(19) United States
(12) Patent Application Publication
(10) Pub. No.: US 2008/0276334 A1
(43) Pub. Date: Nov. 6, 2008

(54) Nucleic acid molecules and other molecules associated with plants

(76) Inventors: Mark S. Abad, Webster Groves, MO (US); Robert E. Buehler, Chesterfield, MO (US); Joseph R. Byrum, West Des Moines, IA (US); Brian E. Coombs, Imperial, MO (US); Gregory R. Heck, Crystal Lake Park, MO (US); Thomas J. La Rosa, Fenton, MO (US); Donald E. Nelson, Chesterfield, MO (US); Hridayabhiranjan Shukla, Ballwin, MO (US); Michael D. Thompson, Ballwin, MO (US)

Correspondence Address: ARNOLD & PORTER LLP, 555 TWELFTH STREET, N.W., ATTN: IP DOCKETING, WASHINGTON, DC, 20004, US

(21) Appl. No.: 11/790,576

(22) Filed: Apr. 26, 2007

Related U.S. Application Data
(63) Continuation of application No. 09/615,606, filed on Jul. 13, 2000, now abandoned.

(51) Int. Cl. A01H 1/00; C12N 15/29; C07K 14/415; A01H 5/00

(52) U.S. Cl. 800/287; 536/23.6; 530/370; 800/298; 800/312; 800/320.1; 800/314; 800/320.3

(57) ABSTRACT

Expressed Sequence Tags (ESTS) isolated from soybean are disclosed. The ESTs provide a unique molecular tool for the targeting and isolation of novel genes for plant protection and improvement. The disclosed ESTs have utility in the development of new strategies for understanding critical plant developmental and metabolic pathways. The disclosed ESTs have particular utility in isolating genes and promoters, identifying and mapping the genes involved in developmental and metabolic pathways, and determining gene function. Sequence homology analyses using the ESTs provided in the present invention, will result in more efficient gene screening for desirable agronomic traits. An expanding database of these select pieces of the plant genomics puzzle will quickly expand the knowledge necessary for subsequent functional validation, a key limitation in current plant biotechnology efforts.

### CROSS-REFERENCE TO RELATED APPLICATIONS

[0001] This application claims priority under 35 U.S.C. §120 to U.S. application Ser. No. 09/615,606, filed Jul. 13, 2000, which application is incorporated herein by reference in its entirety.

### INCORPORATION OF SEQUENCE LISTING

[0002] Two copies of the sequence listing. (Sequence Listing Copy 1 and Sequence Listing Copy 2) and a computer-readable form of the sequence listing, all on CD-Rs, each containing the file named 15444D seqlist.rpt, which is 52,867,096 bytes (measured in MS-DOS) and was created on Apr. 25, 2007, are hereby incorporated by reference.

### FIELD OF THE INVENTION

[0003] The present invention is in the field of plant biochemistry. More specifically the invention relates to nucleic acid molecules that encode proteins and fragments of proteins produced in plant cells, in particular, soybean plants. The invention also relates to proteins and fragments of proteins so encoded and antibodies capable of binding the proteins. The invention also relates to methods of using the nucleic acid molecules, proteins and fragments of proteins.

### BACKGROUND OF THE INVENTION

### I. Expressed Sequence Tag Nucleic Acid Molecules

[0004] Expressed sequence tags, or ESTs, are short sequences of randomly selected clones from a cDNA (or complementary DNA) library which are representative of the cDNA inserts of these randomly selected clones. McCombie et al., Nature Genetics, 1:124-130 (1992); Kurata et al., Nature Genetics, 8: 365-372 (1994); Okubo et al., Nature Genetics, 2: 173-179 (1992), all of which references are incorporated herein in their entirety.

[0005] Using conventional methodologies, cDNA libraries can be constructed from the mRNA (messenger RNA) of a given tissue or organism using poly dT primers and reverse transcriptase (Efstratiadis et al., Cell 7:279-288 (1976), the entirety of which is herein incorporated by reference; Higuchi et al., Proc. Natl. Acad. Sci. (U.S.A) 73:3146-3150 (1976), the entirety of which is herein incorporated by reference; Maniatis et al., Cell 8:163 (1976) the entirety of which is herein incorporated by reference; Land et al., Nucleic Acids Res. 9:2251-2266 (1981), the entirety of which is herein incorporated by reference; Okayama et al., Mol. Cell. Biol. 2:161-170 (1982), the entirety of which is herein incorporated by reference; Gubler et al., Gene 25:263 (1983), the entirety of which is herein incorporated by reference).

[0006] Several methods may be employed to obtain full-length cDNA constructs. For example, terminal transferase can be used to add homopolymeric tails of dC residues to the free 3′ hydroxyl groups (Land et al., Nucleic Acids Res. 9:2251-2266 (1981), the entirety of which is herein incorporated by reference). This tail can then be hybridized by a poly dG oligo which can act as a primer for the synthesis of full-length second strand cDNA. Okayama and Berg report a method for obtaining full-length cDNA constructs. This method has been simplified by using synthetic primer-adapters that have both homopolymeric tails for priming the synthesis of the first and second strands and restriction sites for cloning into plasmids (Coleclough et al., Gene 34:305-314 (1985), the entirety of which is herein incorporated by reference) and bacteriophage vectors (Krawinkel et al., Nucleic Acids Res. 14:1913 (1986), the entirety of which is herein incorporated by reference; and Han et al., Nucleic Acids Res. 15:6304 (1987), the entirety of which is herein incorporated by reference).

[0007] These strategies have been coupled with additional strategies for isolating rare mRNA populations. For example, a typical mammalian cell contains between 10,000 and 30,000 different mRNA sequences. Davidson, Gene Activity in Early Development, 2nd ed., Academic Press, New York (1976). The number of clones required to achieve a given probability that a low-abundance mRNA will be present in a cDNA library is N=(ln(1−P))/(ln(1−1/n)) where N is the number of clones required, P is the probability desired, and 1/n is the fractional proportion of the total mRNA that is represented by a single rare mRNA. (Sambrook et al., Molecular Cloning: A Laboratory Manual, 2nd ed., Cold Spring Harbor Laboratory Press (1989), the entirety of which is herein incorporated by reference.).

[0008] A method to enrich preparations of mRNA for sequences of interest is to fractionate by size. One such method is to fractionate by electrophoresis through an agarose gel (Pennica et al., Nature 301:214-221 (1983), the entirety of which is herein incorporated by reference). Another such method employs sucrose gradient centrifugation in the presence of an agent, such as methylmercuric hydroxide, that denatures secondary structure in RNA (Schweinfest et al., Proc. Natl. Acad. Sci. (U.S.A.) 79:4997-5000 (1982), the entirety of which is herein incorporated by reference).

[0009] A frequently adopted method is to construct equalized or normalized cDNA libraries (Ko, Nucleic Acids Res. 18:5705-5711 (1990), the entirety of which is herein incorporated by reference; Patanjali, S. R. et al., Proc. Natl. Acad. Sci. (U.S.A.) 88:1943-1947 (1991), the entirety of which is herein incorporated by reference). Typically, the cDNA population is normalized by subtractive hybridization. Schmid et al., J. Neurochem. 48:307-312 (1987) the entirety of which is herein incorporated by reference; Fargnoli et al., Anal. Biochem. 187:364-373 (1990) the entirety of which is herein incorporated by reference; Travis et al., Proc. Natl. Acad. Sci (U.S.A.) 85:1696-1700 (1988) the entirety of which is herein incorporated by reference; Kato, Eur. J. Neurosci. 2:704 (1990); and Schweinfest et al., Genet. Anal. Tech. Appl. 7:64 (1990), the entirety of which is herein incorporated by reference). Subtraction represents another method for reducing the population of certain sequences in the cDNA library. Swaroop et al., Nucleic Acids Res. 19:1954 (1991), the entirety of which is herein incorporated by reference).

[0010] ESTs can be sequenced by a number of methods. Two basic methods may be used for DNA sequencing, the chain termination method of Sanger et al., Proc. Natl. Acad. Sci. (U.S.A.) 74: 5463-5467 (1977), the entirety of which is herein incorporated by reference and the chemical degradation method of Maxam and Gilbert, Proc. Nat. Acad. Sci. (U.S.A.) 74: 560-564 (1977), the entirety of which is herein incorporated by reference. Automation and advances in technology such as the replacement of radioisotopes with fluorescence-based sequencing have reduced the effort required to sequence DNA (Craxton, Methods, 2: 20-26 (1991), the entirety of which is herein incorporated by reference; Ju et al., Proc. Natl. Acad. Sci. (U.S.A.) 92: 4347-4351 (1995), the entirety of which is herein incorporated by reference; Tabor and Richardson, Proc. Natl. Acad. Sci. (U.S.A.) 92: 6339-6343 (1995), the entirety of which is herein incorporated by reference). Automated sequencers are available from, for example, Pharmacia Biotech, Inc., Piscataway, N.J. (Pharmacia ALF), LI-COR, Inc., Lincoln, Nebr. (LI-COR 4,000) and Millipore, Bedford, Mass. (Millipore BaseStation).

[0011] In addition, advances in capillary gel electrophoresis have also reduced the effort required to sequence DNA and such advances provide a rapid high resolution approach for sequencing DNA samples (Swerdlow and Gesteland, Nucleic Acids Res. 18:1415-1419 (1990); Smith, Nature 349:812-813 (1991); Luckey et al., Methods Enzymol. 218:154-172 (1993); Lu et al., J. Chromatog. A. 680:497-501 (1994); Carson et al., Anal. Chem. 65:3219-3226 (1993); Huang et al., Anal. Chem. 64:2149-2154 (1992); Kheterpal et al., Electrophoresis 17:1852-1859 (1996); Quesada and Zhang, Electrophoresis 17:1841-1851 (1996); Baba, Yakugaku Zasshi 117:265-281 (1997), all of which are herein incorporated by reference in their entirety).

[0012] ESTs longer than 150 bases have been found to be useful for similarity searches and mapping. (Adams et al., Science 252:1651-1656 (1991), herein incorporated by reference.). EST sequences normally range from 150-450 bases. This is the length of sequence information that is routinely and reliably generated using single run sequence data. Typically, only single run sequence data is obtained from the cDNA library, Adams et al., Science 252:1651-1656 (1991). Automated single run sequencing typically results in an approximately 2-3% error or base ambiguity rate. (Boguski et al., Nature Genetics, 4:332-333 (1993), the entirety of which is herein incorporated by reference).

[0013] EST databases have been constructed or partially constructed from, for example, C. elegans (McCombrie et al., Nature Genetics 1: 124-131 (1992), human liver cell line HepG2 (Okubo et al., Nature Genetics 2:173-179 (1992)), human brain RNA (Adams et al., Science 252:1651-1656 (1991); Adams et al., Nature 355:632-635 (1992)), Arabidopsis, (Newman et al., Plant Physiol. 106:1241-1255 (1994)); and rice (Kurata et al., Nature Genetics 8:365-372 (1994).

### II. Sequence Comparisons

[0014] A characteristic feature of a protein or DNA sequence is that it can be compared with other known protein or DNA sequences. Sequence comparisons can be undertaken by determining the similarity of the test or query sequence with sequences in publicly available or propriety databases (“similarity analysis”) or by searching for certain motifs (“intrinsic sequence analysis”) (e.g. cis elements) (Coulson, Trends in Biotechnology, 12: 76-80 (1994), the entirety of which is herein incorporated by reference; Birren et al., Genome Analysis, 1: 543-559 (1997), the entirety of which is herein incorporated by reference).

[0015] Similarity analysis includes database search and alignment. Examples of public databases include the DNA Database of Japan (DDBJ) (www-ddbj.nig.ac.jp/); Genebank (www-ncbi.nlm.nih.gov/web/Genbank/Index.htlm); and the European Molecular Biology Laboratory Nucleic Acid Sequence Database (EMBL) (www-ebi.ac.uk/ebi_docs/embl_db.html). A number of different search algorithms have been developed, one example of which are the suite of programs referred to as BLAST programs. There are five implementations of BLAST, three designed for nucleotide sequences queries (BLASTN, BLASTX, and TBLASTX) and two designed for protein sequence queries (BLASTP and TBLASTN) (Coulson, Trends in Biotechnology, 12: 76-80 (1994); Birren et al., Genome Analysis, 1: 543-559 (1997)).

[0016] BLASTN takes a nucleotide sequence (the query sequence) and its reverse complement and searches them against a nucleotide sequence database. BLASTN was designed for speed, not maximum sensitivity, and may not find distantly related coding sequences. BLASTX takes a nucleotide sequence, translates it in three forward reading frames and three reverse complement reading frames, and then compares the six translations against a protein sequence database. BLASTX is useful for sensitive analysis of preliminary (single-pass) sequence data and is tolerant of sequencing errors (Gish and States, Nature Genetics, 3: 266-272 (1993), the entirety of which is herein incorporated by reference). BLASTN and BLASTX may be used in concert for analyzing EST data (Coulson, Trends in Biotechnology, 12: 76-80 (1994); Birren et al., Genome Analysis, 1: 543-559 (1997).

[0017] Given a coding nucleotide sequence and the protein it encodes, it is often preferable to use the protein as the query sequence to search a database because of the greatly increased sensitivity to detect more subtle relationships. This is due to the larger alphabet of proteins (20 amino acids) compared with the alphabet of nucleic acid sequences (4 bases), where it is far easier to obtain a match by chance. In addition, with nucleotide alignments, only a match (positive score) or a mismatch (negative score) is obtained, but with proteins, the presence of conservative amino acid substitutions can be taken into account. Here, a mismatch may yield a positive score if the non-identical residue has physical/chemical properties similar to the one it replaced. Various scoring matrices are used to supply the substitution scores of all possible amino acid pairs. A general purpose scoring system is the BLOSUM62 matrix (Henikoff and Henikoff, Proteins, 17: 49-61 (1993), the entirety of which is herein incorporated by reference), which is currently the default choice for BLAST programs. BLOSUM62 is tailored for alignments of moderately diverged sequences and thus may not yield the best results under all conditions. Altschul, J. Mol. Biol. 36: 290-300 (1993), the entirety of which is herein incorporated by reference, uses a combination of three matrices to cover all contingencies. This may improve sensitivity, but at the expense of slower searches. In practice, a single BLOSUM62 matrix is often used but others (PAM40 and PAM250) may be attempted when additional analysis is necessary. Low PAM matrices are directed at detecting very strong but localized sequence similarities, whereas high PAM matrices are directed at detecting long but weak alignments between very distantly related sequences.

[0018] Homologues in other organisms are available that can be used for comparative sequence analysis. Multiple alignments are performed to study similarities and differences in a group of related sequences. CLUSTAL W is a multiple sequence alignment package available that performs progressive multiple sequence alignments based on the method of Feng and Doolittle, J. Mol. Evol. 25: 351-360 (1987), the entirety of which is herein incorporated by reference. Each pair of sequences is aligned and the distance between each pair is calculated; from this distance matrix, a guide tree is calculated, and all of the sequences are progressively aligned based on this tree. A feature of the program is its sensitivity to the effect of gaps on the alignment; gap penalties are varied to encourage the insertion of gaps in probable loop regions instead of in the middle of structured regions. Users can specify gap penalties, choose between a number of scoring matrices, or supply their own scoring matrix for both the pairwise alignments and the multiple alignments. CLUSTAL W for UNIX and VMS systems is available at: ftp.ebi.ac.uk. Another program is MACAW (Schuler et al., Proteins, Struct. Func. Genet, 9:180-190 (1991), the entirety of which is herein incorporated by reference, for which both Macintosh and Microsoft Windows versions are available. MACAW uses a graphical interface, provides a choice of several alignment algorithms, and is available by anonymous ftp at: ncbi.nlm.nih.gov (directory/pub/macaw).

[0019] Sequence motifs are derived from multiple alignments and can be used to examine individual sequences or an entire database for subtle patterns. With motifs, it is sometimes possible to detect distant relationships that may not be demonstrable based on comparisons of primary sequences alone. Currently, the largest collection of sequence motifs in the world is PROSITE (Bairoch and Bucher, Nucleic Acid Research, 22: 3583-3589 (1994), the entirety of which is herein incorporated by reference.) PROSITE may be accessed via either the ExPASy server on the World Wide Web or anonymous ftp site. Many commercial sequence analysis packages also provide search programs that use PROSITE data.

[0020] A resource for searching protein motifs is the BLOCKS E-mail server developed by S. Henikoff, Trends Biochem Sci., 18:267-268 (1993), the entirety of which is herein incorporated by reference; Henikoff and Henikoff, Nucleic Acid Research, 19:6565-6572 (1991), the entirety of which is herein incorporated by reference; Henikoff and Henikoff, Proteins, 17: 49-61 (1993). BLOCKS searches a protein or nucleotide sequence against a database of protein motifs or “blocks.” Blocks are defined as short, ungapped multiple alignments that represent highly conserved protein patterns. The blocks themselves are derived from entries in PROSITE as well as other sources. Either a protein or nucleotide query can be submitted to the BLOCKS server; if a nucleotide sequence is submitted, the sequence is translated in all six reading frames and motifs are sought in these conceptual translations. Once the search is completed, the server will return a ranked list of significant matches, along with an alignment of the query sequence to the matched BLOCKS entries.

[0021] Conserved protein domains can be represented by two-dimensional matrices, which measure either the frequency or probability of the occurrences of each amino acid residue and deletions or insertions in each position of the domain. This type of model, when used to search against protein databases, is sensitive and usually yields more accurate results than simple motif searches. Two popular implementations of this approach are profile searches (such as GCG program ProfileSearch) and Hidden Markov Models (HMMs) (Krough et al., J. Mol. Biol. 235:1501-1531 (1994); Eddy, Current Opinion in Structural Biology 6:361-365 (1996), both of which are herein incorporated by reference in their entirety). In both cases, a large number of common protein domains have been converted into profiles, as present in the PROSITE library, or HHM models, as in the Pfam protein domain library (Sonnhammer et al., Proteins 28:405-420 (1997), the entirety of which is herein incorporated by reference). Pfam contains more than 500 HMM models for enzymes, transcription factors, signal transduction molecules, and structural proteins. Protein databases can be queried with these profiles or HMM models, which will identify proteins containing the domain of interest. For example, HMMSW or HMMFS, two programs in a public domain package called HMMER (Sonnhammer et al., Proteins 28:405-420 (1997)) can be used.

[0022] PROSITE and BLOCKS represent collected families of protein motifs. Thus, searching these databases entails submitting a single sequence to determine whether or not that sequence is similar to the members of an established family. Programs working in the opposite direction compare a collection of sequences with individual entries in the protein databases. An example of such a program is the Motif Search Tool, or MoST (Tatusov et al. Proc. Natl. Acad. Sci. 91: 12091-12095 (1994), the entirety of which is herein incorporated by reference.) On the basis of an aligned set of input sequences, a weight matrix is calculated by using one of four methods (selected by the user); a weight matrix is simply a representation, position by position in an alignment, of how likely a particular amino acid will appear. The calculated weight matrix is then used to search the databases. To increase sensitivity, newly found sequences are added to the original data set, the weight matrix is recalculated, and the search is performed again. This procedure continues until no new sequences are found.

### SUMMARY OF THE INVENTION

[0023] The present invention provides a substantially purified nucleic acid molecule that encodes a soybean protein or fragment thereof comprising a nucleic acid sequence selected from the group consisting of SEQ ID NO: 1 through SE9 ID NO: 91663.

[0024] The present invention also provides one or more substantially purified nucleic acid molecules comprising a nucleic acid sequence selected from the group consisting of SEQ ID NO: 1 through SEQ ID NO: 91663 or complements thereof.

[0025] The present invention also provides a substantially purified soybean protein or fragment thereof, wherein said soybean protein is encoded by a nucleic acid molecule that comprises a nucleic acid sequence selected from the group consisting of SEQ ID NO: 1 through SEQ ID NO: 91663.

[0026] The present invention further provides a substantially purified protein, peptide, or fragment thereof encoded by a nucleic acid sequence which specifically hybridizes to a nucleic acid molecule comprising a nucleic acid sequence selected from the group consisting of a complement of SEQ ID NO: 1 through SEQ ID NO: 91663.

[0027] The present invention further provides a substantially purified antibody capable of specifically binding to a protein or fragment thereof encoded by a nucleic acid sequence which specifically hybridizes to a nucleic acid molecule having a nucleic acid sequence selected from the group consisting of a complement of SEQ ID NO:1 through SEQ ID NO: 91663.

[0028] The present invention also provides a transformed plant transformed to contain a nucleic acid molecule which comprises: (A) an exogenous promoter region which functions in plant cells to cause the production of an mRNA molecule; which is linked to (B) a structural nucleic acid molecule, wherein said structural nucleic acid molecule comprises a nucleic acid molecule that encodes a protein, peptide, or fragment thereof which hybridizes to a nucleic acid sequence selected from the group consisting of a complement of SEQ ID NO:1 through SEQ ID NO: 91663 expressed in an effective amount to produce a desirable agronomic effect; which is linked to (C) a 3′ non-translated sequence that functions in plant cells to cause the termination of transcription and the addition of polyadenylated ribonucleotides to the 3′ end of the mRNA sequence.

[0029] The present invention also provides a transformed plant cell containing a nucleic acid molecule whose non-transcribed strand encodes a protein or fragment thereof, wherein the transcribed strand of said nucleic acid is complementary to a nucleic acid molecule that encodes a protein or fragment thereof. The present invention also provides bacterial, viral, microbial, and plant cells comprising a nucleic acid molecule of the present invention

[0030] The present invention also provides a method of producing a plant containing one or more proteins encoded by sequences comprising SEQ ID NO:1 or complement thereof through SEQ ID NO: 91663 or complements thereof, expressed in a sufficient amount and/or fashion to produce a desirable agronomic effect.

[0031] In accomplishing the foregoing, there is provided, in accordance with one aspect of the present invention, methods of producing genetically transformed plants, comprising the steps of:
[0032] (a) inserting into the genome of a plant cell a recombinant, double-stranded DNA molecule comprising
   [0033] (i) a promoter which functions in plant cells to cause the production of an RNA sequence,
   [0034] (ii) a structural DNA sequence that causes the production of an RNA sequence which encodes a desired protein.
   [0035] (iii) a 3′ non-translated DNA sequence which functions in plant cells to cause the addition of polyadenylated nucleotides to the 3′ end of RNA sequence; where the promoter is homologous or heterologous with respect to the coding sequence and adapted to cause sufficient expression of a protein in desired plant tissues to enhance the agronomic utility of a plant transformed with said gene.
[0036] (b) obtaining a transformed plant cell with said nucleic acid molecule that encodes one or more proteins, wherein said nucleic acid molecule is transcribed and results in expression of said protein(s); and
[0037] (c) regenerating from the transformed plant cell a genetically transformed plant

[0038] The present invention also encompasses differentiated plants, seeds, and progeny comprising said transformed plant cells and which exhibit novel properties of agronomic significance.

[0039] The present invention also provides a method of producing a plant containing reduced levels of a protein comprising: (A) transforming a plant cell with a nucleic acid molecule that encodes a protein, wherein said nucleic acid molecule is transcribed and results in co-suppression of endogenous protein synthesis activity, and (B) regenerating plants and producing subsequent progeny from the transformed plant.

[0040] The present invention also provides a method of determining an association between a polymorphism and a plant trait comprising: (A) hybridizing a nucleic acid molecule specific for a polymorphism to genetic material of a plant, wherein said nucleic acid molecule comprising a nucleic acid sequence selected from the group consisting of SEQ ID NO: 1 through SEQ ID NO: 91663 or complements thereof; and (B) calculating the degree of association between the polymorphism and the plant trait.

[0041] The present invention also provides a method of isolating a genetic region, or nucleic acid that encodes a protein or fragment thereof comprising: (A) incubating under conditions permitting nucleic acid hybridization: a marker nucleic acid molecule, preferably an EST, with a complementary nucleic acid molecule obtained from a plant cell or plant tissue; (B) permitting hybridization between said marker nucleic acid molecule, preferably an EST, and said complementary nucleic acid molecule obtained from said plant cell or plant tissue; and (C) isolating said complementary nucleic acid molecule.

[0042] The present invention also provides a method for determining a level or pattern in a plant cell of a protein in a plant comprising: (A) incubating, under conditions permitting nucleic acid hybridization, a marker nucleic acid molecule, the marker nucleic acid molecule selected from the group of marker nucleic acid molecules which specifically hybridize to a nucleic acid molecule having the nucleic acid sequence selected from the group consisting of SEQ ID NO: 1 through SEQ ID NO: 91663 or complements thereof or fragments of either, with a complementary nucleic acid molecule obtained from the plant cell or plant tissue, wherein nucleic acid hybridization between the marker nucleic acid molecule and the complementary nucleic acid molecule obtained from the plant cell or plant tissue permits the detection of an mRNA for the enzyme; (B) permitting hybridization between the marker nucleic acid molecule and the complementary nucleic acid molecule obtained from the plant cell or plant tissue; and (C) detecting the level or pattern of the complementary nucleic acid, wherein the detection of the complementary nucleic acid is predictive of the level or pattern of the protein.

[0043] The present invention also provides a method for determining the level or pattern of a protein in a plant cell or plant tissue comprising: (A) incubating under conditions permitting nucleic acid hybridization: a marker nucleic acid molecule, the marker nucleic acid molecule comprising a nucleotide sequence selected from the group consisting of SEQ ID NO: 1 through SEQ ID NO: 91663 or complements thereof, with a complementary nucleic acid molecule obtained from a plant cell or plant tissue, wherein nucleic acid hybridization between the marker nucleic acid molecule, and the complementary nucleic acid molecule obtained from the plant cell or plant tissue permits the detection of said protein; (B) permitting hybridization between the marker nucleic acid molecule and the complementary nucleic acid molecule obtained from the plant cell or plant tissue; and (C) detecting the level or pattern of the complementary nucleic acid, wherein the detection of said complementary nucleic acid is predictive of the level or pattern of the protein synthesis.

[0044] The present invention also provides a method for determining a level or pattern of a protein in a plant cell or plant tissue which comprises assaying the concentration of a molecule, whose concentration is dependent upon the expression of a gene, the gene having a nucleic acid sequence which specifically hybridizes to a protein marker nucleic acid molecule, the molecule being present in a plant cell or plant tissue, in comparison to the concentration of that molecule present in a plant cell or plant tissue with a known level or pattern of said protein, wherein an assayed concentration of the molecule is compared to the assayed concentration of the molecule in a plant cell or plant tissue with a known level or pattern of said protein.

[0045] The present invention also provides a method of determining a mutation in a plant whose presence is predictive of a mutation affecting a level or pattern of a protein comprising the steps: (A) incubating, under conditions permitting nucleic acid hybridization, a marker nucleic acid, the marker nucleic acid selected from the group of marker nucleic acid molecules which specifically hybridize to a nucleic acid molecule consisting of the nucleic acid sequence selected from the group consisting of SEQ ID NO: 1 through SEQ ID NO: 91663 or complements thereof or fragments of either and a complementary nucleic acid molecule obtained from the plant, wherein nucleic acid hybridization between the marker nucleic acid molecule and the complementary nucleic acid molecule obtained from the plant permits the detection of a polymorphism whose presence is predictive of a mutation affecting the level or pattern of the protein in the plant; (B) permitting hybridization between the marker nucleic acid molecule and the complementary nucleic acid molecule obtained from the plant; and (C) detecting the presence of the polymorphism, wherein the detection of the polymorphism is predictive of the mutation.

[0046] The present invention also provides a method for determining a mutation in a plant whose presence is predictive of a mutation affecting the level or pattern of protein synthesis comprising the steps: (A) incubating under conditions permitting nucleic acid hybridization: a marker nucleic acid molecule, the marker nucleic acid molecule comprising a nucleic acid molecule that is linked to gene, the gene having a nucleic acid sequence which specifically hybridizes to a sequence selected from the group consisting of SEQ ID NO: 1 through SEQ ID NO: 91663 and complements thereof, and a complementary nucleic acid molecule obtained from a plant tissue or plant cell of the plant, wherein nucleic acid hybridization between the marker nucleic acid molecule and the complementary nucleic acid molecule obtained from the plant permits the detection of a polymorphism whose presence is predictive of a mutation affecting said level or pattern of a protein synthesis in the plant; (B) permitting hybridization between said marker nucleic acid molecule and said complementary nucleic acid molecule obtained from said plant; and; (C) detecting the presence of the polymorphism, wherein the detection of the polymorphism is predictive of the mutation.

[0047] The present invention also provides a method for reducing expression of a protein in a plant cell, the method comprising: growing a transformed plant cell containing a nucleic acid molecule whose non-transcribed strand encodes a protein or fragment thereof, wherein the transcribed strand of said nucleic acid is complementary to a nucleic acid molecule that encodes the protein in said plant cell, and whereby the strand that is complementary to the nucleic acid molecule that encodes the protein reduces or depresses expression of the protein.

[0048] The present invention provides soybean nucleic acid molecules for use as molecular tags to isolate genetic regions (i.e. promoters and flanking sequences), isolate genes, map genes, and determine gene function. The present invention further provides soybean nucleic acid molecules for use in determining if genes are members of a particular gene family.

[0049] The present invention also provides a method of obtaining full-length genes using soybean ESTs or complements thereof or fragments of either.

[0050] The present invention also provides a method of isolating promoters and flanking sequences using soybean ESTs or complements thereof or fragments of either.

[0051] The present invention also provides soybean ESTs or complements thereof or fragments of either for use in marker-assisted breeding programs.

[0052] The present invention also provides a method of identifying tissues comprising hybridizing nucleic acids from the tissue with soybean ESTs or complements thereof or fragments of either.

[0053] The present invention also provides a method for production of antibodies targeted against the proteins, peptides, or fragments produced by the disclosed or complements thereof or fragments of either.

[0054] The present invention also provides a method for the transformation and regeneration of plants comprising sequences hybridizable to the disclosed ESTs or complements thereof or fragments of either.

[0055] The present invention also provides a method of modifying plant protein expression by inserting in a chimeric gene sense or antisense constructs of the soybean ESTs.

### DETAILED DESCRIPTION OF THE INVENTION

### Agents

[0056] (a) Nucleic Acid Molecules

[0057] Agents of the present invention include nucleic acid molecules and more specifically EST nucleic acid molecules or nucleic acid fragment molecules thereof. Fragment EST nucleic acid molecules may encode significant portion(s) of, or indeed most of, the EST nucleic acid molecule. Alternatively, the fragments may comprise smaller oligonucleotides (having from about 15 to about 250 nucleotide residues, and more preferably, about 15 to about 30 nucleotide residues). A subset of the nucleic acid molecules of the present invention includes nucleic acid molecules that are marker molecules. Another subset of the nucleic acid molecules of the present invention include nucleic acid molecules that encode a protein or fragment thereof. Another subset of the nucleic acid molecules of the present invention are EST molecules.

[0058] The term “substantially purified”, as used herein, refers to a molecule separated from substantially all other molecules normally associated with it in its native state. More preferably a substantially purified molecule is the predominant species present in a preparation. A substantially purified molecule may be greater than 60% free, preferably 75% free, more preferably 90% free, and most preferably 95% free from the other molecules (exclusive of solvent) present in the natural mixture. The term “substantially purified” is not intended to encompass molecules present in their native state.

[0059] The agents of the present invention will preferably be “biologically active” with respect to either a structural attribute, such as the capacity of a nucleic acid to hybridize to another nucleic acid molecule, or the ability of a protein to be bound by antibody (or to compete with another molecule for such binding). Alternatively, such an attribute may be catalytic, and thus involve the capacity of the agent to mediate a chemical reaction or response.

[0060] The agents of the present invention may also be recombinant. As used herein, the term recombinant means any agent (e.g. DNA, peptide etc.), that is, or results, however indirect, from human manipulation of a nucleic acid molecule.

[0061] It is understood that the agents of the present invention may be labeled with reagents that facilitate detection of the agent (e.g. fluorescent labels (Prober et al., Science 238:336-340 (1987); Albarella et al., EP 144914, chemical labels (Sheldon et al., U.S. Pat. No. 4,582,789; Albarella et al., U.S. Pat. No. 4,563,417, modified bases (Miyoshi et al., EP 119448, all of which are hereby incorporated by reference in their entirety).

[0062] It is further understood, that the present invention provides bacterial, viral, microbial, and plant cells comprising the agents of the present invention.

[0063] Nucleic acid molecules or fragment thereof of the present invention are capable of specifically hybridizing to other nucleic acid molecules under certain circumstances. As used herein, two nucleic acid molecules are said to be capable of specifically hybridizing to one another if the two molecules are capable of forming an anti-parallel, double-stranded nucleic acid structure. A nucleic acid molecule is said to be the “complement” of another nucleic acid molecule if they exhibit complete complementarity. As used herein, molecules are said to exhibit “complete complementarity” when every nucleotide of one of the molecules is complementary to a nucleotide of the other. Two molecules are said to be “minimally complementary” if they can hybridize to one another with sufficient stability to permit them to remain annealed to one another under at least conventional “low-stringency” conditions. Similarly, the molecules are said to be “complementary” if they can hybridize to one another with sufficient stability to permit them to remain annealed to one another under conventional “high-stringency” conditions. Conventional stringency conditions are described by Sambrook et al., In: Molecular Cloning, A Laboratory Manual, 2nd Edition, Cold Spring Harbor Press, Cold Spring Harbor, N.Y. (1989), and by Haymes et al. In: Nucleic Acid Hybridization, A Practical Approach, IRL Press, Washington, D.C. (1985), the entirety of which is herein incorporated by reference. Departures from complete complementarity are therefore permissible, as long as such departures do not completely preclude the capacity of the molecules to form a double-stranded structure. Thus, in order for an nucleic acid molecule or fragment of the present invention to serve as a primer or probe it need only be sufficiently complementary in sequence to be able to form a stable double-stranded structure under the particular solvent and salt concentrations employed.

[0064] Appropriate stringency conditions which promote DNA hybridization are, for example, 6.0× sodium chloride/sodium citrate (SSC) at about 45° C., followed by a wash of 2.0×SSC at 50° C., are known to those skilled in the art or can be found in Current Protocols in Molecular Biology, John Wiley & Sons, N.Y. (1989), 6.3.1-6.3.6. For example, the salt concentration in the wash step can be selected from a low stringency of about 2.0×SSC at 50° C. to a high stringency of about 0.2×SSC at 50° C. In addition, the temperature in the wash step can be increased from low stringency conditions at room temperature, about 22° C., to high stringency conditions at about 65° C. Both temperature and salt may be varied, or either the temperature or the salt concentration may be held constant while the other variable is changed.

[0065] In a preferred embodiment, a nucleic acid of the present invention will specifically hybridize to one or more of the nucleic acid molecules set forth in SEQ ID NO: 1 through SEQ ID NO: 91663 or complements thereof under moderately stringent conditions, for example, at about 2.0×SSC and about 65° C.

[0066] In a particularly preferred embodiment, a nucleic acid of the present invention will include those nucleic acid molecules that specifically hybridize to one or more of the nucleic acid molecules set forth in SEQ ID NO:1 through SEQ ID NO: 91663 or complements thereof under high stringency conditions.

[0067] In one aspect of the present invention, the nucleic acid molecules of the present invention have one or more of the nucleic acid sequences set forth in SEQ ID NO: 1 through SEQ ID NO: 91663 or complements thereof. In another aspect of the present invention, one or more of the nucleic acid molecules of the present invention share between 100% and 90% sequence identity with one or more of the nucleic acid sequences set forth in SEQ ID NO: 1 through SEQ ID NO: 91663 or complements thereof. In a further aspect of the present invention, one or more of the nucleic acid molecules of the present invention share between 100% and 95% sequence identity with one or more of the nucleic acid sequences set forth in SEQ ID NO: 1 through SEQ ID NO: 91663 or complements thereof. In a more preferred aspect of the present invention, one or more of the nucleic acid molecules of the present invention share between 100% and 98% sequence identity with one or more of the nucleic acid sequences set forth in SEQ ID NO: 1 through SEQ ID NO: 91663 or complements thereof. In an even more preferred aspect of the present invention, one or more of the nucleic acid molecules of the present invention share between 100% and 99% sequence identity with one or more of the sequences set forth in SEQ ID NO: 1 through SEQ ID NO: 91663 or complements thereof. In a further, even more preferred aspect of the present invention, one or more of the nucleic acid molecules of the present invention exhibit 100% sequence identity with one or more nucleic acid molecules present within the cDNA libraries SOYMON007, SOYMON015, SOYMON020, SOYMON022, LIB3027, LIB3028, LIB3029, LIB3030, LIB3039, LIB3040, LIB3049, LIB3050, LIB3051, LIB3052, LIB3053, LIB3054, LIB3055, LIB3056, LIB3065, LIB3093, LIB3107, and LIB3109. (Monsanto Company, St. Louis, Mo., United States of America).

[0068] In a preferred embodiment of the present invention, a soybean protein or fragment thereof of the present invention is a homologue of another plant protein. In another preferred embodiment of the present invention, a soybean protein or fragment thereof of the present invention is a homologue of a fungal protein. In another preferred embodiment of the present invention, a soybean protein or fragment thereof of the present invention is a homologue of mammalian protein. In another preferred embodiment of the present invention, a soybean protein or fragment thereof of the present invention is a homologue of a bacterial protein. In another preferred embodiment of the present invention, a soybean protein or fragment thereof of the present invention is a homologue of a maize protein.

[0069] In a preferred embodiment of the present invention, the nucleic molecule of the present invention encodes a soybean protein or fragment thereof where a soybean protein or fragment thereof exhibits a BLAST probability score of greater than 1E-12, preferably a BLAST probability score of between about 1E-30 and about 1E-12, even more preferably a BLAST probability score of greater than 1E-30 with its homologue.

[0070] In another preferred embodiment of the present invention, the nucleic acid molecule encoding a soybean protein or fragment thereof exhibits a % identity with its homologue of between about 25% and about 40%, more preferably of between about 40 and about 70%, even more preferably of between about 70% and about 90% and even more preferably between about 90% and 99%. In another preferred embodiment, of the present invention, a soybean protein or fragment thereof exhibits a % identity with its homologue of 100%.

[0071] In a preferred embodiment of the present invention, the nucleic molecule of the present invention encodes a soybean protein or fragment thereof where the soybean protein exhibits a BLAST score of greater than 120, preferably a BLAST score of between about 1450 and about 120, even more preferably a BLAST score of greater than 1450 with its homologue.

[0072] Nucleic acid molecules of the present invention also include non-soybean homologues. Preferred non-homologues are selected from the group consisting of alfalfa, Arabidopsis, barley, Brassica, broccoli, cabbage, citrus, cotton, garlic, oat, oilseed rape, onion, canola, flax, an ornamental plant, maize, pea, peanut, pepper, potato, rice, rye, sorghum, strawberry, sugarcane, sugarbeet, tomato, wheat, poplar, pine, fir, eucalyptus, apple, lettuce, lentils, grape, banana, tea, turf grasses, sunflower, oil palm and Phaseolus.

[0073] The degeneracy of the genetic code, which allows different nucleic acid sequences to code for the same protein or peptide, is known in the literature. (U.S. Pat. No. 4,757,006, the entirety of which is herein incorporated by reference).

[0074] In an aspect of the present invention, one or more of the nucleic acid molecules of the present invention differ in nucleic acid sequence from those encoding a soybean protein or fragment thereof in SEQ ID NO: 1 through SEQ ID NO: 91663 due to the degeneracy in the genetic code in that they encode the same protein but differ in nucleic acid sequence.

[0075] In another further aspect of the present invention, one or more of the nucleic acid molecules of the present invention differ in nucleic acid sequence from those encoding a soybean protein or fragment thereof in SEQ ID NO: 1 through SEQ ID NO: 91663 due to fact that the different nucleic acid sequences encode a protein having one or more conservative amino acid residues. It is understood that codons capable of coding for such conservative substitutions are known in the art.

[0076] It is well known in the art that one or more amino acids in a native sequence can be substituted with another amino acid(s), the charge and polarity of which are similar to that of the native amino acid, i.e., a conservative amino acid substitution, resulting in a silent change. Conserved substitutes for an amino acid within the native polypeptide sequence can be selected from other members of the class to which the naturally occurring amino acid belongs. Amino acids can be divided into the following four groups: (1) acidic amino acids, (2) basic amino acids, (3) neutral polar amino acids, and (4) neutral nonpolar amino acids. Representative amino acids within these various groups include, but are not limited to, (1) acidic (negatively charged) amino acids such as aspartic acid and glutamic acid; (2) basic (positively charged) amino acids such as arginine, histidine, and lysine; (3) neutral polar amino acids such as glycine, serine, threonine, cysteine, cystine, tyrosine, asparagine, and glutamine; and (4) neutral nonpolar (hydrophobic) amino acids such as alanine, leucine, isoleucine, valine, proline, phenylalanine, tryptophan, and methionine.

[0077] Conservative amino acid changes within the native polypeptides sequence can be made by substituting one amino acid within one of these groups with another amino acid within the same group. Biologically functional equivalents of the proteins or fragments thereof of the present invention can have 10 or fewer conservative amino acid changes, more preferably seven or fewer conservative amino acid changes, and most preferably five or fewer conservative amino acid changes. The encoding nucleotide sequence will thus have corresponding base substitutions, permitting it to encode biologically functional equivalent forms of the proteins or fragments of the present invention.

[0078] It is understood that certain amino acids may be substituted for other amino acids in a protein structure without appreciable loss of interactive binding capacity with structures such as, for example, antigen-binding regions of antibodies or binding sites on substrate molecules. Because it is the interactive capacity and nature of a protein that defines that protein's biological functional activity, certain amino acid sequence substitutions can be made in a protein sequence and, of course, its underlying DNA coding sequence and, nevertheless, obtain a protein with like properties. It is thus contemplated by the inventors that various changes may be made in the peptide sequences of the proteins or fragments of the present invention, or corresponding DNA sequences that encode said peptides, without appreciable loss of their biological utility or activity. It is understood that codons capable of coding for such amino acid changes are known in the art.

[0079] In making such changes, the hydropathic index of amino acids may be considered. The importance of the hydropathic amino acid index in conferring interactive biological function on a protein is generally understood in the art (Kyte and Doolittle, J. Mol. Biol. 157, 105-132 (1982), herein incorporated by reference in its entirety). It is accepted that the relative hydropathic character of the amino acid contributes to the secondary structure of the resultant protein, which in turn defines the interaction of the protein with other molecules, for example, enzymes, substrates, receptors, DNA, antibodies, antigens, and the like.

[0080] Each amino acid has been assigned a hydropathic index on the basis of its hydrophobicity and charge characteristics (Kyte and Doolittle, 1982); these are isoleucine (+4.5), valine (+4.2), leucine (+3.8), phenylalanine (+2.8), cysteine/cystine (+2.5), methionine (+1.9), alanine (+1.8), glycine (−0.4), threonine (−0.7), serine (−0.8), tryptophan (−0.9), tyrosine (−1.3), proline (−1.6), histidine (−3.2), glutamate (−3.5), glutamine (−3.5), aspartate (−3.5), asparagine (−3.5), lysine (−3.9), and arginine (−4.5).

[0081] In making such changes, the substitution of amino acids whose hydropathic indices are within ±2 is preferred, those which are within ±1 are particularly preferred, and those within ±0.5 are even more particularly preferred.

[0082] It is also understood in the art that the substitution of like amino acids can be made effectively on the basis of hydrophilicity. U.S. Pat. No. 4,554,101, incorporated herein by reference in its entirety, states that the greatest local average hydrophilicity of a protein, as govern by the hydrophilicity of its adjacent amino acids, correlates with a biological property of the protein.

[0083] As detailed in U.S. Pat. No. 4,554,101, the following hydrophilicity values have been assigned to amino acid residues: arginine (+3.0), lysine (+3.0), aspartate (+3.0±1), glutamate (+3.0±1), serine (+0.3), asparagine (+0.2), glutamine (+0.2), glycine (0), threonine (−0.4), proline (−0.5±1), alanine (−0.5), histidine (−0.5), cysteine (−1.0), methionine (−1.3), valine (−1.5), leucine (−1.8), isoleucine (−1.8), tyrosine (−2.3), phenylalanine (−2.5), and tryptophan (−3.4).

[0084] In making such changes, the substitution of amino acids whose hydrophilicity values are within ±2 is preferred, those which are within ±1 are particularly preferred, and those within ±0.5 are even more particularly preferred.

[0085] In a further aspect of the present invention, one or more of the nucleic acid molecules of the present invention differ in nucleic acid sequence from those encoding a soybean protein or fragment thereof set forth in SEQ ID NO: 1 through SEQ ID NO: 91663 or fragment thereof due to the fact that one or more codons encoding an amino acid has been substituted for a codon that encodes a nonessential substitution of the amino acid originally encoded.

[0086] One aspect of the present invention concerns markers that include nucleic acid molecules SEQ ID NO: 1 through SEQ ID NO: 91663 or complements thereof or fragments of either that can act as markers or other nucleic acid molecules of the present invention that can act as markers. Genetic markers of the present invention include “dominant” or “codominant” markers “Codominant markers” reveal the presence of two or more alleles (two per diploid individual) at a locus. “Dominant markers” reveal the presence of only a single allele per locus. The presence of the dominant marker phenotype (e.g., a band of DNA) is an indication that one allele is present in either the homozygous or heterozygous condition. The absence of the dominant marker phenotype (e.g. absence of a DNA band) is merely evidence that “some other” undefined allele is present. In the case of populations where individuals are predominantly homozygous and loci are predominately dimorphic, dominant and codominant markers can be equally valuable. As populations become more heterozygous and multi-allelic, codominant markers often become more informative of the genotype than dominant markers. Marker molecules can be, for example, capable of detecting polymorphisms such as single nucleotide polymorphisms (SNPs).

[0087] SNPs are single base changes in genomic DNA sequence. They occur at greater frequency and are spaced with a greater uniformity throughout a genome than other reported forms of polymorphism. The greater frequency and uniformity of SNPs means that there is greater probability that such a polymorphism will be found near or in a genetic locus of interest than would be the case for other polymorphisms. SNPs are located in protein-coding regions and noncoding regions of a genome. Some of these SNPs may result in defective or variant protein expression (e.g., as a results of mutations or defective splicing). Analysis (genotyping) of characterized SNPs can require only a plus/minus assay rather than a lengthy measurement, permitting easier automation.

[0088] SNPs can be characterized using any of a variety of methods. Such methods include the direct or indirect sequencing of the site, the use of restriction enzymes (Botstein et al., Am. J. Hum. Genet. 32:314-331 (1980), the entirety of which is herein incorporated reference; Konieczny and Ausubel, Plant J. 4:403-410 (1993), the entirety of which is herein incorporated by reference), enzymatic and chemical mismatch assays (Myers et al., Nature 313:495-498 (1985), the entirety of which is herein incorporated by reference), allele-specific PCR (Newton et al., Nucl. Acids Res. 17:2503-2516 (1989), the entirety of which is herein incorporated by reference; Wu et al., Proc. Natl. Acad. Sci. (U.S.A.) 86:2757-2760 (1989), the entirety of which is herein incorporated by reference), ligase chain reaction (Barany, Proc. Natl. Acad. Sci. (U.S.A.) 88:189-193 (1991), the entirety of which is herein incorporated by reference), single-strand conformation polymorphism analysis (Labrune et al., Am. J. Hum. Genet. 48: 1115-1120 (1991), the entirety of which is herein incorporated by reference), primer-directed nucleotide incorporation assays (Kuppuswami et al., Proc. Natl. Acad. Sci. USA 88:1143-1147 (1991), the entirety of which is herein incorporated by reference), dideoxy fingerprinting (Sarkar et al., Genomics 13:441-443 (1992), the entirety of which is herein incorporated by reference), solid-phase ELISA-based oligonucleotide ligation assays (Nikiforov et al., Nucl. Acids Res. 22:4167-4175 (1994), the entirety of which is herein incorporated by reference), oligonucleotide fluorescence-quenching assays (Livak et al., PCR Methods Appl. 4:357-362 (1995), the entirety of which is herein incorporated by reference), 5′-nuclease allele-specific hybridization TaqMan assay (Livak et al., Nature Genet. 9:341-342 (1995), the entirety of which is herein incorporated by reference), template-directed dye-terminator incorporation (TDI) assay (Chen and Kwok, Nucl. Acids Res. 25:347-353 (1997), the entirety of which is herein incorporated by reference), allele-specific molecular beacon assay (Tyagi et al., Nature Biotech. 16: 49-53 (1998), the entirety of which is herein incorporated by reference), PinPoint assay (Haff and Smimov, Genome Res. 7: 378-388 (1997), the entirety of which is herein incorporated by reference) and dCAPS analysis (Neff et al., Plant J. 14:387-392 (1998), the entirety of which is herein incorporated by reference).

[0089] Additional markers, such as AFLP markers, RFLP markers and RAPD markers, can be utilized (Walton, Seed World 22-29 (July, 1993), the entirety of which is herein incorporated by reference; Burow and Blake, Molecular Dissection of Complex Traits, 13-29, Paterson (ed.), CRC Press, New York (1988), the entirety of which is herein incorporated by reference). DNA markers can be developed from nucleic acid molecules using restriction endonucleases, the PCR and/or DNA sequence information. RFLP markers result from single base changes or insertions/deletions. These codominant markers are highly abundant in plant genomes, have a medium level of polymorphism and are developed by a combination of restriction endonuclease digestion and Southern blotting hybridization. CAPS are similarly developed from restriction nuclease digestion but only of specific PCR products. These markers are also codominant, have a medium level of polymorphism and are highly abundant in the genome. The CAPS result from single base changes and insertions/deletions.

[0090] Another marker type, RAPDs, are developed from DNA amplification with random primers and result from single base changes and insertions/deletions in plant genomes. They are dominant markers with a medium level of polymorphisms and are highly abundant. AFLP markers require using the PCR on a subset of restriction fragments from extended adapter primers. These markers are both dominant and codominant are highly abundant in genomes and exhibit a medium level of polymorphism.

[0091] SSRs require DNA sequence information. These codominant markers result from repeat length changes, are highly polymorphic and do not exhibit as high a degree of abundance in the genome as CAPS, AFLPs and RAPDs, SNPs also require DNA sequence information. These codominant markers result from single base substitutions. They are highly abundant and exhibit a medium of polymorphism (Rafalski et al., In: Nonmammalian Genomic Analysis, Birren and Lai (ed.), Academic Press, San Diego, Calif., pp. 75-134 (1996), the entirety of which is herein incorporated by reference). It is understood that a nucleic acid molecule of the present invention may be used as a marker.

[0092] A PCR probe is a nucleic acid molecule capable of initiating a polymerase activity while in a double-stranded structure with another nucleic acid. Various methods for determining the structure of PCR probes and PCR techniques exist in the art. Computer generated searches using programs such as Primer3 (www-genome.wi.mit.edu/cgi-bin/primer/primer3.cgi), STSPipeline (www-genome.wi.mit.edu/cgi-bin/www-STS_Pipeline), or GeneUp (Pesole et al., BioTechniques 25:112-123 (1998) the entirety of which is herein incorporated by reference), for example, can be used to identify potential PCR primers.

[0093] It is understood that a fragment of one or more of the nucleic acid molecules of the present invention may be a probe and specifically a PCR probe.

[0094] (b) Protein and Peptide Molecules

[0095] A class of agents comprises one or more of the protein or peptide molecules encoded by SEQ ID NO: 1 through SEQ ID NO: 91663 or one or more of the protein or fragment thereof or peptide molecules encoded by other nucleic acid agents of the present invention. As used herein, the term “protein molecule” or “peptide molecule” includes any molecule that comprises five or more amino acids. It is well know in the art that proteins may undergo modification, including post-translational modifications, such as, but not limited to, disulfide bond formation, glycosylation, phosphorylation, or oligomerization. Thus, as used herein, the term “protein molecule” or “peptide molecule” includes any protein molecule that is modified by any biological or non-biological process. The terms “amino acid” and “amino acids” refer to all naturally occurring L-amino acids. This definition is meant to include norleucine, ornithine, homocysteine, and homoserine.

[0096] One or more of the protein or fragment of peptide molecules may be produced via chemical synthesis, or more preferably, by expression in a suitable bacterial or eukaryotic host. Suitable methods for expression are described by Sambrook et al., (In: Molecular Cloning, A Laboratory Manual, 2nd Edition, Cold Spring Harbor Press, Cold Spring Harbor, N.Y. (1989)), or similar texts.

[0097] A “protein fragment” is a peptide or polypeptide molecule whose amino acid sequence comprises a subset of the amino acid sequence of that protein. A protein or fragment thereof that comprises one or more additional peptide regions not derived from that protein is a “fusion” protein. Such molecules may be derivatized to contain carbohydrate or other moieties (such as keyhole limpet hemocyanin, etc.). Fusion protein or peptide molecule of the present invention are preferably produced via recombinant means.

[0098] Another class of agents comprise protein or peptide molecules encoded by SEQ ID NO: 1 through SEQ ID NO: 91663 or complements thereof or, fragments or fusions thereof in which non-essential, or not relevant, amino acid residues have been added, replaced, or deleted. An example of such a homologue is the homologue protein of all non-soybean plant species, including but not limited to alfalfa, Arabidopsis, barley, Brassica, broccoli, cabbage, citrus, cotton, garlic, oat, oilseed rape, onion, canola, flax, maize, an ornamental plant, pea, peanut, pepper, potato, rice, rye, sorghum, strawberry, sugarcane, sugarbeet, tomato, wheat, poplar, pine, fir, eucalyptus, apple, lettuce, peas, lentils, grape, banana, tea, turf grasses, etc. Particularly preferred non-soybean plants to utilize for the isolation of homologues would include alfalfa, Arabidopsis, barley, cotton, corn, oat, oilseed rape, rice, corn, canola, ornamentals, sugarcane, sugarbeet, tomato, potato, wheat, and turf grasses. Such a homologue can be obtained by any of a variety of methods. Most preferably, as indicated above, one or more of the disclosed sequences (SEQ ID NO: 1 through SEQ ID NO: 91663 or complements thereof) will be used to define a pair of primers that may be used to isolate the homologue-encoding nucleic acid molecules from any desired species. Such molecules can be expressed to yield homologues by recombinant means.

[0099] (c) Antibodies

[0100] One aspect of the present invention concerns antibodies, single-chain antigen binding molecules, or other proteins that specifically bind to one or more of the protein or peptide molecules of the present invention and their homologues, fusions or fragments. Such antibodies may be used to quantitatively or qualitatively detect the protein or peptide molecules of the present invention. As used herein, an antibody or peptide is said to “specifically bind” to a protein or peptide molecule of the present invention if such binding is not competitively inhibited by the presence of non-related molecules.

[0101] Nucleic acid molecules that encode all or part of the protein of the present invention can be expressed, via recombinant means, to yield protein or peptides that can in turn be used to elicit antibodies that are capable of binding the expressed protein or peptide. Such antibodies may be used in immunoassays for that protein. Such protein-encoding molecules, or their fragments may be a “fusion” molecule (i.e., a part of a larger nucleic acid molecule) such that, upon expression, a fusion protein is produced. It is understood that any of the nucleic acid molecules of the present invention may be expressed, via recombinant means, to yield proteins or peptides encoded by these nucleic acid molecules.

[0102] The antibodies that specifically bind proteins and protein fragments of the present invention may be polyclonal or monoclonal, and may comprise intact immunoglobulins, or antigen binding portions of immunoglobulins (such as (F(ab′), F(ab′)₂) fragments, or single-chain immunoglobulins producible, for example, via recombinant means). It is understood that practitioners are familiar with the standard resource materials which describe specific conditions and procedures for the construction, manipulation and isolation of antibodies (see, for example, Harlow and Lane, In Antibodies: A Laboratory Manual, Cold Spring Harbor Press, Cold Spring Harbor, N.Y. (1988), the entirety of which is herein incorporated by reference).

[0103] Murine monoclonal antibodies are particularly preferred. BALB/c mice are preferred for this purpose, however, equivalent strains may also be used. The animals are preferably immunized with approximately 25 μg of purified protein (or fragment thereof) that has been emulsified a suitable adjuvant (such as TiterMax adjuvant (Vaxcel, Norcross, Ga.)). Immunization is preferably conducted at two intramuscular sites, one intraperitoneal site, and one subcutaneous site at the base of the tail. An additional i.v. injection of approximately 25 μg of antigen is preferably given in normal saline three weeks later. After approximately 11 days following the second injection, the mice may be bled and the blood screened for the presence of anti-protein or peptide antibodies. Preferably, a direct binding Enzyme-Linked Immunoassay (ELISA) is employed for this purpose.

[0104] More preferably, the mouse having the highest antibody titer is given a third i.v. injection of approximately 25 μg of the same protein or fragment. The splenic leukocytes from this animal may be recovered 3 days later, and are then permitted to fuse, most preferably, using polyethylene glycol, with cells of a suitable myeloma cell line (such as, for example, the P3X63Ag8.653 myeloma cell line). Hybridoma cells are selected by culturing the cells under “HAT” (hypoxanthine-aminopterin-thymine) selection for about one week. The resulting clones may then be screened for their capacity to produce monoclonal antibodies (“mAbs), preferably by direct ELISA.

[0105] In one embodiment, anti-protein or peptide monoclonal antibodies are isolated using a fusion of a protein, protein fragment, or peptide of the present invention, or conjugate of a protein, protein fragment, or peptide of the present invention, as immunogens. Thus, for example, a group of mice can be immunized using a fusion protein emulsified in Freund's complete adjuvant (e.g. approximately 50 μg of antigen per immunization). At three-week intervals, an identical amount of antigen is emulsified in Freund's incomplete adjuvant and used to immunize the animals. Ten days following the third immunization, serum samples are taken and evaluated for the presence of antibody. If antibody titers are too low, a fourth booster can be employed. Polysera capable of binding the protein or peptide can also be obtained using this method.

[0106] In a preferred procedure for obtaining monoclonal antibodies, the spleens of the above-described immunized mice are removed, disrupted, and immune splenocytes are isolated over a ficoll gradient. The isolated splenocytes are fused, using polyethylene glycol with BALB/c-derived HGPRT (hypoxanthine guanine phosphoribosyl transferase) deficient P3x63xAg8.653 plasmacytoma cells. The fused cells are plated into 96-well microtiter plates and screened for hybridoma fusion cells by their capacity to grow in culture medium supplemented with hypothanthine, aminopterin and thymidine for approximately 2-3 weeks.

[0107] Hybridoma cells that arise from such incubation are preferably screened for their capacity to produce an immunoglobulin that binds to a protein of interest. An indirect ELISA may be used for this purpose. In brief, the supernatants of hybridomas are incubated in microtiter wells that contain immobilized protein. After washing, the titer of bound immunoglobulin can be determined using, for example, a goat anti-mouse antibody conjugated to horseradish peroxidase. After additional washing, the amount of immobilized enzyme is determined (for example through the use of a chromogenic substrate). Such screening is performed as quickly as possible after the identification of the hybridoma in order to ensure that a desired clone is not overgrown by non-secreting neighbors. Desirably, the fusion plates are screened several times since the rates of hybridoma growth vary. In a preferred sub embodiment, a different antigenic form of immunogen may be used to screen the hybridoma. Thus, for example, the splenocytes may be immunized with one immunogen, but the resulting hybridomas can be screened using a different immunogen. It is understood that any of the protein or peptide molecules of the present invention may be used to raise antibodies.

[0108] As discussed below, such antibody molecules or their fragments may be used for diagnostic purposes. Where the antibodies are intended for diagnostic purposes, it may be desirable to derivatize them, for example with a ligand group (such as biotin) or a detectable marker group (such as a fluorescent group, a radioisotope or an enzyme).

[0109] The ability to produce antibodies that bind the protein or peptide molecules of the present invention permits the identification of mimetic compounds of those molecules. A “mimetic compound” is a compound that is not that compound, or a fragment of that compound, but which nonetheless exhibits an ability to specifically bind to antibodies directed against that compound.

[0110] It is understood that any of the agents of the present invention can be substantially purified and/or be biologically active and/or recombinant.

[0111] Uses of the Agents of the Invention

[0112] The nucleic acid molecules and fragments thereof of the present invention from library SOYMON007 are from seeds at 25 and 35 days after flowering. Seed libraries can enable the acquisition of, but are not limited to, genes that store food and seed regulatory elements, therefore, the ESTs of the present invention will find great use in the isolation of a variety of agronomically significant genes, including but not limited to genes that regulate germination, dormancy, vigor, resistance to seed pathogens, protein, amino acids, sterols, oils, minerals, isoflavones, saponins, trypsin inhibitors, vitamins, tocopherols, antinutrient components, carbohydrates, starch metabolism and seed regulatory elements. Such crucial genes are associated with plant growth, quality, yield, and could also serve as links in important metabolic, developmental and catabolic pathways.

[0113] The nucleic acid molecules and fragments thereof of the present invention from libraries SOYMON015, SOYMON020, LIB3027, LIB3029, LIB3049, LIB3052, and LIB3065 are from pods and seeds. Seed libraries can enable the acquisition of, but are not limited to, genes that store food and seed regulatory elements, therefore, the nucleic acid molecules of the present invention will find great use in the isolation of a variety of agronomically significant genes, including but not limited to genes that regulate protein, amino acids, sterols, oils, minerals, isoflavones, saponins, trypsin inhibitors, vitamins, tocopherols, antinutrient components, carbohydrates, starch metabolism and seed regulatory elements. Such crucial genes are associated with plant growth, quality, yield, and could also serve as links in important metabolic and catabolic pathways.

[0114] The nucleic acid molecules and fragments thereof of the present invention from library SOYMON022, LIB3028 and LIB3030 are from partially to fully open flower tissue. Flower libraries can enable the acquisition of, but are not limited to, genes that are involved in floral development, reproduction and seed production; therefore, the ESTs of the present invention will find great use in the isolation of a variety of agronomically significant genes, including but not limited to, genes that regulate meiosis, cell division, carotenoids, floral biogenesis, embryogenesis, protein, amino acids, sterols, oils, minerals, isoflavones, saponins, vitamins, tocopherols, antinutrient components, carbohydrates, starch metabolism and seed regulatory elements. Such genes are associated with plant growth, quality and yield, and could also serve as links in important developmental, metabolic, and catabolic pathways.

[0115] The nucleic acid molecules and fragments thereof of the present invention from the cDNA library, LIB3039, are isolated from soybean shoot apical meristem. Meristematic tissue is involved in primary plant growth and development, therefore, the ESTs of the present invention will find use in the isolation of a variety of agronomically significant genes, including but not limited to genes involved in meristem organization, cell enlargement, cell maturation and differentiation, cell cycle regulation, protoplasm synthesis, the formation of new cells by division, auxiliary shoot formation, branching and leaf development. Leaves are the carbohydrate factories of crop plants, therefore, the ESTs of the present invention will find use in the isolation of genes, including but not limited to genes that are necessary for the interception and transformation of light energy via photosynthesis linked with plant growth, quality, and yield. Genes isolated utilizing the disclosed ESTs would also be in pathways including but not limited to a pathway such as nitrogen metabolism linked to fruiting and mobilization and distribution of nitrogen.

[0116] The nucleic acid molecules and fragments thereof of the present invention from the cDNA library, LIB3040, are isolated from heart to torpedo stage embryos harvested from soybean plants. The ESTs of the present invention can enable the acquisition of, including but not limited to, genes involved in the seed development, therefore, the ESTs of the present invention will find great use in the isolation of a variety of agronomically significant genes, including but not limited to, genes that regulate proteins, amino acids, sterols, oils, minerals, isoflavones, saponins, trypsin inhibitors, vitamins, tocopherols, antinutrient components, carbohydrates, starch metabolism and seed regulatory elements. Such genes are associated with plant growth, quality, yield, and could also serve as links in metabolic and catabolic pathways. Libraries from the embryo tissue can enable the acquisition of a variety of agronomically significant genes involved in the synthesis and catabolism of commercially important traits.

[0117] The nucleic acid molecules and fragments thereof of the present invention from the cDNA library, LIB3050, are isolated from drought stressed root tissue subtracted from control root tissue, soybean root tissue. Roots play a role in major vegetative organs which supply water, minerals, and substances for plant growth and development, therefore, the ESTs of the present invention will find use in the isolation of a variety of agronomically significant genes, including but not limited to genes that are necessary for absorption, anchorage, storage, transport, propagation, nitrogen fixation, stress and drought stress. Such genes are associated with plant growth, quality, and yield and could also serve as links in important plant metabolic and catabolic pathways. The ESTs of the present invention will also find use in the isolation of genes resistant to brown stem rot and phytophthora root rot.

[0118] The nucleic acid molecules and fragments thereof of the present invention from the cDNA library, LIB3051, are isolated from the endosperm tissue and seed coat of soybean germinating seedlings. The endosperm consists a very thin layer of tissue affixed to the inside of the seed coat harvested from seedlings at 8, 10 and 14 HAI (hours after imbibition). The ESTs of the present invention can enable the acquisition of, including but not limited to genes involved in germination and seedling development, therefore, the ESTs of the present invention will find great use in the isolation of a variety of agronomically significant genes, including but not limited to genes that regulate protein, amino acids, sterols, oils, minerals, isoflavones, saponins, trypsin inhibitors, vitamins, tocopherols, antinutrient components, carbohydrates, starch metabolism and seed regulatory elements. Such crucial genes are associated with plant growth, quality, yield, and could also serve as links in important metabolic and catabolic pathways.

[0119] The nucleic acid molecules and fragments thereof of the present invention from the cDNA library, LIB3053, are isolated from soybean leaf tissue. Leaves are the carbohydrate factories of crop plants, therefore, the ESTs of the present invention will find use in the isolation of a variety of agronomically significant genes, including but not limited to genes that are necessary for the interception and transformation of light energy via photosynthesis linked with plant growth, quality, and yield. Genes isolated utilizing the disclosed ESTs would also be critical in pathways including but not limited to a pathway such as nitrogen metabolism linked to fruiting and mobilization and distribution of nitrogen.

[0120] The nucleic acid molecules and fragments thereof of the present invention from the cDNA library, LIB3054 and LIB3056 are isolated from soybean root tissue. Roots play a critical role in major vegetative organs which supply water, minerals, and substances essential for plant growth and development, therefore, the ESTs of the present invention will find great use in the isolation of a variety of agronomically significant genes, including but not limited to genes that are necessary for absorption, anchorage, storage, transport, propagation, and nitrogen fixation. Such crucial genes are associated with plant growth, quality, and yield and could also serve as links in important plant metabolic and catabolic pathways.

[0121] The nucleic acid molecules and fragments thereof of the present invention from the cDNA library, LIB3055 and LIB3093 are isolated from soybean leaf tissue. Leaves are the carbohydrate factories of crop plants, therefore, the ESTs of the present invention will find use in the isolation of a variety of agronomically significant genes, including but not limited to genes that are necessary for the interception and transformation of light energy via photosynthesis linked with plant growth, quality, and yield. Genes isolated utilizing the disclosed ESTs would also be in pathways including but not limited to a pathway such as nitrogen metabolism linked to fruiting and mobilization and distribution of nitrogen.

[0122] The nucleic acid molecules and fragments thereof of the present invention from the cDNA library, LIB3107, are isolated from the abscission zone from drought-stressed soybean plants at the R3 stage (beginning pod) of development. The ESTs of the present invention can enable the acquisition of genes expressed in soybean flower pedicels and those expressed during the process of abscission under drought stress conditions. The ESTs of the present invention will find great use in the isolation of a variety of agronomically significant genes, including but not limited to, genes that encode receptors, signal transducers, transcription factors, translation factors, enzymes, and structural proteins. These gene products are expected to control biochemical and physiological responses to developmental and environmental cues leading to abscission. Library from this tissue can enable the acquisition of a variety of agronomically significant genes involved in the synthesis and catabolism of commercially important traits.

[0123] The nucleic acid molecules and fragments thereof of the present invention from the cDNA library, LIB3109, are isolated from the abscission zone from non-drought stressed (control) soybean plants at the R3 stage of development. The ESTs of the present invention can enable the acquisition of genes expressed in soybean flower pedicels and those expressed during the process of abscission under non-drought stressed conditions. The ESTs of the present invention will find great use in the isolation of a variety of agronomically significant genes, including but not limited to, genes that encode receptors, signal transducers, transcription factors, translation factors, enzymes, and structural proteins. These gene products are expected to control biochemical and physiological responses to developmental and environmental cues leading to abscission. The library from this tissue can enable the acquisition of a variety of agronomically significant genes involved in the synthesis and catabolism of commercially important traits.

[0124] The nucleic acid molecules and fragments thereof of the present invention from libraries SOYMON007, SOYMON015, SOYMON020, SOYMON022, LIB3027, LIB3028, LIB3029, LIB3030, LIB3039, LIB3040, LIB3049, LIB3050, LIB3051, LIB3052, LIB3065, LIB3093, LIB3107, and LIB3052 are from soybean genotype A3244. This genotype has disease resistance to brown stem rot (Phialophora gregata) and Phytophthora root rot (Phytophthora sojae). Libraries from this genotype are likely to find use in the isolation of genes involved in disease resistance against a number of agronomically important fungal pathogens.

[0125] The nucleic acid molecules and fragments thereof of the present invention from libraries LIB3053, LIB3054, LIB3055 and LIB3056 are from soybean genotype Cristilliana x FT108. The ESTs from this genotype will find use in the isolation of genes involved in frogeye leaf spot and stem canker resistance genes.

[0126] Nucleic acid molecules and fragments thereof of the present invention may be employed to obtain other nucleic acid molecules. Such molecules include the nucleic acid molecules of other plants or other organisms (e.g., alfalfa, rice, potato, cotton, oat, rye, barley, maize, wheat, Arabidopsis, Brassica, etc.) including the nucleic acid molecules that encode, in whole or in part, protein homologues of other plant species or other organisms, and sequences of genetic elements such as promoters and transcriptional regulatory elements. Such molecules can be readily obtained by using the above-described nucleic acid molecules or fragments thereof to screen cDNA or genomic libraries obtained from such plant species. Methods for forming such libraries are well known in the art. Such homologue molecules may differ in their nucleotide sequences from those found in one or more of SEQ ID NO:1 through SEQ ID NO: 91663 or complements thereof because complete complementarity is not needed for stable hybridization. The nucleic acid molecules of the present invention therefore also include molecules that, although capable of specifically hybridizing with the nucleic acid molecules may lack “complete complementarity.”

[0127] Any of a variety of methods may be used to obtain one or more of the above-described nucleic acid molecules (Zamechik et al., Proc. Natl. Acad. Sci. (U.S.A.) 83:4143-4146 (1986), the entirety of which is herein incorporated by reference; Goodchild et al., Proc. Natl. Acad. Sci. (U.S.A.) 85:5507-5511 (1988), the entirety of which is herein incorporated by reference; Wickstrom et al., Proc. Natl. Acad. Sci. (U.S.) 85:1028-1032 (1988), the entirety of which is herein incorporated by reference; Holt et al., Molec. Cell. Biol. 8:963-973 (1988), the entirety of which is herein incorporated by reference; Gerwiftz et al., Science 242:1303-1306 (1988), the entirety of which is herein incorporated by reference; Anfossi et al., Proc. Natl. Acad. Sci. (U.S.A.) 86:3379-3383 (1989), the entirety of which is herein incorporated by reference; Becker et al., EMBO J. 8:3685-3691 (1989); the entirety of which is herein incorporated by reference). Automated nucleic acid synthesizers may be employed for this purpose. In lieu of such synthesis, the disclosed nucleic acid molecules may be used to define a pair of primers that can be used with the polymerase chain reaction (Mullis et al., Cold Spring Harbor Symp. Quant. Biol. 51:263-273 (1986); Erlich et al., EP 50,424; EP 84,796, EP 258,017, EP 237,362; Mullis, EP 201,184; Mullis et al., U.S. Pat. No. 4,683,202; Erlich, U.S. Pat. No. 4,582,788; and Saiki, R. et al., U.S. Pat. No. 4,683,194, all of which are hereby incorporated by reference in their entirety) to amplify and obtain any desired nucleic acid molecule or fragment.

[0128] Promoter sequence(s) and other genetic elements including but not limited to transcriptional regulatory elements associated with one or more of the disclosed nucleic acid sequences can also be obtained using the disclosed nucleic acid sequences provided herein.

[0129] In one embodiment, such sequences are obtained by incubating EST nucleic acid molecules or preferably fragments thereof with members of genomic libraries (e.g. maize and soybean) and recovering clones that hybridize to the EST nucleic acid molecule or fragment thereof. In a second embodiment, methods of “chromosome walking,” or inverse PCR may be used to obtain such sequences (Frohman et al., Proc. Natl. Acad. Sci. (U.S.A.) 85:8998-9002 (1988); Ohara et al., Proc. Natl. Acad. Sci. (U.S.A.) 86: 5673-5677 (1989); Pang et al., Biotechniques, 22(6); 1046-1048 (1977); Huang et al., Methods Mol. Biol. 69: 89-96 (1977); Hartl et al., Methods Mol. Biol. 58: 293-301 (1996), all of which are hereby incorporated by reference in their entirety). In one embodiment, the disclosed nucleic acid molecules are used to identify cDNAs whose analogous genes contain promoters with desirable expression patterns. The nucleic acid molecules isolated from the library of the present invention are used to isolate promoters of tissue-enhanced, tissue-specific, developmentally or environmentally-regulated expression profiles. Isolation and functional analysis of the 5′ flanking promoter sequences of these genes from genomic libraries, for example, using genomic screening methods and PCR techniques would result in the isolation of useful promoters and transcriptional regulatory elements. These methods are known to those of skill in the art and have been described (See for example Birren et al., Genome Analysis: Analyzing DNA, 1, (1997), Cold Spring Harbor Laboratory Press, Cold Spring Harbor, N.Y., the entirety of which is herein incorporated by reference).

[0130] Promoters obtained utilizing the nucleic acid molecules of the present invention could also be modified to affect their control characteristics. Examples of such modifications would include but are not limited to enhancer sequences as reported by Kay et al., Science 236:1299 (1987), herein incorporated by reference in its entirety. Such genetic elements could be used to enhance gene expression of new and existing traits for crop improvements.

[0131] The nucleic acid molecules of the present invention may be used to isolate promoters of tissue enhanced tissue specific, cell-specific, cell-type, developmentally or environmentally regulated expression profiles. Isolation and functional analysis of the 5′ flanking promoter sequences of these genes from genomic libraries, for example, using genomic screening methods and PCR techniques would result in the isolation of useful promoters and transcriptional regulatory elements. These methods are known to those of skill in the art and have been described (See, for example, Birren et. al., Genome Analysis: Analyzing DNA, 1, Cold Spring Harbor Laboratory Press, Cold Spring Harbor, N.Y. (1997), the entirety of which is herein incorporated by reference). Promoters obtained utilizing the nucleic acid molecules of the present invention could also be modified to affect their control characteristics. Examples of such modifications would include but are not limited to enhancer sequences as reported by Kay, et al Science 236:1299 (1987), herein incorporated reference in its entirety. Such genetic elements could be used to enhance gene expression of new and existing traits for crop improvements.

[0132] In an aspect of the present invention, one or more of the nucleic molecules of the present invention are used to determine whether a plant (preferably soybean) has a mutation affecting the level (i.e., the concentration of mRNA in a sample, etc.) or pattern (i.e., the kinetics of expression, rate of decomposition, stability profile, etc.) of the expression encoded in part or whole by one or more of the nucleic acid molecules of the present invention (collectively, the “Expression Response” of a cell or tissue). As used herein, the Expression Response manifested by a cell or tissue is said to be “altered” if it differs from the Expression Response of cells or tissues of plants not exhibiting the phenotype. To determine whether a Expression Response is altered, the Expression Response manifested by the cell or tissue of the plant exhibiting the phenotype is compared with that of a similar cell or tissue sample of a plant not exhibiting the phenotype. As will be appreciated, it is not necessary to re-determine the Expression Response of the cell or tissue sample of plants not exhibiting the phenotype each time such a comparison is made; rather, the Expression Response of a particular plant may be compared with previously obtained values of normal plants. As used herein, the phenotype of the organism is any of one or more characteristics of an organism (e.g. disease resistance, pest tolerance, environmental tolerance, male sterility, yield, quality improvements, etc.). A change in genotype or phenotype may be transient or permanent. Also as used herein, a tissue sample is any sample that comprises more than one cell. In a preferred aspect, a tissue sample comprises cells that share a common characteristic (e.g. derived from leaf, root, or pollen etc).

[0133] In one sub-aspect, such an analysis is conducted by determining the presence and/or identity of polymorphism(s) by one or more of the nucleic acid molecules of the present invention and more specifically, one or more of the EST nucleic acid molecules or fragments thereof which are associated with phenotype, or a predisposition to phenotype.

[0134] Any of a variety of molecules can be used to identify such polymorphism(s). In one embodiment, one or more of the EST nucleic acid molecules (or a sub-fragment thereof) may be employed as a marker nucleic acid molecule to identify such polymorphism(s). Alternatively, such polymorphisms can be detected through the use of a marker nucleic acid molecule or a marker protein that is genetically linked to (i.e., a polynucleotide that co-segregates with) such polymorphism(s).

[0135] In an alternative embodiment, such polymorphisms can be detected through the use of a marker nucleic acid molecule that is physically linked to such polymorphism(s). For this purpose, marker nucleic acid molecules comprising a nucleotide sequence of a polynucleotide located within 1 mb of the polymorphism(s), and more preferably within 100 kb of the polymorphism(s), and most preferably within 10 kb of the polymorphism(s) can be employed.

[0136] The genomes of animals and plants naturally undergo spontaneous mutation in the course of their continuing evolution (Gusella, Ann. Rev. Biochem. 55:831-854 (1986)). A “polymorphism” is a variation or difference in the sequence of the gene or its flanking regions that arises in some of the members of a species. The variant sequence and the “original” sequence co-exist in the species' population. In some instances, such co-existence is in stable or quasi-stable equilibrium.

[0137] A polymorphism is thus said to be “allelic,” in that, due to the existence of the polymorphism, some members of a species may have the original sequence (i.e., the original “allele”) whereas other members may have the variant sequence (i.e., the variant “allele”). In the simplest case, only one variant sequence may exist, and the polymorphism is thus said to be di-allelic. In other cases, the species' population may contain multiple alleles, and the polymorphism is termed tri-allelic, etc. A single gene may have multiple different unrelated polymorphisms. For example, it may have a di-allelic polymorphism at one site, and a multi-allelic polymorphism at another site.

[0138] The variation that defines the polymorphism may range from a single nucleotide variation to the insertion or deletion of extended regions within a gene. In some cases, the DNA sequence variations are in regions of the genome that are characterized by short tandem repeats (STRs) that include tandem di- or tri-nucleotide repeated motifs of nucleotides. Polymorphisms characterized by such tandem repeats are referred to as “variable number tandem repeat” (“VNTR”) polymorphisms. VNTRs have been used in identity analysis (Weber, U.S. Pat. No. 5,075,217; Armour et al., FEBS Lett. 307:113-115 (1992); Jones et al., Eur. J. Haematol. 39:144-147 (1987); Horn et al., PCT Application WO91/14003; Jeffreys, European Patent Application 370,719; Jeffreys, U.S. Pat. No. 5,699,082; Jeffreys. et al., Amer. J. Hum. Genet. 39:11-24 (1986); Jeffreys. et al., Nature 316:76-79 (1985); Gray et al., Proc. R. Acad. Soc. Lond. 243:241-253 (1991); Moore et al., Genomics 10:654-660 (1991); Jeffreys et al., Anim. Genet. 18:1-15 (1987); Hillel et al., Anim. Genet. 20:145-155 (1989); Hillel et al., Genet. 124:783-789 (1990), all of which are herein incorporated by reference in their entirety).

[0139] The detection of polymorphic sites in a sample of DNA may be facilitated through the use of nucleic acid amplification methods. Such methods specifically increase the concentration of polynucleotides that span the polymorphic site, or include that site and sequences located either distal or proximal to it. Such amplified molecules can be readily detected by gel electrophoresis or other means.

[0140] The most preferred method of achieving such amplification employs the polymerase chain reaction (“PCR”) (Mullis et al., Cold Spring Harbor Symp. Quant. Biol. 51:263-273 (1986); Erlich et al., European Patent Appln. 50,424; European Patent Appln. 84,796, European Patent Application 258,017, European Patent Appln. 237,362; Mullis, European Patent Appln. 201,184; Mullis, et al., U.S. Pat. No. 4,683,202; Erlich., U.S. Pat. No. 4,582,788; and Saiki et al., U.S. Pat. No. 4,683,194, all of which are herein incorporated by reference), using primer pairs that are capable of hybridizing to the proximal sequences that define a polymorphism in its double-stranded form.

[0141] In lieu of PCR, alternative methods, such as the “Ligase Chain Reaction” (“LCR”) may be used (Barany, Proc. Natl. Acad. Sci. (U.S.A.) 88:189-193 (1991), the entirety of which is herein incorporated by reference). LCR uses two pairs of oligonucleotide probes to exponentially amplify a specific target. The sequences of each pair of oligonucleotides is selected to permit the pair to hybridize to abutting sequences of the same strand of the target. Such hybridization forms a substrate for a template-dependent ligase. As with PCR, the resulting products thus serve as a template in subsequent cycles and an exponential amplification of the desired sequence is obtained.

[0142] LCR can be performed with oligonucleotides having the proximal and distal sequences of the same strand of a polymorphic site. In one embodiment, either oligonucleotide will be designed to include the actual polymorphic site of the polymorphism. In such an embodiment, the reaction conditions are selected such that the oligonucleotides can be ligated together only if the target molecule either contains or lacks the specific nucleotide that is complementary to the polymorphic site present on the oligonucleotide. Alternatively, the oligonucleotides may be selected such that they do not include the polymorphic site (see, Segev, PCT Application WO 90/01069, the entirety of which is herein incorporated by reference).

[0143] The “Oligonucleotide Ligation Assay” (“OLA”) may alternatively be employed (Landegren et al., Science 241:1077-1080 (1988), the entirety of which is herein incorporated by reference). The OLA protocol uses two oligonucleotides which are designed to be capable of hybridizing to abutting sequences of a single strand of a target. OLA, like LCR, is particularly suited for the detection of point mutations. Unlike LCR, however, OLA results in “linear” rather than exponential amplification of the target sequence.

[0144] Nickerson et al. have described a nucleic acid detection assay that combines attributes of PCR and OLA (Nickerson et al., Proc. Natl. Acad. Sci. (U.S.) 87:8923-8927 (1990), the entirety of which is herein incorporated by reference). In this method, PCR is used to achieve the exponential amplification of target DNA, which is then detected using OLA. In addition to requiring multiple, and separate, processing steps, one problem associated with such combinations is that they inherit all of the problems associated with PCR and OLA.

[0145] Schemes based on ligation of two (or more) oligonucleotides in the presence of nucleic acid having the sequence of the resulting “di-oligonucleotide”, thereby amplifying the di-oligonucleotide, are also known (Wu et al., Genomics 4:560 (1989), the entirety of which is herein incorporated by reference), and may be readily adapted to the purposes of the present invention.

[0146] Other known nucleic acid amplification procedures, such as allele-specific oligomers, branched DNA technology, transcription-based amplification systems, or isothermal amplification methods may also be used to amplify and analyze such polymorphisms (Malek et al., U.S. Pat. No. 5,130,238; Davey et al., European Patent Application 329,822; Schuster et al., U.S. Pat. No. 5,169,766; Miller et al., PCT Application WO 89/06700; Kwoh et al., Proc. Natl. Acad. Sci. (U.S.A.) 86:1173-1177 (1989); Gingeras et al., PCT Application WO 88/10315; Walker et al., Proc. Natl. Acad. Sci. (U.S.A.) 89:392-396 (1992), all of which are herein incorporated by reference in their entirety).

[0147] The identification of a polymorphism can be determined in a variety of ways. By correlating the presence or absence of it in a plant with the presence or absence of a phenotype, it is possible to predict the phenotype of that plant. If a polymorphism creates or destroys a restriction endonuclease cleavage site, or if it results in the loss or insertion of DNA (e.g., a VNTR polymorphism), it will alter the size or profile of the DNA fragments that are generated by digestion with that restriction endonuclease. As such, individuals that possess a variant sequence can be distinguished from those having the original sequence by restriction fragment analysis. Polymorphisms that can be identified in this manner are termed “restriction fragment length polymorphisms” (“RFLPs”). RFLPs have been widely used in human and plant genetic analyses (Glassberg, UK Patent Application 2135774; Skolnick et al., Cytogen. Cell Genet. 32:58-67 (1982); Botstein et al., Ann. J. Hum. Genet. 32:314-331 (1980); Fischer et al. (PCT Application WO90/13668); Uhlen, PCT Application WO90/11369).

[0148] Polymorphisms can also be identified by Single Strand Conformation Polymorphism (SSCP) analysis. The SSCP technique is a method capable of identifying most sequence variations in a single strand of DNA, typically between 150 and 250 nucleotides in length (Elles, Methods in Molecular Medicine: Molecular Diagnosis of Genetic Diseases, Humana Press (1996), the entirety of which is herein incorporated by reference); Orita et al., Genomics 5: 874-879 (1989), the entirety of which is herein incorporated by reference). Under denaturing conditions a single strand of DNA will adopt a conformation that is uniquely dependent on its sequence conformation. This conformation usually will be different, even if only a single base is changed. Most conformations have been reported to alter the physical configuration or size sufficiently to be detectable by electrophoresis. A number of protocols have been described for SSCP including, but not limited to Lee et al., Anal. Biochem. 205: 289-293 (1992), the entirety of which is herein incorporated by reference; Suzuki et al., Anal. Biochem. 192: 82-84 (1991), the entirety of which is herein incorporated by reference; Lo et al., Nucleic Acids Research 20: 1005-1009 (1992), the entirety of which is herein incorporated by reference; Sarkar et al., Genomics 13: 441-443 (1992), the entirety of which is herein incorporated by reference). It is understood that one or more of the nucleic acids of the present invention, may be utilized as markers or probes to detect polymorphisms by SSCP analysis.

[0149] Polymorphisms may also be found using a DNA fingerprinting technique called amplified fragment length polymorphism (AFLP), which is based on the selective PCR amplification of restriction fragments from a total digest of genomic DNA to profile that DNA. Vos et al., Nucleic Acids Res. 23:4407-4414 (1995), the entirety of which is herein incorporated by reference. This method allows for the specific co-amplification of high numbers of restriction fragments, which can be visualized by PCR without knowledge of the nucleic acid sequence.

[0150] AFLP employs basically three steps. Initially, a sample of genomic DNA is cut with restriction enzymes and oligonucleotide adapters are ligated to the restriction fragments of the DNA. The restriction fragments are then amplified using PCR by using the adapter and restriction sequence as target sites for primer annealing. The selective amplification is achieved by the use of primers that extend into the restriction fragments, amplifyng only those fragments in which the primer extensions match the nucleotide flanking the restriction sites. These amplified fragments are then visualized on a denaturing polyacrylamide gel.

[0151] AFLP analysis has been performed on Salix (Beismann et al., Mol. Ecol. 6:989-993 (1997), the entirety of which is herein incorporated by reference); Acinetobacter (Janssen et al., Int. J. Syst. Bacteriol 47:1179-1187 (1997), the entirety of which is herein incorporated by reference), Aeromonas popoffi (Huys et al., Int. J. Syst. Bacteriol. 47:1165-1171 (1997), the entirety of which is herein incorporated by reference), rice (McCouch et al., Plant Mol. Biol. 35:89-99 (1997), the entirety of which is herein incorporated by reference); Nandi et al., Mol. Gen. Genet. 255:1-8 (1997); Cho et al., Genome 39:373-378 (1996), herein incorporated by reference), barley (Hordeum vulgare) (Simons et al., Genomics 44:61-70 (1997), the entirety of which is herein incorporated by reference; Waugh et al., Mol. Gen. Genet. 255:311-321 (1997), the entirety of which is herein incorporated by reference; Qi et al., Mol. Gen Genet. 254:330-336 (1997), the entirety of which is herein incorporated by reference; Becker et al., Mol. Gen. Genet. 249:65-73 (1995), the entirety of which is herein incorporated by reference), potato (Van der Voort et al., Mol. Gen. Genet. 255:438-447 (1997), the entirety of which is herein incorporated by reference; Meksem et al., Mol. Gen. Genet. 249:74-81 (1995), the entirety of which is herein incorporated by reference), Phytophthora infestans (Van der Lee et al., Fungal Genet. Biol. 21:278-291 (1997), the entirety of which is herein incorporated by reference), Bacillus anthracis (Keim et al., J. Bacteriol. 179:818-824 (1997)), Astragalus cremnophylax (Travis et al., Mol. Ecol. 5:735-745 (1996), the entirety of which is herein incorporated by reference), Arabidopsis (Cnops et al., Mol. Gen. Genet. 253:32-41 (1996), the entirety of which is herein incorporated by reference), Escherichia coli (Lin et al., Nucleic Acids Res. 24:3649-3650 (1996), the entirety of which is herein incorporated by reference), Aeromonas (Huys et al., Int. J. Syst. Bacteriol. 46:572-580 (1996), the entirety of which is herein incorporated by reference), nematode (Folkertsma et al., Mol. Plant Microbe Interact. 9:47-54 (1996), the entirety of which is herein incorporated by reference), tomato (Thomas et al., Plant J. 8:785-794 (1995), the entirety of which is herein incorporated by reference), and human (Latorra et al., PCR Methods Appl. 3:351-358 (1994)). AFLP analysis has also been used for fingerprinting mRNA (Money et al., Nucleic Acids Res. 24:2616-2617 (1996), the entirety of which is herein incorporated by reference; Bachem et al., Plant J. 9:745-753 (1996), the entirety of which is herein incorporated by reference). It is understood that one or more of the nucleic acids of the present invention, may be utilized as markers or probes to detect polymorphisms by AFLP analysis for fingerprinting mRNA.

[0152] Polymorphisms may also be found using random amplified polymorphic DNA (RAPD) (Williams et al., Nuc. Acids Res. 18: 6531-6535 (1990), the entirety of which is herein incorporated by reference) and cleaveable amplified polymorphic sequences (CAPS) (Lyamichev et al., Science 260: 778-783 (1993), the entirety of which is herein incorporated by reference). It is understood that one or more of the nucleic acids of the present invention, may be utilized as markers or probes to detect polymorphisms by RAPD or CAPS analysis.

[0153] Polymorphisms are useful, through linkage analysis, to define the genetic distances or physical distances between polymorphic traits. A physical map or ordered array of genomic DNA fragments in the desired region containing the gene may be used to characterize and isolate genes corresponding to desirable traits. For this purpose, yeast artificial chromosomes (YACs), bacterial artificial chromosomes (BACs), and cosmids are appropriate vectors for cloning large segments of DNA molecules. Although fewer clones are needed to make a contig for a specific genomic region by using YACs (Agyare et al., Genome Res. 7: 1-9 (1997), the entirety of which is herein incorporated by reference; James et al., Genomics 32: 425-430 (1996), the entirety of which is herein incorporated by reference), chimerism in the inserted DNA fragment can arise. Cosmids are convenient for handling smaller-size DNA molecules and may be used for transformation in developing transgenic plants. BACs also carry DNA fragments and are less prone to chimerism.

[0154] Through genetic mapping, a fine scale linkage map can be developed using DNA markers and, then, a genomic DNA library of large-sized fragments can be screened with molecular markers linked to the desired trait. Molecular markers are advantageous for agronomic traits that are otherwise difficult to tag, such as resistance to pathogens, insects and nematodes, tolerance to abiotic stress, quality parameters and quantitative traits such as high yield potential.

[0155] The essential requirements for marker-assisted selection in a plant breeding program are: (1) the marker(s) should co-segregate or be closely linked with the desired trait; (2) an efficient means of screening large populations for the molecular marker(s) should be available; and (3) the screening technique should have high reproducibility across laboratories and preferably be economical to use and be user-friendly.

[0156] The genetic linkage of marker molecules can be established by a gene mapping model such as, without limitation, the flanking marker model reported by Lander and Botstein, Genetics 121:185-199 (1989) and the interval mapping, based on maximum likelihood methods described by Lander and Botstein, Genetics 121:185-199 (1989) and implemented in the software package MAPMAKER/QTL (Lincoln and Lander, Mapping Genes Controlling Quantitative Traits Using MAPMAKER/QTL, Whitehead Institute for Biomedical Research, Massachusetts, (1990). Additional software includes Qgene, Version 2.23 (1996), Department of Plant Breeding and Biometry, 266 Emerson Hall, Cornell University, Ithaca, N.Y., the manual of which is herein incorporated by reference in its entirety). Use of Qgene software is a particularly preferred approach.

[0157] A maximum likelihood estimate (MLE) for the presence of a marker is calculated, together with an MLE assuming no QTL effect, to avoid false positives. A log₁₀of an odds ratio (LOD) is then calculated as: LOD=log₁₀ (MLE for the presence of a QTL/MLE given no linked QTL).

[0158] The LOD score essentially indicates how much more likely the data are to have arisen assuming the presence of a QTL than in its absence. The LOD threshold value for avoiding a false positive with a given confidence, say 95%, depends on the number of markers and the length of the genome. Graphs indicating LOD thresholds are set forth in Lander and Botstein, Genetics 121:185-199 (1989) the entirety of which is herein incorporated by reference and further described by Arús and Moreno-González, Plant Breeding, Hayward et al., (eds.) Chapman & Hall, London, pp. 314-331 (1993), the entirety of which is herein incorporated by reference.

[0159] Additional models can be used. Many modifications and alternative approaches to interval mapping have been reported, including the use of non-parametric methods (Kruglyak and Lander, Genetics 139:1421-1428 (1995), the entirety of which is herein incorporated by reference). Multiple regression methods or models can be also be used, in which the trait is regressed on a large number of markers (Jansen, Biometrics in Plant Breeding, van Oijen and Jansen (eds.), Proceedings of the Ninth Meeting of the Eucarpia Section Biometrics in Plant Breeding, The Netherlands, pp. 116-124 (1994); Weber and Wricke, Advances in Plant Breeding, Blackwell, Berlin, 16 (1994), both of which is herein incorporated by reference in their entirety). Procedures combining interval mapping with regression analysis, whereby the phenotype is regressed onto a single putative QTL at a given marker interval and at the same time onto a number of markers that serve as ‘cofactors,’ have been reported by Jansen and Stam, Genetics 136:1447-1455 (1994), the entirety of which is herein incorporated by reference and Zeng, Genetics 136:1457-1468 (1994) the entirety of which is herein incorporated by reference. Generally, the use of cofactors reduces the bias and sampling error of the estimated QTL positions (Utz and Melchinger, Biometrics in Plant Breeding, van Oijen and Jansen (eds.) Proceedings of the Ninth Meeting of the Eucarpia Section Biometrics in Plant Breeding, The Netherlands, pp. 195-204 (1994), the entirety of which is herein incorporated by reference, thereby improving the precision and efficiency of QTL mapping (Zeng, Genetics 136:1457-1468 (1994)). These models can be extended to multi-environment experiments to analyze genotype-environment interactions (Jansen et al., Theo. Appl. Genet. 91:33-37 (1995), the entirety of which is herein incorporated by reference).

[0160] Selection of an appropriate mapping population is important to map construction. The choice of an appropriate mapping population depends on the type of marker systems employed (Tanksley et al., Molecular mapping plant chromosomes. Chromosome structure andfunction: Impact of new concepts, Gustafson and Appels (eds.), Plenum Press, New York, pp. 157-173 (1988), the entirety of which is herein incorporated by reference). Consideration must be given to the source of parents (adapted vs. exotic) used in the mapping population. Chromosome pairing and recombination rates can be severely disturbed (suppressed) in wide crosses (adapted x exotic) and generally yield greatly reduced linkage distances. Wide crosses will usually provide segregating populations with a relatively large array of polymorphisms when compared to progeny in a narrow cross (adapted x adapted).

[0161] An F₂ population is the first generation of selfing after the hybrid seed is produced. Usually a single F₁ plant is selfed to generate a population segregating for all the genes in Mendelian (1:2:1) fashion. Maximum genetic information is obtained from a completely classified F₂ population using a codominant marker system (Mather, Measurement of Linkage in Heredity, Methuen and Co., (1938), the entirety of which is herein incorporated by reference). In the case of dominant markers, progeny tests (e.g. F₃, BCF₂) are required to identify the heterozygotes, thus making it equivalent to a completely classified F₂ population. However, this procedure is often prohibitive because of the cost and time involved in progeny testing. Progeny testing of F₂ individuals is often used in map construction where phenotypes do not consistently reflect genotype (e.g. disease resistance) or where trait expression is controlled by a QTL. Segregation data from progeny test populations (e.g. F₃ or BCF₂) can be used in map construction. Marker-assisted selection can then be applied to cross progeny based on marker-trait map associations (F₂, F₃), where linkage groups have not been completely disassociated by recombination events (i.e., maximum disequilibrium).

[0162] Recombinant inbred lines (RIL) (genetically related lines; usually >F₅, developed from continuously selfing F₂ lines towards homozygosity) can be used as a mapping population. Information obtained from dominant markers can be maximized by using RIL because all loci are homozygous or nearly so. Under conditions of tight linkage (i.e., about <10% recombination), dominant and co-dominant markers evaluated in RIL populations provide more information per individual than either marker type in backcross populations (Reiter et al., Proc. Natl. Acad. Sci. (U.S.) 89:1477-1481 (1992), the entirety of which is herein incorporated by reference). However, as the distance between markers becomes larger (i.e., loci become more independent), the information in RIL populations decreases dramatically when compared to codominant markers.

[0163] Backcross populations (e.g., generated from a cross between a successful variety (recurrent parent) and another variety (donor parent) carrying a trait not present in the former) can be utilized as a mapping population. A series of backcrosses to the recurrent parent can be made to recover most of its desirable traits. Thus a population is created consisting of individuals nearly like the recurrent parent but each individual carries varying amounts or mosaic of genomic regions from the donor parent. Backcross populations can be useful for mapping dominant markers if all loci in the recurrent parent are homozygous and the donor and recurrent parent have contrasting polymorphic marker alleles (Reiter et al., Proc. Natl. Acad. Sci. (U.S.) 89:1477-1481 (1992)). Information obtained from backcross populations using either codominant or dominant markers is less than that obtained from F₂ populations because one, rather than two, recombinant gametes are sampled per plant. Backcross populations, however, are more informative (at low marker saturation) when compared to RILs as the distance between linked loci increases in RIL populations (i.e. about 15% recombination). Increased recombination can be beneficial for resolution of tight linkages, but may be undesirable in the construction of maps with low marker saturation.

[0164] Near-isogenic lines (NIL) created by many backcrosses to produce an array of individuals that are nearly identical in genetic composition except for the trait or genomic region under interrogation can be used as a mapping population. In mapping with NILs, only a portion of the polymorphic loci are expected to map to a selected region.

[0165] Bulk segregant analysis (BSA) is a method developed for the rapid identification of linkage between markers and traits of interest (Michelmore et al., Proc. Natl. Acad. Sci. (U.S.A.) 88:9828-9832 (1991), the entirety of which is herein incorporated by reference). In BSA, two bulked DNA samples are drawn from a segregating population originating from a single cross. These bulks contain individuals that are identical for a particular trait (resistant or susceptible to particular disease) or genomic region but arbitrary at unlinked regions (i.e. heterozygous). Regions unlinked to the target region will not differ between the bulked samples of many individuals in BSA.

[0166] It is understood that one or more of the nucleic acid molecules of the present invention may be used as molecular markers. It is also understood that one or more of the protein molecules of the present invention may be used as molecular markers.

[0167] In accordance with this aspect of the present invention, a sample nucleic acid is obtained from plants cells or tissues. Any source of nucleic acid may be used.

[0168] Preferably, the nucleic acid is genomic DNA. The nucleic acid is subjected to restriction endonuclease digestion. For example, one or more EST nucleic acid molecule or fragment thereof can be used as a probe in accordance with the above-described polymorphic methods. The polymorphism obtained in this approach can then be cloned to identify the mutation at the coding region which alters the protein's structure or regulatory region of the gene which affects its expression level.

[0169] In one aspect of the present invention, an evaluation can be conducted to determine whether a particular mRNA molecule is present. One or more of the nucleic acid molecules of the present invention, preferably one or more of the EST nucleic acid molecules of the present invention are utilized to detect the presence or quantity of the mRNA species. Such molecules are then incubated with cell or tissue extracts of a plant under conditions sufficient to permit nucleic acid hybridization. The detection of double-stranded probe-mRNA hybrid molecules is indicative of the presence of the mRNA; the amount of such hybrid formed is proportional to the amount of mRNA. Thus, such probes may be used to ascertain the level and extent of the mRNA production in a plant's cells or tissues. Such nucleic acid hybridization may be conducted under quantitative conditions (thereby providing a numerical value of the amount of the mRNA present). Alternatively, the assay may be conducted as a qualitative assay that indicates either that the mRNA is present, or that its level exceeds a user set, predefined value.

[0170] A principle of in situ hybridization is that a labeled, single-stranded nucleic acid probe will hybridize to a complementary strand of cellular DNA or RNA and, under the appropriate conditions, these molecules will form a stable hybrid. When nucleic acid hybridization is combined with histological techniques, specific DNA or RNA sequences can be identified within a single cell. An advantage of in situ hybridization over more conventional techniques for the detection of nucleic acids is that it allows an investigator to determine the precise spatial population (Angerer et al., Dev. Biol. 101: 477-484 (1984), the entirety of which is herein incorporated by reference; Angerer et al., Dev. Biol. 112: 157-166 (1985), the entirety of which is herein incorporated by reference; Dixon et al., EMBO J. 10: 1317-1324 (1991), the entirety of which is herein incorporated by reference). In situ hybridization may be used to measure the steady-state level of RNA accumulation. It is a sensitive technique and RNA sequences present in as few as 5-10 copies per cell can be detected (Hardin et al., J. Mol. Biol. 202: 417-431. (1989), the entirety of which is herein incorporated by reference). A number of protocols have been devised for in situ hybridization, each with tissue preparation, hybridization, and washing conditions (Meyerowitz, Plant Mol. Biol. Rep. 5: 242-250 (1987), the entirety of which is herein incorporated by reference; Cox and Goldberg, In: Plant Molecular Biology: A Practical Approach (ed. C. H. Shaw), pp. 1-35. IRL Press, Oxford (1988), the entirety of which is herein incorporated by reference; Raikhel et al., In situ RNA hybridization in plant tissues. In Plant Molecular Biology Manual, vol. B9: 1-32. Kluwer Academic Publisher, Dordrecht, Belgium (1989), the entirety of which is herein incorporated by reference).

[0171] In situ hybridization also allows for the localization of proteins within a tissue or cell (Wilkinson, In Situ Hybridization, Oxford University Press, Oxford (1992), the entirety of which is herein incorporated by reference; Langdale, In Situ Hybridization 165-179 In: The Maize Handbook, eds. Freeling and Walbot, Springer-Verlag, New York (1994), the entirety of which is herein incorporated by reference). It is understood that one or more of the molecules of the present invention, preferably one or more of the EST nucleic acid molecules of the present invention or one or more of the antibodies of the present invention may be utilized to detect the level or pattern of a protein or fragment thereof by in situ hybridization.

[0172] Fluorescent in situ hybridization also enables the localization of a particular DNA sequence along a chromosome which is useful, among other uses, for gene mapping, following chromosomes in hybrid lines or detecting chromosomes with translocations, transversions or deletions. In situ hybridization has been used to identify chromosomes in several plant species (Griffor et al., Plant Mol. Biol. 17: 101-109 (1991), the entirety of which is herein incorporated by reference; Gustafson et al., Proc. Nat'l Acad. Sci. (U.S.A). 87: 1899-1902 (1990), herein incorporated by reference; Mukai and Gill, Genome 34: 448-452. (1991); Schwarzacher and Heslop-Harrison, Genome 34: 317-323 (1991); Wang et al., Jpn. J. Genet. 66: 313-316 (1991), the entirety of which is herein incorporated by reference; Parra and Windle, Nature Genetics, 5: 17-21 (1993), the entirety of which is herein incorporated by reference). It is understood that the nucleic acid molecules of the present invention may be used as probes or markers to localize sequences along a chromosome.

[0173] It is also understood that one or more of the molecules of the present invention, preferably one or more of the EST nucleic acid molecules of the present invention or one or more of the antibodies of the present invention may be utilized to detect the expression level or pattern of a protein or mRNA thereof by in situ hybridization.

[0174] Another method to localize the expression of a molecule is tissue printing. Tissue printing provides a way to screen, at the same time on the same membrane many tissue sections from different plants or different developmental stages. Tissue-printing procedures utilize films designed to immobilize proteins and nucleic acids. In essence, a freshly cut section of an organ is pressed gently onto nitrocellulose paper, nylon membrane or polyvinylidene difluoride membrane. Such membranes are commercially available (e.g. Millipore, Bedford, Mass.). The contents of the cut cell transfer onto the membrane, and the molecules are immobilized to the membrane. The immobilized molecules form a latent print that can be visualized with appropriate probes. When a plant tissue print is made on nitrocellulose paper, the cell walls leave a physical print that makes the anatomy visible without further treatment (Varner and Taylor, Plant Physiol. 91: 31-33 (1989), the entirety of which is herein incorporated by reference).

[0175] Tissue printing on substrate films is described by Daoust, Exp. Cell Res. 12: 203-211 (1957), the entirety of which is herein incorporated by reference, who detected amylase, protease, ribonuclease, and deoxyribonuclease in animal tissues using starch, gelatin, and agar films. These techniques can be applied to plant tissues (Yomo and Taylor, Planta 112:35-43 (1973); Harris and Chrispeels, Plant Physiol. 56: 292-299 (1975). Advances in membrane technology have increased the range of applications of Daoust's tissue-printing techniques allowing (Cassab and Vamer, J. Cell. Biol. 105: 2581-2588 (1987), the entirety of which is herein incorporated by reference; the histochemical localization of various plant enzymes and deoxyribonuclease on nitrocellulose paper and nylon (Spruce et al., Phytochemistry, 26: 2901-2903 (1987), the entirety of which is herein incorporated by reference; Barres et al. Neuron 5: 527-544 (1990), the entirety of which is herein incorporated by reference; the entirety of which is herein incorporated by reference; Reid and Pont-Lezica, Tissue Printing: Tools for the Study of Anatomy, Histochemistry, and Gene Expression, Academic Press, New York, N.Y. (1992), the entirety of which is herein incorporated by reference; Reid et al. Plant Physiol. 93: 160-165 (1990), herein incorporate by reference; Ye et al. Plant J. 1: 175-183 (1991), the entirety of which is herein incorporated by reference).

[0176] It is understood that one or more of the molecules of the present invention, preferably one or more of the EST nucleic acid molecules of the present invention or one or more of the antibodies of the present invention may be utilized to detect the presence or quantity of a protein by tissue printing.

[0177] Further, it is also understood that any of the nucleic acid molecules of the present invention may be used as marker nucleic acids and or probes in connection with methods that require probes or marker nucleic acids. As used herein, a probe is an agent that is utilized to determine an attribute or feature (e.g. presence or absence, location, correlation, etc.) or a molecule, cell, tissue or plant. As used herein, a marker nucleic acid is a nucleic acid molecule that is utilized to determine an attribute or feature (e.g., presence or absence, location, correlation, etc.) or a molecule, cell, tissue or plant.

[0178] A microarray-based method for high-throughput monitoring of plant gene expression may be utilized to measure gene-specific hybridization targets. This ‘chip’-based approach involves using microarrays of nucleic acid molecules as gene-specific hybridization targets to quantitatively measure expression of the corresponding plant genes (Schena et al., Science 270: 467-470 (1995), the entirety of which is herein incorporated by reference; Shalon, Ph.D. Thesis. Stanford University (1996), the entirety of which is herein incorporated by reference). Every nucleotide in a large sequence can be queried at the same time. Hybridization can be used to efficiently analyze large amounts of nucleotide sequence.

[0179] Several microarray methods have been described. One method compares the sequences to be analyzed by hybridization to a set of oligonucleotides representing all possible subsequences (Bains and Smith, J. Theor. Biol. 135: 303 (1989), the entirety of which is herein incorporated by reference). A second method hybridizes the sample to an array of oligonucleotide probes. An array consisting of oligonucleotides complementary to subsequences of a target sequence can be used to determine the identity of a target sequence, measure its amount, and detect differences between the target and a reference sequence. Nucleic acid molecules microarrays may also be screened with protein molecules or fragments thereof to determine nucleic acid molecules that specifically bind protein molecules or fragments thereof.

[0180] The microarray approach may be used with polypeptide targets (U.S. Pat. No. 5,445,934; U.S. Pat. No. 5,143,854; U.S. Pat. No. 5,079,600; U.S. Pat. No. 4,923,901, all of which are herein incorporated by reference in their entirety). Essentially, polypeptides are synthesized on a substrate (microarray) and these polypeptides can be screened with either protein molecules or fragments thereof or nucleic acid molecules in order to screen for either protein molecules or fragments thereof or nucleic acid molecules that specifically bind the target polypeptides. Implementation of these techniques rely on recently developed combinatorial technologies to generate any ordered array of a large number of oligonucleotide probes (Fodor et al., Science 251:767-773 (1991), the entirety of which is herein incorporated by reference).

[0181] It is understood that one or more of the molecules of the present invention, preferably one or more of the nucleic acid molecules or protein molecules or fragments thereof of the present invention may be utilized in a microarray based method.

[0182] In a preferred embodiment of the present invention microarrays may be prepared that comprise nucleic acid molecules where preferably at least 10%, preferably at least 25%, more preferably at least 50% and even more preferably at least 75%, 80%, 85%, 90% or 95% of the nucleic acid molecules located on that array are selected from the group of nucleic acid molecules that specifically hybridize to one or more nucleic acid molecule having a nucleic acid sequence selected from the group of SEQ ID NO: 1 through SEQ ID NO: 91663 or complement thereof or fragments of either.

[0183] A particular preferred microarray embodiment of the present invention is a microarray comprising nucleic acid molecules encoding genes or fragments thereof that are homologues of known genes or nucleic acid molecules that comprise genes or fragment thereof that elicit only limited or no matches to known genes. A further preferred microarray embodiment of the present invention is a microarray comprising nucleic acid molecules having genes or fragments thereof that are homologues of known genes and nucleic acid molecules that comprise genes or fragment thereof that elicit only limited or no matches to known genes. Site-directed mutagenesis may be utilized to modify nucleic acid sequences, particularly as it is a technique that allows one or more of the amino acids encoded by a nucleic acid molecule to be altered (e.g. a threonine to be replaced by a methionine). Three basic methods for site-directed mutagenesis are often employed. These are cassette mutagenesis (Wells et al., Gene 34:315-23 (1985), the entirety of which is herein incorporated by reference), primer extension (Gilliam et al., Gene 12:129-137 (1980), the entirety of which is herein incorporated by reference); Zoller and Smith, Methods Enzymol. 100:468-500 (1983), the entirety of which is herein incorporated by reference; and Dalbadie-McFarland et al., Proc. Natl. Acad. Sci. (U.S.A.) 79:6409-6413 (1982), the entirety of which is herein incorporated by reference) and methods based upon PCR (Scharf et al., Science 233:1076-1078 (1986), the entirety of which is herein incorporated by reference; Higuchi et al., Nucleic Acids Res. 16:7351-7367 (1988), the entirety of which is herein incorporated by reference). Site-directed mutagenesis approaches are also described in European Patent 0 385 962, the entirety of which is herein incorporated by reference, European Patent 0 359 472, the entirety of which is herein incorporated by reference, and PCT Patent Application WO 93/07278, the entirety of which is herein incorporated by reference.

[0184] Site-directed mutagenesis strategies have been applied to plants for both in vitro as well as in vivo site-directed mutagenesis (Lanz et al., J. Biol. Chem. 266:9971-6 (1991), the entirety of which is herein incorporated by reference; Kovgan and Zhdanov, Biotekhnologiya 5:148-154; No. 207160n, Chemical Abstracts 110:225 (1989), the entirety of which is herein incorporated by reference; Ge et al., Proc. Natl. Acad. Sci. (U.S.A.) 86:4037-4041 (1989), the entirety of which is herein incorporated by reference, Zhu et al., J. Biol. Chem. 271:18494-18498 (1996), Chu et al., Biochemistry 33:6150-6157 (1994), the entirety of which is herein incorporated by reference, Small et al., EMBO J. 11: 1291-1296 (1992), the entirety of which is herein incorporated by reference, Cho et al., Mol. Biotechnol. 8:13-16 (1997), Kita et al., J. Biol. Chem. 271:26529-26535 (1996), the entirety of which is herein incorporated by reference, Jin et al., Mol. Microbiol. 7:555-562 (1993), the entirety of which is herein incorporated by reference, Hatfield and Vierstra, J. Biol. Chem. 267:14799-14803 (1992), the entirety of which is herein incorporated by reference, Zhao et al., Biochemistry 31:5093-5099 (1992), the entirety of which is herein incorporated by reference).

[0185] Any of the nucleic acid molecules of the present invention may either be modified by site-directed mutagenesis or used as, for example, nucleic acid molecules that are used to target other nucleic acid molecules for modification. It is understood that mutants with more than one altered nucleotide can be constructed using techniques that practitioners skilled in the art are familiar with such as isolating restriction fragments and ligating such fragments into an expression vector (see, for example, Sambrook et al., Molecular Cloning: A Laboratory Manual, Cold Spring Harbor Press (1989)).

[0186] Sequence-specific DNA-binding proteins play a role in the regulation of transcription. The isolation of recombinant cDNAs encoding these proteins facilitates the biochemical analysis of their structural and functional properties. Genes encoding such DNA-binding proteins have been isolated using classical genetics (Vollbrecht et al., Nature 350: 241-243 (1991), the entirety of which is herein incorporated by reference) and molecular biochemical approaches, including the screening of recombinant cDNA libraries with antibodies (Landschulz et al., Genes Dev. 2: 786-800 (1988), the entirety of which is herein incorporated by reference) or DNA probes (Bodner et al., Cell 55: 505-518 (1988), the entirety of which is herein incorporated by reference). In addition, an in situ screening procedure has been used and has facilitated the isolation of sequence-specific DNA-binding proteins from various plant species (Gilmartin et al., Plant Cell 4: 839-849 (1992), the entirety of which is herein incorporated by reference; Schindler et al., EMBO J. 11: 1261-1273 (1992) the entirety of which is herein incorporated by reference). An in situ screening protocol does not require the purification of the protein of interest (Vinson et al., Genes Dev. 2: 801-806 (1988), the entirety of which is herein incorporated by reference; Singh et al., Cell 52: 415-423 (1988), the entirety of which is herein incorporated by reference).

[0187] Steps may be employed to characterize DNA-protein interactions. The first is to identify promoter fragments that interact with DNA-binding proteins, to titrate binding activity, to determine the specificity of binding, and to determine whether a given DNA-binding activity can interact with related DNA sequences (Sambrook et al., Molecular Cloning: A Laboratory Manual, 2^{nd} edition. Cold Spring Harbor Laboratory Press, Cold Spring Harbor, N.Y. (1989). Electrophoretic mobility-shift assay is a widely used assay. The assay provides a simple, rapid, and sensitive method for detecting DNA-binding proteins based on the observation that the mobility of a DNA fragment through a nondenaturing, low-ionic strength polyacrylamide gel is retarded upon association with a DNA-binding protein (Fried and Crother, Nucleic Acids Res. 9: 6505-6525 (1981), the entirety of which is herein incorporated by reference). When one or more specific binding activities have been identified, the exact sequence of the DNA bound by the protein may be determined. Several procedures for characterizing protein/DNA-binding sites are used, including methylation and ethylation interference assays (Maxam and Gilbert, Methods Enzymol. 65: 499-560 (1980), the entirety of which is herein incorporated by reference; Wissman and Hillen, Methods Enzymol. 208: 365-379 (1991), the entirety of which is herein incorporated by reference) and footprinting techniques employing DNase I (Galas and Schmitz, Nucleic Acids Res. 5: 3157-3170 (1978), the entirety of which is herein incorporated by reference), 1,10-phenanthroline-copper ion methods (Sigman et al., Methods Enzymol. 208: 365-379 (1991), the entirety of which is herein incorporated by reference) or hydroxyl radical methods (Dixon et al., Methods Enzymol. 208: 380-413 (1991), the entirety of which is herein incorporated by reference). It is understood that one or more of the nucleic acid molecules of the present invention, preferably one or more of the EST nucleic acid molecules of the present invention may be utilized to identify a protein or fragment thereof that specifically binds to a nucleic acid molecule of the present invention. It is also understood that one or more of the protein molecules or fragments thereof of the present invention may be utilized to identify a nucleic acid molecule that specifically binds to it.

[0188] The two-hybrid system is based on the fact that many cellular functions are carried out by proteins that interact (physically) with one another. Two-hybrid systems have been used to probe the function of new proteins (Chien et al., Proc. Natl. Acad. Sci. (U.S.A.) 88: 9578-9582 (1991) the entirety of which is herein incorporated by reference; Durfee et al., Genes Dev. 7: 555-569 (1993) the entirety of which is herein incorporated by reference; Choi et al., Cell 78: 499-512 (1994), the entirety of which is herein incorporated by reference; Kranz et al., Genes Dev. 8: 313-327 (1994), the entirety of which is herein incorporated by reference).

[0189] Interaction mating techniques have facilitated a number of two-hybrid studies of protein-protein interaction. Interaction mating has been used to examine interactions between small sets of tens of proteins (Finley and Brent, Proc. Natl. Acad. Sci. (U.S.A.) 91: 12098-12984 (1994), the entirety of which is herein incorporated by reference), larger sets of hundreds of proteins, (Bendixen et al., Nucl. Acids Res. 22: 1778-1779 (1994), the entirety of which is herein incorporated by reference) and to comprehensively map proteins encoded by a small genome (Bartel et al., Nature Genetics 12: 72-77 (1996), the entirety of which is herein incorporated by reference). This technique utilizes proteins fused to the DNA-binding domain and proteins fused to the activation domain. They are expressed in two different haploid yeast strains of opposite mating type, and the strains are mated to determine if the two proteins interact. Mating occurs when haploid yeast strains come into contact and result in the fusion of the two haploids into a diploid yeast strain. An interaction can be determined by the activation of a two-hybrid reporter gene in the diploid strain. The primary advantage of this technique is that it reduces the number of yeast transformations needed to test individual interactions. It is understood that the protein-protein interactions of protein or fragments thereof of the present invention may be investigated using the two-hybrid system and that any of the nucleic acid molecules of the present invention that encode such proteins or fragments thereof may be used to transform yeast in the two-hybrid system.

[0190] Synechocystis 6803 is a photosynthetic Cyanobacterium capable of oxygenic photosynthesis as well as heterotrophic growth in the absence of light. The entire genome has been sequenced, and it is reported to have a circular genome size of 3.57 Mbp containing 3168 potential open reading frames. Open reading frames (ORFs) were identified based upon their homology to other reported ORFs and by using ORF identification computer programs. Sixteen hundred potential ORFs were assigned based on their homology to previously identified ORFs. Of these 1600 ORFs, 145 were identical to reported ORFs (Kaneko et al., DNA Research 3:109-36 (1996), herein incorporated by reference in its entirety).

[0191] Several prokaryote promoters have been used in Synechocystis to express heterologous genes including the tac, lac, and lambda phage promoters (Bryant (ed.), The Molecular Biology of Cyanobacteria, Kluwer Academic Publishers, (1994); Ferino and Chauvat, Gene 84:257-266 (1989), both of which are herein incorporated by reference in their entirety). Several bacterial origins of replication such as RSF1010 and ACYC are reported to replicate in Synechocystis (Mermet-Bouvier and Chauvat, Current Microbiology 28:145-148 (1994); Kuhlemeier et al., Mol. Gen. Genet. 184:249-254 (1981), both of which are herein incorporated by reference in their entirety).

[0192] Synechocystis has been used to study gene regulation by gene replacement through homologous recombination or by gene disruption using antibiotic resistance markers (Pakrasi et al., EMBO 7:325-332 (1988), herein incorporated by reference in its entirety). In such gene regulation studies, double reciprocal homologous regions of the host genome flanking the gene of interest recombine to stably integrate the gene of interest into the genome. The gene of interest can be expressed once that gene has been stably integrated into the genome. Biochemical analysis can be performed to study the effect of the replaced or deleted gene.

[0193] It is understood that the agents of the present invention may be employed in a Synechocystis system.

[0194] Exogenous genetic material may be transferred into a plant cell and the plant cell regenerated into a whole, fertile or sterile plant. Exogenous genetic material is any genetic material, whether naturally occurring or otherwise, from any source that is capable of being inserted into any organism. Such genetic material may be transferred into either monocotyledons and dicotyledons including but not limited to the crops, maize and soybean (See specifically, Chistou, Particle Bombardment for Genetic Engineering of Plants, pp. 63-69 (maize), pp 50-60 (soybean), Biotechnology Intelligence Unit. Academic Press, San Diego, Calif. (1996), the entirety of which is herein incorporated by reference and generally Chistou, Particle Bombardment for Genetic Engineering of plants, Biotechnology Intelligence Unit. Academic Press, San Diego, Calif. (1996), the entirety of which is herein incorporated by reference).

[0195] Transfer of a nucleic acid that encodes for a protein can result in overexpression of that protein in a transformed cell or transgenic plant. One or more of the proteins or fragments thereof encoded by nucleic acid molecules of the present invention may be overexpressed in a transformed cell or transformed plant. Such overexpression may be the result of transient or stable transfer of the exogenous material.

[0196] Exogenous genetic material may be transferred into a plant cell by the use of a DNA vector or construct designed for such a purpose. Design of such a vector is generally within the skill of the art (See, Plant Molecular Biology: A Laboratory Manual eds. Clark, Springer, N.Y. (1997), the entirety of which is herein incorporated by reference).

[0197] A construct or vector may include a plant promoter to express the protein or protein fragment of choice. A number of promoters which are active in plant cells have been described in the literature. These include the nopaline synthase (NOS) promoter (Ebert et al., Proc. Natl. Acad. Sci. (U.S.A.) 84:5745-5749 (1987), the entirety of which is herein incorporated by reference), the octopine synthase (OCS) promoter (which are carried on tumor-inducing plasmids of Agrobacterium tumefaciens), the caulimovirus promoters such as the cauliflower mosaic virus (CaMV) 19S promoter (Lawton et al., Plant Mol. Biol. 9:315-324 (1987), the entirety of which is herein incorporated by reference) and the CAMV 35S promoter (Odell et al., Nature 313:810-812 (1985), the entirety of which is herein incorporated by reference), the figwort mosaic virus 35S-promoter, the light-inducible promoter from the small subunit of ribulose-1,5-bis-phosphate carboxylase (ssRUBISCO), the Adh promoter (Walker et al., Proc. Natl. Acad. Sci. (U.S.A.) 84:6624-6628 (1987), the entirety of which is herein incorporated by reference), the sucrose synthase promoter (Yang et al., Proc. Natl. Acad. Sci. (U.S.A.) 87:4144-4148 (1990), the entirety of which is herein incorporated by reference), the R gene complex promoter (Chandler et al., The Plant Cell 1:1175-1183 (1989), the entirety of which is herein incorporated by reference), and the chlorophyll a/b binding protein gene promoter, etc. These promoters have been used to create DNA constructs which have been expressed in plants; see, e.g., PCT publication WO 84/02913, herein incorporated by reference in its entirety.

[0198] Promoters which are known or are found to cause transcription of DNA in plant cells can be used in the present invention. Such promoters may be obtained from a variety of sources such as plants and plant viruses. It is preferred that the particular promoter selected should be capable of causing sufficient expression to result in the production of an effective amount of a protein to cause the desired phenotype. In addition to promoters which are known to cause transcription of DNA in plant cells, other promoters may be identified for use in the current invention by screening a plant cDNA library for genes which are selectively or preferably expressed in the target tissues or cells.

[0199] For the purpose of expression in source tissues of the plant, such as the leaf, seed, root or stem, it is preferred that the promoters utilized in the present invention have relatively high expression in these specific tissues. For this purpose, one may choose from a number of promoters for genes with tissue- or cell-specific or -enhanced expression. Examples of such promoters reported in the literature include the chloroplast glutamine synthetase GS2 promoter from pea (Edwards et al., Proc. Natl. Acad. Sci. (U.S.A.) 87:3459-3463 (1990), herein incorporated by reference in its entirety), the chloroplast fructose-1,6-biphosphatase (FBPase) promoter from wheat (Lloyd et al., Mol. Gen. Genet. 225:209-216 (1991), herein incorporated by reference in its entirety), the nuclear photosynthetic ST-LS1 promoter from potato (Stockhaus et al., EMBO J. 8:2445-2451 (1989), herein incorporated by reference in its entirety), the phenylalanine ammonia-lyase (PAL) promoter and the chalcone synthase (CHS) promoter from Arabidopsis thaliana. Also reported to be active in photosynthetically active tissues are the ribulose-1,5-bisphosphate carboxylase (RbcS) promoter from eastern larch (Larix laricina), the promoter for the cab gene, cab6, from pine (Yamamoto et al., Plant Cell Physiol. 35:773-778 (1994), herein incorporated by reference in its entirety), the promoter for the Cab-1 gene from wheat (Fejes et al., Plant Mol. Biol. 15:921-932 (1990), herein incorporated by reference in its entirety), the promoter for the CAB-1 gene from spinach (Lubberstedt et al., Plant Physiol. 104:997-1006 (1994), herein incorporated by reference in its entirety), the promoter for the cabIR gene from rice (Luan et al., Plant Cell. 4:971-981 (1992), the entirety of which is herein incorporated by reference), the pyruvate, orthophosphate dikinase (PPDK) promoter from maize (Matsuoka et al., Proc. Natl. Acad. Sci. (U.S.A.) 90: 9586-9590 (1993), herein incorporated by reference in its entirety), the promoter for the tobacco Lhcb1*2 gene (Cerdan et al., Plant Mol. Biol. 33: 245-255. (1997), herein incorporated by reference in its entirety), the Arabidopsis thaliana SUC2 sucrose-H+ symporter promoter (Truemit et al., Planta. 196: 564-570 (1995), herein incorporated by reference in its entirety), and the promoter for the thylacoid membrane proteins from spinach (psaD, psaF, psaE, PC, FNR, atpC, atpD, cab, rbcS). Other promoters for the chlorophyll alb-binding proteins may also be utilized in the present invention, such as the promoters for LhcB gene and PsbP gene from white mustard (Sinapis alba; Kretsch et al., Plant Mol. Biol. 28: 219-229 (1995), the entirety of which is herein incorporated by reference).

[0200] For the purpose of expression in sink tissues of the plant, such as the tuber of the potato plant, the fruit of tomato, or the seed of maize, wheat, rice, and barley, it is preferred that the promoters utilized in the present invention have relatively high expression in these specific tissues: A number of promoters for genes with tuber-specific or -enhanced expression are known, including the class I patatin promoter (Bevan et al., EMBO J. 8: 1899-1906 (1986); Jefferson et al., Plant Mol. Biol. 14: 995-1006 (1990), both of which are herein incorporated by reference in its entirety), the promoter for the potato tuber ADPGPP genes, both the large and small subunits, the sucrose synthase promoter (Salanoubat and Belliard, Gene. 60: 47-56 (1987), Salanoubat and Belliard, Gene. 84: 181-185 (1989), both of which are incorporated by reference in their entirety), the promoter for the major tuber proteins including the 22 kd protein complexes and proteinase inhibitors (Hannapel, Plant Physiol 101: 703-704 (1993), herein incorporated by reference in its entirety), the promoter for the granule bound starch synthase gene (GBSS) (Visser et al., Plant Mol. Biol. 17: 691-699 (1991), herein incorporated by reference in its entirety), and other class I and II patatins promoters (Koster-Topfer et al., Mol Gen Genet. 219: 390-396 (1989); Mignery et al., Gene. 62: 27-44 (1988), both of which are herein incorporated by reference in their entirety).

[0201] Other promoters can also be used to express a fructose 1,6 bisphosphate aldolase gene in specific tissues, such as seeds or fruits. The promoter for β-conglycinin (Chen et al., Dev. Genet. 10: 112-122 (1989), herein incorporated by reference in its entirety) or other seed-specific promoters such as the napin and phaseolin promoters, can be used. The zeins are a group of storage proteins found in maize endosperm. Genomic clones for zein genes have been isolated (Pedersen et al., Cell 29: 1015-1026 (1982), herein incorporated by reference in its entirety), and the promoters from these clones, including the 15 kD, 16 kD, 19 kD, 22 kD, 27 kD, and gamma genes, could also be used. Other promoters known to function, for example, in maize, include the promoters for the following genes: waxy, Brittle, Shrunken 2, Branching enzymes I and II, starch synthases, debranching enzymes, oleosins, glutelins, and sucrose synthases. A particularly preferred promoter for maize endosperm expression is the promoter for the glutelin gene from rice, more particularly the Osgt-1 promoter (Zheng et al., Mol. Cell Biol. 13: 5829-5842 (1993), herein incorporated by reference in its entirety). Examples of promoters suitable for expression in wheat include those promoters for the ADPglucose pyrophosphorylase (ADPGPP) subunits, the granule bound and other starch synthases, the branching and debranching enzymes, the embryogenesis-abundant proteins, the gliadins, and the glutenins. Examples of such promoters in rice include those promoters for the ADPGPP subunits, the granule bound and other starch synthases, the branching enzymes, the debranching enzymes, sucrose synthases, and the glutelins. A particularly preferred promoter is the promoter for rice glutelin, Osgt-1. Examples of such promoters for barley include those for the ADPGPP subunits, the granule bound and other starch synthases, the branching enzymes, the debranching enzymes, sucrose synthases, the hordeins, the embryo globulins, and the aleurone specific proteins.

[0202] Root specific promoters may also be used. An example of such a promoter is the promoter for the acid chitinase gene (Samac et al., Plant Mol. Biol. 25: 587-596 (1994), the entirety of which is herein incorporated by reference). Expression in root tissue could also be accomplished by utilizing the root specific subdomains of the CaMV35S promoter that have been identified (Lam et al., Proc. Natl. Acad. Sci. (U.S.A.) 86:7890-7894 (1989), herein incorporated by reference in its entirety). Other root cell specific promoters include those reported by Conkling et al. (Conkling et al., Plant Physiol. 93:1203-1211 (1990), the entirety of which is herein incorporated by reference).

[0203] Additional promoters that may be utilized are described, for example, in U.S. Pat. Nos. 5,378,619, 5,391,725, 5,428,147, 5,447,858, 5,608,144, 5,608,144, 5,614,399, 5,633,441, 5,633,435, and 4,633,436, all of which are herein incorporated in their entirety. In addition, a tissue specific enhancer may be used (Fromm et al., The Plant Cell 1:977-984 (1989), the entirety of which is herein incorporated by reference).

[0204] Constructs or vectors may also include, with the coding region of interest, a nucleic acid sequence that acts, in whole or in part, to terminate transcription of that region. For example, such sequences have been isolated including the Tr7 3′ sequence and the nos 3′ sequence (Ingelbrecht et al., The Plant Cell 1:671-680 (1989), the entirety of which is herein incorporated by reference; Bevan et al., Nucleic Acids Res. 11:369-385 (1983), the entirety of which is herein incorporated by reference), or the like.

[0205] A vector or construct may also include regulatory elements. Examples of such include the Adh intron 1 (Callis et al., Genes and Develop. 1:1183-1200 (1987), the entirety of which is herein incorporated by reference), the sucrose synthase intron (Vasil et al., Plant Physiol. 91:1575-1579 (1989), the entirety of which is herein incorporated by reference) and the TMV omega element (Gallie et al., The Plant Cell 1:301-311 (1989), the entirety of which is herein incorporated by reference). These and other regulatory elements may be included when appropriate.

[0206] A vector or construct may also include a selectable marker. Selectable markers may also be used to select for plants or plant cells that contain the exogenous genetic material. Examples of such include, but are not limited to, a neo gene (Potrykus et al., Mol. Gen. Genet. 199:183-188 (1985), the entirety of which is herein incorporated by reference) which codes for kanamycin resistance and can be selected for using kanamycin, G418, etc.; a bar gene which codes for bialaphos resistance; a mutant EPSP synthase gene (Hinchee et al., Bio/Technology 6:915-922 (1988), the entirety of which is herein incorporated by reference) which encodes glyphosate resistance; a nitrilase gene which confers resistance to bromoxynil (Stalker et al., J. Biol. Chem. 263:6310-6314 (1988), the entirety of which is herein incorporated by reference); a mutant acetolactate synthase gene (ALS) which confers imidazolinone or sulphonylurea resistance (European Patent Application 154,204 (Sep. 11, 1985), the entirety of which is herein incorporated by reference); and a methotrexate resistant DHFR gene (Thillet et al., J. Biol. Chem. 263:12500-12508 (1988), the entirety of which is herein incorporated by reference).

[0207] A vector or construct may also include a transit peptide. Incorporation of a suitable chloroplast transit peptide may also be employed (European Patent Application Publication Number 0218571, the entirety of which is herein incorporated by reference). Translational enhancers may also be incorporated as part of the vector DNA. DNA constructs could contain one or more 5′ non-translated leader sequences which may serve to enhance expression of the gene products from the resulting mRNA transcripts. Such sequences may be derived from the promoter selected to express the gene or can be specifically modified to increase translation of the mRNA. Such regions may also be obtained from viral RNAs, from suitable eukaryotic genes, or from a synthetic gene sequence. For a review of optimizing expression of transgenes, see Koziel et al., Plant Mol. Biol. 32:393-405 (1996), the entirety of which is herein incorporated by reference.

[0208] A vector or construct may also include a screenable marker. Screenable markers may be used to monitor expression. Exemplary screenable markers include a glucuronidase or uidA gene (GUS) which encodes an enzyme for which various chromogenic substrates are known (Jefferson, Plant Mol. Biol, Rep. 5: 387-405 (1987), the entirety of which is herein incorporated by reference; Jefferson et al., EMBO J. 6: 3901-3907 (1987), the entirety of which is herein incorporated by reference); an R-locus gene, which encodes a product that regulates the production of anthocyanin pigments (red color) in plant tissues ((Dellaporta et al., Stadler Symposium 11:263-282 (1988), the entirety of which is herein incorporated by reference); a β-lactamase gene (Sutcliffe et al., Proc. Natl. Acad. Sci. (U.S.A.) 75: 3737-3741 (1978), the entirety of which is herein incorporated by reference), a gene which encodes an enzyme for which various chromogenic substrates are known (e.g., PADAC, a chromogenic cephalosporin); a luciferase gene (Ow et al., Science 234: 856-859 (1986), the entirety of which is herein incorporated by reference) a xylE gene (Zukowsky et al., Proc. Natl. Acad. Sci. (U.S.A.) 80:1101-1105 (1983), the entirety of which is herein incorporated by reference) which encodes a catechol dioxygenase that can convert chromogenic catechols; an α-amylase gene (Ikatu et al., Bio/Technol. 8:241-242 (1990), the entirety of which is herein incorporated by reference); a tyrosinase gene (Katz et al., J. Gen. Microbiol. 129:2703-2714 (1983), the entirety of which is herein incorporated by reference) which encodes an enzyme capable of oxidizing tyrosine to DOPA and dopaquinone which in turn condenses to melanin; an α-galactosidase, which will turn a chromogenic α-galactose substrate.

[0209] Included within the terms “selectable or screenable marker genes” are also genes which encode a scriptable marker whose secretion can be detected as a means of identifying or selecting for transformed cells. Examples include markers which encode a secretable antigen that can be identified by antibody interaction, or even secretable enzymes which can be detected catalytically. Secretable proteins fall into a number of classes, including small, diffusible proteins detectable, e.g., by ELISA, small active enzymes detectable in extracellular solution (e.g., α-amylase, β-lactamase, phosphinothricin transferase), or proteins which are inserted or trapped in the cell wall (such as proteins which include a leader sequence such as that found in the expression unit of extension or tobacco PR-S). Other possible selectable and/or screenable marker genes will be apparent to those of skill in the art.

[0210] Methods and compositions for transforming a bacteria and other microorganisms are known in the art (see for example Sambrook et al., Molecular Cloning: A Laboratory Manual, Second Edition, Cold Spring Harbor Laboratory Press, Cold Spring Harbor, N.Y., (1989), the entirety of which is herein incorporated by reference).

[0211] There are many methods for introducing transforming nucleic acid molecules into plant cells. Suitable methods are believed to include virtually any method by which nucleic acid molecules may be introduced into a cell, such as by Agrobacterium infection or direct delivery of nucleic acid molecules such as, for example, by PEG-mediated transformation, by electroporation or by acceleration of DNA coated particles, etc. (Pottykus, Ann. Rev. Plant Physiol. Plant Mol. Biol. 42:205-225 (1991), the entirety of which is herein incorporated by reference; Vasil, Plant Mol. Biol. 25: 925-937 (1994), the entirety of which is herein incorporated by reference. For example, electroporation has been used to transform maize protoplasts (Fromm et al., Nature 312:791-793 (1986), the entirety of which is herein incorporated by reference).

[0212] Other vector systems suitable for introducing transforming DNA into a host plant cell includes but is not limited to binary artificial chromosome (BIBAC) vectors (Hamilton et al., Gene 200:107-116, (1997), the entirety of which is herein incorporated by reference, and transfection with RNA viral vectors (Della-Cioppa et al., Ann. N.Y. Acad. Sci. (1996), 792 (Engineering Plants for Commercial Products and Applications), 57-61, the entirety of which is herein incorporated by reference.

[0213] Technology for introduction of DNA into cells is well known to those of skill in the art. Four general methods for delivering a gene into cells have been described: (1) chemical methods (Graham and van der Eb, Virology, 54:536-539 (1973), the entirety of which is herein incorporated by reference); (2) physical methods such as microinjection (Capecchi, Cell 22:479-488 (1980), electroporation (Wong and Neumann, Biochem. Biophys. Res. Commun., 107:584-587 (1982); Fromm et al., Proc. Natl. Acad. Sci. USA, 82:5824-5828 (1985); U.S. Pat. No. 5,384,253; and the gene gun (Johnston and Tang, Methods Cell Biol. 43:353-365 (1994), all of which the entirety is herein incorporated by reference; (3) viral vectors (Clapp, Clin. Perinatol., 20:155-168 (1993); Lu et al., J. Exp. Med., 178:2089-2096 (1993); Eglitis and Anderson, Biotechniques, 6:608-614 (1988), all of which the entirety is herein incorporated by reference); and (4) receptor-mediated mechanisms (Curiel et al., Hum. Gen. Ther., 3:147-154 (1992); Wagner et al., Proc. Natl. Acad. Sci. USA, 89:6099-6103 (1992), all of which the entirety is herein incorporated by reference).

[0214] Acceleration methods that may be used include, for example, microprojectile bombardment and the like. One example of a method for delivering transforming nucleic acid molecules to plant cells is microprojectile bombardment. This method has been reviewed by Yang and Christou, eds., Particle Bombardment Technology for Gene Transfer, Oxford Press, Oxford, England (1994), the entirety of which is herein incorporated by reference). Non-biological particles (microprojectiles) that may be coated with nucleic acids and delivered into cells by a propelling force. Exemplary particles include those comprised of tungsten, gold, platinum, and the like.

[0215] A particular advantage of microprojectile bombardment, in addition to it being an effective means of reproducibly, and stably transforming monocotyledons, is that neither the isolation of protoplasts (Cristou et al., Plant Physiol. 87:671-674 (1988), the entirety of which is herein incorporated by reference) nor the susceptibility of Agrobacterium infection is required. An illustrative embodiment of a method for delivering DNA into maize cells by acceleration is a biolistics g-particle delivery system, which can be used to propel particles coated with DNA through a screen, such as a stainless steel or Nytex screen, onto a filter surface covered with corn cells cultured in suspension. Gordon-Kamm et al., describes the basic procedure for coating tungsten particles with DNA (Gordon-Kamm et al., Plant Cell 2: 603-618 (1990), the entirety of which is herein incorporated by reference). The screen disperses the tungsten nucleic acid particles so that they are not delivered to the recipient cells in large aggregates. A particle delivery system suitable for use with the present invention is the helium acceleration PDS-1000/He gun which is available from Bio-Rad Laboratories (Bio-Rad, Hercules, Calif.) (Sanford et al., Technique 3:3-16 (1991), the entirety of which is herein incorporated by reference).

[0216] For the bombardment, cells in suspension may be concentrated on filters. Filters containing the cells to be bombarded are positioned at an appropriate distance below the microprojectile stopping plate. If desired, one or more screens are also positioned between the gun and the cells to be bombarded.

[0217] Alternatively, immature embryos or other target cells may be arranged on solid culture medium. The cells to be bombarded are positioned at an appropriate distance below the macroprojectile stopping plate. If desired, one or more screens are also positioned between the acceleration device and the cells to be bombarded. Through the use of techniques set forth herein one may obtain up to 1000 or more foci of cells transiently expressing a marker gene. The number of cells in a focus which express the exogenous gene product 48 hours post-bombardment often range from one to ten and average one to three.

[0218] In bombardment transformation, one may optimize the prebombardment culturing conditions and the bombardment parameters to yield the maximum numbers of stable transformants. Both the physical and biological parameters for bombardment are important in this technology. Physical factors are those that involve manipulating the DNA/microprojectile precipitate or those that affect the flight and velocity of either the macro- or microprojectiles. Biological factors include all steps involved in manipulation of cells before and immediately after bombardment, the osmotic adjustment of target cells to help alleviate the trauma associated with bombardment, and also the nature of the transforming DNA, such as linearized DNA or intact supercoiled plasmids. It is believed that pre-bombardment manipulations are especially important for successful transformation of immature embryos. In another alternative embodiment, plastids can be stably transformed. Methods disclosed for plastid transformation in higher plants include the particle gun delivery of DNA containing a selectable marker and targeting of the DNA to the plastid genome through homologous recombination (Svab et al., Proc. Natli Acad. Sci. (U.S.A.) 87:8526-8530 (1990); Svab and Maliga, Proc. Natl. Acad. Sci. (U.S.A.) 90:913-917 (1993); Staub and Maliga, EMBO J. 12:601-606 (1993); U.S. Pat. Nos. 5,451,513 and 5,545,818, all of which are herein incorporated by reference in their entirety).

[0219] Accordingly, it is contemplated that one may wish to adjust various aspects of the bombardment parameters in small-scale studies to fully optimize the conditions. One may particularly wish to adjust physical parameters such as gap distance, flight distance, tissue distance, and helium pressure. One may also minimize the trauma reduction factors by modifying conditions which influence the physiological state of the recipient cells and which may therefore influence transformation and integration efficiencies. For example, the osmotic state, tissue hydration and the subculture stage or cell cycle of the recipient cells may be adjusted for optimum transformation. The execution of other routine adjustments will be known to those of skill in the art in light of the present disclosure.

[0220] Agrobacterium-mediated transfer is a widely applicable system for introducing genes into plant cells because the DNA can be introduced into whole plant tissues, thereby bypassing the need for regeneration of an intact plant from a protoplast. The use of Agrobacterium-mediated plant integrating vectors to introduce DNA into plant cells is well known in the art. See, for example the methods described (Fraley et al., Biotechnology 3:629-635 (1985); Rogers et al., Meth. In Enzymol, 153:253-277 (1987), both of which are herein incorporated by reference in their entirety. Further, the integration of the Ti-DNA is a relatively precise process resulting in few rearrangements. The region of DNA to be transferred is defined by the border sequences, and intervening DNA is usually inserted into the plant genome as described (Spielmann et al., Mol. Gen. Genet., 205:34 (1986), the entirety of which is herein incorporated by reference).

[0221] Modern Agrobacterium transformation vectors are capable of replication in E. coli as well as Agrobacterium, allowing for convenient manipulations as described (Klee et al., In: Plant DNA Infectious Agents, T. Hohn and J. Schell, eds., Springer-Verlag, New York, pp. 179-203 (1985), the entirety of which is herein incorporated by reference. Moreover, recent technological advances in vectors for Agrobacterium-mediated gene transfer have improved the arrangement of genes and restriction sites in the vectors to facilitate construction of vectors capable of expressing various polypeptide coding genes. The vectors described have convenient multi-linker regions flanked by a promoter and a polyadenylation site for direct expression of inserted polypeptide coding genes and are suitable for present purposes (Rogers et al., Meth. In Enzymol., 153:253-277 (1987), the entirety of which is herein incorporated by reference). In addition, Agrobacterium containing both armed and disarmed Ti genes can be used for the transformations. In those plant strains where Agrobacterium-mediated transformation is efficient, it is the method of choice because of the facile and defined nature of the gene transfer.

[0222] A transgenic plant formed using Agrobacterium transformation methods typically contains a single gene on one chromosome. Such transgenic plants can be referred to as being heterozygous for the added gene. More preferred is a transgenic plant that is homozygous for the added structural gene; i.e., a transgenic plant that contains two added genes, one gene at the same locus on each chromosome of a chromosome pair. A homozygous transgenic plant can be obtained by sexually mating (selfing) an independent segregant transgenic plant that contains a single added gene, germinating some of the seed produced and analyzing the resulting plants produced for the gene of interest.

[0223] It is also to be understood that two different transgenic plants can also be mated to produce offspring that contain two independently segregating added, exogenous genes. Selfing of appropriate progeny can produce plants that are homozygous for both added, exogenous genes that encode a polypeptide of interest. Backcrossing to a parental plant and out-crossing with a non-transgenic plant are also contemplated, as is vegetative propagation.

[0224] Transformation of plant protoplasts can be achieved using methods based on calcium phosphate precipitation, polyethylene glycol treatment, electroporation, and combinations of these treatments. See for example (Potrykus et al., Mol. Gen. Genet., 205: 193-200 (1986); Lorz et al., Mol. Gen. Genet., 199:178, (1985); Fromm et al., Nature, 319:791, (1986); Uchimiya et al., Mol. Gen. Genet.: 204:204, (1986); Callis et al., Genes and Development, 1183, (1987); Marcotte et al., Nature, 335:454, (1988), all of which the entirety is herein incorporated by reference).

[0225] Application of these systems to different plant strains depends upon the ability to regenerate that particular plant strain from protoplasts. Illustrative methods for the regeneration of cereals from protoplasts are described (Fujimura et al., Plant Tissue Culture Letters, 2:74, (1985); Toriyama et al., Theor Appl. Genet. 205:34. (1986); Yamada et al., Plant Cell Rep., 4:85, (1986); Abdullah et al., Biotechnology, 4:1087, (1986), all of which the entirety is herein incorporated by reference).

[0226] To transform plant strains that cannot be successfully regenerated from protoplasts, other ways to introduce DNA into intact cells or tissues can be utilized. For example, regeneration of cereals from immature embryos or explants can be effected as described (Vasil, Biotechnology, 6:397, (1988), the entirety of which is herein incorporated by reference). In addition, “particle gun” or high-velocity microprojectile technology can be utilized (Vasil et al., Bio/Technology 10:667, (1992), the entirety of which is herein incorporated by reference).

[0227] Using the latter technology, DNA is carried through the cell wall and into the cytoplasm on the surface of small metal particles as described (Klein et al., Nature, 328:70, (1987); Klein et al., Proc. Natl. Acad. Sci. USA, 85:8502-8505, (1988); McCabe et al., Biotechnology, 6:923, (1988), all of which the entirety is herein incorporated by reference). The metal particles penetrate through several layers of cells and thus allow the transformation of cells within tissue explants.

[0228] Other methods of cell transformation can also be used and include but are not limited to introduction of DNA into plants by direct DNA transfer into pollen (Zhou et al., Methods in Enzymology, 101:433, (1983); Hess et al., Intern Rev. Cytol., 107:367, (1987); Luo et al., Plant Mol Biol. Reporter, 6:165, (1988), all of which the entirety is herein incorporated by reference), by direct injection of DNA into reproductive organs of a plant (Pena et al., Nature, 325:274, (1987), the entirety of which is herein incorporated by reference), or by direct injection of DNA into the cells of immature embryos followed by the rehydration of dessicated embryos (Neuhaus et al., Theor. Appl. Genet., 75:30, (1987), the entirety of which is herein incorporated by reference).

[0229] The regeneration, development, and cultivation of plants from single plant protoplast transformants or from various transformed explants is well known in the art (Weissbach and Weissbach, In: Methods for Plant Molecular Biology, (Eds.), Academic Press, Inc. San Diego, Calif., (1988), the entirety of which is herein incorporated by reference). This regeneration and growth process typically includes the steps of selection of transformed cells, culturing those individualized cells through the usual stages of embryonic development through the rooted plantlet stage. Transgenic embryos and seeds are similarly regenerated. The resulting transgenic rooted shoots are thereafter planted in an appropriate plant growth medium such as soil.

[0230] The development or regeneration of plants containing the foreign, exogenous gene that encodes a protein of interest is well known in the art. Preferably, the regenerated plants are self-pollinated to provide homozygous transgenic plants, as discussed before. Otherwise, pollen obtained from the regenerated plants is crossed to seed-grown plants of agronomically important lines. Conversely, pollen from plants of these important lines is used to pollinate regenerated plants. A transgenic plant of the present invention containing a desired polypeptide is cultivated using methods well known to one skilled in the art.

[0231] There are a variety of methods for the regeneration of plants from plant tissue. The particular method of regeneration will depend on the starting plant tissue and the particular plant species to be regenerated.

[0232] Methods for transforming dicots, primarily by use of Agrobacterium tumefaciens, and obtaining transgenic plants have been published for cotton (U.S. Pat. No. 5,004,863, U.S. Pat. No. 5,159,135, U.S. Pat. No. 5,518,908, all of which the entirety is herein incorporated by reference); soybean (U.S. Pat. No. 5,569,834, U.S. Pat. No. 5,416,011, McCabe et al., Biotechnology 6:923, (1988), Christou et al., Plant Physiol., 87:671-674 (1988), all of which the entirety is herein incorporated by reference); Brassica (U.S. Pat. No. 5,463,174, the entirety of which is herein incorporated by reference); peanut (Cheng et al., Plant Cell Rep. 15: 653-657 (1996), McKently et al., Plant Cell Rep. 14:699-703 (1995), all of which the entirety is herein incorporated by reference); papaya (Yang et al., (1996), the entirety of which is herein incorporated by reference); pea (Grant et al., Plant Cell Rep. 15:254-258, (1995), the entirety of which is herein incorporated by reference).

[0233] Transformation of monocotyledons using electroporation, particle bombardment, and Agrobacterium have also been reported. Transformation and plant regeneration have been achieved in asparagus (Bytebier et al., Proc. Natl. Acad. Sci. USA 84:5345, (1987), the entirety of which is herein incorporated by reference); barley (Wan and Lemaux, Plant Physiol 104:37, (1994), the entirety of which is herein incorporated by reference); maize (Rhodes et al., Science 240: 204, (1988), Gordon-Kamm et al., Plant Cell, 2:603, (1990), Fromm et al., Bio/Technology 8:833, (1990), Koziel et al., Bio/Technology 11:194, (1993), Armstrong et al., Crop Science 35:550-557, (1995), all of which the entirety is herein incorporated by reference); oat (Somers et al., Bio/Technology, 10:1589, (1992), the entirety of which is herein incorporated by reference); orchardgrass (Horn et al., Plant Cell Rep. 7:469, (1988), the entirety of which is herein incorporated by reference); rice (Toriyama et al., Theor Appl. Genet. 205:34, (1986); Park et al., Plant Mol. Biol., 32: 1135-1148, (1996); Abedinia et al., Aust. J. Plant Physiol. 24: 133-141, (1997); Zhang and Wu, Theor. Appl. Genet. 76:835, (1988); Zhang et al. Plant Cell Rep. 7:379, (1988); Battraw and Hall, Plant Sci. 86:191-202, (1992); Christou et al., Bio/Technology 9:957, (1991), all of which the entirety is herein incorporated by reference); sugarcane (Bower and Birch, Plant J. 2:409, (1992), the entirety of which is herein incorporated by reference); tall fescue (Wang et al., Bio/Technology 10:691, (1992), the entirety of which is herein incorporated by reference), and wheat (Vasil et al., Bio/Technology 10:667, (1992), the entirety of which is herein incorporated by reference; U.S. Pat. No. 5,631,152, the entirety of which is herein incorporated by reference.

[0234] Assays for gene expression based on the transient expression of cloned nucleic acid constructs have been developed by introducing the nucleic acid molecules into plant cells by polyethylene glycol treatment, electroporation, or particle bombardment (Marcotte et al., Nature, 335: 454-457 (1988), the entirety of which is herein incorporated by reference; Marcotte et al., Plant Cell, 1: 523-532 (1989), the entirety of which is herein incorporated by reference; McCarty et al., Cell 66: 895-905 (1991), the entirety of which is herein incorporated by reference; Hattori et al., Genes Dev. 6: 609-618 (1992), the entirety of which is herein incorporated by reference; Goff et al., EMBO J. 9: 2517-2522 (1990), the entirety of which is herein incorporated by reference). Transient expression systems may be used to functionally dissect gene constructs (See generally, Mailga et al., Methods in Plant Molecular Biology, Cold Spring Harbor Press (1995)).

[0235] Any of the nucleic acid molecules of the present invention may be introduced into a plant cell in a permanent or transient manner in combination with other genetic elements such as vectors, promoters enhancers etc. Further any of the nucleic acid molecules of the present invention may be introduced into a plant cell in a manner that allows for over expression of the protein or fragment thereof encoded by the nucleic acid molecule.

[0236] Cosuppression is the reduction in expression levels, usually at the level of RNA, of a particular endogenous gene or gene family by the expression of a homologous sense construct that is capable of transcribing mRNA of the same strandedness as the transcript of the endogenous gene (Napoli et al., Plant Cell 2: 279-289 (1990), the entirety of which is herein incorporated by reference; van der Krol et al., Plant Cell 2: 291-299 (1990), the entirety of which is herein incorporated by reference). Cosuppression may result from stable transformation with a single copy nucleic acid molecule that is homologous to a nucleic acid sequence found with the cell (Prolls and Meyer, Plant J. 2:465-475 (1992), the entirety of which is herein incorporated by reference) or with multiple copies of a nucleic acid molecule that is homologous to a nucleic acid sequence found with the cell (Mittlesten et al., Mol. Gen. Genet. 244: 325-330 (1994), the entirety of which is herein incorporated by reference). Genes, even though different, linked to homologous promoters may result in the cosuppression of the linked genes (Vaucheret, C. R. Acad. Sci. III 316: 1471-1483 (1993), the entirety of which is herein incorporated by reference).

[0237] This technique has, for example been applied to generate white flowers from red petunia and tomatoes that do not ripen on the vine. Up to 50% of petunia transformants that contained a sense copy of the chalcone synthase (CHS) gene produced white flowers or floral sectors; this was as a result of the post-transcriptional loss of mRNA encoding CHS (Flavell, Proc. Natl. Acad. Sci. (U.S.A.) 91:3490-3496 (1994)), the entirety of which is herein incorporated by reference). Cosuppression may require the coordinate transcription of the transgene and the endogenous gene, and can be reset by a developmental control mechanism (Jorgensen, Trends Biotechnol, 8:340344 (1990), the entirety of which is herein incorporated by reference; Meins and Kunz, In: Gene Inactivation and Homologous Recombination in Plants (Paszkowski, J., ed.), pp. 335-348. Kluwer Academic, Netherlands (1994), the entirety of which is herein incorporated by reference).

[0238] It is understood that one or more of the nucleic acids of the present invention including those comprising SEQ ID NO:1 through SEQ ID NO: 91663 or complement thereof or fragments of either or other nucleic acid molecules of the present invention may be introduced into a plant cell and transcribed using an appropriate promoter with such transcription resulting in the co-suppression of an endogenous protein.

[0239] Antisense approaches are a way of preventing or reducing gene function by targeting the genetic material (Mol et al., FEBS Lett. 268: 427-430 (1990), the entirety of which is herein incorporated by reference). The objective of the antisense approach is to use a sequence complementary to the target gene to block its expression and create a mutant cell line or organism in which the level of a single chosen protein is selectively reduced or abolished. Antisense techniques have several advantages over other ‘reverse genetic’ approaches. The site of inactivation and its developmental effect can be manipulated by the choice of promoter for antisense genes or by the timing of external application or microinjection. Antisense can manipulate its specificity by selecting either unique regions of the target gene or regions where it shares homology to other related genes (Hiatt et al., In Genetic Engineering, Setlow (ed.), Vol. 11, New York: Plenum 49-63 (1989), the entirety of which is herein incorporated by reference).

[0240] The principle of regulation by antisense RNA is that RNA that is complementary to the target mRNA is introduced into cells, resulting in specific RNA:RNA duplexes being formed by base pairing between the antisense substrate and the target mRNA (Green et al., Annu. Rev. Biochem. 55: 569-597 (1986), the entirety of which is herein incorporated by reference). Under one embodiment, the process involves the introduction and expression of an antisense gene sequence. Such a sequence is one in which part or all of the normal gene sequences are placed under a promoter in inverted orientation so that the ‘wrong’ or complementary strand is transcribed into a noncoding antisense RNA that hybridizes with the target mRNA and interferes with its expression (Takayama and Inouye, Crit. Rev. Biochem. Mol. Biol. 25: 155-184 (1990), the entirety of which is herein incorporated by reference). An antisense vector is constructed by standard procedures and introduced into cells by transformation, transfection, electroporation, microinjection, or by infection, etc. The type of transformation and choice of vector will determine whether expression is transient or stable. The promoter used for the antisense gene may influence the level, timing, tissue, specificity, or inducibility of the antisense inhibition.

[0241] It is understood that protein synthesis activity in a plant cell may be reduced or depressed by growing a transformed plant cell containing a nucleic acid molecule whose non-transcribed strand encodes a protein or fragment thereof.

[0242] Antibodies have been expressed in plants (Hiatt et al., Nature 342:76-78 (1989), the entirety of which is herein incorporated by reference; Conrad and Fielder, Plant Mol. Biol. 26: 1023-1030 (1994), the entirety of which is herein incorporated by reference). cytoplasmic expression of a scFv (single-chain Fv antibodies) has been reported to delay infection by artichoke mottled crinkle virus. Transgenic plants that express antibodies directed against endogenous proteins may exhibit a physiological effect (Philips et al., EMBO J. 16: 4489-4496 (1997), the entirety of which is herein incorporated by reference; Marion-Poll, Trends in Plant Science 2: 447-448 (1997), the entirety of which is herein incorporated by reference). For example, expressed anti-abscisic antibodies reportedly result in a general perturbation of seed development (Philips et al., EMBO J. 16: 4489-4496 (1997)).

[0243] Antibodies that are catalytic may also be expressed in plants (abzymes). The principle behind abzymes is that since antibodies may be raised against many molecules, this recognition ability can be directed toward generating antibodies that bind transition states to force a chemical reaction forward (Persidas, Nature Biotechnology 15:1313-1315 (1997), the entirety of which is herein incorporated by reference; Baca et al., Ann. Rev. Biophys. Biomol. Struct. 26:461-493 (1997), the entirety of which is herein incorporated by reference). The catalytic abilities of abzymes may be enhanced by site directed mutagenesis. Examples of abzymes are, for example, set forth in U.S. Pat. No. 5,658,753; U.S. Pat. No. 5,632,990; U.S. Pat. No. 5,631,137; U.S. Pat. No. 5,602,015; U.S. Pat. No. 5,559,538; U.S. Pat. No. 5,576,174; U.S. Pat. No. 5,500,358; U.S. Pat. No. 5,318,897; U.S. Pat. No. 5,298,409; U.S. Pat. No. 5,258,289 and U.S. Pat. No. 5,194,585, all of which are herein incorporated in their entirety.

[0244] It is understood that any of the antibodies of the present invention may be expressed in plants and that such expression can result in a physiological effect. It is also understood that any of the expressed antibodies may be catalytic.

[0245] In addition to the above discussed procedures, practitioners are familiar with the standard resource materials which describe specific conditions and procedures for the construction, manipulation and isolation of macromolecules (e.g., DNA molecules, plasmids, etc.), generation of recombinant organisms and the screening and isolating of clones, (see for example, Sambrook et al., Molecular Cloning: A Laboratory Manual, Cold Spring Harbor Press (1989); Mailga et al., Methods in Plant Molecular Biology, Cold Spring Harbor Press (1995), the entirety of which is herein incorporated by reference; Birren et al., Genome Analysis: Analyzing DNA, 1, Cold Spring Harbor, N.Y., the entirety of which is herein incorporated by reference).

[0246] The nucleotide sequence provided in SEQ ID NO:1, through SEQ ID NO: 91663 or fragment thereof, or complement thereof, or a nucleotide sequence at least 90% identical, preferably 95%, identical even more preferably 99% or 100% identical to the sequence provided in SEQ ID NO:1 through SEQ ID NO: 91663 or fragment thereof, or complement thereof, can be “provided” in a variety of mediums to facilitate use fragment thereof. Such a medium can also provide a subset thereof in a form that allows a skilled artisan to examine the sequences.

[0247] In one application of this embodiment, a nucleotide sequence of the present invention can be recorded on computer readable media. As used herein, “computer readable media” refers to any medium that can be read and accessed directly by a computer. Such media include, but are not limited to: magnetic storage media, such as floppy discs, hard disc, storage medium, and magnetic tape: optical storage media such as CD-ROM; electrical storage media such as RAM and ROM; and hybrids of these categories such as magnetic/optical storage media. A skilled artisan can readily appreciate how any of the presently known computer readable mediums can be used to create a manufacture comprising computer readable medium having recorded thereon a nucleotide sequence of the present invention.

[0248] As used herein, “recorded” refers to a process for storing information on computer readable medium. A skilled artisan can readily adopt any of the presently known methods for recording information on computer readable medium to generate media comprising the nucleotide sequence information of the present invention. A variety of data storage structures are available to a skilled artisan for creating a computer readable medium having recorded thereon a nucleotide sequence of the present invention. The choice of the data storage structure will generally be based on the means chosen to access the stored information. In addition, a variety of data processor programs and formats can be used to store the nucleotide sequence information of the present invention on computer readable medium. The sequence information can be represented in a word processing text file, formatted in commercially-available software such as WordPerfect and Microsoft Word, or represented in the form of an ASCII file, stored in a database application, such as DB2, Sybase, Oracle, or the like. A skilled artisan can readily adapt any number of data processor structuring formats (e.g. text file or database) in order to obtain computer readable medium having recorded thereon the nucleotide sequence information of the present invention.

[0249] By providing one or more of nucleotide sequences of the present invention, a skilled artisan can routinely access the sequence information for a variety of purposes. Computer software is publicly available which allows a skilled artisan to access sequence information provided in a computer readable medium. The examples which follow demonstrate how software which implements the BLAST (Altschul et al., J. Mol. Biol. 215:403-410 (1990)) and BLAZE (Brutlag et al., Comp. Chem. 17:203-207 (1993), the entirety of which is herein incorporated by reference) search algorithms on a Sybase system can be used to identify open reading frames (ORFs) within the genome that contain homology to ORFs or proteins from other organisms. Such ORFs are protein-encoding fragments within the sequences of the present invention and are useful in producing commercially important proteins such as enzymes used in amino acid biosynthesis, metabolism, transcription, translation, RNA processing, nucleic acid and a protein degradation, protein modification, and DNA replication, restriction, modification, recombination, and repair.

[0250] The present invention further provides systems, particularly computer-based systems, which contain the sequence information described herein. Such systems are designed to identify commercially important fragments of the nucleic acid molecule of the present invention. As used herein, “a computer-based system” refers to the hardware means, software means, and data storage means used to analyze the nucleotide sequence information of the present invention. The minimum hardware means of the computer-based systems of the present invention comprises a central processing unit (CPU), input means, output means, and data storage means. A skilled artisan can readily appreciate that any one of the currently available computer-based system are suitable for use in the present invention.

[0251] As indicated above, the computer-based systems of the present invention comprise a data storage means having stored therein a nucleotide sequence of the present invention and the necessary hardware means and software means for supporting and implementing a search means. As used herein, “data storage means” refers to memory that can store nucleotide sequence information of the present invention, or a memory access means which can access manufactures having recorded thereon the nucleotide sequence information of the present invention. As used herein, “search means” refers to one or more programs which are implemented on the computer-based system to compare a target sequence or target structural motif with the sequence information stored within the data storage means. Search means are used to identify fragments or regions of the sequence of the present invention that match a particular target sequence or target motif. A variety of known algorithms are disclosed publicly and a variety of commercially available software for conducting search means are available and can be used in the computer-based systems of the present invention. Examples of such software include, but are not limited to, MacPattern (EMBL), BLASTIN and BLASTIX (NCBIA). One of the available algorithms or implementing software packages for conducting homology searches can be adapted for use in the present computer-based systems.

[0252] The most preferred sequence length of a target sequence is from about 10 to 100 amino acids or from about 30 to 300 nucleotide residues. However, it is well recognized that during searches for commercially important fragments of the nucleic acid molecules of the present invention, such as sequence fragments involved in gene expression and protein processing, may be of shorter length.

[0253] As used herein, “a target structural motif,” or “target motif,” refers to any rationally selected sequence or combination of sequences in which the sequences or sequence(s) are chosen based on a three-dimensional configuration which is formed upon the folding of the target motif. There are a variety of target motifs known in the art. Protein target motifs include, but are not limited to, enzymatic active sites and signal sequences. Nucleic acid target motifs include, but are not limited to, promoter sequences, cis elements, hairpin structures and inducible expression elements (protein binding sequences).

[0254] Thus, the present invention further provides an input means for receiving a target sequence, a data storage means for storing the target sequences of the present invention sequence identified using a search means as described above, and an output means for outputting the identified homologous sequences. A variety of structural formats for the input and output means can be used to input and output information in the computer-based systems of the present invention. A preferred format for an output means ranks fragments of the sequence of the present invention by varying degrees of homology to the target sequence or target motif. Such presentation provides a skilled artisan with a ranking of sequences which contain various amounts of the target sequence or target motif and identifies the degree of homology contained in the identified fragment.

[0255] A variety of comparing means can be used to compare a target sequence or target motif with the data storage means to identify sequence fragments sequence of the present invention. For example, implementing software which implement the BLAST and BLAZE algorithms (Altschul et al., J. Mol. Biol. 215:403-410 (1990)) can be used to identify open frames within the nucleic acid molecules of the present invention. A skilled artisan can readily recognize that any one of the publicly available homology search programs can be used as the search means for the computer-based systems of the present invention. Having now generally described the invention, the same will be more readily understood through reference to the following examples which are provided by way of illustration, and are not intended to be limiting of the present invention, unless specified.

### EXAMPLE 1

[0256] The SOYMON007 cDNA library is generated from soybean cultivar Asgrow 3244 (Asgrow Seed Company, Des Moines, Iowa U.S.A.) seed tissue. Seeds are harvested from plants grown in a field in Jerseyville 25 and 35 days after flowering. Seed pods are picked from all over the plant and the seeds are extracted from the pods. Approximately 4.4 g and 19.3 g of seeds are collected from the 25 and 35 days after flowering plants, respectively, placed into 14 ml polystyrene tubes and immediately immersed in dry ice. The harvested tissue is then stored at −80° C. until RNA preparation. Total RNA is prepared from the combination of 1.0 g and 3.4 g of seeds from 25 and 35 days after flowering plants and the cDNA library is constructed as described in Example 2. SEQ ID NO: 55541 through SEQ ID NO: 60924 are from SOYMON007.

[0257] The SOYMON015 cDNA is generated from soybean cultivar Asgrow 3244 (Asgrow Seed Company, Des Moines, Iowa U.S.A.) seed tissue harvested 45 and 55 days post-flowering. Seed pods from field grown plants are harvested 45 and 55 days after flowering. The seed pods are picked from all over the plant and the seeds extracted from the pods. Approximately 19 g and 31 g of seeds are harvested from the respective seed pods and immediately frozen in dry ice. The harvested tissue is then stored at −80° C. until RNA preparation. Total RNA is prepared from the combination of 0.75 g and 1.25 g of seeds from 45 and 55 days after flowering and the cDNA library is constructed as described in Example 2. SEQ ID NO: 60925 through SEQ ID NO: 66318 are from SOYMON015.

[0258] The SOYMON020 cDNA is generated from soybean cultivar Asgrow 3244 (Asgrow Seed Company, Des Moines, Iowa U.S.A.) seeds harvested from plants grown in a field in Jerseyville 65 and 75 days post-flowering. The seed pods are picked from all over the plant and the seeds extracted from the pods. Approximately 14 g and 31 g of seeds are harvested from the respective seed pods and immediately frozen in dry ice. The harvested tissue is then stored at −80° C. until RNA preparation. Total RNA is prepared from the combination of equal numbers of seeds from 65 and 75 days after flowering and the cDNA library is constructed as described in Example 2. SEQ ID NO: 66319 through SEQ ID NO: 72496 are from SOYMON020.

[0259] The SOYMON022 cDNA library is generated from soybean cultivar Asgrow 3244 (Asgrow Seed Company, Des Moines, Iowa U.S.A.) partially to fully opened flower tissue, which is harvested from plants grown in an environmental chamber. Seeds are planted in moist Metromix 350 medium at a depth of approximately 2 cm. Trays are placed in an environmental chamber set to a 12 h day/12 h night cycle, 29° C. daytime temperature, 24° C. night temperature and 70% relative humidity. Daytime light levels are measured at 450 mEinsteins/m². Soil is checked and watered daily to maintain even moisture conditions. Flowers are removed from the plant at the pedicel. Flower buds showing petal color to fully open flowers are selected for collection. A total of 3 g of flower tissue is harvested and immediately frozen in dry ice. The harvested tissue is then stored at −80° C. until RNA preparation. Total RNA is prepared from a mixture of opened and partially opened flowers and the cDNA library is constructed as described in Example 2. SEQ ID NO: 72497 through SEQ ID NO: 91663 are from SOYMON022.

[0260] The Soy51 (LIB3027) normalized cDNA library is prepared from SOYMON007, SOYMON015 and SOYMON020. Equal amounts of SOYMON007, SOYMON015, and SOYMON020 in the form of single stranded DNA, are mixed and used as the starting material for normalization.

[0261] Normalized libraries are made using essentially the Soares procedure (Soares et al., Proc. Natl. Acad. Sci. (U.S.A.) 91:9228-9232 (1994)). This approach is designed to reduce the initial 10,000-fold variation in individual cDNA frequencies to achieve abundances within one order of magnitude while maintaining the overall sequence complexity of the library. In the normalization process, the prevalence of high-abundance cDNA clones decreases dramatically, clones with mid-level abundance are relatively unaffected and clones for rare transcripts are effectively increased in abundance.

[0262] Normalized libraries are prepared from single-stranded DNA. Single-stranded DNA representing approximately 1×10⁶ colony forming units are isolated using standard protocols. RNA, complementary to the single-stranded DNA, is synthesized using the double stranded DNA as a template. Biotinylated dATP is incorporated into the RNA during the synthesis reaction. The single-stranded DNA is mixed with the biotinylated RNA in a 1:10 molar ratio) and allowed to hybridize. DNA-RNA hybrids are captured on Dynabeads M280 streptavidin (Dynabeads, Dynal Corporation, Lake Success, N.Y. U.S.A.). The dynabeads with captured hybrids are collected with a magnet. The non-hybridized single-stranded molecules remaining after hybrid capture are converted to double stranded form and represent the primary normalized library SEQ ID NO: 1 through SEQ ID NO: 545 are from LIB3027.

[0263] The Soy52 (LIB3028) normalized cDNA library is generated from Soy35 (SOYMON022). Single stranded DNA representing approximately 1×10⁶ colony forming units of Soy35 (SOYMON022) is used as the starting material for normalization. The Soares procedure (Soares et al., Proc. Natl. Acad. Sci. (U.S.A.) 91:9228-9232 (1994)) is used for normalization.

[0264] Normalized libraries are prepared from single-stranded DNA. Single-stranded DNA representing approximately 1×10⁶ colony forming units are isolated using standard protocols. RNA, complementary to the single-stranded DNA, is synthesized using the double stranded DNA as a template. Biotinylated dATP is incorporated into the RNA during the synthesis reaction. The single-stranded DNA is mixed with the biotinylated RNA in a 1:10 molar ratio) and allowed to hybridize. DNA-RNA hybrids are captured on Dynabeads M280 streptavidin (Dynabeads, Dynal Corporation, Lake Success, N.Y. U.S.A.). The dynabeads with captured hybrids are collected with a magnet. The non-hybridized single-stranded molecules remaining after hybrid capture are converted to double stranded form and represent the primary normalized library SEQ ID NO: 546 through SEQ ID NO: 5362 are from LIB3028.

[0265] Soy56 (LIB3029) cDNA library is prepared from Soy19 (SOYMON007), Soy27 (SOYMON015) and Soy33 (SOYMON020). Equal amounts of Soy19, Soy27 and Soy33, in the form of single stranded DNA, are mixed in equimolar quantities. This mixture is used as the starting material for construction of the cDNA library and as a non-normalized control for comparison to Soy51. The cDNA library is constructed as described in Example 2. SEQ ID NO: 5363 through SEQ ID NO: 6309 are from LIB3029.

[0266] The Soy57 (LIB3030) cDNA library is generated from soybean cultivar Asgrow 3244 (Asgrow Seed Company, Des Moines, Iowa U.S.A.) partially to fully opened flower tissue, which is harvested from plants grown in an environmental chamber. Seeds are planted in moist Metromix 350 medium at a depth of approximately 2 cm. Trays are placed in an environmental chamber set to a 12 h day/12 h night cycle, 29° C. daytime temperature, 24° C. night temperature and 70% relative humidity. Daytime light levels are measured at 450 μEinsteins/m². Soil is checked and watered daily to maintain even moisture conditions. Flowers are removed from the plant at the pedicel. Flower buds showing petal color to fully open flowers are selected for collection. A total of 3 g of flower tissue is harvested and immediately frozen in dry ice. The harvested tissue is then stored at −80° C. until RNA preparation. Total RNA is prepared from a mixture of opened and partially opened flowers and the cDNA library is constructed as described in Example 2. SEQ ID NO: 6310 through SEQ ID NO: 7363 are from LIB3030.

[0267] The Soy53 (LIB3039) cDNA library is generated from soybean cultivar Asgrow 3244 (Asgrow Seed Company, Des Moines, Iowa U.S.A.) seedling shoot apical meristem tissue. Seeds are planted at a depth of approximately 2 cm into 2-3 inch peat pots containing Metromix 350 medium and the plants are grown in an environmental chamber set to a 12 h day/12 h night cycle, 29° C. daytime temperature, 24° C. night temperature and 70% relative humidity. Daytime light levels are measured at 450 μEinsteins/m². Soil is checked and watered daily to maintain even moisture conditions. Apical tissue is harvested from seedling shoot meristem tissue, 7-8 days after the start of imbibition. The apex of each seedling is dissected to include the fifth node to the apical meristem. The fifth node corresponds to the third trifoliate leaf in the very early stages of development. Stipules completely envelop the leaf primordia at this time. A total of 200 mg of apical tissue is harvested and immediately frozen in liquid nitrogen. The harvested tissue is then stored at −80° C. until RNA preparation. Total RNA is prepared from 100 mg of tissue and used directly to generate a library using the Clonetech SMART PCR cDNA library construction kit. The cDNA generated by this method is ligated to SalI adapters from the pSPORT cDNA system from Life Technologies for ligational insertion into the pSPORT vector. SEQ ID NO: 7364 through SEQ ID NO: 12287 are from LIB3039.

[0268] The Soy54 (LIB3040) cDNA library is generated from soybean cultivar Asgrow 3244 (Asgrow Seed Company, Des Moines, Iowa U.S.A.) heart to torpedo stage embryo tissue. Seeds are planted at a depth of approximately 2 cm into 2-3 inch peat pots containing Metromix 350 medium and the plants are grown in an environmental chamber under 12 hr daytime/12 hr nighttime cycles. The daytime temperature is approximately 29° C. and the nighttime temperature 24° C. Soil is checked and watered daily to maintain even moisture conditions. Seeds are collected and embryos removed from surrounding endosperm and maternal tissues. Embryos from globular to young torpedo stages (by corresponding analogy to Arabidopsis) are collected with a bias towards the middle of this spectrum. Embryos which are beginning to show asymmetric development of cotyledons are considered the upper developmental boundary for the collection and are excluded. A total of 12 mg embryo tissue is frozen in liquid nitrogen. The harvested tissue is stored at −80° C. until RNA preparation. Total RNA is prepared from 12 mg of tissue and used directly to generate a library using the Clontech SMART™ PCR cDNA (Clontech Laboratories, Palo Alto, Calif. U.S.A.) library construction kit. The SalI adapters are used in this library construction. The cDNA is ligated into the pSPORT vector. SEQ ID NO: 12288 through SEQ ID NO: 16835 are from LIB3040.

[0269] Soy55 (LIB3049) cDNA library is generated from soybean cultivar Asgrow 3244 (Asgrow Seed Company, Des Moines, Iowa U.S.A.) young seed tissue. Seeds are planted at a depth of approximately 2 cm into 2-3 inch peat pots containing Metromix 350 medium and the plants are grown in an environmental chamber under 12 hr daytime/12 hr nighttime cycles. The daytime temperature is approximately 29° C. and the nighttime temperature 24° C. Soil is checked and watered daily to maintain even moisture conditions. Seeds are collected from very young pods (5 to 15 days after flowering). A total of 100 mg of seeds are harvested and frozen in liquid nitrogen. The harvested tissue is stored at −80° C. until RNA preparation. Total RNA is prepared from 100 mg of tissue and used directly to generate a library using the Clontech SMART PCR cDNA (Clontech Laboratories, Palo Alto, Calif. U.S.A.) library construction kit. The SalI adapters are used in this library construction. The cDNA is ligated into the pSPORT vector. SEQ ID NO: 16836 through SEQ ID NO: 21836 are from LIB3049.

[0270] The Soy58 (LIB3050) cDNA library is generated by subtracting the target cDNA, which is prepared from soybean cultivar Asgrow 3244 (Asgrow Seed Company, Des Moines, Iowa U.S.A.) roots from drought stressed plants, from the driver cDNA, which is prepared from soybean cultivar Asgrow 3244 roots from non drought-stressed (control) plants. Seeds are planted at a depth of approximately 2 cm into 2-3 inch peat pots containing Metromix 350 medium and the plants are grown in an environmental chamber set to a 12 h day/12 h night cycle, 26° C. daytime temperature, 21° C. night temperature and 70% relative humidity. Daytime light levels are measured at 300 μEinsteins/m². Soil is checked and watered daily to maintain even moisture conditions. At the R3 stage of the plant drought is induced by withholding water. After 3 and 6 days root tissue from both drought stressed and control (watered regularly) plants are collected and frozen in dry-ice. The harvested tissue is stored at −80° C. until RNA preparation. The RNA is prepared from the stored tissue and cDNA libraries are constructed as described in Example 2. For subtraction, target cDNA is made from the drought stressed tissue total RNA using the SMART cDNA synthesis system from Clonetech. Driver first strand cDNA is covalently linked to Dynabeads following a protocol similar to that described in the Dynal literature. The target cDNA is then heat denatured and the second strand trapped using Dynabeads oligo-dT. The target second strand cDNA is then hybridized to the driver cDNA in 400 μl 2×SSPE for two rounds of hybridization at 65° C. and 20 hours. After each hybridization, the hybridization solution is removed from the system and the hybridized target cDNA removed from the driver by heat denaturation in water. The refreshed driver is then reintroduced to the hybridization for the next round of hybridization. After hybridization, the remaining cDNA is trapped with Dynabeads oligo-dT. The trapped cDNA is then amplified as in previous PCR based libraries and the resulting cDNA ligated into the pSPORT vector. SEQ ID NO: 21837 through SEQ ID NO: 24268 are from LIB3050.

[0271] The Soy59 (LIB3051) cDNA library is generated from soybean cultivar Asgrow 3244 (Asgrow Seed Company, Des Moines, Iowa U.S.A.) endosperm tissue. Seeds are germinated on paper towels under laboratory ambient light conditions. At 8, 10 and 14 hours after imbibition, the seed coats are harvested. The endosperm consists of a very thin layer of tissue affixed to the inside of the seed coat. The seed coat and endosperm are frozen immediately after harvest in liquid nitrogen. The harvested tissue is stored at −80° C. until RNA preparation. The stored tissue is then used immediately for preparation of poly A+ RNA using Dynabeads oligo-dT in a direct isolation procedure described by the manufacturer. The cDNA library is constructed using the pSPORT cDNA synthesis kit from Life Technologies (Life Technologies, Gaithersburg, Md. U.S.A.). The resulting cDNA is ligated into the pSPORT. SEQ ID NO: 24269 through SEQ ID NO: 33852 are from LIB3051.

[0272] Soy68 (LIB3052) normalized cDNA library is prepared from SOYMON007, SOYMON015 and SOYMON020. Equal amounts of Soy19 (SOYMON007), Soy27 (SOYMON015) and Soy33 (SOYMON020), in the form of double stranded DNA, are mixed and used as the starting material for normalization. For normalization, biotinylated genomic soybean DNA is used as the driver for the normalization reaction. Double stranded plasmid DNA representing approximately 1×10⁶ colony forming units is used as the target. The double stranded plasmid DNA is isolated using standard protocols. Approximately 4 micrograms of biotinylated genomic DNA is mixed with approximately 6 micrograms of double stranded plasmid DNA and allowed to hybridize. Genomic DNA-plasmid DNA hybrids are captured on Dynabeads M280 streptavidin. The dynabeads with captured hybrids are collected with a magnet. Captured hybrids are eluted in water. SEQ ID NO: 33853 through SEQ ID NO: 34853 are from LIB3052.

[0273] Soy69 (LIB3053) normalized cDNA library is generated from soybean cultivars Cristalina (USDA Soybean Germplasm Collection, Urbana, Ill. U.S.A.) and FT108 (Monsoy, Brazil, tropical germ plasma) normalized leaf tissue. Leaves are harvested from plants grown in an environmental chamber under 12 hr daytime/12 hr nighttime cycles. The daytime temperature is approximately 29° C. and the nighttime temperature approximately 24° C. Soil is checked and watered daily to maintain even moisture conditions. Approximately 30 g of leaves are harvested from the 4^{th} node of each of the Cristalina and FT108 cultivars and immediately frozen in dry ice. The harvested tissue is then stored at −80° C. until RNA preparation. Total RNA is prepared from the combination of equal amounts of leaf tissue from each cultivar and a cDNA library is constructed as described in Example 2. For normalization, approximately 1 million clones from the cDNA library are used for generation of double and single stranded plasmid DNA. Double stranded plasmid DNA is used as a template for preparation of biotinylated RNA transcripts. Single stranded plasmid DNA from the cDNA library is hybridized with biotinylated RNA transcripts from the same library. Hybridized molecules are removed with Streptavidin beads (Dynal Inc. Lake Success, N.Y.). Remaining single stranded molecules are partially repaired with “Klenow” before transforming E. coli for the generation of the normalized cDNA library. SEQ ID NO: 34854 through SEQ ID NO: 35835 are from LIB3053.

[0274] LIB3054 is a normalized cDNA library generated from roots from two exotic soybean cultivars Cristilliana (USDA Soybean Germplasm Collection, Urbana, Ill. U.S.A.) and FT108 (Monsoy, Brazil, tropical germ plasma). The roots are harvested from plants grown an environmental chamber set to a 12 h day/12 h night cycle, 29° C. daytime temperature, 24° C. night temperature and 70% relative humidity. Daytime light levels are measured at 450 μEinsteins/m². Soil is checked and watered daily to maintain even moisture conditions. Approximately 50 g and 56 g of roots are collected from cultivar Cristilliana and cultivarFT108. The plants are uprooted and the roots quickly rinsed in a pail of water. The root tissue is then cut from the plants, placed immediately in 14 ml polystyrene tubes and immersed in dry-ice. The tissue is stored at −80° C. until RNA preparation. Total RNA is prepared from the combination of equal amounts of root tissue from each cultivar and a cDNA library is constructed as described in Example 2. For normalization, approximately 1 million clones from the cDNA library are used for generation of double and single stranded plasmid DNA. Double stranded plasmid DNA is used as a template for preparation of biotinylated RNA transcripts. Single stranded plasmid DNA from the cDNA library is hybridized with biotinylated RNA transcripts from the same library. Hybridized molecules are removed with Streptavidin beads (Dynal Inc. Lake Success, N.Y.). Remaining single stranded molecules are partially repaired with “Klenow” before transforming E. coli for the generation of the normalized cDNA library. SEQ ID NO: 35836 through SEQ ID NO: 36568 are from LIB3054.

[0275] Soy70 (LIB3055) cDNA library is generated from soybean cultivars Cristalina (USDA Soybean Germplasm Collection, Urbana, Ill. U.S.A.) and FT108 (Monsoy, Brazil, tropical germ plasma) leaf tissue. Leaves are harvested from plants grown in an environmental chamber under 12 hr daytime/12 hr nighttime cycles. The daytime temperature is approximately 29° C. and the nighttime temperature approximately 24° C. Soil is checked and watered daily to maintain even moisture conditions. Approximately 30 g of leaves are harvested from the 4^{th} node of each of the Cristalina and FT108 cultivars and immediately frozen in dry ice. The harvested tissue is then stored at −80° C. until RNA preparation. Total RNA is prepared from the combination of equal amounts of leaf tissue from each cultivar and the cDNA library is constructed as described in Example 2. SEQ ID NO: 36569 through SEQ ID NO: 37719 are from LIB3055.

[0276] Soy71 (LIB3056) cDNA library is generated from soybean cultivars Cristalina (USDA Soybean Germplasm Collection, Urbana, Ill. U.S.A.) and FT108 (Monsoy, Brazil, tropical germ plasma) root tissue. Roots are harvested from plants grown in an environmental chamber set to a 12 h day/12 h night cycle, 29° C. daytime temperature, 24° C. night temperature and 70% relative humidity. Daytime light levels are measured at 450 μEinsteins/m². Soil is checked and watered daily to maintain even moisture conditions. Approximately 50 g and 56 g of roots are harvested from cultivar Cristalina and cultivar FT108 and immediately frozen in dry ice. The harvested tissue is then stored at −80° C. until RNA preparation. Total RNA is prepared from the combination of equal amounts of root tissue from each cultivar and the cDNA library is constructed as described in Example 2. SEQ ID NO: 37720 through SEQ ID NO: 38942 are from LIB3056.

[0277] Soy67 (LIB3065) normalized cDNA library is prepared from SOYMON007, SOYMON015 and SOYMON020 prepared tissue. Equal amounts of Soy19 (SOYMON007), Soy27 (SOYMON015) and Soy33 (SOYMON020), in the form of double stranded DNA, are mixed and used as the starting material for normalization. For normalization, biotinylated genomic soybean DNA is used as the driver for the normalization reaction. Double stranded plasmid DNA representing approximately 1×10⁶ colony forming units is used as the target. The double stranded plasmid DNA is isolated using standard protocols. Approximately 4 micrograms of biotinylated genomic DNA is mixed with approximately 6 micrograms of double stranded plasmid DNA and allowed to hybridize. Genomic DNA-plasmid DNA hybrids are captured on Dynabeads M280 streptavidin. The dynabeads with captured hybrids are collected with a magnet. Captured hybrids are eluted in water. The resulting clones are subjected to a second round of hybridization identical to the first. SEQ ID NO: 38943 through SEQ ID NO: 40712 are from LIB3065.

[0278] Soy74 (LIB3093) cDNA library is generated from soybean cultivar Asgrow 3244 (Asgrow Seed Company, Des Moines, Iowa U.S.A.) leaves collected from control (watered regularly) plants. Seeds are planted at a depth of approximately 2 cm into 2-3 inch peat pots containing Metromix 350 medium and the plants are grown in an environmental chamber set to a 12 hr daytime/12 hr nighttime cycle, 26° C. daytime temperature, 21° C. night temperature and 70% relative humidity. Daytime light levels are measured at 300 μEinsteins/m². Soil is checked and watered daily to maintain even moisture conditions. At the R3 stage of the plant drought is induced by withholding water. After 3 and 6 days seeds and pods from both drought stressed and control (watered regularly) plants are collected from the fifth and sixth node and frozen in dry-ice. The harvested tissue from control plants is stored at −80° C. until RNA preparation. The RNA is purified from the stored control tissue and the cDNA library is constructed as described in Example 2. SEQ ID NO: 40713 through SEQ ID NO: 45659 are from LIB3093.

[0279] The Soy65 (LIB3107) cDNA library is generated from soybean cultivar Asgrow 3244 (Asgrow Seed Company, Des Moines, Iowa U.S.A.) abscission zone tissue from drought-stressed plants. Seeds are planted at a depth of approximately 2 cm into 2-3 inch peat pots containing Metromix 350 medium and the plants are grown in an environmental chamber set to 12 h day/12 h night cycle; 26 degree C. daytime temperature, 21 degree C. night temperature; 70% relative humidity. Daytime light levels are measured at 300 microeinsteins per square meter. Plants are irrigated with 15-16-17 Peter's Mix. At the R3 stage of development, drought is imposed by withholding water. At 3, 4, 5 and 6 days, tissue is harvested and wilting is not obvious until the fourth day. Abscission layers from reproductive organs are harvested by cutting less than one millimeter proximal and distal to the layer. Immediately upon excision, samples are frozen in liquid nitrogen and are stored at −80° C. until RNA preparation. The following tissues are combined for the single library: four day stress, all nodes; 5 day stress, all nodes. The RNA is prepared from the stored tissue and the cDNA library is constructed as described in Example 2. SEQ ID NO: 45660 through SEQ ID NO: 50787 are from LIB3107.

[0280] The Soy66 (LIB3109) cDNA library is generated from soybean cultivar Asgrow 3244 (Asgrow Seed Company, Des Moines, Iowa U.S.A.) abscission zone tissue from control (watered regularly) plants. Seeds are planted at a depth of approximately 2 cm into 2-3 inch peat pots containing Metromix 350 medium and the plants are grown in an environmental chamber set to 12 h day/12 h night cycle; 26 degree C. daytime temperature, 21 degree C. night temperature; 70% relative humidity. Daytime light levels are measured at 300 microeinsteins per square meter. Plants are irrigated with 15-16-17 Peter's Mix. At 3, 4, 5 and 6 days (relative to drought stress induction in plants for Soy65), abscission layer tissue is harvested. Abscission layers from reproductive organs are harvested by cutting less than one millimeter proximal and distal to the layer. Immediately upon excision samples are frozen in liquid nitrogen and stored at −80° C. until RNA preparation. The following samples are combined for this cDNA library: 4 day control, all nodes; 5 day control; all nodes. The RNA is prepared from the stored tissue and the cDNA library is constructed as described in Example 2. SEQ ID NO: 50788 through SEQ ID NO: 55540 are from LIB3109.

### EXAMPLE 2

[0281] The stored RNA is purified using Trizol reagent from Life Technologies (Gibco BRL, Life Technologies, Gaithersburg, Md. U.S.A.), essentially as recommended by the manufacturer. Poly A+ RNA (mRNA) is purified using magnetic oligo dT beads essentially as recommended by the manufacturer (Dynabeads, Dynal Corporation, Lake Success, N.Y. U.S.A.).

[0282] Construction of plant cDNA libraries is well-known in the art and a number of cloning strategies exist. A number of cDNA library construction kits are commercially available. The Superscript™ Plasmid System for cDNA synthesis and Plasmid Cloning (Gibco BRL, Life Technologies, Gaithersburg, Md. U.S.A.) is used, following the conditions suggested by the manufacturer.

### EXAMPLE 3

[0283] The cDNA libraries are plated on LB agar containing the appropriate antibiotics for selection and incubated at 370 for a sufficient time to allow the growth of individual colonies. Single selective media colonies are individually placed in each well of a 96-well microtiter plates containing LB liquid including the selective antibiotics. The plates are incubated overnight at approximately 37° C. with gentle shaking to promote growth of the cultures. The plasmid DNA is isolated from each clone using Qiaprep plasmid isolation kits, using the conditions recommended by the manufacturer (Qiagen Inc., Santa Clara, Calif. U.S.A.).

[0284] Template plasmid DNA clones are used for subsequent sequencing. For sequencing, the ABI PRISM dRhodamine Terminator Cycle Sequencing Ready Reaction Kit with AmpliTaq® DNA Polymerase, FS, is used (PE Applied Biosystems, Foster City, Calif. U.S.A.).

1-7. (canceled)

8. A substantially purified nucleic acid molecule comprising a nucleic acid sequence wherein said nucleic acid sequence:
(a) hybridizes under stringent conditions to a nucleic acid sequence selected from the group consisting of SEQ ID NO: 1 through SEQ ID NO: 91663, a complement thereof and a fragment of either, or
(b) exhibits a 90% or greater identity to a nucleic acid sequence selected from the group consisting of SEQ ID NO: 1 through SEQ ID NO: 91663, a complement thereof and a fragment of either.

9. The substantially purified nucleic acid molecule of claim 8, wherein said nucleic acid molecule encodes a soybean protein or fragment thereof.

10. A substantially purified nucleic acid molecule comprising a nucleic acid sequence that shares between 100% and 90% sequence identity with a nucleic acid sequence selected from the group consisting of SEQ ID NO: 1 through SEQ ID NO: 91663, a complement thereof and a fragment of either.

11. The substantially purified nucleic acid molecule of claim 10, wherein said nucleic acid sequence shares between 100% and 95% sequence identity with a nucleic acid sequence selected from the group consisting of SEQ ID NO: 1 through SEQ ID NO: 91663, a complement thereof and a fragment of either.

12. The substantially purified nucleic acid molecule of claim 11, wherein said nucleic acid sequence shares between 100% and 98% sequence identity with a nucleic acid sequence selected from the group consisting of SEQ ID NO: 1 through SEQ ID NO: 91663, a complement thereof and a fragment of either.

13. The substantially purified nucleic acid molecule of claim 12, wherein said nucleic acid sequence shares between 100% and 99% sequence identity with a nucleic acid sequence selected from the group consisting of SEQ ID NO: 1 through SEQ ID NO: 91663, a complement thereof and a fragment of either.

14. The substantially purified nucleic acid molecule of claim 13, wherein said nucleic acid sequence shares 100% sequence identity with a nucleic acid sequence selected from the group consisting of SEQ ID NO: 1 through SEQ ID NO: 91663, a complement thereof and a fragment of either.

15. A substantially purified polypeptide, wherein said polypeptide is encoded by a nucleic acid molecule comprising a nucleic acid sequence, wherein said nucleic acid sequence:
(a) hybridizes under stringent conditions to a nucleic acid sequence selected from the group consisting of SEQ ID NO: 1 through SEQ ID NO: 91663, a complement thereof and a fragment of either, or
(b) exhibits a 90% or greater identity to a nucleic acid sequence selected from the group consisting of SEQ ID NO: 1 through SEQ ID NO: 91663, a complement thereof and a fragment of either.

16. A transformed plant having a nucleic acid molecule which comprises:
(a) an exogenous promoter region which functions in a plant cell to cause the production of an mRNA molecule; which is linked to;
(b) a structural nucleic acid molecule, wherein said structural nucleic acid molecule comprises a nucleic acid sequence, wherein said nucleic acid sequence
(i) hybridizes under stringent conditions to a nucleic acid sequence selected from the group consisting of SEQ ID NO: 1 through SEQ ID NO: 91663, a complement thereof and a fragment of either; or
(ii) exhibits a 90% or greater identity to a nucleic acid sequence selected from the group consisting of SEQ ID NO: 1 through SEQ ID NO: 91663, a complement thereof and a fragment of either,
which is linked to
(c) a 3′ non-translated sequence that functions in said plant cell to cause the termination of transcription and the addition of polyadenylated ribonucleotides to said 3′ end of said mRNA molecule.

17. The transformed plant according to claim 16, wherein said nucleic acid sequence is a complement of a nucleic acid sequence selected from the group consisting of SEQ ID NO: 1 through SEQ ID NO: 91663 or a fragment thereof.

18. The transformed plant according to claim 16, wherein said plant is selected from the group consisting of soybean, maize, cotton and wheat.

19. A transformed seed comprising a transformed plant cell comprising a nucleic acid molecule which comprises:
(a) an exogenous promoter region which functions in said plant cell to cause the production of an mRNA molecule; which is linked to;
(b) a structural nucleic acid molecule, wherein said structural nucleic acid molecule comprises a nucleic acid sequence, wherein said nucleic acid sequence
(i) hybridizes under stringent conditions to a nucleic acid sequence selected from the group consisting of SEQ ID NO: 1 through SEQ ID NO: 91663, a complement thereof and a fragment of either; or
(ii) exhibits a 90% or greater identity to a nucleic acid sequence selected from the group consisting of SEQ ID NO: 1 through SEQ ID NO: 91663, a complement thereof and a fragment of either,
which is linked to
(c) a 3′ non-translated sequence that functions in said plant cell to cause the termination of transcription and the addition of polyadenylated ribonucleotides to said 3′ end of said mRNA molecule.

20. The transformed seed according to claim 19, wherein said nucleic acid sequence is a complement of a nucleic acid sequence selected from the group consisting of SEQ ID NO: 1 through SEQ ID NO: 91663 or a fragment thereof.

21. The transformed seed according to claim 19, wherein said seed is selected from the group consisting of soybean, maize, cotton and wheat seed.

22. The transformed seed according to claim 19, wherein said exogenous promoter region functions in a seed cell.

23. The transformed seed according to claim 19, wherein said exogenous promoter region functions in a leaf cell.

24. A method of producing a genetically transformed plant, comprising the steps of:
(a) inserting into the genome of a plant cell a recombinant, double-stranded DNA molecule comprising
(i) a promoter which functions in plant cells to cause the production of an RNA sequence,
(ii) a structural nucleic acid molecule, wherein said structural nucleic acid molecule comprises a nucleic acid sequence, wherein said nucleic acid sequence
(A) hybridizes under stringent conditions to a nucleic acid sequence selected from the group consisting of SEQ ID NO: 1 through SEQ ID NO: 91663, a complement thereof and a fragment of either; or
(B) exhibits a 90% or greater identity to a nucleic acid sequence selected from the group consisting of SEQ ID NO: 1 through SEQ ID NO: 91663, a complement thereof and a fragment of either,
which is linked to
(iii) a 3′ non-translated sequence which functions in plant cells to cause the addition of polyadenylated nucleotides to the 3′ end of RNA sequence,
(b) obtaining a transformed plant cell with said structural nucleic acid molecule that encodes one or more proteins, wherein said structural nucleic acid molecule is transcribed and results in expression of said protein(s); and
(c) regenerating from said transformed plant cell a genetically transformed plant.

25. A method for reducing expression of a protein in a plant cell comprising growing a transformed plant cell containing a nucleic acid molecule wherein the non-transcribed strand of said nucleic acid molecule encodes a protein or fragment thereof, and wherein the transcribed strand of said nucleic acid molecule is complementary to a nucleic acid molecule comprising a nucleic acid sequence selected from the group consisting of SEQ ID NO: 1 through SEQ ID NO: 91663, a complement thereof and a fragment of either, and whereby said transcribed strand reduces or depresses expression of said protein.

26. A method for increasing expression of a protein in a plant cell comprising growing a transformed plant cell containing a nucleic acid molecule that encodes a protein or fragment thereof, wherein said nucleic acid molecule comprises a nucleic acid sequence selected from the group consisting of SEQ ID NO: 1 through SEQ ID NO: 91663, a complement thereof and a fragment of either, and whereby said nucleic acid molecule increases expression of said protein.

27. A method of producing a plant containing reduced levels of a protein comprising:
(a) transforming a plant cell with a nucleic acid molecule comprising a nucleic acid sequence selected from the group consisting of SEQ ID NO: 1 through SEQ ID NO: 91663, a complement thereof and a fragment of either, wherein said nucleic acid molecule is transcribed and results in co-suppression of endogenous protein synthesis activity, and
(b) regenerating said plant comprising said plant cell and producing subsequent progeny from said plant.

28. A method of growing a transgenic plant comprising
(a) planting a transformed seed comprising a nucleic acid sequence selected from the group consisting of SEQ ID NO: 1 through SEQ ID NO: 91663, a complement thereof and a fragment of either, and
(b) growing a plant from said seed.

The application's sequence listing, which the Patent Office published only in electronic form, follows.

SEQUENCE LISTING (91663 sequences)

SEQ ID NO: 1 - DNA, 357 bp, Glycine max
  Clone ID: LIB3027-001-Q1-B1-H8
attttccttttggatttgataatattaagaggaaccaggatagataggtaggttctagcctttctgttatcattttcgaaacaaaccaaattgaaactgtttgagttttgtttagaaggctgttatgaatgaaactttgaagcttagaaaagcggttaggtagctaggtttcagtttcagatctggtagagagcttcatcatgaagccattaccggcggagcaaaccggtgaatcagcgccgacggagttgcagagatccattccgacgccttttctgaccaagacgtaccagctcgtcgatgatccctccgcggatgacctaatttcctggaacgaagatggcaccagcttcatcg

SEQ ID NO: 2 - DNA, 383 bp, Glycine max
  Clone ID: LIB3027-009-Q1-B1-B6
attttccttttggatttgataatattaagaggaaccaggatagataggtaggttctagcctttctgttatcattttcgaaacaaaccaaattgaaactgtttgagttttgtttagaaggctgttatgaatgaaactttgaagcttagaaaagcggttaggtagctaggtttcagtttcagatctggtagagagcttcatcatgaagccattaccggcggagcaaaccggtgaatcagcgccgacggagttgcagagatccattccgacgccttttctgaccaagacgtaccagctcgtcgatgatccctccgcggatgacctaatttcctggaacgaagatggcaccagcttcatcgtttggcgacccgcggaattcgctaag

SEQ ID NO: 3 - DNA, 351 bp, Glycine max
  Clone ID: LIB3027-005-Q1-B1-E1
attagattcagattgtggccgtggcagccagcagcaatatctctaaactcgaaaaatggatcagcgaaagctacgagactcgtccaattcgaaacccgcttcagatgcagcaccccaacacgtcactctcacctctaaccgcttccgcaactctcaagctgctgtgagggagagagagaaagagaagggtgaaggggaaaacgaggatccaagtgcggcacgaaaggttctaaaggcagaccgcgagaagctcagaagggatcgactcaacgaacacttccaagagttgggaaacgcgttagatcctgatagaccaaagaatgacaaggcaactatcctcactgagaacgt

SEQ ID NO: 4 - DNA, 369 bp, Glycine max
  Clone ID: LIB3027-010-Q1-B1-B7
gatgagcttattgcgaatgctgcttacattggcactcctggaaagggtattcttgctgctgatgagtcaacagggacaattggcaagcgtttggccagcatcagtgtagagaatgttgaatccaacaggcgtgctcttagggagctgcttttcaccgctcccggtgctcttaaatatctcagtggtgtcatcctctttgaggaaactctctaccagagcacagctgcaggcaagccctttgtggaagtcttgaaggaggctggtgtgcttcctggcatcaaggttgacaagggcacagttgagcttgctggcactaatggagaaaccaccactcagggtctagatggccttggtcagcgttgcgccaag

SEQ ID NO: 5 - DNA, 346 bp, Glycine max
  Clone ID: LIB3027-004-Q1-B1-D6
caagagatcaaggactgtttgagttatgtttacagatattggactgaaaagggtatttgttgggcaagaaattcaaatgttcaagacattgatgacacggcaatgggtttcagactattaagattacacggttaccaagtttcagccgatgtgttcaagaactttgagagaaatggtgaatttttctgctttacggggcagaccacacaagcagtgacaggaatgtttaatctgtatagggccacacaaatcatgttcccgggagagagaattcttgagcacgggaagcacttctctgccaaatttttgaaggagaagagagcagcaaatgagcttgtaaataaat

SEQ ID NO: 6 - DNA, 384 bp, Glycine max
  Clone ID: LIB3027-005-Q1-B1-F12
ctaagaaggagaagcaaatggcttcctcaatgatctcttccccagctgttaccactgtcaaccgtgccggtgccggcatggttgctccattcactggcctcaagtccatggctggcttccccaccagaaagaccaacaatgacattacctccattgctagcaacggtggaagagtgcaatgcatgcaggtgtggccaccagttggcaagaagaagtttgagactctttcctacctgccagaccttgatgatgcacaattggcaaaggaagtagaataccttcttaggaagggatggattccttgcttggaattcgagttggagcacggtttcgtgtaccgtgagcacaacaggtcaccaggatactacgatggacgctactgga

SEQ ID NO: 7 - DNA, 334 bp, Glycine max
  Clone ID: LIB3027-011-Q1-B1-F5
aattaccttcagaagctgtcgttgtaaatgttacatgtggtagtggacgtggtggtttacctaccactgcttggattagttctgcagttaacaatcgctcctcagatatcaacaaaaagattcgcacagcacttgggaaaggtaagaaaattgtttttcttactagagttgatccttttccagtagctctactggctgttctttttggcgttaagaatgaaattctgagttccaacgccactaaccctatgctgacgcgacttcttgagaactgtaagagtctcaaatatctggttgatgagtgtccttttgcatttgtgaactagtatgtaat

SEQ ID NO: 8 - DNA, 338 bp, Glycine max
  Clone ID: LIB3027-011-Q1-B1-F6
cttggcagaaccggcccaattgaacacttccaaggaaataagcatcggaacgtcccaacctgaagaaagtgcttccgcttcatctcaccctataagacccaaacaaggcaacaccaccatccaagagataaaaaagcacattgcaaaggaaacgcgaccaaaaccaaaccccaattcacccgagccaattgaaaacaaacctttgtctaacgaaaacttaaccaaagttgaaataatgggaaagcctccaaagcctctctctcacacctcttagtcgctccctccaatgccctatgtgtctacaagaggggacaatgggagaacggttaatgggtttc

SEQ ID NO: 9 - DNA, 297 bp, Glycine max
  Clone ID: LIB3027-011-Q1-B1-F8
gtgcaacgaataaaagaaagcgatagaaaaggaagaagaagcgcttcgcgatgcacgaaagagaagaattggaagcaaagtttcggcgttttgtcttttataaaaaaaatgttaaatcattataattttctatgatagggattggtttcttgtcttttttcttttgtttatgaatatcggtgtattttaacagttgtaaagcactgcgccctcgctgcatgatcatgtagttttcaaccagctgcgtttgcaggggttgtaaaactaataacatatataattaaataaattatattc

SEQ ID NO: 10 - DNA, 256 bp, Glycine max
  Clone ID: LIB3027-011-Q1-B1-G1
agttgatcctggaactaaccctgtttgccatttccttggaagcaaggccattttatgggtacccaatttatctatggacactgcctatcagactaacgttgttgtttaattagtccatgcatctgcatcttgggcaccataagattgtatataaaataaattatggtgtgttgtgtatgttgtgcaagacctggaacttcacctttctacgtacgtgtgctgttaggatgcagtgtgctttgatgatgctttgatg

SEQ ID NO: 11 - DNA, 359 bp, Glycine max
  Clone ID: LIB3027-011-Q1-B1-G2
aacttattaacactttccttagttcaatatggggaagcccttcttcactctctctctttcttccctttgcttgctactcttgtcgagtgcatgctttgctattacctccagcaagttcaacgagtgccaactcaacaacctcaacgcgttggaacccgaccaccgcgttgagtccgaaggtggtcttattgaaacatggaactctcaacaccctgagctgcaatgcgccggtgtcactgtttccaaacgcaccctcaaccgcaacggcctccacttgccatcttactcaccttatccccaaatgatcattgtcgttcaagggaagggagcaattggatttgcatttccgggatgtcctg

SEQ ID NO: 12 - DNA, 344 bp, Glycine max
  unsure (1)..(344): unsure at all n locations
  Clone ID: LIB3027-011-Q1-B1-G6
cggctcgagatcaattttgaggcttttccccacaagctggtgcagtttggagagattcaggaaaaagttgtattgaaattttcacaagaggaatttcttacagcttggtcaactcaggtgcgtcctgcaacaactctgttggctgatgggtgtccatatttgtatgcaatggtgcatgatagttcagtgtctacaataccaggtgattttgtcattggtgtcaagttgacaaccataaacaatatgtgtgcatatgggctcaatcctggtatttcaggttctcgtcttttgggcaccattcctcagtccatttcacagcanactgtttggaatcaaatggcaac

SEQ ID NO: 13 - DNA, 234 bp, Glycine max
  Clone ID: LIB3027-011-Q1-B1-G7
cggctcgagatcaattttgaggcttttccccacaagctggtgcagtttggagagattcaggaaaaagttgtggtgaaattttcacaagaggaagttcgtacagcttggtcaactcacgtgcgtcctgcaggaactctgttggctgatgggtgtccagatttgtatgcaatggctcatgagagttcagtgtctacaatagcagatgattttggcactggtgtcaagttgacaacc

SEQ ID NO: 14 - DNA, 397 bp, Glycine max
  Clone ID: LIB3027-011-Q1-B1-G8
tccaccactaagaaagtctctgactatgccggtgatgctgctcagaaatcaaaggactatgccggtgacactgctcagaaaaccaaggactatgccggtgacactgctcagaaaaccaaggactatgccggtgacactgcacagacatcaaaggactatgccggtgatgctgctcagaaatcaaagggctatgtcggtgatgctgcacaaaagaccaaagaatatgttggtgatgctgctcagaagaccatggattatgccactgatgcagcacagaagaccaaagattatgctactcagaagactaaggactatgcaagtgatgcaactgatgctgcaaaaaagactaaagattatgctgctcagaagaccaaggattatgcaagtgatgcaactg

SEQ ID NO: 15 - DNA, 330 bp, Glycine max
  Clone ID: LIB3027-011-Q1-B1-H2
gggtatcccaccagatcaacagaggctcatctttgctggaaagcaacttgaggatggccgtacccttgctgattacaacatccagaaagagtccactcttcacttggtactccgtctacgtggtggaatgcaaatctttgttaagactctgaccggaaagacaatcacccttgaggtggagagctctgacaccattgacaatgttaaggctaagattcaagacaaagagggtatcccaccagaccaacataggctcatctttgctggaaagcagctagaagatggccgaaccttggctgattacaacatccaaaaagaatctaccctcca

SEQ ID NO: 16 - DNA, 258 bp, Glycine max
  Clone ID: LIB3027-011-Q1-B1-H4
ggctcgagctttgagatcaccccagagaaaaacccccagcttcgggacttggatatcttcctcagtattgtggatatgaacgatggagctcttcttctaccacacttcaattcaaaggcgatagtgatactggtaattaatgaaggagatgcaaacattgaacttgttggcctaaaagaacaacaacaggagcagcaacaggaagagcaacctttggaagtgcggaaatatagagcccaattgtctgaacaagatata

SEQ ID NO: 17 - DNA, 113 bp, Glycine max
  Clone ID: LIB3027-011-Q1-B1-H6
cgcgttagttcactcggaattccgctctagcgtctccatataagctatgaggcttttctccaaacactggttcagtttggagatattcgcgaataacttgtgttgacattttc

SEQ ID NO: 18 - DNA, 366 bp, Glycine max
  Clone ID: LIB3027-011-Q1-B1-H8
ggaggacaagacttacggtgtcccccgccgccgcctcaccggccattctcattttgtccaggacgtcgtcctctcttctgacggccagtttgccctatccggctcctgggacggcgagctccgcctctgggaccttgctgctggcacctccgctcgccgctttgtgggccacaccaaggacgtgctctccgtggccttttccattgacaaccgtcagatcgtgtctgcctctcgtgaccgcacgatcaagctgtggaacaccctgggagagtgtaagtacacaatccaagacggcgatgcgcattctgattgggtaagctgcgtccgtttcagccctagcaccctttagcccactattgtttctgc

SEQ ID NO: 19 - DNA, 275 bp, Glycine max
  Clone ID: LIB3027-011-Q1-B1-F4
aagaaaaagaagaaggtgattgttgttcggtggtttgcaaggatggggaacacgttctgcttcttctgtggttgcgttgctcaatccagcgtcggcgtggtcgagcagtggggtcgcttccaccgcctcgcccaaccgggcgtccactttttcaaccctctcgccggcgaatgcctctccggtatcctctccaccaggaatctcctccctcgaacgtctgcatcgaaaccaagtaccaacgaccatgttttctgtgcagttgcctgtgttcgatt

SEQ ID NO: 20 - DNA, 336 bp, Glycine max
  Clone ID: LIB3027-008-Q1-B1-B5
gggtttttgaaattctgtaatgctaagaagccaagttgcttttaccccattcctcaagctgcagattgcatcttgagggtggttgagatggccgatgcacctatcatttatctttctacagatgcagcagaaagtgaaactggtctgcttcagtcactagttgtgctgaatggcaggcctgttcctcttgtaatacgtccagctcgaaattcagcagaaaaatgggatgctctgttgtacaggcataatatggatggagattcacaggtggaagctatgttggacaagactatatgtgccatgtctagcgtgttcattggagcccctggttccact

SEQ ID NO: 21 - DNA, 336 bp, Glycine max
  Clone ID: LIB3027-008-Q1-B1-B8
ggtccgacgacctctcaggttctcgcagttgtcgccggccttccggtcggcggcatcctcctgctcctggcaggactgaccctggctggaactctcaccgggctggtggtggcaacaccgctcttcatcatcttcagcccggtgctgattccggccacggtcgcaattggcctggccgtggccgggttcctgacgtcgggagtctttgggctcacggcgctgtcgtccttctcctggatcctgaactacatccgggagacccagccggcgtcggagaatctggccgctgcggcgaagcaccatctggcggaggcggcggagtacgtggggcagaag

SEQ ID NO: 22 - DNA, 345 bp, Glycine max
  Clone ID: LIB3027-008-Q1-B1-C2
attacatctaagcaactagatgttgacagatcactttcctagtagctggaagaatacagttttctttccatatcagattataacgctatgtatgtatatagataaatatattttaaagaagctatttttgcttgagaagtagggaaaaattgcactcttaaccaaaaaaataaggaaaaagatgatttccaccacatacctttgtatacctaaaatcttacacttagctcagtcataaaaagcttgcgcacagtttaaaacaacccatacaaagaaaagagagtaactcacatcctttgcggctctaagcacaaagcatcaacttgggaatgattctaatgatgg

SEQ ID NO: 23 - DNA, 342 bp, Glycine max
  Clone ID: LIB3027-008-Q1-B1-C5
cacacacaactactacaagtacttccttacaatcaaaaccaacaacaactatggcaagttatcaaaagcactacgatgatcagggtcgcaaggttgacgagtatggcaacgttgagaagcaaaccgacgaatacggcaaccctgttcatgctgctagtgtcacctatgtagccaccagaactgctgctggtggttacagtgatgacattaataagcaacatgataccaccaatgcctacggcgtagacactggtagacagcattctagtggtggctacgatggtgacactaataaacatcatggaactactggtggctataatgatgacaccaatagacatc

SEQ ID NO: 24 - DNA, 343 bp, Glycine max
  Clone ID: LIB3027-008-Q1-B1-D1
aaaatagtttacgtgttatccttcatcatagcctcttagacttgaaaacggataagaacaaaagtgagtggcccttccaataggcaaaatttgttgtgctttcacaatcatgctacccgtaaatatgtaaactacaaatttcttgaaccttcgtattaattcacctgttatccccccacttcatcaacttctttccctaaagaaacaaacataacttcccctgtctctgctctgctacagattcctcaagtactgttgtgttcactgttgaggcctaatctggacaactattctctcacattttttataataaatttatgtttgaatgcttatcccccaatgt

SEQ ID NO: 25 - DNA, 401 bp, Glycine max
  Clone ID: LIB3027-008-Q1-B1-D10
agcaaagcaatggctacttcaaagttgaaaacccataatgtggttgtatctctctccctaaccttaaccttggtactggtgctactgaccagcatggcagactcagcggaaactgtttctttcagctggaacaagttcgtgcctaagcaaccaatcatgatcctccacggagacgctattgtgacctccacgggaaagttacaactcactaaggttgacgaaaactgcaccccaaaaccctcgtctcttggtcgcgccctctactccacccccatccacatttgggacaattaaaccggtagcgttgccagcttcgccgcttccttcaacttcaccttctatgcccctgacacaaaaaggcttgcagatgggcttgccttctttctcgcatcaattgacac

SEQ ID NO: 26 - DNA, 403 bp, Glycine max
  Clone ID: LIB3027-008-Q1-B1-D11
ctcgagccgctcttttcgtttctgccacccccttcttcaccgcctcacccaagcgcggctttcgtggtgggattgtggccatggccgccgctggctcgctccgcaaatcagaggaagagtggcgcgcagttctctcccctgaacagtttcgtattctcaggcaaaagggcaccgagttccctggaacaggagagtatgacaagttctttgatgagggagtttacaactgtgctggttgtgggacacctctctacaggtccttaacaaaattcaattctggttgtggctggccagccttctatgaggggattcctggagccataaatcgcaatccggaccctgatgggatgaggacagaaataacgtgtgctgcttgtgggggacatctaggtcacgtctttaa

SEQ ID NO: 27 - DNA, 398 bp, Glycine max
  Clone ID: LIB3027-008-Q1-B1-D12
cagatttcaatcaccgatttcaccattatcatcatcattattataattattttctcgctcgatttgtttcaattacgaaataatcgcgataattattttttttttttgttatatcaggaatctctctgaatcgcgggattaagagaggaatatgcaacagaggcttaagttgcagcaacaacaacaagccctcatgcagcaagctttgcttcaacagcagcagatgtaccaccctggcatgctcgccgctgctatgtctcagatggagcctgttccaagtggaaatttgcctcctggttttgatacgtctgcatgccgtagtgtttatgtaggaaatattcatgtaaatgtcaccgataaacttcttgcagaagtttttcagagtgctggtcctcttg

SEQ ID NO: 28 - DNA, 344 bp, Glycine max
  Clone ID: LIB3027-008-Q1-B1-D2
aacttattaacactttccttagttcaatatggggaagcccttcttcactctctctctttcttccctttgcttgctactcttgtcgagtgcatgctttgctattacctccagcaagttcaacgagtgccaactcaacaacctcaacgcgttggaacccgaccaccgcgttgagtccgaaggtggtcttattgaaacatggaactctcaacaccctgagctgcaatgcgccggtgtcactgtttccaaacgcaccctcaaccgcaacggcctccacttgccatcttactcaccttatccccaaatgatcattgtcgttcaagggaagggagcaattggatttgcat

SEQ ID NO: 29 - DNA, 342 bp, Glycine max
  Clone ID: LIB3027-008-Q1-B1-D7
acggcttacccgccggtcttctccccgccaccaccgtcttgggctacgccgtgaaccgtacctccggtgactttaccgtcaagctcggcggcgcgtgcaagatcacgctcccgccggacaactacgtcgccacctattccgacaccatcacagggaagatcgtgaaggggaaaatcgctgaactcgaggggattagggttcgcgcgttcttcaagtggtggtccatcaccggaatccgctcctccggcgatgatatcgtcttcgaggtcggtatggtcacggcgaagtatccatcgaagaatttcgacgatagccccgcgtgcgagggccagcactcttctt

SEQ ID NO: 30 - DNA, 339 bp, Glycine max
  Clone ID: LIB3027-008-Q1-B1-D8
ggtccttaaacactcatcagtcatcaccatggccaagctagttttttccctttgttttctgcttttcagtggctgctgcttcgctttcagttccagagagcagcctcagcaaaacgagtgccagatccaaaaactcaatgccctcaaaccggataaccgtatagagtcagaaggagggctcattgagacatggaaccctaacaacaagccattccagtgtgccggtgttgccctctctcgctgcaccctcaaccgcaacgcccttcgtagaccttcctacaccaacggtccccaggaaatctacatccaacaaggtaagggtatttttggcatgatata

SEQ ID NO: 31 - DNA, 400 bp, Glycine max
  Clone ID: LIB3027-008-Q1-B1-D9
aaaacaaaaagtttacgttacaaatcgcataataaccgtcctaagtttattgagagaattttgcaagtgtgagaaacatggcatctcgtcaaaacaacaagcaagagcttgatgaaagagcaaggcaaggagagactgttgtcccgggtggaactggtggcaagagcctggaggctcagcaacaccttgctgaaggaaggagcaagggagggcaaacaaggaaggaacagctgggtacagaagggtaccaggaaatgggacgcaaaggagggttgagcactgtggacaaatcaggagaagaacgtgctcaagaggaaggcattggcatcgatgagtccaagttcaggactggtaataacaagaaccagaatcagaacgaagaccaggataagtgataatg

SEQ ID NO: 32 - DNA, 345 bp, Glycine max
  Clone ID: LIB3027-008-Q1-B1-E1
tgcccatctttcccctaatgctggtggtgggttcagttttttggtgaggaaggataataaagaaggaagctttttttgtgtgagagaaggaagaggagaaaagaaggcatggggagagggaagattgagattaagaagattgagaatttgaacagcagacaagttaccttctccaagaggagaaatgggttgttgaagaaggccaaagagttgtctgttctctgtgatgcagaggttgctgtcatcatattctccagcactggcaagctttatgagttctcaaacacaagcatggagcataccctttcgaggtacagtaaaggcgcagaatcagattctgcagag

SEQ ID NO: 33 - DNA, 53 bp, Glycine max
  Clone ID: LIB3027-008-Q1-B1-E10
tgcggctgaggattccgatcgaattaccttcttcgtttctcgcaaagtttaag

SEQ ID NO: 34 - DNA, 344 bp, Glycine max
  Clone ID: LIB3027-008-Q1-B1-E2
gtgctggggacgttgacgcggatgctcatgacctggaagcagaggaagagatcctgggcctcgaggccgtagattgcgtcgattttctggggagtacagtccttatggccagcctgtgctcgttcaattttaaaaaaatcacgtcaataataaaagcccgttgtgaatcctggtcacttgaattttccttttttttataaaaaaaaaacagactaaatccagatcttttcacgatgtactgtaaaattgtatttttttaaatagtgatgagttgtatagttgggtatgtaaatgtatgtaatcattatttttggacccttttgaatatcatgaaatacagtttg

SEQ ID NO: 35 - DNA, 345 bp, Glycine max
  Clone ID: LIB3027-008-Q1-B1-E3
cggctcgagagtaaggccaccaaagaaaggttctgctgttcagcgcccccgcaccagaacactcactgctgtacatgaggcaatgctggaagatattgtattgcctgctgagattgttggaaagcgtgttaggtataaaattgatggttccaagattatgaaggtctttttggaccccaaggagcgaaacaataccgagtacaagttggagacttttgctgcagtatacaggaaactttcaggcaaaggtgtcgtgtttgagtatcctactaccgaggcttaggttctatttgttagctttgaatttcttcctgaattacatatggtggatgctggttttgttaa

SEQ ID NO: 36 - DNA, 326 bp, Glycine max
  Clone ID: LIB3027-008-Q1-B1-E5
agtactctctataatgagtcacgaaacttttgcgggaataaaaggagaaattccaatgaaaaaaaaaaaaaaaaaaaaaaaaaaaaaaaaaaaaaaaaaaaaaaaaaaaaaaaaaaaaaaaaaaaaaaaaaaaaaaaaaaaaaaaaaaaaaaaaaaaaaaaaaaaaaaaaaaaaaaagggggggcccccaaaaaggaaccccgtcaaccgggaaataaattcgggacgggaaccggaaggggaaaaagtttcccaaaaagggagccaaaaaaaacctgggggaaacaagggcaaaaagggttcccgggggaaaatggtaaccggcc

SEQ ID NO: 37 - DNA, 344 bp, Glycine max
  Clone ID: LIB3027-008-Q1-B1-E6
aaataattgatctttgaaaatgcagggaggaaagaaagctggagagtccatcaaggaaacagctgcaaacattggtgcttctgccaaggctggcatggagaaaaccaaggccactgtccaggagaaggcagaaagaatgacggcacgtgatccgatgcaaaaggagttggcaacccagaagaaagaggcaaagatgagccaggcagagctggacaagcaggcggcgcgtcagcataacacggcggcgaagcaggctgccacggcagggcacatgggacaacccatggggacccatcagacgtcagctatgcccggtcatggaaccggacagcccacgggccatg

SEQ ID NO: 38 - DNA, 341 bp, Glycine max
  Clone ID: LIB3027-008-Q1-B1-E8
caggaccaaaccttgtgggagttaaggaatgatggaagaaaagaaataaaaaaaagtaaataaaaatgcagtagaagagtcctgattccaaacgaaaaaattcaaacttgattgaaaaggatctttctgattattgaagaatgggacaaaaggattgatcgcgaaaaagatttcttgttcttattagaagatcgtgattggatccacatatgtttggtaaaaagaaagaaaaatattcttctttgagaataataaaaaaggaaagtgttcaattggaacatgaaaacgtgacagaattggtcctagttactcttcggaacggaatagaagaaggggagaga

SEQ ID NO: 39 - DNA, 345 bp, Glycine max
  Clone ID: LIB3027-008-Q1-B1-F3
gttaaataggtggatggggaaactgactttcccccagggcacttcccgaagtgttaaaagaatgcctctttcaatagggggaggagctggtgcaaagaatgctattctcataaatatgccaaatgctgttctttcaatgtggagatattttgttggagacctcgtctttgaagtttctaagatgacttctccctacattaaatgtacagtctctttcttcatagcatttggaaatttggctgatgacaccattaattttgaggcttttccccacaagctggtgcagtttggagagattcaggaaaaagttgtattgaaattttcacaagaggaatttcttacagc

SEQ ID NO: 40 - DNA, 346 bp, Glycine max
  Clone ID: LIB3027-008-Q1-B1-F4
ccccaactaacaataattccttcacttgcagaacttagttctctgttgcatcatcatcatcttcattagtgttagccctaaacttcaccttcaaccatgaccacagtgccaccacacagtgtccaagtgcacacaacaacacaccgctacgaagccggcgtcgtcccgccggctcgttttgaggcgccgcgttacgaagccggcatcaaggcgccctcttccatttaccattccgagagaggtccgacgacctctcaggttctcgcagttgtcgccggccttccggtcggcggcatcctcctgctcctggcaagactgaccctggctggaactctcaccgggctgg

SEQ ID NO: 41 - DNA, 344 bp, Glycine max
  Clone ID: LIB3027-008-Q1-B1-F6
cagcgttatcagccccaagtggcaagaacaacaagatgaagatgaagatgaagacgaagatgatgaagatgaacaaattccctctcaccctcctcgccgaccaagccatggaaagcgtgaacaagacgaggacgaggacgaagatgaagataaacctcgtcctagtcgaccaagccaaggaaagcgtgaacaagaccaggaccaggacgaggacgaagatgaagatgaagatcaacctcgcaagagccgcgaatggagatcgaaaaagacacaacccagaagacctagacaagaagaaccacgtgaaagaggatgcgagacaagaaacggggttgaggaaaata

SEQ ID NO: 42 - DNA, 403 bp, Glycine max
  Clone ID: LIB3027-008-Q1-B1-G11
ttctctccattggtccttaaacactcatcagtcatcaccatggccaagctagttttttccctttgttttctgcttttcagtggctgctgcttcgctttcagttccagagagcagcctcagcaaaacgagtgccagatccaaaaactcaatgccctcaaaccggataaccgtatagagtcagaaggagggctcattgagacatggaaccctaacaacaagccattccagtgtgccggtgttgccctctctcgctgcaccctcaaccgcaacgcccttcgtagaccttcctacaccaacggtccccaggaaatctacatccaacaaggtaagggtatttttggcatgatatacccgggttgtcctagcacatttgaagagcctcaacaacctcaacaaagaggac

SEQ ID NO: 43 - DNA, 401 bp, Glycine max
  Clone ID: LIB3027-008-Q1-B1-G12
actttattgaagtcttgaagaagaaacatgcatctggaggttacaagaagatggtcatatacgtggaagcttgtgaaagtgggagcatgtttgagggtataatgcctaaggatctgcagatttatgtcacaactgcatccaatgcacaagagaatagttggggaacttattgtcctggaatggatccttctccacctccagagtacatcacttgcctaggggatttgtacagtgttgcttggatggaagatagtgagactcataatctaaaaagggagtccgtgaaacaacaatacaaatcggtaaagcaacggacttcaaatttcaacaactatgcgatgggttctcatgtgatgcaatacggtgacacaaacatcacagctgaaaagctttatttatac

SEQ ID NO: 44 - DNA, 343 bp, Glycine max
  Clone ID: LIB3027-008-Q1-B1-G2
ccgagaacaaaaaaaaaaaaaaaaaaaatccgcgattcgctcttctcttggaaaagtgaaaaccagaagtacgaacgaaagagaagagcgatttagaagtgagagaagatggggttgtcgttcacgaagctgttcagcaggttgtttgcgaagaaggaaatgaggattctgatggtaggtctcgatgctgctggtaagacaaccatcttgtacaagctcaagcttggagaaatcgtcaccactatccccaccatcggatttaatgttgagactgtggagtacaagaacatcagcttcactgtgtgggatgttggtggtcaggacaagatccgtccactgtgga

SEQ ID NO: 45 - DNA, 287 bp, Glycine max
  Clone ID: LIB3027-008-Q1-B1-G3
cattctgggcaacattcaaacgccggttgatagcatcagacagggaacttcaacacggagtttgcctcaagcaaggtccacggtgaccctcaacaatgggcagcatggcccttgcgttcggttcctcgctacggtatcactttagtcaaccgcgggaagagagataaccacatgtttacgggacttttgctgaatgatcatgtaattattttgccattcaagtgctggaaacataatggagcctcttttctagtatatgtcaaggtggtcagcatacctgactcaca

SEQ ID NO: 46 - DNA, 340 bp, Glycine max
  Clone ID: LIB3027-008-Q1-B1-G7
gaagaagatgggtttgaagaacaacatggtggtgctaaaggtgtgtttggtgctacttttccttgtggggggtactactagtgccagcttgaggctgagtgagcttggcctgctcatgaaaagtgatcatcatcaacactcaaatgatgatgactcttcaaaaccatgctgtgatcaatgcgcatgcacaaagtcaaaccctcctcaatgccgctgttcagatatgaggctgaattcgtgccattcagcttgcaaatcttgtatttgcgcattatcgtatcctgcacagtgtttttgtgttgacataacggatttctgctatgaaccttgcaagcccagt

SEQ ID NO: 47 - DNA, 318 bp, Glycine max
  Clone ID: LIB3027-008-Q1-B1-G8
ctttaggtttggaattgggaattagggttgttcgcgtcacgaagatgatcgaggtggtgttgaacgatcgattggggaagaaggtgcgcgtgaagtgcaacgacgatgacaccatcggcgacctgaagaagctggtggcggctcagacgggcacaagagccgacaagatccgcatccagaagtggtacaccatatacaaggatcacatcactctcaaggattacgagatccacgacggcatgggtctcgaactctactacaactaaacacaaggtggtgtttatgcatgatatattactatgatctgggaatgggatg

SEQ ID NO: 48 - DNA, 412 bp, Glycine max
  Clone ID: LIB3027-008-Q1-B1-H10
aggtccactctaaaggatccactcggggaattccaattccacattttcaagaaataaggaggcaaaaatgttcatatatgaattggaattatttgttttcttattaggcctatcctgaagccaaaggaaatgagatcggaattcctcggggaattccaattccacattttcaagaaataaggaggcaaaaatgttcatatatgaattggaattatttgttttcttattaggcctatcctgaagccaaaggaaatgagatcggaattcctcggggaattccaattccacattttcaagaaataaggaggcaaaaatgttcatatatgaattggaattatttgttttcttattaggcctatcctgaagccaaaggaaatgagatcggaattcctcgggggtaccgagctcgaat

SEQ ID NO: 49 - DNA, 399 bp, Glycine max
  Clone ID: LIB3027-008-Q1-B1-H11
aattaagaaattttcatggtaaccattcgtgcagatgaaattagtaaaattatccgtgaacgcattgagcaatataatacggaagtaaaaattgtaaatacgggtaccgtacttcaagtaggcgacggtattgctcgtatttatggtcttgatgaagtaatggcgggtgaattagtggaatttgaagagggtactataggcattgctttgaatttggaatccaaaaatgttggtgttgtattaatgggtgatggtttgatgatacaagagggaagttcagtaaaagcaacaggaagaattgctcagatacctgtaagtgaggcttatttgggtcgtgttataaatgccctggctaaaccaattgatggtcgaggagaaatttcagcttcggaatctcga

SEQ ID NO: 50 - DNA, 304 bp, Glycine max
  Clone ID: LIB3027-008-Q1-B1-H2
atccgttcaaggttcatctgtgcataattaacgagattattttttgaattgtatgataagatcgatgtgcctccattcctgcacctaacgtatgtactgtttgggacatccagtttggtacattgcatgcctgcaaaacatgttgtccagacagttgatgtaccacacagtttcaaatctaatgcaactatgacatgtcagctacactgttgtcacgcaaatttcgaattacttaaggagaacttaatttttagcaggatgagtatcagagtatgcaatctgtactatcagcaatatcccctca

SEQ ID NO: 51 - DNA, 347 bp, Glycine max
  Clone ID: LIB3027-008-Q1-B1-H3
ctcactaccaccaaagactgagaagaggggttgaattaactgcttgcaagcatggcgaagagcaaggaagacataacctatgcaacatcacaagcaaggctttcagaagatgaagcagtgagagtggcctacgagcatggctcaccccttgaaggaggaaagattgctgactctcaaccagttgacttgttttcaagtgcacacaatatgccaaagagtggccaaacaacaatggattcaaacactagtgatcaatctcagatgcaacgtgatacacaagaagggggttctaaagaattcaccactggagctcctggatagccccaaaaggggctcctccagcaatg

SEQ ID NO: 52 - DNA, 342 bp, Glycine max
  Clone ID: LIB3027-008-Q1-B1-H5
tgaccaagttcacaatcctcctcatctctcttctcttctgcatcgcccacacttgcagcgcctccaaatggcagcaccagcaagatagctgccgcaagcagctccagggggtgaacctcacgccctgcgagaagcacatcatggagaagatccaaggccgcggcgatgacgatgatgatgatgacgacgacaatcacattctcaggaccatgcggggaagaatcaactacataaggaggaacgaaggaaaagacgaagacgaagaagaagaaggacacatgcagaagtgctgcacagaaatgagcgaactgagaagccccaaatgccagtgcaaagcgctgc

SEQ ID NO: 53 - DNA, 339 bp, Glycine max
  Clone ID: LIB3027-008-Q1-B1-H6
gatgagagtgcggtttcctttgttggtgttgctgggaactgttttcctggcatcagtttgtgtctcattaaaggtgagagaggatgagaataaccctttctacttgagaagctctaacagcttccaaactctctttgagaaccaaaacggtcgcattcgtctcctccagagattcaacaaacgctccccacaacttgagaaccttcgagactaccggattgtccagtttcagtcaaaacccaacacaatccttctcccccaccatgctgacgccgatttcctcctctttgtccttagcgggagagccatacttaccttggtgaacaacgacgacagaga

SEQ ID NO: 54 - DNA, 342 bp, Glycine max
  Clone ID: LIB3027-008-Q1-B1-H7
gggattttggatgctctcgtacgatgcctcatctgtatcatgatgcacctgtccatggaggacaacataagaaactatgttcacatataacgtcgagactttagaacagacgctgggaataccatgagcatcgctctaaagattcaatcactagtcactccgttgacactctagacgaatacagcatagattgccgacattcacactacaattgccatggcactttcacaaacatcacactatcagtaactcatctcttctatatgtaatgagcacagagatggcctgtgtgaaagcttggcgaatccaacatgaaaactctccagtactgcgaaaccaact

SEQ ID NO: 55 - DNA, 345 bp, Glycine max
  unsure (1)..(345): unsure at all n locations
  Clone ID: LIB3027-008-Q1-B1-H8
cctaagtgagaaacaaagaaaggaaataattgatctttgaaaatgcagggaggaaagaaagctggagagtccatcaaggaaacagctgcaaacattggtgcttctgccaaggctggcatggagaaaaccaaggccactgtccaggagaaggcagaaagaatgacggcacgtgatccgatgcaaaaggagttggcaacccagaagaaagaggcaaagatgagccaggcagagctggacaagcaggcggcgcgtcagcataacacggcggcgaancaggctgccacggcagggcacatgggacaaaccatggggaaccatcagacgtcagctatgcccggtcatgga

SEQ ID NO: 56 - DNA, 330 bp, Glycine max
  unsure (1)..(330): unsure at all n locations
  Clone ID: LIB3027-009-Q1-B1-A10
gataaacaagttctgtttagtanagagggaagggcagcagcaagggagcagaggctgcaagagagcgtgattgtggaaatctcgaaggaacagattcgggcactgagcaaacgtgccaaatctagttcaaggaaaaccatttcttctgaagataaaccttttaacttgagaagccgcgaccccatctactccaacaagcttggcaagttctttgagatcaccccagagaaaaacccccagcttcgggacttggatatcttcctcagtattgtggatatgaacgagggagctcttcttctaccacacttcaattcaaaggcgatagtgata

SEQ ID NO: 57 - DNA, 327 bp, Glycine max
  Clone ID: LIB3027-009-Q1-B1-A12
tgctcatctagaatgtaaatggtgctacatgtgatgaggcatgagctttttatattattttaaaataaaaacagtttttgattaaatcaaacacacccttaatgtttggtcctatgtttcaaaaggtttcacatagcaaataacttataacatgtacggcatatacagatattcggatgacaccctttatctcagtatgatataaagatgccttaagttttaagtgaggtattaaatcaaaagggtaaagtattttaagaataaaatcaagttatggtaatgctagtttaatttattgatgtatgatgtgcagaggctggtcaatac

SEQ ID NO: 58 - DNA, 405 bp, Glycine max
  Clone ID: LIB3027-009-Q1-B1-A4
gttctgagtctcaaagagaaccacgaagacataagaataagaacccttttcacttcaactctaaaaggttccaaactctcttcaaaaaccaatatggccacgttcgcgtcctccagaggttcaacaaacgctcccaacagcttcagaatctccgagactaccgcattttggagttcaactccaaacccaacacccttcttctcccccaccatgctgacgctgattacctcatcgttatccttaacgggactgccattcttaccttggtgaacaacgacgaccgagactcttacaaccttcaatctggcgatgccctaagagtccctgcaggaaccacatactatgtggttaaccctgacaacgacgagaatctcagaatgataacactcgccaatacccgttaac

SEQ ID NO: 59 - DNA, 280 bp, Glycine max
  Clone ID: LIB3027-009-Q1-B1-A6
aagtcaaatatctacattttcacaccatgatggttggggagacgcaccgcccagatctagccgtacacgtgccaccgtgggcgccggcgatcttctcaccgtacaccggtagtgccgcttaggcgccgtactccacgcaagatgcacttagtgcacgttcggcactacgactccatcgatgctgagtcagactcggatcgttccgtcgcgggacccggaagtcccggtggtcgcatacgcctgccaccatttccgcatgttccagttctacgttcggtga

SEQ ID NO: 60 - DNA, 323 bp, Glycine max
  Clone ID: LIB3027-009-Q1-B1-A9
agtgtttttaacaaacagcaacagtacagagcattttgatgcatgtaagtggacaaaatcggaaccacattcctgggaattgatcttcccaatagaggtatgcggtcctaataatggttttgaaatgtggagttctgagtgggcaaatcaaacttcatggcatttgagtttccttattgacaatcccaaacagtctacagtttttgacattctcttgggaatttctcaagattttgaaattgctggtaatactcttatgccagcttttttctgttccacaagctactgccagatcttctgaaaatgcggaatcctctgcatga

SEQ ID NO: 61 - DNA, 119 bp, Glycine max
  unsure (1)..(119): unsure at all n locations
  Clone ID: LIB3027-009-Q1-B1-B1
ccaaaaccctcgtctccttggtcgcgccctctactccacccccatccacatttgggacanagaaaccggtancgttgccagcttcgccgcttccttcaacttcaccttctatgcccctg

SEQ ID NO: 62 - DNA, 326 bp, Glycine max
  Clone ID: LIB3027-009-Q1-B1-B11
cacagagagagaagggaaggaaaagtggtgttggtggttgtcctcctcattggtatggcaaccctttcctccatcctctcctcctctcttcctcttttccatcgctaccctaaccctaacccttcgctctttcgcccctccctttctctctctttctctcgcactaaaccccgttcccccttcctcgttctcgctgcctcttcccatgatttcgcctccaactccaagaaatcagtgctcaccgagttgatacaagagatagaacctctggatgttagccacattcagaaggatgttccaccaactacagcagatgccatgaagag

SEQ ID NO: 63 - DNA, 330 bp, Glycine max
  Clone ID: LIB3027-009-Q1-B1-B12
ggatagaagcctaacaggttggggcaagacaaccagaaggccccgccgacagaggtgcccggccggtaaccctccgttgatccagttaacctaatcaccataagaggcttaaaatttttagatgtgaatttatagaggtaagcagggcaggctttcgaattaatggaacgcatgatgttctcaggcatggggatttctcttgtaaatttcttcaacccgtatttgggtatatgcttgattgtcagtctttggggtggtggtaccaacttgtattattcttaaataatgttgcatgatttcttctcattatctctttatagaactgttgag

SEQ ID NO: 64 - DNA, 313 bp, Glycine max
  Clone ID: LIB3027-009-Q1-B1-B3
ctaaataagaaatgaagagtactatcttctttgctctctttctagtttgtgccttcaccatctcatacctgccttcagccaccgctcagttcgtgctcgacactgatgatgatcctcttcaaaacggtggcacatactatatgttgccagttatgagaggaaagggcggtggaatagaagtagattcaactggaaaagaaatatgccctctcactgttgtgcaatcacccaatgagctcgataaggggattggactagtctttacatctccattacatgccctttttatcgccgaaggctatcctttgagcat

SEQ ID NO: 65 - DNA, 379 bp, Glycine max
  unsure (1)..(379): unsure at all n locations
  Clone ID: LIB3027-009-Q1-B1-B4
gtcacctttccgttcatttcctctgttttttcttcaaatccattgtttcgtggaaatcccgaaatttaaccatgcttctccgaaccgccgcctccgccgcttctgcttcgtcnctctccctcttcagccctacctccgaacctctccgttcggttcccgctcgtggattggtggttcgcgccgcgaaaggatccacgaaccaccgcgccctaaccggcgtgatctttgaaccgttcgaagaggtgaagaaggagctcgatctcgttcccaccgttccacaagcttctctcgcccgccaaaaatacgttgacgaatccgaagccgccgttaacgaacaaatcaatgtggagtataacgtttcctacgtttaacatgctat

SEQ ID NO: 66 - DNA, 312 bp, Glycine max
  unsure (1)..(312): unsure at all n locations
  Clone ID: LIB3027-009-Q1-B1-C10
ctttgaacaagatctcacaattcattcaccttttaattcatctcattcacacatcacaatgctcttcctttcttccttaataataataccataataatctgttacgttacggggcccaaatgtctgttacggagctcaaggagcgtcactctgctgccaacgacaccgtcaacaatctcagacaccgtttaaagcagaagcgcctttcgttgctcgacacagatatttctgggtatgcaaggtctcacggtanaacgcctgtgacctttggacctacggatctggtttgctgtataacctttcaaggtcaca

SEQ ID NO: 67 - DNA, 322 bp, Glycine max
  Clone ID: LIB3027-009-Q1-B1-C11
ggggaattccaattccacattttcaaaaattactgatgcataaatgtttcagatatgaattggaattatttgttttcttattaggctcatcctgaagccaaaggaaatgagatcggaattcctcggggaattcaaattccacattttcaagaaataaggaggcaaaattgttcatatatgaattggaattatctgttttcttattaggcctatcctgaacccaaaggaaatgagatcggaattcctcggggaattccaattcaacattttcaagaaataaggaggcaaaaatgttcatatatgaattggaattatttgtttt

SEQ ID NO: 68 - DNA, 328 bp, Glycine max
  Clone ID: LIB3027-009-Q1-B1-C3
gaaggaggccatagaagcgtacacggggctctctccgaacaccttcttcaccctgctggccctcatcctggccctctactacgtcgtttcgggcctcttcccctcctcctccgaccaccgccacaacaccgcctcgcgtgacttcgagcctcagatggagcctctgcgactccctgttcaaatcggcgaggtcaccgatgaagaactcaaggcctacgacggctccgatcccgagaagcctctcctcatggccatcaagggccagatctatgatgtttcccagagcagaatgtttttatgacctggtggaccctatgctctatttgct

SEQ ID NO: 69 - DNA, 365 bp, Glycine max
  Clone ID: LIB3027-009-Q1-B1-C4
gcaaagtataattgcaaaaagatggttttctcatcatctgcaaccgtttatggccaacctgaaaagataccgtgtgaggaggatttcaagttacaagctatgaatccctatggacggaccaagcttttcctggaagaaattgcccgagatattcagaaagctgaaccagaatggaagatcatattactgagatacttcaatccagttggggctcatgaaagtggcaaactcggtgaagatcccaagggcatcccaaataagctcatgccttacattcagcacgtagctgttgggagattgactgaactcaatgtataccgtcatgactatccaacgacggatggctctgcgatccgggactatat

SEQ ID NO: 70 - DNA, 420 bp, Glycine max
  Clone ID: LIB3027-009-Q1-B1-C8
ggcagcatattgagtggcttcaccctggaattcttggaacatgcattcagcgtggacaagcagatagcgaaaaacctacaaggagagaacgaaggggaagacaagggagccattgtgacagtgaaaggaggtctgagcgtgataaaaccacccacggacgagcagcaacaaagaccccaggaggaggaagaagaagaagaggatgagaagccacagtgcaagggtaaagacaaacactgccaacgcccccgaggaagccaaagcaaaagcagaagagatggcattgacgagaccatatgcaccatgagacttcgccacaacattggccagacttcatcacctgacatctacaaccctcaagccggtagcgtcacaaccgccatcagccttgacttcacagccctctcgtggctcagactc

SEQ ID NO: 71 - DNA, 140 bp, Glycine max
  Clone ID: LIB3027-009-Q1-B1-D1
tactcttatgccagctttttctgttccacaagctactgccagatcttctgaaaatgcggaatcctctgcatgatctggaattcgtgttttctttcgcttgttcgtttgtttaattcaataaaggtcagcatgaatgaatc

SEQ ID NO: 72 - DNA, 331 bp, Glycine max
  Clone ID: LIB3027-009-Q1-B1-D10
ctttctccgagaacaaaaaaaaaaacgtgattcgctcttctcttcgaataaaccacaaaaccaacaaacgagaagaggagtgagagaagatggggttgtcgttcacgaagctgttcagcaggttgtttgcgaagaaggaaatgaggattctgatggtaggtctcgatgctgctggtaagacaaccatcttgtacaagctcaagcttggagaaatcgtcaccaccatccccaccatcggatttaatgttgagactgtggagtacaagaacatcagcttcactgtgtgggatgttggtggtcaggacaagatccgtcctctgtggaggcatta

SEQ ID NO: 73 - DNA, 329 bp, Glycine max
  unsure (1)..(329): unsure at all n locations
  Clone ID: LIB3027-009-Q1-B1-D11
tcttcttctcttacagctanggttttagcgcagcttcttctatatttaaggaagatgggtaaggaaaaggttcacatcagtattgtggtcattggccatgtcgactctgggaaatccactaccactggtcacctgatttacaagcttggaggcattgacaagcgtgttattgagaggtttgagaatgaagctgctgagatgaacaagaggtctttcaagtatgcctgggtgctggacaaacttaaggctgagcgtgaaataggaatcaccattgatattgctttgtggaagtttgaaacaacacagtattattgcacagttattgatgc

SEQ ID NO: 74 - DNA, 326 bp, Glycine max
  Clone ID: LIB3027-009-Q1-B1-D12
cgttaaaccatggaaccgccatcgcagcaacagcctccgcaaccgccatcgcgcactgccaccatcctcggaaagtaccagctgacgcgcttcctcggccgtggcagcttcgccaaggtctaccaggggcgatccctcgtcgacggtgccgccgtggccgtgaaaatcatcgacaaatcgaaaaccgttgacgccggcatggagccacgcataatccgcgagatcgacgccatgcgccgcctccaccaccaccctaacatcctcaaaatccacgaggtgctcgccaccaaaaccaagatccacctcgtcgtggagctcgccgccgg

SEQ ID NO: 75 - DNA, 427 bp, Glycine max
  Clone ID: LIB3027-009-Q1-B1-D3
atgattctgaactccaacattggtggaaagaagctgtagagaaaggccatggtgatttgaaagacaagccatggtggcctaagttgcagacacttgaagaccttgttgaagtttgcctcattatcatatggattgcttcagctctccatgcagccgttaattttggtcagtatccttatggaggtttgataatgaaccgcccaactgcttctagaacgttgcttcctgagaaaggcaccccagaatatgaagaaatgattaataaccatgaaaaggcttatttgagaacaattacatcaaagttgccgactctcattagcctttcagtgatagagatcttgtcgacacatgcttctgatgaggtctacctttggcagaaggacaacccacatttggcctctgattcaaaagcattacaagcctttca

SEQ ID NO: 76 - DNA, 395 bp, Glycine max
  unsure (1)..(395): unsure at all n locations
  Clone ID: LIB3027-009-Q1-B1-D4
cttcgtcactgcctcccctgttccagcattcgggctttccgctggagtcggagttggcaacgctttggtgttggagatcgtgatgaccttcggtttggtgtacacagtctacgccactgccgttgaccccaagaagggcaatttgggaattattgctcccatcgccattggtttcattgttggcgctaacattttgttgggtggggccttctccggagcagccatgaaccctgctgtgacatttgggcctgctgtcgtgagctggacctggaccaaccactggatctactgngccggccctctcatcggaagtggaattgctgggcttatctaccaggttgtcntcatcagccacacccacgagcagctttccagcactgactactagaggggga

SEQ ID NO: 77 - DNA, 321 bp, Glycine max
  Clone ID: LIB3027-009-Q1-B1-E10
aaactaagagatggaaggaatttagcatacaaagagcatggtgtcccaaaagatgttgccaagcataaaatcatctttgtccatggttttgatgcttgcaggcatgatgcctatgttgccaaaacactatcacctgatgttgctgaagtattaggggtttacattgtatcttttgatagacctgggtatggggaaagtgatcctcatccaaatcaaacagttaagagcctggcattggatatagaagaacttactgataaattgggattagggtccaaattctacataataggtttttcattgggtggccaggttgtttgg

SEQ ID NO: 78 - DNA, 337 bp, Glycine max
  Clone ID: LIB3027-009-Q1-B1-E11
ctccaaggaaaaaacaaagaaaaggagataattgatctttgaaaatgcagggaggaaagaaagctggacagtccatcaaggaaacagctgcaaacattggtgcttctgccaaagctggcatggataaaaccaacgccactgtccacgataacgcagaaagaatgacggcacgtgatccgatgcaaaaggagttggcaacccagaagaaagaggcaaagatgagccaggcagagctggacaagcatgcggcgcgtcagcataacacggcggcgaagcaggctgccacggcagggcacatgggacaacccatggggacccatcagacgtcagctatgcc

SEQ ID NO: 79 - DNA, 70 bp, Glycine max
  Clone ID: LIB3027-009-Q1-B1-E2
aacaacgaaaacaacaagccgggaaccaatttattcggcccaaaattaaacccccccaaaaatttccaac

SEQ ID NO: 80 - DNA, 389 bp, Glycine max
  unsure (1)..(389): unsure at all n locations
  Clone ID: LIB3027-009-Q1-B1-E6
tgatctctcctttattgaagaaattagttatggaatctggttttgggaagctccctatttttgaagttgaagctacaattgatattgccttggactgcatggcatctttattgaagaaagttgaggctaatcaagcttcattctgctcagctagttgggtgactatgatattcccttttctggtgtctgatgtacatcattaagtgttcctcaggatcttgtcatgtcttataattgaagatacctcacaggctcatcctgaagaattaggcatgttggttgaagttttgaaaagtggaatggttaccagtgcttcaggatcccaatatcgactttcncttgatgcanaatgtgattatgggaatattggtggatcctgggagttaata

SEQ ID NO: 81 - DNA, 210 bp, Glycine max
  Clone ID: LIB3027-009-Q1-B1-E7
tgatctctcctttattgaagaaattagttatggaatctggatttgggaagctccctatttttgaagttgaagctacaattgatattgccttggactgcatggcatctttattgaagaaagttgaggctaatcaagcttcattctgctcagctagttgggtgactatcatattcccttttctggtgtccgatgtacatcagtaagtgttcc

SEQ ID NO: 82 - DNA, 322 bp, Glycine max
  Clone ID: LIB3027-009-Q1-B1-F11
cggggaattccaattccacattttcaagaaataaggaggcaaaaatgttcatatatgaattggaattatttgttttcttattaggcctatcctgaagccaaaggaaatgagatcggaattcctcggggaattccaattccacattttcaagaaataaggaggcaaaaatgttcatatatgaattggaattatttgttttcttattaggcctatcctgaagccaaaggaaatgagatcggaattcctcggggaattccaattccacattttcaagaaataaggaggcaaaaatgttcatatatgaattggaattatttgtttt

SEQ ID NO: 83 - DNA, 257 bp, Glycine max
  unsure (1)..(257): unsure at all n locations
  Clone ID: LIB3027-009-Q1-B1-F2
tcaacttcatcctaaccttttacacatcatatttttcggcttagaaacaaacataagcaaatttcaaattgtcntgtccttttcgggtaatgggctgtaanaggaaaaactcctgttttgtgcgcatattgataatggnatagtctttcttctgaacccatttttgcaaaaaggaanaaagagaaagagagagagagagagaagagagagatattcactgccaagaaagaagacatgaaaattcagtgcgatgtgtg

SEQ ID NO: 84 - DNA, 317 bp, Glycine max
  Clone ID: LIB3027-009-Q1-B1-F3
ggaattttagtggacaaaactggagattggatcacacttatacaaaattctccaattagtaacttgttgagagttgctgcttggaataaaggctgtttaatggttaagattgtgatgtctgggaatgcagcagtcaaaaggagtgattgggcctcattggtacaagtgtttttaacaaacagcaacagtacagagcattttgatgcatgtaagtggacaaaattcgaaccacattcctgggaattgatcttcccaatagaggtatgtggtcccaataatggttttgaaatgtggatttctgagtgggcaaatcaaac

SEQ ID NO: 85 - DNA, 372 bp, Glycine max
  Clone ID: LIB3027-009-Q1-B1-F4
gttttgtgtttgttgatgtcacagattgaagcaccgtggtcctgactggagtgggctccaccaatatggtgataactatttggctcatcaacggttagccatagttgatccagcttctggtgatcaacccctcttcaatgaagacaaaactgttgttgttacggtgaatggagagatctacaatcatgaagaactcaggaaacaattgcctaatcacaccttccgtacaggaagtgattgtgatgttattgctcacctgtatgaggagcacggagaaaactttatggacatgcttgatggtaaattttcatttgttctgctggatactcgtgacaacagttttatagtggcacgggatgcaattggggtcac

SEQ ID NO: 86 - DNA, 393 bp, Glycine max
  unsure (1)..(393): unsure at all n locations
  Clone ID: LIB3027-009-Q1-B1-F6
caattttcttgccaccggaaagctcgtcagtcttagtgaacaacagctccttgactgtgacaacaagtgtgacataacagaaaagacttcatgtgacaatgggtgtaatggaggtcttatgacaaatgcctacaattatttgctcgagtctggtgggttggaggaggagtcttcatatccctacactggggagagaggtgaatgcaagtttgatccagagaaaatagcagttaagatcacaaatttcaccaatatccctgctgatgagaaccaaattgccgcatatttagtaaaaaatggtccacttgctatgggcgtgaatgcaattttcatgcaaacatacattggtggtgtctcatgcnctctcatatgtagcaagaaaaggctgaacca

SEQ ID NO: 87 - DNA, 378 bp, Glycine max
  unsure (1)..(378): unsure at all n locations
  Clone ID: LIB3027-009-Q1-B1-G2
attcgatgcagaggatgatgaatgctcctgattcaaatgataatattgatctactgttgagcattgatttgttgggtttacaaggagcaagtaaagcttttccaaacaagattgtttttgatgataagcttgtgttggctaatacacaagaattctttgatggaaattttccagtggattcttggttaccaatttttgtgaattgtctttatcctgtaagtcaattaccttcagaagctgtcgttgtaaatgttacatgtggtagtggacgtggtggtttacccaccactgcttggattagttctgcagttaacaatcgctcctcagatatcaacanaaagattcgcacagcacttgggaaaggtaagaaaattgttt

SEQ ID NO: 88 - DNA, 386 bp, Glycine max
  Clone ID: LIB3027-009-Q1-B1-G3
gtctgaacataactgaagaacgagtaaagaatttgcagaaagaccacctccatggtaataagtcttctatggtagtttcagtccttgttgatcccaaagaggctggcgatggtgatgttgatgttgacggcatgatgagaccaaagtcactctctcggatttttgtggttgtgctaattgatagtgtcaagtatgtcacttactcttgtggtctgcctcgtgcttctccccatttggtgactggttacgtatgacaatccttcggaaaaaagttttgatgcagccgaagcatctaacctgagttctagtttctgtaacaaaggatgtgggggactgggaaggaaagaaactcatctccagttttgtacatattaacatatttaaag

SEQ ID NO: 89 - DNA, 378 bp, Glycine max
  unsure (1)..(378): unsure at all n locations
  Clone ID: LIB3027-009-Q1-B1-G8
aaagaaattaagagagttttttttgttcctcactgaccaagccatggcgatgagaaccaaactttctttagctatctttttcttttttcttttagccttattttcaaacctagcctttggcaaatgtaaagaaaccgaggtagaagaagaagaccctgagctcgtaacatgcaaacaccaatgccaacagccacagcaatacactgagggtgacaagcgggtatgcttgcanagatgtgacaggtatcatcgtatgaagcaagagcgagagaaacanatccaagaggaaactcgtgagaagaaagaggaggaaagccgtgaaagggaagaagaacaacaagagcagcatgaggaacangatgaaaatccctacatttt

SEQ ID NO: 90 - DNA, 341 bp, Glycine max
  Clone ID: LIB3027-009-Q1-B1-G9
atccggtccagccaaaatgccaagtcctaacaaccgggaaactaatcctgatcttcaagtttaaactaaacaaaggaaaatcaagcctcaacaattctgttgcgatgggtggaccatccttttctcccaccaggtgatttcaccccgggtttgtaccactgagcttggtaagatgggctcagtatgctaaggagttttatcaacgaggagtgaagctcttaggtttatcttgtgatgatgtgcaatcccacaatgagtggatcaaagacattgaagcctacactccaggtgcgaaagtgaattatccaataattgctgatccgaagagagaaatcatcaag

SEQ ID NO: 91 - DNA, 277 bp, Glycine max
  Clone ID: LIB3027-009-Q1-B1-H10
tcctattataccttaataaataatttaagatactatgatgatgagcacggttcccattactgttgctgggacttgttttcctggcttcagtttctgtctcatttggcattgcttactgggaaaaagagaagcccacacacaacatgtgtctccagacttgcaataacgagagagactcgtacaggaaccaagcatgccacgctcgttgcaacctccttaaggtggataaagaagaatgtgaagaaggtgaaattccacgaccacgaccacgaccaca

SEQ ID NO: 92 - DNA, 326 bp, Glycine max
  Clone ID: LIB3027-009-Q1-B1-H11
tggctttctatccctccactacttttttacccctctctccttccttctcatcccgtttcctcgtatccgactccgtcgccattctccaacaccacactaaccctacaaaacctataaaccttctggttctacccgttcaaaatgatgcttccacagggctccattgggccaacctccaaaaaaggacccctctaatgcaagtaccagtcctggtggacctcaatggaaaccacttgtgggttaactgtgagcaacactactcatccaaaacataccaagcacccttctgccactccacccaatgctccagagccaacactcaccaa

SEQ ID NO: 93 - DNA, 318 bp, Glycine max
  Clone ID: LIB3027-009-Q1-B1-H12
acactttcattatcttcagttgaatatttttcccaaaatgtcaactttcatgttgaaaatcttccttctaatttccatctttcaaatctctttcgccactaggaggttgaatgagttagttcaggaccaaactcagcttcttcgttaccacaatggccctcttctctctggcaaaatctccattaacctcatttggtacggccacttcaaaccttcccagaatgcaatagtctccgatttcatcacctcgctgtcaccctcatcccctcacagcacccaaccatccgtcgccacgtggtggaaaaccacagaaaaata

SEQ ID NO: 94 - DNA, 304 bp, Glycine max
  Clone ID: LIB3027-009-Q1-B1-H2
gctctggagctttataaaacatctccgtgcaatgggtgaaaaaaagctctttaacaaatgaacaatatcccaaagagggacacagcgttaacaactgcagcgaattatgaatcaatgttttctgcagaatgacggacctgtacttgcaacattccagcgttatataacatgtaccggcgtggaccagaacatccgtctcaacagaaagcaaaaagaatgggattaaccacgatagccttcaacgatattcaggaacaagttggaaaccaaaaatgagtgtccttccccatatttttcactctgc

SEQ ID NO: 95 - DNA, 363 bp, Glycine max
  unsure (1)..(363): unsure at all n locations
  Clone ID: LIB3027-009-Q1-B1-H3
tttctttctctttccttttcttcttatccgactccgtcaccattcgccaacaccacactaaccctacaaaacctataaaccttctggttctacacgttcaaaatgatgcttccacagggctccattgggccaacctccataaaaggacccctctaatgcaagtaccagtcctggtggacctcaatggaaaccacttgtgggttaactgtgagcagcactactcatccaacacataccaagcatccttctgccactccacccaatgctccagagccaacactcaccaatgcctcagttgcccatcggcatcaatgccanggtgccacgaatacacgtgtggcctcatgttccacaaccccatca

SEQ ID NO: 96 - DNA, 218 bp, Glycine max
  Clone ID: LIB3027-009-Q1-B1-H4
ttcacaattttcaacatctaatgtggcaccaatcgttcatactcgtcaattcggcactaactgtattcctactatgcctatcctgaatctaaacgatatgaaatctgcattcctcggggaactctaagtccacatcttcaagaggtaccgtcgcatgcatgttcaaatcctgattgacatcatttgtattcacatgtgggctaaccgtaagccaaacg

SEQ ID NO: 97 - DNA, 414 bp, Glycine max
  Clone ID: LIB3027-009-Q1-B1-H6
cacacacacagctagcagatattacatacacgtgaatcactaattaagccatggagaagaaatcaatagctgggttgtgcttcctcttccttgttctctttgttgctcaagaagttgtggtgcaaactgaggcaaagacttgcgagaacctggctgatacatacaggggtccatgcttcaccactggcagctgcgatgatcactgcaagaacaaagagcacttgctcagaggcagatgcagggacgattttcgctgttggtgcaccaaaaactgttaaatggattcattcactccaacgtgaagaagatgcatgcagcgctattttataaaaaataaaactactatatactatatataataagactggcgctgcatcaatgacctatgtattatagtatatattattaccgatg

SEQ ID NO: 98 - DNA, 271 bp, Glycine max
  Clone ID: LIB3027-009-Q1-B1-H8
agcatttggaaatttggctgatgataccatcaattttgaggcttttccccacaagctggtgcagtttggagagattcaggaaaaagttgtattgaaattttcacaagaggaatttcttacagcttggtcaactcaggtgcgtcctgcaacaactctgttggctgatgggtgtccatatttgtatgcaatggtgcatgataattcagtgtctacaataccaggtgattttgtcattggtgtcaagttgacaaccataaacaatatgtgtgca

SEQ ID NO: 99 - DNA, 334 bp, Glycine max
  Clone ID: LIB3027-010-Q1-B1-A1
atccgttcaagctacatcccaccttaaacgggctcactagtcatgaagcaattcaatacacgagattgttcctactagatcatcattacccaagcatgctataggtgaggctagtagttgcaacctccataaacgcttatgctatgagaaccatccgtttcctgaaacatgtcggaacgttaatgacacctgccatagacttgactatgccatatcctcatggagatcaatctggtgcgttcagtcacattattctgcctgcagacgaatgtgttgcacgttcaaattcggtgatatcataggcttatgtaggtgtcaatgactcatgctagca

SEQ ID NO: 100 - DNA, 345 bp, Glycine max
  Clone ID: LIB3027-010-Q1-B1-A10
aaaaaaaaaaaaaaaaaaaaaaaaaaaaaaaaaaaaaaaaaaaaaaaaaaaaaaaaaaaaaaaaaaaaaaaaaaaaagttatggtggaggccgaaaattattttacttgaccctggaagttagtccgggatcccgtgccccttggcggtatacatttagggggggggccccccttttttgcctttccccccggggtattctttccggtcccgtttctcgagggtttccccttttccccatcggcgttctatttaaagctggggctttcccgggcacaacgtttttccccttgtaatttttttacccctcaaaatttccctggccctgtcggcccggttccctatt

SEQ ID NO: 101 - DNA, 246 bp, Glycine max
  unsure (1)..(246): unsure at all n locations
  Clone ID: LIB3027-010-Q1-B1-A2
gaataatgtctccaatggagtttcatagcattaccaagtttcacaatatcncacttgtgtcntcntctcctgtgattttatgtattgctaccactatactgaataaccctgcaatggccacaaagcaatattattgtgatttccctgccatctttaactttggtgcctcaaacgctgacactggtggcttggctgcttcattttttgttgctgcaccaaaatcaccaaatggagaaacctattttc

SEQ ID NO: 102 - DNA, 372 bp, Glycine max
  Clone ID: LIB3027-010-Q1-B1-A3
ctcagctttaagatcaccccagagaaaaacccccagcttcgggacttggatatcttcctcagtattgtggatatgaacgagggagctcttcttctaccacacttcaattcaaaggcgatagtgatactggtaattaatgaaggagatgcaaacattgaacttgttggcctaaaagaacaacaacaggagcagcaacaggaagagcaacctttggaagtgcggaaatatagagccgaattgtctgaacaagatatatttgtaatcccagcaggttatccagttgtggtcaacgctacctcaaatctgaatttctttgctattggtattaatgccgagaacaaccagaggaacttcctcgcaggttcgcaagac

SEQ ID NO: 103 - DNA, 189 bp, Glycine max
  Clone ID: LIB3027-010-Q1-B1-A4
ggttgggccaccaaccatggctgtaattgcctcgatctcaggacacttcaaggcaattacagccatggttgggccagcaacatatctgtaattgccttcaagtgtcctggcatcgatgtgatcgttgaggacattgcgacatcccgactcagcgcgtgttagactcatcaactcacgatatgtgcacct

SEQ ID NO: 104 - DNA, 388 bp, Glycine max
  Clone ID: LIB3027-010-Q1-B1-A5
gaacaattggctcgcagagagaacaccaccaccgagaaggagattcacgttgagaaacacagggttcccaagatggccacccacttcgagcaccttgcggagcaagctaaagaatctgacatcaccgctgggaaggatactccgcagggtagcatagaagccttgcaagctggagagagggtcaaagatcatgcaggaaaagccatgggagatattggtggacgtgggaaagccagagagactcacgagctgggtgcacactttgaatccctggctgacaaagtaactgaccatgcagcagccaatgtagttggaaacaaagagagtcaaagagaagctcgtggtggtgttcgtgatgttgggaagttcgaaatgagaactgaaaggg

SEQ ID NO: 105 - DNA, 199 bp, Glycine max
  Clone ID: LIB3027-010-Q1-B1-A6
gttcggctcgtggaacacttggctcgcatttagaacaccatcatcgataaggagattcacgttttgtaaatacatggttcctatgatggtcactcatttcgagcagcttgtggtggttgctatgtattctgtcattaccgctgggaaggttactccgtagggtagcatataatctttgcatgctggatagatggtctta

SEQ ID NO: 106 - DNA, 354 bp, Glycine max
  Clone ID: LIB3027-010-Q1-B1-A7
gttcctcactgaccaagccatggcgatgagaaccaaactttctttagctatctttttcttttttcttttagccttattttcaaacctagcctttggcaaatgtaaagaaaccgaggtagaagaagaagaccctgagctcgtaacatgcaaacaccaatgccaacagccacagcaatacactgagggtgacaagcgggtatgcttgcaaagatgtgacaggtatcatcgtatgaagcaagagcgagagaaacaaatccaagaggaaactcgtgagaagaaagaggaggaaagccgtgaaagggaagaagaacaacaagagcagcatgagggacaagatgaaaatccctacatttt

SEQ ID NO: 107 - DNA, 359 bp, Glycine max
  unsure (1)..(359): unsure at all n locations
  Clone ID: LIB3027-010-Q1-B1-A8
tgaggataatgagaattttgttgatgatgggattcaaattgagcctttcaacctagagaaagaaagggaagaaggttattttgatgctgcaggaaattttgttgaatatataagagagaacgagattaaggagccttacaggatgcatggcttgataatgttgaagttgatccaaaatatgctgcattaagctctgtagcaacagatgacgaagatgaggggcccccagacctttcctctaaagatattggaatcatgaagaggcgcattgcaaatgttcttgaacctgnggaaacagtcttgcaagccttgagaaggttaaaaggtaacagtgacagaaaagcaaaaatgtctgctga

SEQ ID NO: 108 - DNA, 279 bp, Glycine max
  Clone ID: LIB3027-010-Q1-B1-A9
gtcgtcggctcgcgtgcggcgtttggctgttttgtcggtcctgggattcgggttgcgcctttcagcctagtgatggtccgggaggccggttattttgatgctgcaggaaattttgttgaatatataagagagaacgagattaaggagccttacaggatgcatggcttgataatgttgaagttgatccaaagtatgctgcattaagctctgttgcaacagatgacgaaggattacgtgcccccaaacctttcctcaaaagatattggaatcatgaggagg

SEQ ID NO: 109 - DNA, 339 bp, Glycine max
  Clone ID: LIB3027-010-Q1-B1-B11
agcagatgatctgctgctgtaacaagatggatgccactaccccgaagtactctaaggctaggtatgatgaaattgtgaaggaagtctcttcctacttgaagaaggttggttacaacccagacaagattccatttgtgcccatctctggtttcgagggtgacaacatgattgagaggtccaccaaccttgactggtacaagggaccaactctccttgaggctcttgaccaaatcaatgagcccaagaggccctcagacaagccactcaggcttccattgcaggatgtctacaaaattggtggtattggtaccgtgccagtgggacgtgttgagactggtg

SEQ ID NO: 110 - DNA, 344 bp, Glycine max
  Clone ID: LIB3027-010-Q1-B1-B12
aaatttcagaactgcagtattttactgccataaagtccgtgaaacaacagctttcatggttccattggtggctggtgatggaaccaaaactcaggcacttgctgtttgccactcagatacttctggaatgaatcatcacatgcttcatgaactcatgggagttgatcctggaactaaccctgtttgccatttccttggaagcaaggccattttatgggtacccaatttatctatggacactgcctatcagactaacgttgttgtttaattagtccatgcatctgcatcttgggcaccataagattgtatataaaataaattatggtgtgttgtgtatgttgtgc

SEQ ID NO: 111 - DNA, 306 bp, Glycine max
  Clone ID: LIB3027-010-Q1-B1-B3
gaaaataagtaggaaatttactaactttgcttaagtggtactataggggtatacttgtaaccatttaagcaaagttggaaaagaaataactgaaaataagtaggaaatttactaacacctggttcaaatggaggtaaggacggtgtggggaggtatagtaacaagcattgagtgactgattgtaaattcagttgccgttttgacaattgcaaaatattgtacaaacattaacaattatcagttcctatcatttattggcatttgggaaaattttgtacaaatgtctttctaatctaatttgatttc

SEQ ID NO: 112 - DNA, 360 bp, Glycine max
  Clone ID: LIB3027-010-Q1-B1-B5
cacaactacaagaaagaacttccttataaccaaaaccaacaacaactatggcaagttatcagaagcactacgatgatcagggtcgcaaggtcgacgagtatggcaatgttgagaggcaaactgacgaatatggcaacccggttcatgccactagtgtcacttatgtagccaccaaaagtgttggtggctacaatgatgacgctaataagcaacatgatattactggtgtctatcccgagaaagacaccggtagacatcattttggtcgtggttacgacggtgacactaacaagcaacatgatgctactggtgtttatcccggaatagacattggtagagatcatgggactaccggtgttt

SEQ ID NO: 113 - DNA, 357 bp, Glycine max
  Clone ID: LIB3027-010-Q1-B1-B6
ctcgagccgaatcggctcgaggcttataagcaaaaccaacatcaactatggcaagttatcacaagcactatcatgatcagggtcacaaggtcgacgagtatggcaatgttgagaggcaaactgacgaatatggcaacccggttcatgccactagtgtcacttatgtagccaccaaaagtgttggtggctacaatgatgacgctaataagcaacatgatattactggtgtctatcccgagaaagacaccggtagacatcattttggtcgtggttacgacggtgacactaacaagcagcatgatgctactggtgtttatcccggaatacacattggtagagatcaggggactaccggtg

SEQ ID NO: 114 - DNA, 390 bp, Glycine max
  Clone ID: LIB3027-010-Q1-B1-B9
gtttccttgacaatctaattctgcaaaaatggcaagcaataaggagtctaagttcccagcacagagccagaaaactcagccaggaaaagaacatgtaatgaatccactcccacaagccacaaatcctgatcacaaggccgccaataaactccagggaaaggtggcgttggtgacaggaggtgactcaggaattggcagagcggtttgcctgtgtttcgcaaaagagggtgcaaccgtggcctttacatacgtaaagggccatgaggacagggataaagatgatactctgaagatgctgcttgaagctaagacaagtggtgcagacaatccattggcaatagcagcggatattggctttgatgagaactgcaaacaggtcattgaccttgt

SEQ ID NO: 115 - DNA, 345 bp, Glycine max
  Clone ID: LIB3027-010-Q1-B1-C12
cacttcccgaagtgttaaaagaatgcctctttctatagggggaggagctggtgcaaagaatgctattctcatgaatatgccaaatgctgttctttcaatgtggagatattttgttggagatctcgtctttgaagtttctaagatgacttctccttacattaaatgtacagtctctttcttcatagcatttggaaatttggctgatgacaccatcaattttgaggcttttcctcacaagctggtgcagtttggagagattcaggaaaaagttgtattgaaattttcacaagaggaatttcttacagcttggtcaactcaggtgcgtcctacaacaactctgttggc

SEQ ID NO: 116 - DNA, 332 bp, Glycine max
  Clone ID: LIB3027-010-Q1-B1-C2
ggaaaaagttgtattgaaattttcacaagaggaatttcttacagcttggtcaactcaggtgcgtcctgcaacaactctgttggctgatgggtgcccatatttgtatgctatggtgcatgatagttcagtgtctacaataccaagtgattttgtcattggtgttaagttgacaaccataaacaatatgtgtgcatatgggctcaatcctggtatttcaggttctcgtcttttgggcaccattcctcagtccatttcacagcaaactgtttggaatcaaatggcaacagtgagaacaccattgaattttgattctagcaagcagagcttttgtc

SEQ ID NO: 117 - DNA, 332 bp, Glycine max
  Clone ID: LIB3027-010-Q1-B1-C3
agaatccacacaaactcagggtatggcagagagagagagagagagagagagagagagagagaatgggagggtgggctatcgcggtgcatggtggcgctggtgtcgaccctaatctcccactcgagcgccaagaagaagcgaaacaacttctcacgcgctgtctcaatcttggaatctctgctctaaattctaatcttcccgccatagatgtcgtcgaacttgtggtgagggaattggaaacggatccgctgttcaattcgggccgtggatctgccctgacagaaaaaggaacggtggagatggaggctagcatcatggatggtccaaaacga

SEQ ID NO: 118 - DNA, 362 bp, Glycine max
  Clone ID: LIB3027-010-Q1-B1-C5
actcaccattgtgttgagacacactctctttctttcttgttattctctttctctttcatcatttggcttaaaacacacacacaaaaggtggccaaaatgagcagtgtctgtgccaagcagcacaagttttacccctctcaccaactcctttctccaaagaaaaccctcagagaaattgacatccctccaaggaagctcctcactcgccgtgccgccgcatgcgtcggcggcaccgacgtgtactcctccgaggagaccatgctgcaaaagttcctcccttccaacgattctgacgaggacgacccttactcctcagaccacttccggatgttcgagttcaaggtccgccggtgcacccgaag

SEQ ID NO: 119 - DNA, 376 bp, Glycine max
  Clone ID: LIB3027-010-Q1-B1-C9
ggagtggcaattgaatagtgaggtgatggtgaaagtgtcatcaatggagaaagagggtgaaaagcaaaaactgggggaaggaccccaaatctcaagaatggagccggtaacacatggtgcctatggtggtggaatgtacggtaccgagaaagggcaaccggagaaacaaacaaagccaccggcaagtgagagccagagtgctgatggccccgttgataaggacgctatcaagcccaaacacaatcctcccccttcaactggggacagagatttagatatcactggccaatcctatatccagttacaaaatatatgtaaatacaatcactataataatcacggtgtatcttcctcctttaggtttttttttttccca

SEQ ID NO: 120 - DNA, 351 bp, Glycine max
  Clone ID: LIB3027-010-Q1-B1-D10
cattcctgatatccctgggaaggaatatgcaatagattcagatgctgcccttgatttaccaacaaaacctgtgaaaatagccattgttggtggtggttacattgccttggagtttgctggtatctttaatggtttgaaaagtgaggttcatgtatttatacggcaaaagaaggttttgcggggatttgatgaagagattagagattttgttgaagaacaaatgtctgtaagaggtattgaattccataccgaggagtctcctcaagctatcacgaagtcagcggatggctcattctctttaaagaccaacaaaggtacagtggacggtttctcacatattatgtttgctac

SEQ ID NO: 121 - DNA, 354 bp, Glycine max
  Clone ID: LIB3027-010-Q1-B1-D12
tttctctgcagtctcttcacctttatgttaatgatattatgtgtttagagagaaagagaacaagcatagttgagcttgattgtgttcttcaacattagaacaagaaaagaaagacaacaacatggaaggaggaggagtagaagttgatgcctctgctttcagagaatgcttgtctctgtcatggaaaaatccttacgttcttcgccttgctttttctgctggaattggtggccttctctttggctatgacactggagtcatatctggggctattttatatatcagagatgatttcaaagcagtggataggaagacttggcttcaggaagccatactgagtatggctcttgctgg

SEQ ID NO: 122 - DNA, 137 bp, Glycine max
  Clone ID: LIB3027-010-Q1-B1-D5
ttttctttcgcttgttcgtttgtttaattcaataaaggaaattaggcatgaccctcttgttgagtatgctctgcctatttgaaaatttccacacctcttttaattgtcgtaatgatgtgtgaagtgtgtgttatttt

SEQ ID NO: 123 - DNA, 376 bp, Glycine max
  Clone ID: LIB3027-010-Q1-B1-D7
attcatcactagaagtgttggatgcatttctatttctaactaattattgtgcttattattattgttgagaaagaaaagaatggcaaagttaataaaattctttgagttgaacacaggggccaagattccttctgttggattaggcacttggcaagctgagcctggtgttgtagccaaagctgtcaccacagccattctggttggatacaggcatattgattgtgctcaagcgtataacaatcaagcagagattggttctgctcttaagaagctttttgatgatggtgtggtgaagcgtgaggacttatggatcacctccaaactctggtgttcagatcatgcttcagaagatgtgcccaaagcattggataaaaca

SEQ ID NO: 124 - DNA, 380 bp, Glycine max
  Clone ID: LIB3027-010-Q1-B1-E10
aggcagttggctaagttgtcctctgagataaatgcacacaacaccaatttgcttgctgttggaggaggtcctgagggtcctgatccacgggaggttgagttgtatttggaagagattctcaaccttatgcagcttggtgaggattacactgagttcatgatttccaagatcaaagcacttacttctgttgaccccgaattgctccctcgcgccaccaaggctttccggagtggcagtttcagcaaggtggcgcaggatttaacaggcttttatgtcattttggagggatttttcatggtggagaatgttaggaaggcgataaagatcgatgaacaggtgcctgacagccttaccacttctatggtggatgatgtttttta

SEQ ID NO: 125 - DNA, 397 bp, Glycine max
  Clone ID: LIB3027-010-Q1-B1-E11
aggtcaactctaaaggatcccctcggggaattccaattccacattttcaagaaataaggaggcaaaaatgttcatatatgaattggaattatttgttttcttattaggcctatcctgaagccaaaggaaatgagatcggaattcctcggggaattccaattccacattttcaagaaataaggaggcaaaaatgttcatatatgaattggaattatttgttttcttattaggcctatcctgaagccaaaggaaatgagatcggaattcctcggggaattccaattccacattttcaagaaataaggaggcaaaaatgttcatatatgaattggaattatttgttttcttattaggcctatcctgaagccaaaggaaatgagattgggattcctccggg

SEQ ID NO: 126 - DNA, 343 bp, Glycine max
  Clone ID: LIB3027-010-Q1-B1-E12
gccaggcaagccccactcaaccaccacacctctcctcgttcacgctacccctttctgctcttcttctacctttcaagttttaaaagtataaagatggcagagacattcctatttacctcagagtcggtgaacgagggacaccctgacaagctctgcgaccaaatctccgatgctgtcctcgacgcttgcctcgagcaggacccagacagcaaagttgcctgcgaaacatgcaccaaaaccaacttggtcatggtcttcggagaaatcacgaccaaggccaacgttgactacgagaagatagtgcgtgacacctgcaggaacatccggttcgtctcaaatgatg

SEQ ID NO: 127 - DNA, 366 bp, Glycine max
  Clone ID: LIB3027-010-Q1-B1-E3
ttcaagagttgaaggaaatggctgaagcacaactacgagaccagcatggcaaccctgtcccactcaccgatcaatacggtaatccggttatcttaactgacgagcgcggtaatcccgtccaactcactggtgtcgctaccaccgctaccggcacagcaggttctgggtttgggtcctatggtaccggtgcttacggtggtggtgcaagtgcaaccaccgttgcagatcttttggcaacccaaccaaggagtggcagggaggctagagagcttcgtcgttcctccagttcaagctctagctcgtctgaggatgatgggcaaggtgggaggaggaagaacggagtgaacgagtaaataaaagagaaac

SEQ ID NO: 128 - DNA, 352 bp, Glycine max
  Clone ID: LIB3027-010-Q1-B1-E4
tttggttaagagtcttgaaaaagcaagagaaaaaaaaataccaaccatggcaaccatttctgatcaacctagagggtcctactcctatggaacctcatatggagcaccctatggaaccacgtatgagaccaacaccagcattaacaacccaccttcacgccaaacagtgaagttcataactgctgccactattggcatcacactcttgctcctgtctgggttgaccctcacaggcactgtcatacgtttgatcattgcaacccctcttcttgttatcttcagccccatccttgtccctgctgcgtatgtgctgttcctagttgcttctggctttttggtccctggggggctg

SEQ ID NO: 129 - DNA, 364 bp, Glycine max
  Clone ID: LIB3027-010-Q1-B1-E7
agcaaaatgaccaagttcacaatcctcctcatctctcttctcttctgcatcgcccacacttgcagcgcctccaaatggcagcaccagcaagatagctgccgcaagcagctccagggggtgaacctcacgccctgcgagaagcacatcatggagaagatccaaggccgcggcgatgacgatgatgatgatgacgacgacaatcacattctcaggaccatgcggggaagaatcaactacataaggaggaacgaaggaaaagacgaagacgaggaagaagaatgacacatgcagaagtgctgcacagaaatgagcgagctgagaagccccaaatgccagtgcaaagcgctgcagaagataatggaga

SEQ ID NO: 130 - DNA, 352 bp, Glycine max
  Clone ID: LIB3027-010-Q1-B1-E9
caaggaacggtcttgaatagcaacgattttgagctgttctggcagtcatgagggtatgttcacagcttatattcaacattaactttttaccctttttccctcttctctcgacccatcacatgttctgagtacggtcatctagtataggtcaaagattgacatagagatggtagtaggataacttgaggtggggagaaatagaactatagaaatccaaagtagatgttgtagaggcattcattactgtaacacctaatgctcaatagttcttttttttaaaaaaaaaattaatcattttcaccttgaattttcctactgtgtaaatatcaagtaactaagcacaatttagaat

SEQ ID NO: 131 - DNA, 360 bp, Glycine max
  Clone ID: LIB3027-010-Q1-B1-F10
cggctcgagcacagcaaactgtttggtatttcaggttctcgtcttttgggcaccattcctcagtccatttcacagcaaactgtttggaatcaaatggcaacagtgagaacaccattgaattttgattctagcaagcagagcttttgtcaattctctattgatcttcttggtggaggaattttagtggacaaaactggagattggatcacacttatacaaaattctccaattagtaacttgttgagagttgctgcttggaagaaaggctgtttaatggttaagattgtgatgtctgggaatgcagcagtcaaaaggagtgattgggcctcattggtacaagtgtttttaacaaacagcaac

SEQ ID NO: 132 - DNA, 342 bp, Glycine max
  Clone ID: LIB3027-010-Q1-B1-F2
cagagctcctggcatattagtatattcaagaacttgctagtgctatctactttcaaccgaaccagggagtacttcgttttttttttttccttctttgaaccgtccggttcgttgcgaactgaatactatggcagctctgttaccttgcgcgccgaacgtagtctctgctcccttggggaaccggagcacgtgccacttcccgcaccgaccttactcccacgctttctccggttcgaccgccagacactttcttcgcggttcgcttaccgtcgcccgcttcgggttccaacccggtttcttgcccgagccggacgaaactgaaggtgttctcagagaactgtt

SEQ ID NO: 133 - DNA, 325 bp, Glycine max
  Clone ID: LIB3027-010-Q1-B1-F3
gagaaatgcttgcaggtgtaaatccacacttgattcgttgtcttaaggatttccctccacgaaacaggctagatagccaagtctatggtgatcatactagtcatcatgaccatagaacacctagagcccaacttagaacggctcactgtagatgaggcaattcacaacacgagattgttcctactagatcatcatgacccaatcatgccatatttgaggcgaataaatgcaacctccacaaacgcgtaagctaccagaaccatccctttcctgaaaaatgaccgaattttaaggccacttgccatacgagttgagtttgccacat

SEQ ID NO: 134 - DNA, 344 bp, Glycine max
  Clone ID: LIB3027-010-Q1-B1-F4
gtaagggtccggtgtggcgaatgattactatttgagctcttccctctcacaaactcagaaaacaagtccaatgagcaatttccagagaatatcacacgaatcccaccctcccccagggtacggatctccttaccctccaccccaaccgggttacccatccgcaccgcctcatgaagggtaccctccgccgccgccgcctcacggatacggtgggtaccctccgccgcagccgccgcagcgtccgccgtacgactcctatcagggttacttcgataacgggcatccaccgccgcctccgccgccgcactaccactaccagcacgtggatcaccatcaccaccatg

SEQ ID NO: 135 - DNA, 340 bp, Glycine max
  Clone ID: LIB3027-010-Q1-B1-F5
cgaatggagatcgaaaaagacacaacccagaagacctagacaagaagaaccacgtgaaagaggatgcgagacaagaaacggggttgaggaaaatatctgcaccttgaagcttcacgagaacattgctcgcccttcacgcgctgacttctacaaccctaaagctggtcgcattagtaccctcaacagcctcaccctcccagccctccgccaattccaactcagtgcccaatatgttgtcctctacaagaatggaatttactctccacattggaatctgaatgcacacagtgtgatctatgtgactcgaggacaaggaaaggttagagttgtgaactgccaa

SEQ ID NO: 136 - DNA, 359 bp, Glycine max
  Clone ID: LIB3027-010-Q1-B1-F6
ggagtagttatgaaccccgtagaccatccgcatgggggtggtgaagggagggccccaattggtagaaaaaaacccgcaactccttggggttttcctgcacttggaagaagaagtagaaaaaggaagaaatatagtgataatttgattcttcgtcgtcgtactaaatagtagagaaaatagaaattgtttcttcgtctttacaagaaaaaggagtaattaactgtgacacgttcactaaaaaaaaatccttttgtagcgaatcatttattaagaaaaataaataaacttaacacaaaagcggaaaaagatataataataacttggtccagaacatctaccattatacctacaatgagtgg

SEQ ID NO: 137 - DNA, 341 bp, Glycine max
  Clone ID: LIB3027-010-Q1-B1-F9
ctgcagcagtgtcagcgtctcttcgacaaactgctcacacttcgagggaaactgatctgtcgccagcctaaccattagaatccagaccaccgactggctaccttggtgtcagtcgtacacgaagtggtgctgagcatggagccattggtgataattttagtgggtcgaatgttaattctggtggagtgcgtgatcaagtaaaaaatttgcaaatgcttgaggcagcccacttcacaattcgactacccaaagactctgaatgtcacaggacttacactcctaagcacccatcaattacacctcccagctatcctcaagtacaggcagccactgttaaaaat

SEQ ID NO: 138 - DNA, 323 bp, Glycine max
  Clone ID: LIB3027-010-Q1-B1-G1
gtggaacactaccattggtcaaggtagaggaaatatctcagactattgacacgctgaattttaccgtccaaaactctgttcagttcgctggtcctttggccaccacctcaattagtactaatgccaaattcgatgttcgaagtccaaaacgtgtgcagataaaatttgaggaaggcataattggcactccacagcttacggactcactagagataccagaaaatgtggaacttctgggtcaaaagattgaccttacacctttcaaaggaatccttacctctgtccaagacacagcctcatcggtggtgaaaacaatttcaagt

SEQ ID NO: 139 - DNA, 339 bp, Glycine max
  Clone ID: LIB3027-010-Q1-B1-G10
gaaaatcaccccattctcatcgtttaggattgaacaagtttgctgacatcactcctcaagagttcagcaaaaagtacttgcaagctcccaaggatgtgtcgcagcaaatcaaaatggccaacaagaaaatgaagaaggaacaatattcttgtgaccatccacctgcatcatgggattggaggaaaaaaggtgtcatcacccaagtaaagtaccaagggggctgtggaagcggttgggcgttttctgccacgggagccatagaagcagcacatgcaatagcaacaggagaccttgttagcctttctgaacaagaactcgtaaactgtgtggaagaaagcg

SEQ ID NO: 140 - DNA, 376 bp, Glycine max
  Clone ID: LIB3027-010-Q1-B1-G11
aaaattagaaaaaataccacatgaatattctaccataataggtattgaagaatcagtacatgaaattttaatgaatttgaaagaaattgtattgagaagtaatctgtatggaactcgggacgcgtctatttgtttcaaaggtcctggatatgtaaccgctcaagacatcattttaccaccctctgtggaaatcgttgataatacacaacatatagccaacgtaacagaacccgttaatttgtgtattgaattaaaaattgagaggaatcgtgggtatcgtataaaaacactaaaaaactttcaagatggaagttatcctatagatgccacatttatgcctgttcgaaatgttaatcataatattcattcctaagtg

SEQ ID NO: 141 - DNA, 275 bp, Glycine max
  Clone ID: LIB3027-010-Q1-B1-G12
aaaattagaaaaaataccacatgaatattctaccataataggtattgaagaatcagtacatgaaattttaatgaatttgaaagaaattgtattgagaagtaatctgtatggaactcgggacgcgtctatttgtttcaaaggtcctggatatgtaaccgctcaagacatcattttaccaccctctgtggaaatcgttgataatacacaacatatagccaacgtaacagaacccgttaaattgtgtattgaattaagaattgagaggaatcgtgggt

SEQ ID NO: 142 - DNA, 220 bp, Glycine max
  Clone ID: LIB3027-010-Q1-B1-G3
gacgatttagacagatttgtcacgtgatgatgttgacactcctaaaggttccatgttggatcgtaaaatttctcactctaaaattgcagttcccaagaacgcagaatagttccaccaactgtgttcttgggaaatgcaattttgcctagtgatctattggcaaattttctgacagacggcaggtttacagcaagtgttgatttgcagcgcaatcatcgta

SEQ ID NO: 143 - DNA, 312 bp, Glycine max
  Clone ID: LIB3027-010-Q1-B1-G4
agacagcattctagtggtggctacgatggtgacactaataaacatcatggaactactggtggctataatgatgacaccaatagacatcatggaactaccggtgtctatggtatagacaccgataggcaacaacatgggactactggtggctatgccggtgacactggtaggcaacatgggaacatcggtggcccttactatggaaccaacaccgcagacaccggtactggtcccagaagtggaaccacgggcggcaccggttatggacgcactggtggcactgattatggaacaactggtggcactggttat

SEQ ID NO: 144 - DNA, 364 bp, Glycine max
  Clone ID: LIB3027-010-Q1-B1-H11
ctcgagccgctcgagccgcaaatctgaatgatgttaactggaatttgtatctgaatactctattttggaatctcaactattgggactccataagtactcttgctggagaagtagaaaatccgaagaaaactcttccgaaggctttgttttatgctgtgatcctagtagttctagggtacttctttcctcttctaattggtactggtgctgttcctgtcaaccgtgagttgtggacagatggctacttctcagatattgctttgattataggaggagcatggttgagatggtggcttcaggctgctgctgcgatgtcaaacatgggaatgtttgttgctgaaatgagcagttacgccttccaact

SEQ ID NO: 145 - DNA, 328 bp, Glycine max
  Clone ID: LIB3027-010-Q1-B1-H12
caacatgagcagtttgaggtagagcaacctttggaagtgcggaaatatagagccgaattgtctgaacaagatatatttgtaatcccagcaggttatccagttgtggtcaacgctacctcaaatctgaatttctttgctattggtattaatgccgagaacaaccagaggaacttcctcgcaggttcgcaagacaatgtgataagccagatacctagtcaagtgcaggagcttgcattccctgggtctgcacaagctgttgagaagctattaaagaaccaaagagaatcctactttgtggatgctcagcctaagaagaaagaagaaggga

SEQ ID NO: 146 - DNA, 402 bp, Glycine max
  unsure (1)..(402): unsure at all n locations
  Clone ID: LIB3027-010-Q1-B1-H2
aaaaatggagccattattttcttcagcagcagcaatatgtgtggtgactgtgttggtagctgtgattcccatatgggcactgaagatgctgaactcgctgtggcttaggccaaagaggtttgaaaggcttcttagagcgcaaggttttcatggtgacccatactcactttctcatcacaactccaaccaaacccttttgcaacaacaccagctcaattcccaaccttttcctctatccgatgatgttgctcctcgtgtatcctccttgttacatcacactatcgacaaatatggcaagaaatccttcttttgggaaggtagaacaccaaaggtgatcattacggacccaaatcaactcanagaagtcttcaacaacattcatgaccttcaaaaacccaaagt

SEQ ID NO: 147 - DNA, 377 bp, Glycine max
  Clone ID: LIB3027-010-Q1-B1-H5
gctcgttgtcagtcctgaattcaactgttcaaatgagattctgtccgtttctgccatgctttcagtacccaattgctttgtccggcctagggaggcacaaaaagctgcggatgaagctaaagctaggttcgggcacattgatggagatcatctcacactgttgaatgtctatcatgcgtacaagcagaataatgaggatccctcttggtgctacgataactttgttaatcatagggcattgaaatcagctgataatgttagacaacacttagtgcgtatcatgtcccggtttaatctgaagctatgcagcactgactttaatagccgcgactactatgtcaacataagaaaagctatgctagctgggtatttcatgc

SEQ ID NO: 148 - DNA, 101 bp, Glycine max
  Clone ID: LIB3027-010-Q1-B1-H6
gctcgtcgccactcctccatttaagcgttcattttcgaatctgtctgtctcggctatgccatcactcgggaaatggtctgtcaggacaaagcaggataatc

SEQ ID NO: 149 - DNA, 66 bp, Glycine max
  Clone ID: LIB3027-010-Q1-B1-H9
gggtgctctgcactagtgcatctgactccgcgccgggagacgcggtatgcatattgtccgcggatc

SEQ ID NO: 150 - DNA, 220 bp, Glycine max
  Clone ID: LIB3027-011-Q1-B1-A1
cagagcttttgtcaattctctattgatcttcttggtggaggaattttagtggacaaaactggagattggatcacacttatacaaaattctccaattagtaacttgttgagagttgctgcttggaagaaaggctgtttaatggttaagattgtgatgtctgggaatgcagcagtcaaaaggagtgattgggcctcattggtacaagtgtttttaacaaaca

SEQ ID NO: 151 - DNA, 278 bp, Glycine max
  unsure (1)..(278): unsure at all n locations
  Clone ID: LIB3027-011-Q1-B1-A4
gaaaaatggtttcgctgaaactgcagaagccgctcgccgccaacctgctcaagtgttgcaaaagaaaaggttggcttgaacccaatgaaatccaacgaaatctccaatggcaaatctcgccaaaaaataaggaagctgtttaaggatgggtttatcatcangaagcccacaagaatcactctcgctcacgtgctcgtcgaatgaaggaagccaagaggaaaggacgtcactctggatacggtaagcgtaagggtacaagggaagcaaggcttcccact

SEQ ID NO: 152 - DNA, 332 bp, Glycine max
  Clone ID: LIB3027-011-Q1-B1-A6
tgagaaacttcggtctccagatgacgaaaggaagcagatcgtgacagtggagggaggcctcagcgttatcagccccaagtggcaagaacaagaagacgaagacgaagatgaagacgaagaatatgaacaaactccctcttatcctccacgacgaccaagccatggaaagcatgaagatgacgaggacgaggacgaagaagaagatcaacctcgtcctgatcaccctccacagcgaccaagcaggcccgaacaacaagaaccacgtggaagaggatgtcagactagaaatggggttgaggaaaatatttgcaccatgaagcttcacgagaaca

SEQ ID NO: 153 - DNA, 303 bp, Glycine max
  Clone ID: LIB3027-011-Q1-B1-A7
aaaaaaatatcagacacaaaaagaatctatagaaatatataaataatatatataaggtacaaatagtaaatcgaggtacccattttatgataaactttccttccatttttgttcctctagtaggcctagtatttccggcaattgcaatggcttctttatttctttatgttcacaagaacaagattttttagatacagaaaacaatgtacaattctggggttttttattccccaattatactagtaaattcaacaaaaggagagtaatgaatataatctttcgctcagacgagttactgatata

SEQ ID NO: 154 - DNA, 351 bp, Glycine max
  Clone ID: LIB3027-011-Q1-B1-B2
cactgacctcaccatggcgaccagagccaagctttctttagctatcttccttttctttcttttagccttgatttcaaacctagccttgggcaaacttaaagaaaccgaggtcgaagaagatcccgagctcgtaacatgcaaacaccagtgccaacagcaacggcaatacactgagagtgacaagcgaacatgcttgcaacaatgtgacagtatgaagcaagagcgagagaaacaagtcgaagaggaaactcgcgagaaggaagaagaacatcaagagcagcatgaggaggaggaagaccaaaatccctacgtttttgaagaagataaggatttttcgaccagagtcgaaac

SEQ ID NO: 155 - DNA, 288 bp, Glycine max
  Clone ID: LIB3027-011-Q1-B1-B3
cactgacctcaccatggcgaccagagccaagctttctttagctatcttccatgtctttcttttagccttgatttcaaacctagccttgggcaaacttaaagaaaccgacgtcgaagaagatgtcgagctcgtaacatgcaaacaccagtggcaacagcaacggcaatacactgagagtgacaagcgaacatgcttgcaacaatgtgacagtatgaagcatgagcgagagaaacaagtcgaagaggaaactcgcgagaaggaagaagaacatcaagagcagcatgagga

SEQ ID NO: 156 - DNA, 318 bp, Glycine max
  unsure (1)..(318): unsure at all n locations
  Clone ID: LIB3027-011-Q1-B1-B4
gagcttaattattaacacttccttagttcaatatggggaagcncttcactctctctctttcttcnctttgcttgctactcttgtcgagtgcatgctttgctattagctccagcaagctcaacgagtgccaactcaacaacctcaacgcgttggaacccgaccaccgcgttgagtccgaaggtggtttgattcaaacatggaactctcaacaccctgagctgaaatgcgccggtgtcactgtttctaaactcaccctcaaccgcaatggcctccacttgccatcttactcaccttatccccggatgatcatcatcgccc

SEQ ID NO: 157 - DNA, 275 bp, Glycine max
  Clone ID: LIB3027-011-Q1-B1-B8
gatccttaataacgcatcagtcatcgacaaggacaatcgaacttgttcgcattaagttccacctttcaatggctgaacacgaacatcaacctttacaaatgcggacttagcataccgaattgtacatacagcagataattggcatctgaccaggtataccagttgatggccgacgctggctcatatacgcatttcaccgcaattggaatccattccaatatcaacgagtggaacttccttgcaggttccacatccactgtgaccttcgagaaacc

SEQ ID NO: 158 - DNA, 150 bp, Glycine max
  Clone ID: LIB3027-011-Q1-B1-C2
ttttttttttttttttttttttttaataaaaatgaccagtaattgtcatgggcacgtataaaaactaaagtctaggccctcgtgtatgcgattatgattgtaacattagttgaatataatttatttatttttactttttttctgcccgtc

SEQ ID NO: 159 - DNA, 78 bp, Glycine max
  Clone ID: LIB3027-011-Q1-B1-C3
gtttgtttgtaaaaaaacagtgaaattcttttattcataacttgaagtacaaaataaaagaatttcactgttttttgt

SEQ ID NO: 160 - DNA, 318 bp, Glycine max
  Clone ID: LIB3027-011-Q1-B1-C7
gaccgtcaccagaagatctataacttcagagagggtgatttgatcgcagtgcctactggtgttgcatggtggatgtacaacaatgaagacactcctgttgttgccgtttctattattgacaccaacagcttggagaaccagctcgaccagatgcctaggagattctatcttgctgggaaccaagagcaagagtttctaaaatatcagcaagagcaaggaggtcatcaaagccagaaaggaaagcatcagcaagaagaagaaaacgaatgaggcagcatattgagtggcttcaccctggaattcttggaacatgcattc

SEQ ID NO: 161 - DNA, 302 bp, Glycine max
  Clone ID: LIB3027-011-Q1-B1-D1
gtggacaccggttccaatcttttcacaactatcactgtcaatgagcctgctcctggtctcaagactatttttagctttagagttcctgatcaaaggtctggaaaggtggaagtccagtacttgcatgactatgctggaataagcaccagtgtgggtttaacagcaaacccaattgtcaacttctccggcgttgtaggaactaatgtacttgcccttggtactgatgtttcttttgacaccaagattggggagttaactaaattcaatgctggattgaacttcaccaaagaatgatttgggtg

SEQ ID NO: 162 - DNA, 333 bp, Glycine max
  Clone ID: LIB3027-011-Q1-B1-D3
caaacattgaacttgttggcctaaaagaacaacaacaggagcagcaacaggaagagcaacctttggaagtgcggaaatatagagccgaattgtctgaacaagatatatttgtaatcccagcaggttatccagttgtggtcaacgctacctcaaatctgaatttctttgctattggtattaatgccgagaacaaccagaggaacttcctcgcaggttcgcaagacaatgtgataagccagatacctagtcaagtgcaagagcttgcattccctgggtctgcacaagctgttgagaagctattaaagaaccaaagagaatcctactttgtggatg

SEQ ID NO: 163 - DNA, 369 bp, Glycine max
  Clone ID: LIB3027-011-Q1-B1-D4
ctaaatggtattcctgtagctattggaattatggattttcagtttatggggggcagtatgggatccgcagtaggtgagaaaatcacccgtttggtagaatatgctactaatcaacttttacctcttattctggtatgtgcgtccggaggagcgcgtatgcaagaaggaagtttgagcttgatccaaatggctaaaatctcttctgctttatatgattatcaaaaaaataaaaagttattctatgtatccatacttacatctcccactactgggggggtaactgctagttttggcatgttgggggaaatcattattgccgaaccaaatgcctaaattgcatttgctggtaaaaaagtaattgaacaaaca

SEQ ID NO: 164 - DNA, 191 bp, Glycine max
  Clone ID: LIB3027-011-Q1-B1-D8
gagattaattgttttcataatatgccaatcgcgatgccaggggaaatgagatcgtggattcctcggggaactccaaatctatgttttccagattgtatgctgcacaagtgttgcatatataaatggtattcattggtttcctaataaggccaaccctaatcccaagggaattggattcggaattccccggg

SEQ ID NO: 165 - DNA, 358 bp, Glycine max
  unsure (1)..(358): unsure at all n locations
  Clone ID: LIB3027-011-Q1-B1-E1
gattgggcctcattggtacaagtgtttttaacaaacagcaacagtacagagcattttgatgcatgtaagtggacaaaatcagaaccacattcctgggaattgatcttcccaatagaggtatgtggtcctaataatggttttgaaatgtggagttctgagtgggcaaatcaaacttcatggcatttgagtttccttattgacaatcccaaacagtctacagtttttgatattctcttgggaatctctcaagattttgaaattgctggtaatactcttatgccagctttttctgttccacaggctactgccaaatcntctgaaaatgcggaatcctctgcatgatctggaatttgtgttt

SEQ ID NO: 166 - DNA, 258 bp, Glycine max
  Clone ID: LIB3027-011-Q1-B1-E2
ctccattctccacacttgactcacttctctacaaccctctcaatattttattatacccaacaaaaattcttcactcactcttaatttcttatggcatcatccgagaacgtagccagcattgagccatgtatgcttcgtccccctgtcaccgattcatggctcgcagagttcttcgctcgtgacgccgatgccttaaccaaggctcttcagaagtctctctccggtactgtcctgccggacgaggaaaactacttttct

SEQ ID NO: 167 - DNA, 339 bp, Glycine max
  Clone ID: LIB3027-011-Q1-B1-E6
actcctttggatattctgcagcgactggtctccacattggaccgttgtgcatcacgcacatgctcattacctgttgagactgtagagcttatgcctcctcactgcagcagattttccttgacttgtttacagaagttattttctttgtgcagttattctaatgaagtcaattggaatatgacaagatctgaagtcagcaaaatctcaattacagtgctcatgaccagatgtgaatacatcttgagcaggtttctgacagatgaaaatggcttaggtgactgtccattaccaaaagcaagacttgatgaaattatttatgttctccaagaactggcacat

SEQ ID NO: 168 - DNA, 316 bp, Glycine max
  Clone ID: LIB3027-011-Q1-B1-E7
ctcatcgttatccttaacgggactgccattctttccttggtgaacaacgacgacagagactcctacagacttcaatctggtgatgccctgagagtcccctcaggaaccacatactatgtggtcaaccctgacaacaacgaaaatctcagattaataacactcgccatacccgttaacaagcctggtagatttgagagtttcttcctatctagcactgaagctcaacaatcctacttgcaaggattcagcaggaacattttagaggcctcctacgataccaaattcgaggagataaacaaggttctgtttagtagag

SEQ ID NO: 169 - DNA, 312 bp, Glycine max
  Clone ID: LIB3027-011-Q1-B1-F2
ctcgagccgagaaaggaaataattgatctttgaaaatgcatggaggaaagaaagctggagagtccatcaaggaaacagctgcaaacattggtgcttctgccaaggctggcatggagaaaaccaaggccactgtccacgagaaggcagaaagaatgacggcacgtgatccgatgcaaaaggagttggcaacccagaagaaagaggcaaagatgagccaggcagagctggacaagcatgcggcgcgtcagcataacacggcggcgaagcatgctgccacggcagggcacatgggacaacccatggggaaccatc

SEQ ID NO: 170 - DNA, 260 bp, Glycine max
  Clone ID: LIB3027-011-Q1-B1-F3
cataattcaatgtgtcgtctacaaatgtcacagttgctggataaagccaagaacctcgtgtctgacaacgtcaatgataaggcaaagccggaggcgactgtcaccgaagtggacttcaagcacgtgagcaaatatcatgtcgagtacttggccaaggtcactgttcgtaacccttattcaacttctatacacatttgtgagatcaaccaccctttcaaaagcggatccagggagatatcatcatggaaaattccagaccc

SEQ ID NO: 171 - DNA, 346 bp, Glycine max
  Clone ID: LIB3027-008-Q1-B1-B3
gtaggatacaaccctgacaagattccttttgttcctatctctggttttgagggagacaacatgattgagaggtccacaaaccttgactggtacaagggtccaactctgcttgatgcacttgaccagattagtgagcccaagaggccctctgacaagcccctcaggcttccccttcaggatgtgtacaagattggaggtattggaactgtgccagtgggacgtgttgagaccggtgtcttgaagcctggaatggtggtgacttttgcaccaactggactgacaactgaagtcaagtctgtggagatgcaccatgaatctcttacagaggcacatcctggtgacaatg

SEQ ID NO: 172 - DNA, 357 bp, Glycine max
  Clone ID: LIB3027-004-Q1-B1-G3
gtcagatgtcacaaactcaggcctcacttggctatatacctccttcaaccccgataatgggtccttttggcaccacaggattaaatcagacatctagtgagggtgtttacctacagtggcctactgctgcaatgatgtatgcacattcatacgaccaatttagacatgctgttttccaggctccatttggtcaacagccgttgagctttgactattcacagaactattagatgacatttaggggagaatattcaatttggatgcaaaagttatgttagcttttttaaaatttcatgttacgttcatttgtcagtgctgtcagagacccttattgtgtttcagttttgatggttatag

SEQ ID NO: 173 - DNA, 409 bp, Glycine max
  Clone ID: LIB3027-004-Q1-B1-G4
caaatggataaatatgacttccaagcatcaaatatctttgtagtgccaatgcttgccctcatcactatcaacatatcttgcttctttggaggagtctacagagtgttattggtgggtgattgtgacaaaatgtttgtgcagcttttcctagcagtttttataattacggtcaactaccccatcattgaagggctgatgataaggaatgacaagggacgaatttctaagttagttgctatacctgttatcttggctactgttgttcttttggcattttttaaactactaagaatgcatagtatgctctactagtaatttgagtttaatttttgtgcactgatgggagacttttatatggtcaaccaatcagaagttatgacagatatgacctttaaccaaattttcgtaa

SEQ ID NO: 174 - DNA, 348 bp, Glycine max
  Clone ID: LIB3027-004-Q1-B1-G6
gacaatgaagaaacctaagcggaagccgaagagcaaacaaattaaacagacacggcgtgtgtgtctgttttagggaacacggcgatggtgttctcttcgaaccccgtatccctgagcgtcaccgaacccgccttcgagtcatggctccgcgacaccggcttcctcgaagtcctcgaccaccgcacctcctcctccgccgcagccgcctctcccgctccctcctccgccgcctcgactctcatctcgcgcctcgtgaccttcctcaccctcttcaccctcaacgccttcgccaagctcgccgccgatgacttcgccaccgacaccctctcctggtcccgctccctcttc

SEQ ID NO: 175 - DNA, 358 bp, Glycine max
  Clone ID: LIB3027-004-Q1-B1-G7
gtgagatttgcgaatctgacaaatggcggattcttctcgggaggagaacgtttacatggcgaaattggcggagcaggccgagcgttacgaggagatggttgagttcatggagaaggttgcaaagactgtggaggttgacgagttgacggtggaggagaggaatctcctctctgtggcttacaagaacgtgattggtgcgaggagggcttcgtggaggatcatatcctccattgagcagaaggaggagagcaggggcaatgaggaccacgtggccattataaaggagtacaggggcaaaattgaagctgaactcagcaagatctgtgatgggaatttgaaccctccttgagttcaacct

SEQ ID NO: 176 - DNA, 364 bp, Glycine max
  Clone ID: LIB3027-004-Q1-B1-G8
gcgaaagcaagaggaagatgaggatgaggagcagcagcgagagagcgaagaaagtgaagattctgagttacgaagacataagaataagaacccttttctcttcggctctaacaggttcgaaactctcttcaaaaaccaatatggtcgcattcgcgtcctccagaggttcaaccaacgctccccacaacttcagaatctccgagactaccgcattttggagttcaactccaaacccaacaccctccttctccccaaccatgctgacgctgattacctcatcgttatccttaacgggactgccattctttccttggtgaacaacgacgacagagactcctacagacttcaatctggtgatgccctg

SEQ ID NO: 177 - DNA, 332 bp, Glycine max
  Clone ID: LIB3027-004-Q1-B1-G9
ggaaaattggaaggaatctgaatatggaggtggtcagtctgttcctgttggtggcattgcatactatatcactgcaccatccagcttagctgatatggcagccaatcctttccatgctctgttctatcttgtgtttatgctttcagcctgtgccttgttctctaaaacatggattgaagtctctggttcatctgctaaagatgttgccaagcagcttaaggaacaacaaatggtaatgcctggacaccgtgagtcaaacttgcagaaagagctgaaccgatacattcccacggccgcagcatttggaggcatctgtatcggtgctctgacag

SEQ ID NO: 178 - DNA, 354 bp, Glycine max
  Clone ID: LIB3027-004-Q1-B1-H2
aagatcatacatagtagtgttggtgggttgcaaagatgcttgggggtcttctccataggggtcataagataaaagggacagtggtgttgatgcgcaagaatgtgttggacgtgaatagcgtaaccagcgttgggggaattattggtcaaggtctcgacttagttggctcaacactcgatactcttactgccttcttgggccgatccgtgtctctccagcttattagtgctaccaaagctgatgccaacggaaaagggaaacttggaaaggctacctttttggaaggtatcattacttcattgccaactttgggagcaagccaatctgcattcaaaattaatttttgaatgggat

SEQ ID NO: 179 - DNA, 349 bp, Glycine max
  Clone ID: LIB3027-004-Q1-B1-H3
agaaagagagagaagaagaaaagaagaacaaagatgcaatcctcaaaggagaagatgaaaaacatggcaagtgctgccaaggaacaagtcgacatctataaagccaaaatagacgagaaggcagagaaagcaacggcaagaacagaagaggagagggtgatagcccatgagcacgcaaaggcaaaggaagctggagcaaagatggagctgcatgaagctaaagcaaggcatgcagcagagaagctaagcgccaaccaatcacattatggtctccaccatggccacaacaaccctcccttagtaggaacaactcagactcactaccagcaagggcaccagcaccagccac

SEQ ID NO: 180 - DNA, 394 bp, Glycine max
  Clone ID: LIB3027-004-Q1-B1-H6
ctaacactagggtttacagagaagcgaagaggcgcagccgtagcagtaactcgtggaattgctagcaatggcgaggatcaaggtttacgagctgaggcagaagacgaaggctgatctgttgaatcagctgaaggacctcaaggccgagcttgccttgcttcgtgttgctaaggtcaccggcggtgcacctaacaagctctctaagatcaaggtggtgaggttgaacattgcccaggttttgacggtgatttctcagaagcagaaggccgcgttgagggatgcctacaagaacaagaagtacttgcctctcgatctccgccctaagaagaccagggccattcgcaagaggcttactaagcaccaggcatcaattaagacagagagggagaagaag

SEQ ID NO: 181 - DNA, 372 bp, Glycine max
  Clone ID: LIB3027-004-Q1-B1-H8
tctaaatgatcccctcggggaattccaattccacattttcaagaaataaggaggcaaaaatgttcatatatgaattggaattatttgttttcttattaggcctatcctgaagccaaaggaaatgagatcggaattcctcggggaattccaattccacattttcaagaaataaggaggcaaaaatgttcatatatgaattggaattatttgttttcttattaggcctatcctgaagccaaaggaaatgagatcggaattcctcggggaattccaattccacattttcaagaaataaggaggcaaaaatgttcatatatgaattggaattatttgttttcttattaggcctatcctgaagccaaaggaaatgag

SEQ ID NO: 182 - DNA, 247 bp, Glycine max
  unsure (1)..(247): unsure at all n locations
  Clone ID: LIB3027-004-Q1-B1-H9
gagcatggctcaccccttgaaggangaaagattgctgactctcaaccagttgacttgttttcaagtgcacacaatatgccaaagagtggccaaacaacaatggattcaaacactagtgatcaatctcagatgcaacgtgatacacaagaagggggttctaaagaattcaccactggagctcctggatagccccaaaaggggctcctccagcaatgggtcataaattttgaaggcaataatatagaca

SEQ ID NO: 183 - DNA, 347 bp, Glycine max
  unsure (1)..(347): unsure at all n locations
  Clone ID: LIB3027-005-Q1-B1-A1
aggaaccacatactatgtggtcaaccctgacaacaacgaaaatctcagattaataacactcgccatacccgttaacaagcctggtagatttgagagtttcttcctatctagcactgaagctcaacaatcctacttgcaaggattcagcaggaacattttagaggcctcctacgataccaaattcgaggagataaacaaggttctgtttagtagagaggaagggcagcagcaaggggagcagaggctgcaagagagcgtgattgtggaaatctcgaaggaacagattcgggcactgagcanacgtgccaaatctagttcaaggaaaaccatttcttctgaagataaac

SEQ ID NO: 184 - DNA, 359 bp, Glycine max
  Clone ID: LIB3027-005-Q1-B1-A11
caaaacagtaaagctaacttcaacacctttaattttctaaaagtaattcagcggctgaataccaagcggagaagatgagtcaggagcagccacggcgtcccaaaggccaaaaccccatcaaatacggcgacgtttttgtcgtctccggcgaccttgcacagaagcccgtcgcaccggaagatgctgccatgatgcaaagcgcggaaactcgagtgctcggacaaacccaacccggcggagcagcttccgtcatgcaatctgccgccaccaggaatgaacaggctggccttgtcggtcaccgggacgtcaccgacgttaccggcgaccgtggcgtcacagtcacagaaactaaagtccct

SEQ ID NO: 185 - DNA, 359 bp, Glycine max
  Clone ID: LIB3027-005-Q1-B1-A3
tcgacgagtgattgggcctcattggtacaagtgtttttaacaaacagcaacagtacagagcattttgatgcatgtaagtggacaaaatcggaaccacattcctgcgaattgatcttcccaatagaggtatgtggtcctaataatggttttgaaatgtggagttctgagtgggcaaatcaaacttcatggcagttgagtttccttattgacaatcccaaagagtctacagtttttgatattctcttgggaaattctcaagattttgagattgctggtaatactcttatgccagctttttctgttccacaggctactgccagatcttctgaaaatgccgaatcctctgcatgatctggaat

SEQ ID NO: 186 - DNA, 396 bp, Glycine max
  unsure (1)..(396): unsure at all n locations
  Clone ID: LIB3027-005-Q1-B1-A4
tctgtataccttgttgaatcaaaatctcccatccttcccaatgctgaaaattaatcataaccgaatttggagtaagatccaaatttccggctaattttcaacggcagattccaattctggactaaacaccagaaaaaatcttgccttgacaaaagaggaaaagatggaagtgattagaactagaggcattcctgctgatgttcttgcaaagcgagctcatgaatttgataaacatgttgctcatgatagcctcaaggatcaaattcctgctgttgacaagttgtattccactaacgttaataagtgtgcaaaaattatgaaccttagacaaagtgttgttggtgatcntaaacttcttactgatgggaagttgtatgagggtaagcatattcctgt

SEQ ID NO: 187 - DNA, 370 bp, Glycine max
  Clone ID: LIB3027-005-Q1-B1-A5
atcaagtccaagaaccaacctaccttttgcaatctcaattcaatggcgtcctctctcattgcgaagcgcttcctctcctcttccctcctctccaggtccctccttcgccccgccgcttccgcttcccaccgctctttcaacaccaacgccatgcgccagtatgacaaccgcgccgacgaccacagcaccgacatcgatcgtcactccgaacgctctttccctagcactgcgcgccgcgacgatatcttctcagatgtgttggatccattttttccgactcggagtttgagccaggttctgaacatgatggaccaggtcatggacaatccgttcctctccgcgtcgcgcgggattcgagctggcgctggag

SEQ ID NO: 188 - DNA, 404 bp, Glycine max
  Clone ID: LIB3027-005-Q1-B1-B1
tcaaaaccctaaccctaaccccaatccccagagtctggaagcctctccaatggcgtaccagacccccgatcaagattcaggttccgatccgaagaccccaacgcgcctctacaacccctacaaggatctcgaagtccccattcgcaacctctaccagctcccaacctccccggagtacctcttcgtcgaggaggcccgccgcaagcgccgatcctggggcgagaacctcaccttctacaccggctgcggctacctctccggcgctgtcggtggcgccgcctccggcctcgtcggcggcgttaaatccttcgagtccggcgacaccgccaaagctccgcgtcaaccggcgtcctcaactcctccgggcacgcccgccgcgcctggggcaaccgcctcggcgtcat

SEQ ID NO: 189 - DNA, 393 bp, Glycine max
  Clone ID: LIB3027-005-Q1-B1-B11
cgaagggtgaatatgatgagtctggtccatccattgtccacaggaagtgcttctaagtccaaaagaaatgctttaatggtgagttatgtttttgctatggcttttttggtgtctgtgtcatgtcgtgcgaactatgttgtcatggataagaggtgggataggattggagggtatattcggagagcttgatgtatcatatattgtgtggcatccctctggatgtggcgggcacagaattgttgagaagcatttttcatcttggaattcatctgtcttcgtaagtaggtttgtctgtagcaaaggagtggtgatgcttattttctttttgtaccctttttcagagttcacatttttttggcctttggaacattaatgtgaatgtctaaagctaca

SEQ ID NO: 190 - DNA, 370 bp, Glycine max
  Clone ID: LIB3027-005-Q1-B1-B12
gccctgcaatctgtgattaattcactgtagtgagtttccagggtaattacttttcaaaactgcactcatcttaaaattgggttattacatcataatagtagcatcatgtctaaatatagaactggctcacaccatggtcgtacatataagacactagttcttctcgtttaacatcttataatcattaattgatctatctctcaatctatatatagctctcaatgaccactgacgcttcgctaacttggttcagtgaacattcatattgacacgtcacttgtcttttgtacgctgatatcgttttttccgacatggttgttatcctgtgcaactatctgtcaggtaattactaattactcctcacgtaccg

SEQ ID NO: 191 - DNA, 411 bp, Glycine max
  unsure (1)..(411): unsure at all n locations
  Clone ID: LIB3027-005-Q1-B1-B2
acacaatataagtccaccctaaacaatcaccatggcagttgaagctagttacatgaatctcttgccttctcagttactcactaacagagaactcatcaaatccaatcaacagctacagcatcaattaaactctgattacatgtacaacactactacccagatggattcttcttcagctttgcctcaaccagcagcaatgcctgaatcactcttgtccttctaccaatccaacttttgtgatccaaacaaggcagatagtggtctcacctaccatattcctctccagagaaagcgttcaagagatttcaccaccgaattaacctctctcncagctcaccagaagaacaaaatctcctctgatccttcctttctcaaccaagagattctcctacaatttcagaaccaacaatc

SEQ ID NO: 192 - DNA, 409 bp, Glycine max
  Clone ID: LIB3027-005-Q1-B1-B5
ctccattggtccttaaacactcatcagtcatcaccatggccaagctagttttttccctttgttttctgcttttcagtggctgctgcttcgctttcagttccagagagcagcctcagcaaaacgagtgccagatccaaaaactcaatgccctcaaaccggataaccgtatagagtcagaaggagggctcattgagacatggaaccctaacaacaagccattccagtgtgccggtgttgccctctctcgctgcaccctcaaccgcaacgcccttcgtagaccttcctacaccaacggtccccaggaaatctacatccaacaaggtaagggtatttttggcatgatatacccgggttgtcctagcacatttgaagagcctcaacaacctcaacaaagaagacaaagcaacag

SEQ ID NO: 193 - DNA, 340 bp, Glycine max
  Clone ID: LIB3027-005-Q1-B1-B7
gagcggttcgctgcccgcgacgttgtgagaagccccaaatgccagtgcaaagcgctgcagaagataatggagaaccagagcgaggaactggaggagaagcagaagaagaaaatggagaaggagctcattaacttggctactatgtgcaggtttggacccatgatccagtgcgacttgtcctccgatgactaagaagttaaaagcaatgttgtcacttgtacgtactaacacatgatgtgatagtttatgctagctagctataacataagctgtctctgagtgtgttgtatattaataaagatcatcactggtgaatggtgatcgtgtacgtaccctactt

SEQ ID NO: 194 - DNA, 425 bp, Glycine max
  Clone ID: LIB3027-005-Q1-B1-B9
aggtcgactctaaaggatcccctcggggaattccaattccacattttcaagaaataaggaggcaaaaatgttcatatatgaattggaattatttgttttcttattaggcctatcctgaagccaaaggaaatgagatcggaattcctcggggaattccaattccacattttcaagaaataaggaggcaaaaatgttcatatatgaattggaattatttgttttcttattaggcctatcctgaagccaaaggaaatgagatcggaattcctcggggaattccaattccacattttcaagaaataaggaggcaaaaatgttcatatatgaattggaattatttgttttcttattaggcctatcctgaagccaaaggaaatgagatcgggattcctcgggggtaccgagctcgaattccctaaaatgag

SEQ ID NO: 195 - DNA, 364 bp, Glycine max
  Clone ID: LIB3027-005-Q1-B1-C1
gcgtaaaaacaaaaggcttgactagagaaagagagagagagagcttcgaatcgaaactcagaagtagaaagaaacacaaatcacaatcgctatggctaggtacgaccgagcaatcaccgtgttctcccctgacggccatctcttccaggtcgagtacgccctcgaagccgtccgcaagggcaacgccgccgtcggcgtccgcggcaccgacaatgttgtcctcggcgtcgagaagaaatccaccgccaaactccaagactccaggtcggtgaggaagatagtgaatctggacgaccacattgcgctggcctgcgcggggctgaaggccgacgcacgcgtgctcataaacagggcacgtgtggag

SEQ ID NO: 196 - DNA, 356 bp, Glycine max
  Clone ID: LIB3027-005-Q1-B1-C11
cgacgaagccaccgggaacagctcaactccttacgatttcggtgctggccatcttaacctaggacgagccatggatcctggcttggtgtacgatatcaccaacaatgattatgttaatttcctttgcggtattggttacgggcctaaggtgattcaggtgatcactcgcgcgccggcgagttgtccggtgaggaggccggcgccggagaatctgaattacccttcctttgttgctatgtttcctgcttcgtccaagggggtggcttccaagacgttcatacggactgtgaccaacgtggggcccgcgaactcagtttaccgcgtgagcgtggaggcgcccgcgagtggtgtcagcg

SEQ ID NO: 197 - DNA, 379 bp, Glycine max
  Clone ID: LIB3027-005-Q1-B1-C5
ggctttttcgccaattagtttcatttttaaaattggagcttataagtccttttctgagatatcacctgttcttcagtttgccaattttacttgcaaccaagccctcattgaagctgtggaaaggtctgacagaattcatgttatcgatttcgatattgggtttggagtgcagtggtcatcttttatgcaagagattgccttgagaagtagtggtgcaccttcactcaaagtcactgccattgtgtcaccctccacttgtgatgaggttgagctcaatttcactagagagaatttgattcaatacgcgaaagacatcaatgtgtcatttgaattcaatgttttgagcattgaatccttgaactctccttcctgtccactg

SEQ ID NO: 198 - DNA, 389 bp, Glycine max
  Clone ID: LIB3027-005-Q1-B1-C6
aaattcataatatccatttgtattacagatctccaaaattttggtcaaagaatttgccacaaatccaaaggtccaaatatgggatggtgaaggttcaaatccacatatgggacatctggcctgggctgatgcctttgttatcactgctgattcagttagtatgttgagtgaggcctgcagtactgggaagcctgtgtatgtaattggagcagaacggtgtacatggaagtttgctgacttccaaaattctttgcagaagcaaggggttgctcgaccattcactgggaatgagaatatgactgctgaaagctggagttatcctccactgaatgacaccgcagaagctgccagtcaagtggttgctgctcctgctcagcgacgatggacta

SEQ ID NO: 199 - DNA, 407 bp, Glycine max
  Clone ID: LIB3027-005-Q1-B1-C8
gatggcacaagttgaacttcgtgacgagcatgggaacccagttgaactaacagatgcatatgggaatccggtttggttaacggacgagaaaggcaacccggtgcacctcacggctgtggcaaccaatgcacacaaatctatgcttcagaatgacaccccacaagagcttcctcactccaagagttcaagctcgtctgaggatgaagggcatggagagaggatcaggaagggactgaaggataacatagaagaaaagttaccagctggagaaggagtagtgaaggagaataaacacaccacaattgctgcttctacttctacaacagatactagtgatgctaatcaccacccaaccactgagcatgacaagaagagtatcatacacaagattaaagaaaaattccaat

SEQ ID NO: 200 - DNA, 360 bp, Glycine max
  Clone ID: LIB3027-005-Q1-B1-C9
aagaactaagatggattggatcggagcgtaccgcggaggccagagaagcagggactggtgcgacccttcatcaccattcactgatttgtgggaccctcgtcgtgtcggtgacgctgatgatatcacctcctctctcgcccatgctcacgttgactggcgtgagactgataaagctcatatcttccgtgctgatcttccaggggtgaagaaagaggatctgaaggtgcaggtggaggagaataagatcgtgcagataagcggggagagggtgaacgagaaggaggaccagatcgacaagtggcatcgcgtccagatgcagtgcggaagcttcctccgccgcttccggctgccggaggatgc

SEQ ID NO: 201 - DNA, 391 bp, Glycine max
  Clone ID: LIB3027-005-Q1-B1-D10
tgcatggatccaggtcgactctaacggatcccctcggggaattcgcaattccacattttcaagaaataaggaggcaaaaatgttcatatatgaattggaattaattgttttcttattaggcctatcctgaagccaaaggaaatgagatcggaattcctcggggaattccaattccacattttcaagaaataaggacgcaaaagtgttcatatatgaattggcattagttgttttcataataagcctatcctgaagccaaagggaatgagatcggaattcctcggggaattccacatccacattttcaagatataaggaggcacaaatgttcatatatgaaatgggaatatttgttttcgcattaaggctatcctgaagcccaaggaaatga

SEQ ID NO: 202 - DNA, 375 bp, Glycine max
  Clone ID: LIB3027-005-Q1-B1-D12
cggctcgaggctgatacaggtggaggagatgcagtgagaccagtggtaatatgtgataacaagtgtggctgcacacttccatgcactggtggttccacttgcaggtgcacaagtgctggcactgccacaggagggggtgatcacgtgacatgctcgtgcggagagcactgtggttgcaatccatgctcatgtcccaagattgcggctgctggaagtggttgcagatgtggcacagattgtgcatgtgcctcctgccgcacttagtatcacaccttaaggcttaaacttcacgttttattttatgtcttcaaatcttgaatacgttttctatatattagtcttgtttaaagttcaaagtgttgacgtggtttccac

SEQ ID NO: 203 - DNA, 394 bp, Glycine max
  unsure (1)..(394): unsure at all n locations
  Clone ID: LIB3027-005-Q1-B1-D4
agaagaaaataacaaaggtccgtttaataaaaaaggaaggcaacaacaaagggaacaaaaggttccaaaaaaccttaattttggaaaccccaaaggaacaaatccgggcactgagcaaacgtgcaaaatccaatttcaaggaaaaccattcctctgaagatanacctttaacttgagaagccgcgaccccatctactccaacaagcttggcaagttctttgagatcaccccagagaaaaacccccagcttcgggacttggatatcttcctcagtattgtggatatgaacgagggagctcttcttctaccacacttcaattcaaaggcgatagtgatactggtaattaatgaaggagatgcaaacattgaacttgttggcctaaaagaacaacaa

SEQ ID NO: 204 - DNA, 367 bp, Glycine max
  Clone ID: LIB3027-005-Q1-B1-D6
aaaagcaatgactatgtcatttaatccaaacccgtgttctgatgcatggagtttggaatttctgaagcgtactggatttcattgcgatatcatttgtgtcactggatggactgccaccccaatgcaggatgttcaggttacaattgattggtttatttcctctcaggaatgtgttcccaggacctattgtgttttaaatccacaaaatccttttgtgttaaataggtggatgggaaaattgactttcccccagggcacttcccgaagtgttaagagaatgcctctttctatagggggaggagctggtgcaaagaatgctattctcatgaatatgccaaatgctgttctttcaatgtggaaatatttg

SEQ ID NO: 205 - DNA, 208 bp, Glycine max
  Clone ID: LIB3027-005-Q1-B1-D8
atgccatcaaccgtaacaatgccactttgctgtcgtctttccacatgttccgctgccctgactatgatcatacagatccactcttgcgtctaatttcgattatcactttatatgactatatcgataccattcgtgtttcaatatattctcgttctagctcactcgtgtacatactctcacgcatttgatctgagtgtctattgttctc

SEQ ID NO: 206 - DNA, 383 bp, Glycine max
  Clone ID: LIB3027-005-Q1-B1-D9
ggattattatgtatctattaacagtgattcatatatagccacatattttgggaacatggataagatggttgcagcaatgagagctttcaatggtttatacaagactctatttttgagcagaagaagttttgcacaattaacctcacagggtcttagaggaaagaagttgatgcaagccctatggaagcttcacagagatgattttgccaatggaagaggctctgctctgtccgagtgtttttgcgaattcaagttgtgattttggatctcggattcatcatttttgtagttttgacattattaatttaatttggcttttcacttttcaggaaggcacttcttagcttctgtcagcttgtttattattttgtattgatgtgatg

SEQ ID NO: 207 - DNA, 355 bp, Glycine max
  Clone ID: LIB3027-005-Q1-B1-E10
ccaacctcatcaagaggaagagcacgagcagaaggaggaacacgaatggcatcgcaaggaggaaaaacacggaggaaagggaagtgaagaggaacaagatgaacgtgaacacccacgcccacaccaacctcatcaaaaggaagaggaaaagcacgaatggcaacacaagcaggaaaagcaccaaggaaaggaaagtgaagaagaagaagaagaccaagacgaggatgaggagcaagacaaagagagccaagaaagtgaaggttctgagtctcaaagagaaccacgaagacataagaataagaacccttttcacttcaactctaaaaggttccaaactctcttcaaaaaccaatat

SEQ ID NO: 208 - DNA, 315 bp, Glycine max
  Clone ID: LIB3027-005-Q1-B1-E2
attagattcagattgtggccgtggcagccatcagcaatatctctaaactcgaaaaatggatcagcgaaagctacgagactcgtccaattcgaaacccgcttcagatgcagcaccccatcacgtcagtctcacctctaaccgcttccgcaactctcaagctgctgtgatggagagagagaaagagaagggtgaaggggataacgaggatgcaagtgcggcacgataggttctaaaagcataccgcgataagctcaaaagggatcgactcaatgagcacttccaggagttgggaaacgcgttagatcctgatagacc

SEQ ID NO: 209 - DNA, 415 bp, Glycine max
  unsure (1)..(415): unsure at all n locations
  Clone ID: LIB3027-005-Q1-B1-E4
gtccttaaaaaacccaccatccacaacaatggccaacctagttttttccctttgtttcctgctttccagtggctgctgcttcgctttcagttccagagagcagcctcagcaaaacgagtgccagatccaaaaactcaatgccctcaaaccggataaccgtatagagtcagaaggagggctcattgagacatggaaccctaacaacaagccattccagtgtgccggtgttgccctctctcgctgcaccctcaaccgcaacgcccttcgtagaccttcctacaccaacggtccccaggaaatctacatccaacaaggtaagggtatttttggcatgatatacccgggttgtcctagcacatttgaagagcctcaacaacctcaacanagaggacaaagcagcagaccacaagaccgt

SEQ ID NO: 210 - DNA, 181 bp, Glycine max
  Clone ID: LIB3027-005-Q1-B1-E5
ggctcgatattatattcagattgtggccgtggcaaccagcaacaatatgtctaaactcgagtgatggtctcagcgttagctacgacactcgctccatttcggggggggcttcatatgcagcaccataacatgtcactctcacttctaattggttccgcaactctcaatctgatgtaaggga

SEQ ID NO: 211 - DNA, 403 bp, Glycine max
  Clone ID: LIB3027-005-Q1-B1-E8
ctcgagccgcttaattattaacacttccttagttcaatatggggaagcccttcactctctctctttcttccctttgcttgctactcttgtcgagtgcatgctttgctattagctccagcaagctcaacgagtgccaactcaacaacctcaacgcgttggaacccgaccaccgcgttgagtccgaaggtggtttgattcaaacatggaactctcaacaccctgagctgaaatgcgccggtgtcactgtttccaaactcaccctcaaccgcaatggcctccacttgccatcttactcaccttatccccggatgatcatcatcgcccaagggaaaggagcacttggagttgcaattccaggatgtcctgagacgtttgaggagccacaagaacaatcaaacagaag

SEQ ID NO: 212 - DNA, 396 bp, Glycine max
  Clone ID: LIB3027-005-Q1-B1-E9
agcaaaatgaccaagttcacaatcctcctcatctctcttctcttctgcatcgcccacacttgcagcgcctccaaatggcagcaccagcaagatagctgccgcaagcagctccagggggtgaacctcacgccctgcgagaagcacatcatggagaagatccaaggccgcggcgatgacgatgatgatgatgacgacgacaatcacattctcaggaccatgcggggaagaatcaactacataaggaggaacgaaggaaaagacgaagacgaagaagaagaaggacacatgcagaagtgctgcacagaaatgagcgagctgagaagccccaaatgccagtgcaaagcgctgcagaagataatggagaaccagagcgaggaactggaggagaagcagaag

SEQ ID NO: 213 - DNA, 373 bp, Glycine max
  Clone ID: LIB3027-005-Q1-B1-F1
ctcaaaagcttcatcttcgcagtcaaccttcaagtccctggaaaagaacatcacagcgcggtcttctacttctcaaccgacgaaccgataacctccggttcgctcctctcccggttcatcgagggcgacgacgcgttccgaaaccagcggttcaagctcgtgaaccggatcgtgaagggtccatggatcgtgaaaaaggctgtggggaattacagcgcttgcttattgggaaaggcgctgacgtgcaactatcacagaggaccaaactacttcgagattgacgtggacattgggagcagcgccatcgccaacgctatcctgcgcctcgcgctggggtatgttaccagcgtcaccatcgatatggggtttgttg

SEQ ID NO: 214 - DNA, 361 bp, Glycine max
  unsure (1)..(361): unsure at all n locations
  Clone ID: LIB3027-005-Q1-B1-F5
agaaagaccaaaaaagggtaggaaagactagtgagtctctgaagagagtgagagctgtctctattgttgaaacctctccatgcaccttggatatggactacaatgaagctgcagccaaacttgaaaatatatataaactcagccctgtatctgatacctgtaatatggaagatattgatagtaaagtcgagagagtcttgtggaggaggaggaaggttggtaatgaacatgatgatgaaaattgtgatattgtggttagaaaccagaataagaaggccaaacgattgagtcttgataagaggattacattgaaaaataatgcanaggaggaagtgattgaccaaactcagaagataagaaa

SEQ ID NO: 215 - DNA, 373 bp, Glycine max
  Clone ID: LIB3027-005-Q1-B1-F7
gagagagattgtgaagtaagtagaaatcggtgcaagaaattctccgctttatctacaaaatttaagtgagtttgtgaagacaaaaaatcactagctactaaaaaatggccacagttggaaggaacgcagcagctccattgctgtttcttaacttgatcatgtattttattgttcttggctttgctagttggtgcctcaacaagttcatcaatggccaaacttaccaccctagctttggtggaaatggtgcaactatgtttttcttaatcttctccatactagcagccgttttgggcatagtgtccaaacttttgggtgcgaatcacattaggacatggacgagtgacagtttagcatctgcaggagccacatc

SEQ ID NO: 216 - DNA, 390 bp, Glycine max
  Clone ID: LIB3027-005-Q1-B1-G1
aacaattccttcacttgcagcactgttgcatcatcatcttcattgcaaaaccctaaacttcaccttcaaccatgaccacacaagtaccaccacacagtgtccaagtccacacaacaacacaccgctacgaagctggcgtcgtcccccccggagcccgtttcgaaccgccgcgttatgaagccggcgtcaaagcgccctccaattaccaatccgagagaggtgcaacgacttctcaagtcctcgccgtcctcgccggcctcccggtcggtggcatcctgcgcctcctggcgggattgaccctggcaagagccctcaccggactggcagttgccacgccgctcttcgtcctcttcagaccggtgctggttcagccacagtcgccatcggcct

SEQ ID NO: 217 - DNA, 371 bp, Glycine max
  Clone ID: LIB3027-005-Q1-B1-G11
ctcaagtagaggaactggttgtggatgaagaaagtttagctttccttggggagattggacaacaaacatctttaaggcatgcagttcaactgttatcacctgccagcattgttgcaaaaatgaatggccgagacaacatctgcaaggcggatcttgaggaagtttgtacgctatatttggatgccaaatcatcggccaggttacttcaagagcagcaggagaaatacatttcataatattgttttccaactgttgcgatgactgttggttgggtttgaattacaaccagtttttgctttcgcttctatactgtctcttgcatgattgagataatcggttcaagggctgtaattttgttactgaattcattt

SEQ ID NO: 218 - DNA, 364 bp, Glycine max
  Clone ID: LIB3027-005-Q1-B1-G12
agaacacacagtttgatcgatgatggaaacgttggccacatcttcttctgcaactcttccatcttcttcttctcccttttccattttcccttcaagaagaacttccctttatcctcccaagactctccaatttcgtttaccctcctccaagcgtgatgatgctttcgattcagactccaaagaaaaaaacaagcttccaattcttagtgatcgctgcctctctctttcccctctttccaaagatgctgcgatggggctggtgctgagtgctgcgacgggcagaggatggaccacgggttcagggatggaaggcccctctgttcctgcagttggtagggatagcgaatcggggacggggaacatc

SEQ ID NO: 219 - DNA, 391 bp, Glycine max
  Clone ID: LIB3027-005-Q1-B1-G2
atcctggtatttcaggttctcgtcttttgggcaccattcctcagtccatttcacagcaaactgtttggaatcaaatggcaacagtgagaacaccattgaattttgattctagcaagcagagcttttgtcaattttctattgaccttctcggtggaggaattttagtggacaaaactggagattggatcacacttatacaaaattctccaattagtaacttgttgagagttgctgcttggaagaaaggctgtttaatggttaagattgtgatgtctgggaatgcagcagtcaaaaggagtgattgggcctcattggtacaagtgtttttaacaaacagcaacagtacagagcattttgatgcatgtaagtggacaaaatcggaaccacattc

SEQ ID NO: 220 - DNA, 413 bp, Glycine max
  Clone ID: LIB3027-005-Q1-B1-G4
ttgcaatttagaaagttaccaaattgtgatttccccaagagaaactttaggcaaatgtcaaaggttttgtgggtggctcctgaggacaaggcgagtttatggtcacaacttcattatgtttcatgtaataatctggaaatgcaagaagcttatcttgtcaatctcgtaaatgtgttacgagaattgtatttgcacagtccagaggaagctcgccaattgagaaggaaagctctctctcgtattgaatggctgcaaaaagctgatgtgcctaccatagcacagattgaagagttccattcgatgcagaggatgatgaatgctcctgattcaaatgataatatcgatctactgttgagcaatgatttgttgggtttacaaggagcaggtaaagcttttcaaacaagattgttttt

SEQ ID NO: 221 - DNA, 411 bp, Glycine max
  Clone ID: LIB3027-005-Q1-B1-G6
ctcctgttgttgccgtttctattattgacaccaacagcttggagaaccagctcgaccagatgcctaggagattctatcttgctgggaaccaagagcaagagtttctaaaatatcagcaagagcaaggaggtcatcaaagccagaaaggaaagcatcagcaagaagaagaaaacgaaggaggcagcatattgagtggcttcaccctggaattcttggaacatgcattcagcgtggacaagcagatagcgaaaaacctacaaggagagaacgaaggggaagacaagggagccattgtgacagtgaaaggaggtctgagcgtgataaaaccacccacggacgagcagcaacaaagaccccaggaagaggaagaagaagaagaggatgagaagccacagtgcaaggggtaaagac

SEQ ID NO: 222 - DNA, 396 bp, Glycine max
  unsure (1)..(396): unsure at all n locations
  Clone ID: LIB3027-005-Q1-B1-G7
gcatggagtcctcaaagatctatgcttacctcttcctctgcatgatctttctctcttccgccactcccattctcggttgtggctactgtggcaaaccccccaaaaagcacaagcctggtaaaacaccaaagacacccaaaacacccgttgttaagccaccagtcaccatccctcccattaatgttcctcccgttgttcttccaccaatagtgaagcccccaggtattctccctccaattccaattattaacccaccaaccacaccagggaagggagggaacactccatgcccaccaccaaagtctcctgcgcaggctacgtgccccattgacacgctcaaacttggtgcctgtgtggatcntcttggagggttggttcacattggtttgggtgacc

SEQ ID NO: 223 - DNA, 412 bp, Glycine max
  Clone ID: LIB3027-005-Q1-B1-G8
aatggcttcaaccgacaagtcaccggacccaacgccggcgaagggtccggatccaactccggggaagccgatgagtgttggtcagcacgtgatcgacaagagtgcaatgatggtgcagtcgctggaccccattaagcagatgagtcagcacgtgtgctccttcgctatctacagccatgacatgtctcgccagatagagacacatcactactgctccagactccaccagaacttcatacaatgtgctgtctatgattccgatgaatccaaagctcgtctcctcggggtggagtacatcgttcctgctgatgtctttgaagcctttcctccggaggagcagaaactttggcattctcatgcttatgagattaaatcaggcctgttggtgaatcctacagttcctgaggttgtt

SEQ ID NO: 224 - DNA, 313 bp, Glycine max
  Clone ID: LIB3027-005-Q1-B1-G9
tgaacgcattgccagaggaagtgattcagcacacttttaacctaaagagccagcaggccaggcaggtgaagaacaacaaccctttcagcttcctggttccacctcaggagtctcagaggagagctgtggcttagagagccctttttgcatgtgctaccacacttttgtccttttgggctctagctagtgctggtagcagtaaataagaatgaataaaagaaacaaaggcttagatgccctttgttaagtgtagaataacgggtatagtaactatgtacccttgtgtaatgagtcactcaagtacctatgcggg

SEQ ID NO: 225 - DNA, 378 bp, Glycine max
  Clone ID: LIB3027-005-Q1-B1-H1
aaaagctgatgtgcctaccatagcacagattgaagagttccattcgatgcagaggatgatgaatgctcctgattcaaatgataatattgatctactgttgagcattgatttgttgggtttacaaggagcaggcaaagcttttccaaacaagattgtttttgatgataagcttgtgttggctaacacacaagaattctttgatggaaattttccagtggattcttggttaccaatttttgtgaattgtctttatcctgtaagtcaattaccttcagaagctgtcgttgtaaatgtcacatgtggtagtggacgtggtggtttacccaccactgcttggattagttctgcagttaacaatcgctcctcagatatcaacaa

SEQ ID NO: 226 - DNA, 161 bp, Glycine max
  Clone ID: LIB3027-005-Q1-B1-H10
gcggaatcctctgcatgatctggaatttgtgttttctttcgcttgttcgtttgtttaattcaataaaggaaattaggcatgaccctcttggtgagtatgctctgcctatttgcaaagttcgacatctcttttaattgtcgtaatgatttgtcaagtgtgtg

SEQ ID NO: 227 - DNA, 355 bp, Glycine max
  Clone ID: LIB3027-005-Q1-B1-H11
agattatgcatttttgttgcgggctacatagatcactctttatttcattgttatttcgttgggttttgataagaaccttactagaaaagctagccatgtagttcttgttctcatagctacaagtgattccagtttcagcatagttccatcatgttactgtgtttagagggtgacaagtataataattgggccagatatggttcctaagttaacatttctgtagctttattctagtttgtagcgtcctctgttaagagcagccttagaaaatagggtcttgttacctaaaagcttttgcatcctggaaggcatgtattctttttattgctcatatattatatcccttttgtggggt

SEQ ID NO: 228 - DNA, 409 bp, Glycine max
  Clone ID: LIB3027-005-Q1-B1-H2
aaaagctgatgtgcctaccatagcacagattgaagagttccattcgatgcataggatgatgaatgctcctgattcaaatgataatattgatctactgttgagcattgatttgttgggtttacaaggagcaggcaaagcttttccaaacaagattgtttttgatgataagcttgtgttggctaacacacaagaattctttgatggaaattttccagtggattcttggttaccaatttttgtgaattgtctttatcctgtaagtcaattaccttcagaagctgtcgttgtaaatgtcacatgtggtagtggacgtggtggtttacccaccactgcttggattagttctgcagttaacaatcgctcgtcagattagagcacagggattcgcagagcacttgggaaaggttag

SEQ ID NO: 229 - DNA, 389 bp, Glycine max
  Clone ID: LIB3027-005-Q1-B1-H3
gagaagatgaagttcaatccacgtgtgtcgagcagccgccgcaagagccgaaaggctcatttcacggcgccatcgagcgtgcggcgggtgcttatgagcgcccctctgtcggcggagctgcggtctaagtacaacgtgaggtcgatcccagtacggaaggaggacgaggtgcaggtgatgcgaggaacatacaagggtcgcgaggggaaggtgactcaggtctaccgtcgaaagtgggtgattcacattgagcgcataacccgcgagaaggtgaatggttccaccgtcaacgttgggattcacccctccaaggttgtgctgaccaagctcaaattggacaaggaccgtaaggccattctcgatcgcaaggccaagggtcgcgccgccgc

SEQ ID NO: 230 - DNA, 380 bp, Glycine max
  Clone ID: LIB3027-005-Q1-B1-H5
caaattttggtctgaaaatcgttgctttgcagagtataagatctggtatgctcttgctcccacgtctctgattgattacttgcaagcttcatctgcactcatggatcccaaccagatttaggtgattaattagattttcttgtgtgtgtggtgcagcccgtgggtgaaaactacgccaatcccaggacttgcttctttcatgtcctcttcaaggctgcagccttggcattttacattctctcggccctctttattgataactttgtcatcattttcgtggtgaccgttcttcttgccgcccttgatttttgggtagtgaagaatgtgagtgggcgaattttagttggattgaggtggtggaatgaaattaatgatctggg

SEQ ID NO: 231 - DNA, 349 bp, Glycine max
  Clone ID: LIB3027-005-Q1-B1-H6
ggcaatgtcacaatttctgagacttatcaatcattgattgtacgcaaatatgtgctcagataagctcgagctcacatgttctctgattaagcacatccatgacttcatctgaaatcatatctgacttccacatttgagtgaataactacattttcatgagtgtgtgatgcaacccgttggagataacaactccaatcacatgacttgctactatcatgacctcgacaccgctggaaccttgatatgaaacattctcgcagccctctttattgataaccttgacatcatgatcatggtgactgatcttcttgccgcacttgatttttggctaatgaagcctgtcagtagg

SEQ ID NO: 232 - DNA, 404 bp, Glycine max
  unsure (1)..(404): unsure at all n locations
  Clone ID: LIB3027-005-Q1-B1-H8
agaagaagaaaacgaaggaagcaacatattgagtggcttcgcccctgaattcttgaaagaagcgttcggcgtgaacatgcagatagtgagaaacctacaaggtgagaacgaagaggaggatagtggagccattgtgacagtgaaaggaggtctaagagtcacagctccagccatgaggaagccacagcaagaagaagatgatgatgatgaggaagagcagccacagtgcgtggagacagacaaaggttgccaacgccaaagcaaaaggagcagaaatggcattgatgagaccatttgcacaatgagacttcgccaaaacattggtcagaattcatcacctgacatctacaaccctcaagctggtagcatcacaaccgccaccagccttgacttcncagccctct

SEQ ID NO: 233 - DNA, 168 bp, Glycine max
  Clone ID: LIB3027-005-Q1-B1-H9
gcggaatcctctgcatgatctggaatttgtgttttctttcgcttgttcgtttgtttaattcaataaaggaaattaggcatgaccctcttgttgagtatgctctgcctatttgaaaatttccacacctcttttaattgtcgtaatgatgtgtgaagtgtgtgttatttt

SEQ ID NO: 234 - DNA, 324 bp, Glycine max
  Clone ID: LIB3027-006-Q1-B1-A10
ctccttcaaaactcatctcgaaaccctaagcactcgctcgggttcgtgtagtgccaaaccctagggctcattttccagatgtattcagtttttctctcctctcttttccgatccaccgttggagatcgaagatggtgtccgacgccagcaataagaaggccgcacagaagaacgccgccgccgccgccaagagaggtggcaaatctgccgccgctgccgttatggccgccacctcttccaaagccgccgacaaggtcgccaacggaatcgccgatattcagatttcggatcggacctgcatcggcgtcctctgttcgcatcctc

SEQ ID NO: 235 - DNA, 321 bp, Glycine max
  Clone ID: LIB3027-006-Q1-B1-A11
cctttctcttctttttccttattgttctctcaaccttcacttaaacgaataacctagaagacaagttaaaaaaaaaaaatctaaaaccttcgatctttgtcgttgttgttgttgtttttgaatttcgaccaacgcgtgcgccaccgtgcgcggcctgcgatgttgccggcgccaccgggagctacaacaacaaacgtcgtggtgagaatctcgcgctacagatcgcgcggcgagcattgataaagaagaaaaacaccacgtgggtcccacaccgatggaagctcagaagaagacccaaacccaaaccaatctcacccgaac

SEQ ID NO: 236 - DNA, 324 bp, Glycine max
  Clone ID: LIB3027-006-Q1-B1-A12
gaggcttcaatttccaattagggtttcgcttagagtaaccaattaccatgggagtcttcacctttgtcgttcgcaaatccggcgccgaatggagcgccaagcaacattccggcgacatcgaggcctccgccgactccacctacgatctccaaaggaagctcgtgcaagccgctctcgccgttgattcctccggtggagtccagtcctccttctctcccgtgtctcctacctccgctgtgttccaggtgatagtgggtggtgctgtattcgttggaggtggcggtggtgctgttgcagctgcacctgcaggtggtgctgctgcag

SEQ ID NO: 237 - DNA, 228 bp, Glycine max
  Clone ID: LIB3027-006-Q1-B1-A3
ctcaaatctgaactcggcactcgtgagcttgctactgagtttccacactgcataccttatgtcttccgaattcgaagttaacttgcaagatggctaaggaaaaggctcagatcaacattgtggtggggggtcatgtggaccctgatgacgcaaccaccattaacgagctgaagaagcctgttgtggagaaagaagctccacggcatgccatatgacggcatgcacgta

SEQ ID NO: 238 - DNA, 248 bp, Glycine max
  Clone ID: LIB3027-006-Q1-B1-A4
cgcaaggaggccgccgagagcacgctctccgcctacaaagccgctcaggacattgctaataccgagttgcctccaactcaccctatcaggctgggtcttgctctgaacttctccgtgttttactatgagattcttaactctcctgatcgggcttgcagccttgcaaaacaggcttttgatgaggctattgctgaattggatacattgggagaggagtcatacaaggatagcactttgatcatgcaact

SEQ ID NO: 239 - DNA, 343 bp, Glycine max
  Clone ID: LIB3027-006-Q1-B1-A7
aaggggtgtttcagaatccttcctagttgagaacaacaatggttcctccattgctggaaggagacttgagatcacagcacgaactgctggggcttcaaagacaattgaggtggaggttgacaagccacttggcctctccttaggccaaaagtctggtggtggtgttgtcatcactgtgagtatctagcacccgtctattcaattgaatgatttcctatttgtgaatgaggattgtttatgcaatgcgtgttgtcttctataggctgttgatggtggtgggaatgcagcaggagcagggttaaagggacgggaccaagtccgttacacgagcagtttctttggg

SEQ ID NO: 240 - DNA, 231 bp, Glycine max
  Clone ID: LIB3027-006-Q1-B1-A8
cacgagttctacattcgccttggtgactcatcgcaacattggcaccttcatgggccaaccggttgctagaatgatttcctacgcagctgtcacggcactgacgatggcgacttctgcagacagatccctcagcagccaccgactgcggctttctcttccaaacgctagcacgatcaagccttcctcgcagtccatcaaatctctaccatgctctgcgacagcgccgttttg

SEQ ID NO: 241 - DNA, 306 bp, Glycine max
  Clone ID: LIB3027-006-Q1-B1-B11
cggctcgagaattcatcattttctctcttctctgcttcttcttgttcaaatcttaggagctgaggagaatcaatcgagagaaatatgtctggtatcgctcgtggacgccttgctgaggaacgaaagtcatggcgcaaaaaccatccacacggtttcgttgccaagcccgagactctacctgatggcaccgtaaatttgatggtctggcattgcactattcctggcaagaccgggactgattgggagggtggatatttcccactgacaatgcacttcagtgaagattaccctagcaagcctcccaag

SEQ ID NO: 242 - DNA, 323 bp, Glycine max
  Clone ID: LIB3027-006-Q1-B1-B12
caacttagaagggctcactgtagatgaggcaattcaaaacaagagattgttcctactagatcatcatgacccaatcatgccatatttgaggcgaataaatgcaacctccacaaaggcttatgctaccagaaccatccttttcctgaaaaatgacggaactttaaggccacttgccatagagttgagtttgccacatcctcagggagatcaatctggtgcttttagtcaagtttttctgcctgcagatgaaggtgttgaaagttctatttggctgctagcaaaggcttatgtagttgtgaatgactcgtgctatcatcaacttg

SEQ ID NO: 243 - DNA, 247 bp, Glycine max
  Clone ID: LIB3027-006-Q1-B1-B3
gttggcctaaaagaacaacaacaggagcagcaacaggaagaccaacctttggaagtgcggaaatatagagccgaattgtctgaacaagatatatttgtagtcccagcaggttatccagttgtggtcaacgctacctcaaatctgaatttctttgctattggtattaatgccgagaacaaccagaggaacttcctcgcaagttcgcaagacaatgtgataagccagatacctagtccagtgcaggagc

SEQ ID NO: 244 - DNA, 248 bp, Glycine max
  Clone ID: LIB3027-006-Q1-B1-B7
caccacttctgaatcaaataatccaacatcacatatccgtgtaacaacagtatttctattcaaacgtcgactcaggttcactccaaaacataaacttagcaccgtcgatgaatcagcacaattggctacatcgtaatcacaggacgatcatgcaccgtttttcaagtatctacttcatgatcagaaggacaacgacaatcaagatgacaattagtatgaattgaaagattcagtgcacaatactctaa

SEQ ID NO: 245 - DNA, 244 bp, Glycine max
  Clone ID: LIB3027-006-Q1-B1-B8
cctgacaacaacgaaaatctcagattaataacactcgccatacccgttaacaagcctggtagatttgagagtttcttcctatctagcactgaagctcagcagtcctacttgcaaggattcagcaggaacattttagaggcctcctacgataccaaattcgaggagataaacaaggttctgtttagtagagaggaagggcagcagcaaggggagcagaggctgcaagagagcgtgattgtggaaa

SEQ ID NO: 246 - DNA, 262 bp, Glycine max
  Clone ID: LIB3027-006-Q1-B1-B9
aatacgtagtgttcaagacacaccacaacgccgtgagcagctacattaaggaagtgtttagggcaatcccttcggaggttctttccaattcttacaaccttggccagagtcaagtgcgtcagctcaagtatcaaggacactccggccctttggtcaagccataaataacagcaagcatatatgaaggtgtggtgaggcaaactcagaagaaaaaatatcagtacatagtttgtgtaacaataaaactatggcctacgtattt

SEQ ID NO: 247 - DNA, 263 bp, Glycine max
  Clone ID: LIB3027-006-Q1-B1-C1
tccactctaaaggatcacctcggggaattccaattccacattttcaagaaataaggaggcaaaaatgttcatatatgaattggaagtatttgttttcttattaggcctatcctgaagccaaaggaaatgagatcggaattcctcggggaattccaattccacattttcaagaaataaggatgcaaaaatgttcatatatgaattggaattatttgttttcttattaggcctatcttgaagccaaaagaaatgagatctgaatt

SEQ ID NO: 248 - DNA, 309 bp, Glycine max
  Clone ID: LIB3027-006-Q1-B1-C11
cgggaatgccaattccacattttcaacacataacgaggcaaaaatgttcagatatgaattggaattaattgttttcctaataggcctatcctgaagccacgtgaaatgatatcggaaatcctcgtggaattcccattccacattttcaacaaataaggaggcataaatgttcatatataatttgggacttacttgctttcgtattaggcctatcctgaagccaaaggaaatgagattggaattcctcggggaattccacttccacattttcacgacataaggaggcaaacttgttcatatatcaattgg

SEQ ID NO: 249 - DNA, 227 bp, Glycine max
  Clone ID: LIB3027-006-Q1-B1-C2
aaataatttaagatactatgatgagagcacggttcccattactgttgctgggacttgttttcctggcttcagtttctgtctcatttggcattgcttacggggaaagagagaaccccaaacacaacaagtgtctccagagttgcaatagcgagagagactcgtacaggaaccaagcatgccacgctcgttgcaacctccttaaggtggagaaagaagaatgtgaagaa

SEQ ID NO: 250 - DNA, 245 bp, Glycine max
  Clone ID: LIB3027-006-Q1-B1-C5
gcaccagtttcaccgcacgactatcttgttgtttggagcgatgcgagaaaaactctgtaaacatgttggtttaccaggacctccttacaggtgatgagcttctctctgactccttccgttataaggaaattgagaatggaatgctgtgggaagttgaggggaagtgggttgttaaaggagcagttgatgtagacattggtgcagacccttctgctgagggtggaggagaagatgagggagttgat

SEQ ID NO: 251 - DNA, 265 bp, Glycine max
  Clone ID: LIB3027-006-Q1-B1-C8
ctgcaattcactctgtacaattcttcgttcgttctctgcagttatatcctttttgagcttcaatggcggacgctgaaaccttcgctttccaggctgagatcaaccagcttctaagtctcatcatcaacacattctacagcaacaaggagattttcttgcgtgaactcatcagcaatgcttctgatgctttggataagattcgattcgagagcttaaccgacaagagcaagctcgatgctcagccagagctcgtcagtcgtcgggt

SEQ ID NO: 252 - DNA, 327 bp, Glycine max
  Clone ID: LIB3027-006-Q1-B1-D10
ctgtggagcgccaggctcaagacagaattcaccgaatagggcaatataagcctataaggttttagttcttgttctctagcactttcaaattagaacaattaggaaatgaaaaagtagagttaaaaatacaggttggtcctttcttcatgatctgacacttcttatatgcacagaattgtgaggtttgtcatcgagaagacaatcgaggagagaattctgaaactgcaagagaagaaggaactagtgtttgaagggactataggtggctcttctgatgctctggggaaattgacagaggcagacttgagatttttatttgttacctaa

SEQ ID NO: 253 - DNA, 233 bp, Glycine max
  Clone ID: LIB3027-006-Q1-B1-D3
acaaaatcattccaatacacatggcttccgaaaggcaagcgttaatgcttattctcttaacaacattcttcttcaccataaagccttcacatgccagtactacgtcgtggcataacaatctactggggccaaaacatttaccactgcaccttgacttccacatgctacattggaaacttcgagattgtcaacctagctttcctcaatacgtttggttgcggcataactccatc

SEQ ID NO: 254 - DNA, 231 bp, Glycine max
  Clone ID: LIB3027-006-Q1-B1-D4
aacaattcaattcaatctgcctcgatcatggagaggaaaacatttgggtttttgttcgtgctcctccttgtcttagcttctgatgtgacggtgaagagagcagaggcgaaagattgcttgacaaggaggcacgggttccagggtagatgcttattcgacaggcaatgtgcacatgtgtgcaggagcgatggtttcatcggtggtcagtgccgaggccctcttcgcaaatgc

SEQ ID NO: 255 - DNA, 417 bp, Glycine max
  Clone ID: LIB3027-006-Q1-B1-D6
ctagtcaccaaccaaacctctgcattattctcttctctcactctctctaagctctcttttagtcttactcacaaacacttttttcactgcttccattacgaacatatatttattatatggctcctgaacttgtccccaccgttgtgaaatccagtgctgcgttcacgaaacccgcgacccttccaaggcgtgcctacgtgacattcctcgccggaaacggtgactacgtgaaaggggtggttggcctcgccaaagggttgcgagaggtgaggagcgcgtacccgttggtggtggctgtccgcgccgatgtgccggaggaggagcgtgagattctggagtcgcagggctgcatcgttcgcgagatcaacccgtttaccacccgaaaacaaacccagtttgccatggcttaatacgtca

SEQ ID NO: 256 - DNA, 230 bp, Glycine max
  Clone ID: LIB3027-006-Q1-B1-E1
tctgggctctcaactgaactaagtctgaaaaggaaaacatttaactaactgcaatggctgcacgtgtggctgcaaggtacggatctagaaggctatttagcactggttctggacgaatactgagcgaggaggaaaaggctgcataaaatgcttactttatgaaagctgagcatcagaagttggacaagcttgctcgcaagggtcctcaacccgaagcaagctcggggggt

SEQ ID NO: 257 - DNA, 311 bp, Glycine max
  Clone ID: LIB3027-006-Q1-B1-E10
cttattaacactttccttagttcaatatggggaagcccttcttcattctcgctctttcttccctttgcttgctactcgtgtcgagtgcatgcgttgctatgacctgcatgacgttcaacgagtgccaactcttgcacctcaacgcgttggaaaccgagcagcgcgttgagtccgagggtggtcttattgattcatggaactctcaagaccttgagctgcagtgcgccggtgtcactgtttccagactcaccgtcatgggaatcgggcctaagttgccagctttatgatcttagctcgatatggatcattgt

SEQ ID NO: 258 - DNA, 324 bp, Glycine max
  Clone ID: LIB3027-006-Q1-B1-E11
ggagctcttcttctaccacacttcaattcaaaggcgatagtgatactggtaattaatgaaggagatgcaaacattgaacttgttggcctaaaagaacaacaacaggagcagcaacaggaagagcaacctttggaagtgcggaaatatagagccgaattgtctgaacaagatatatttgtaatcccagcaggttatccagttgtggtcaacgctacctcaaatctgaatttctttgctattggtattaatgccgagaacaaccagaggaacttcctcgcaggttcgcaagacaatgtgataagccagatacctagtcaagtgcag

SEQ ID NO: 259 - DNA, 84 bp, Glycine max
  Clone ID: LIB3027-006-Q1-B1-E12
ggagctcttcttctaccacacttccgttcatacgccatcgtcataccggtacttaatgaaggacatgcattcattgatcttgtt

SEQ ID NO: 260 - DNA, 222 bp, Glycine max
  Clone ID: LIB3027-006-Q1-B1-E2
taaaattcttccaccaagttatgggtttccttgtgttccttcttttctccctcttaggtctctcttctatttccagcatatcaactcatcgttccatagtggaggtgcacctaacgaagtttaccacacagaaacaggtgtcttcactgttccaactatggaacagtgagcatggacgtgtctaccataaccacgaagaagaggcacggagacttgagattt

SEQ ID NO: 261 - DNA, 220 bp, Glycine max
  Clone ID: LIB3027-006-Q1-B1-E3
tcccaaacatgtagcaccccttttgaaactttttctcatgagccaccccccctttgccccatgccaccacttccttaatcaatttggcatgtgagggtggtggacatgttgtggatatatggtgtgtttggtgtggctataatggtatcttccttatctttccatgctccttttctttcaacgctaagctaaaacgctccttcttgaggggcggtttctg

SEQ ID NO: 262 - DNA, 244 bp, Glycine max
  Clone ID: LIB3027-006-Q1-B1-E6
ggaaataattgatctttgaaaatgcagggaggaaagaaagctggagagtccatcaaggaaacagctgcaaacattggtgcttctgccaaggctggcatggagaaaaccaaggccactgtccaggagaaggcagaaagaatgacggcacgtgatccgatgcaaaaggagttggcaacccaggcggcgcgtcagcataacacggcggcgaagcaggctgccacggcaaggcacatgggacaaccca

SEQ ID NO: 263 - DNA, 199 bp, Glycine max
  Clone ID: LIB3027-006-Q1-B1-E7
ggaaataattgatctttgaaaatgcacggatgaaagaaagctggagagtccatcaaggaaacagctgcaaacattggtgcttctgccaaggctggcaggggtaaaaccaacgccactgtccagtagaaggcagaaagaatgacggcacgtgatccgatccaaaatgagttggcaacccaggcggcgcgtcagcataaca

SEQ ID NO: 264 - DNA, 322 bp, Glycine max
  Clone ID: LIB3027-006-Q1-B1-E9
cttattaacactttccttagttcaatatggggaagcccttcttcactctctctctttcttccctttgcttgctactcttgtcgagtgcatgctttgctattacctccagcaagttcaacgagtgccaactcaacaacctcaacgcgttggaacccgaccaccgcgttgagtccgaaggtggtcttattgaaacatggaactctcaacaccctgagctgcaatgcgccggtgtcactgtttccaaacgcaccctcaaccgcaacggcctccacttgccatcttactcaccttatccccaaatgatcattgtcgttcaagggaa

SEQ ID NO: 265 - DNA, 327 bp, Glycine max
  Clone ID: LIB3027-006-Q1-B1-F10
cacaaagagaagcattagcactaggagcagcaacaactagtctcagctgaaatggcctcttcagtgatggcatctgtggccctcaaacctgcccctttcactgttgagaagtcctcagtgagaggccttccctctctctcaaggaactcttcttcattcagagttgtggccagtggcaagaagatcaagactgacaaaccttatggaattaatggtggcatggctttgagggatggaactgatgcatctggcaggaaaggaaagggaaagggtgtttaccagtttgtagacaaatacggtgctaatgtcgatggttacagtcctatc

SEQ ID NO: 266 - DNA, 223 bp, Glycine max
  Clone ID: LIB3027-006-Q1-B1-F3
ctcaagctaaatcggctcgagctcgactgaacctgcctctgcaaccccgtttcgattgagcctcaaacatttccgttgcattcatggtccaagagaagcgcaggaggaagaaaccaaacattcttggtactggcacaccggggacaggaaagacaactgtgtgcactgctctagctgaagccacccagctctgccacatcaatgtcggagaattagtcaaaga

SEQ ID NO: 267 - DNA, 251 bp, Glycine max
  Clone ID: LIB3027-006-Q1-B1-F4
gggaaacaaaactacccttttgcttttgctctttgttctttgccatggagtggccacaacaacaatggccttccatgatgatgagggtggtgataaaaagtcaccagaaagtttgtttttgatgagcaactccacgagggttttcaagactgatgcaggggaaatgcgtgtgctgaaaagccatggtggtaggatattttataggcacatgcacattggcttcatctctatggaaccaaaatccttgtttg

SEQ ID NO: 268 - DNA, 389 bp, Glycine max
  Clone ID: LIB3027-006-Q1-B1-F6
cgtcgctccgcaccagtttcaccgcacgaatatcttgttgtttggagcgatccgagaaaaactctgtaaacatgttggtttaccaggacctccttacaggtgatgagcttctctctgactccttccgttacaaggaaattgagaatggaatgctgtgggaagttgaggggaagtgggttgttaaaggagcagttgatgtagacattggtgcaaacccttctgctgagggtggaggagaagatgaggggagttgatgatgcagctgggagggttggtgacagtgttgagacagtcagacgtcaggagcagggcggagtcgagaagaggcagtttgttaccttcatgaggaggtttatcaagaatttgactcgcaagctcgatgcagagca

SEQ ID NO: 269 - DNA, 249 bp, Glycine max
  Clone ID: LIB3027-006-Q1-B1-F7
atcaaatcagcgtcattcacctaaaccctatggccgacgaagccaaagccataaggcaacgcatccttctcctccggcgactaccccgccgcaattcaccacttctccgacgccatcgccttggtccccaccaaccacgtcctctattccaatcgatccgccgcatacgcgtctctccataactacaccgatgccttagccgatgctaagaagaccgttgaactcaagcccgactggtccaagggctga

SEQ ID NO: 270 - DNA, 245 bp, Glycine max
  Clone ID: LIB3027-006-Q1-B1-F8
ctagtcaccaaccaaacctctgcattattctcttctctcactctctctaagctctcttttagtcttactcacaaacacttttttcactgcttccattacgaacatatatttattatatggctcctgaacttgtccccaccgttgtgaaatccagtgctgcgttcacgaaacccgcgacccttccaaggcgtgcctacgtgacattcctcgccggaaacggtgactacgtgaaaggggtggttggc

SEQ ID NO: 271 - DNA, 325 bp, Glycine max
  Clone ID: LIB3027-006-Q1-B1-F9
gtaacctcttgttgggggaagcagttaaaaaatgaaccaaagcaaatgaaagtgccaaataatccgatcgaaatccaaaacctacttctgtacttccccttattaatcatttgtttttgtggctcataatcttatttttattggtatggttaaagcaaagaaatctgaagggaacaatagactttttacaataaaagggacatcccctatacattgcgatgcacgccgctttcgtacgaggtcgtgccgcaaccgcaactatttaaggataagggaatcccaaatgggtttgttgaaatggagaaaaggcaagaacgataaaggc

SEQ ID NO: 272 - DNA, 325 bp, Glycine max
  Clone ID: LIB3027-006-Q1-B1-G11
gccttttatcttttttctttctttcttttttaacagatcgttcttcttcttcccactcactctcactctctgtgttggtgagatgggtatgtcatggctgtgctgctgagaatggctcagcctcacaatggcaacaccaacaacacttcaaaccagcaattggtactccatgactttctgggtatgaggcccgccgccgattcccccaaaaccgccgatgtcaggttaccggagccttcggcctccgcctcttccaccggaggacgcggccccttctccgccacctccgacatcgcttccgaaaaacaggtaggaaatcatctcg

SEQ ID NO: 273 - DNA, 284 bp, Glycine max
  Clone ID: LIB3027-006-Q1-B1-G12
gccttatatcttttttctttcgttcctgtttgacagatagttcttcttcttcccactcactctcactctctgtgttggtgagatgggtatgtcatggctgtgctgctgagaatggctcaccctcacaatggcaacaccaacaacacttccatccagtatttggtactccatgactttctgggtatcaggctcacatccgattcctcgaactcagtggatgtcttgtaatcggaaccttcggccttcgagtcgtctaccggaggacgctgccccttctcggacac

SEQ ID NO: 274 - DNA, 224 bp, Glycine max
  Clone ID: LIB3027-006-Q1-B1-G3
caaagccagaaaggaaagcatcagcaagaagaagaaaacgaaggaggcagcatattgagtggcttcaccctggaattcttggaacatgcattcagcgtggacaggcacatagcgaaaaacctacaaggagagaacgaaggggaagacaagggagccattgtgacagtgaaaggaggtctgagcgtgataaaaccacccacggacgagcagcaacaaaggaccca

SEQ ID NO: 275 - DNA, 249 bp, Glycine max
  unsure (1)..(249): unsure at all n locations
  Clone ID: LIB3027-006-Q1-B1-G4
tggattcanacactagtgatcaatctcagatgcaacgtgatacacaagaaaggggtttcaaagaattcaacactggaacctcctggatagccccaaaaaggggtcccccaacaatgggtcataaattttgaaggcaataatataaacaaccttataaaatatgtttacttttgtgtgttttgttctgccctttgtttcttttttatggcatatcatcaatcatgtatggggatgactcccgaagttttt

SEQ ID NO: 276 - DNA, 253 bp, Glycine max
  Clone ID: LIB3027-006-Q1-B1-G8
gagtctatagccttggccgacaggtccgggtaatctttgaaatttcatcgtgatgaggaagagagcaaggaataagggaggtttcggtgtttcatcgatatcatcacagatgatgcagcagttgaatggtgaagtgagtggtgtgttgcaagatggagggaagagtgcttgggagaaaaagcagtggatgaagaagaaggtggtgcagttggaggagcagcaggtgagttatcaaatgcaagcgtttgggatg

SEQ ID NO: 277 - DNA, 325 bp, Glycine max
  Clone ID: LIB3027-006-Q1-B1-G9
agagattgtggaatttgtgatcacacaacataagcatatatatagaaagatgtcaggggcacaaggagcacaaccaaaggagtcaaaaacagcaacaacatatgagtcagtagaaggaggagagaaccgaacaaggactgacttgctttcaagggaggatcaaggctgcattcaagtggaaaaacttcaggagaaggtccatgatcctgctggcaaaggtggtcctgtctttggtgctggcaaagatgaagacaaacaagaccttggagttactggcacaggctaattaacctactatatatattactactatatactatatagt

SEQ ID NO: 278 - DNA, 227 bp, Glycine max
  Clone ID: LIB3027-006-Q1-B1-H10
tcatctcggggaattccaggtctaaatttttacaaactgaagttggacagctcggttcgcaatactgttgctgggacttgttttcctggcttcagtttctgtctcatttggcattgcttactgggaaaaagagaagcccattccagattttcaagaactgccgaggcacgagtatacagagtttgcgtggtgtgagctcttctcctatcacgctcatcgtgacgctg

SEQ ID NO: 279 - DNA, 337 bp, Glycine max
  Clone ID: LIB3027-006-Q1-B1-H12
ctggcgcatcttgttccacattttcaagatcattaggatgcaaaaatgttcatatatgaattggaattagttgttttctctatcaggcctatcctgaagccaaaggaaatgagatcggaattcctcggggaattccaattccacattttcaagaaataaggaggcaaaaatgttcatatatgaattggaattatttgttttcttattaggcctatcctgaagccaaaggaaatgagatcggaattcctcggggaattccaattccacattttcaagaaataaggaggcaaaaatgttcatatatgaattggaattatttgttttcttattaggccta

SEQ ID NO: 280 - DNA, 269 bp, Glycine max
  Clone ID: LIB3027-006-Q1-B1-H3
tctagatgatcaactcggggaattccaattcgacattttcaggaaattaaggaggcaaaatgttcaaaatataaattggaataattggtttcctaataaggcctacccgaaacccaacggaagtaagatccgaatccctcggggaattccaattcaacattttcattaaattccgacgcacaaatgttcatgacatgaattcgaattatttgtcttcttaataagcctatcctgaaaccatatgaaatgagatcggaattcctcggggg

SEQ ID NO: 281 - DNA, 409 bp, Glycine max
  unsure (1)..(409): unsure at all n locations
  Clone ID: LIB3027-006-Q1-B1-H5
gacaaccataaacaatatgtgtacatatgggctcaatcctggtatttcaggttctcgtcttttgggcaccattcctcagtctatttcacagcaaactgtttggaatcaagtggcaccagtgagaacaccattgaattttgattctagcaagcagagcttttgtcaattttccattgaccttctcggtggaggaattttagtggacataactggagattggatcacacttatacaaaattctccaggttagtaacgtgttgagagttgctgcttgggagaaaaggtgtttaatgggtaggattgtggtgtctgggaagtgagcagtcaaaaggagtgattggggctcattggtacaagtgtttttagcaaacagcancagtacagagcattttgatgcatgtaagtggac

SEQ ID NO: 282 - DNA, 294 bp, Glycine max
  Clone ID: LIB3027-007-Q1-B1-A11
ctcacacaacagacatatctcttcctcttctgtccctcaatggaaggatcaggatccggtgtggttacagtctacggcaacggcgccatcaccgagacgaagaagtcccccttctccgtcaaagtcggcctagcccagatgctccgcggcggcgtcatcatggacgtcgtcgacgccgagcacgcccgcatcgcggaggaggccggtgcctgcgcggtgatggccctggagcgtgtccccgccgacatccgggcccagggcggcgtggcccgcatgagcgatccgcagctcatc

SEQ ID NO: 283 - DNA, 337 bp, Glycine max
  Clone ID: LIB3027-007-Q1-B1-A12
ttacaacatcgtattctgcaaattcaaaccgggtcttggttttctgaaagatgggaggtggcaaggacaagcatcatgatgaatctgacaaaggaattttttcacaccttgctcatggggtagctggtgcagcacatggtggacatgggtacccacctggggcttacccaccaccacctgcggcataccctccacaacaaggatatcctccagctgggtatcctccacaacaatggtatcctccagctgggtaccctccacatcaaggctatcctcctgcttgttaccccccagctggttatcctggttcatcacatgcaccaggttctcatgggca

SEQ ID NO: 284 - DNA, 284 bp, Glycine max
  Clone ID: LIB3027-007-Q1-B1-A2
tgtcaatcctttaagtggacacatggattactcatttgcatctgcgtggcatcctgatggacgtatttttgctactgggaactaatacaaaacatggcatgcttgggatgttaagaacgtgtcaaaatctaatgcagtgcttaatggcaaccttggggctataccttccataccgtttacatcagatggactgttcatggcaatggctgagccatctgacgatgtgcatgtctatgatgcacatagtgggtttgagacagagcaggaaatcaattttcttgggg

SEQ ID NO: 285 - DNA, 307 bp, Glycine max
  Clone ID: LIB3027-007-Q1-B1-A5
ggataatcaaaaccaagttaatttatcccaagattctcctattcctgaaaaaaactgtactgattatgagacatctgttctggctaggtttcatattcttaaatcccggattgaaggttcaagttctacttcagaagggaagcaattagatggagatggatctgctggcaaagaaatggatgacacaacaaattcaacatatgtatctgagggtaaaagtttggacgtccatgttaatcctgctgtggtgcatctcaattcctacactgccgttgacaagtcaatcccaaaagagtttcatctggat

SEQ ID NO: 286 - DNA, 358 bp, Glycine max
  unsure (1)..(358): unsure at all n locations
  Clone ID: LIB3027-007-Q1-B1-A9
ttctcagcgaaatccgtcgtcaaagttggtttccggcagagatcatatatctcctagggtttccagctgaatcgagcatactccctcaatctccaattccacatcacaaaccctagaaaatcttttcagatgaatccaaaatcgctccaaatcctggtgcagtcaccggacctcggaatttcccttcaacccacaaccaaacacgaaaccctttccgatctcaaacactctctctttcctcaatcacaccgatccttctacttcaccttcaatggcaagcccctccccgacaaaatccctctctcgcaattcncccctctctcaaccctctccctccgctcccgcctccctggtggtg

SEQ ID NO: 287 - DNA, 345 bp, Glycine max
  Clone ID: LIB3027-007-Q1-B1-B10
gctcgagtcggctctcaagactgtgaattatggaatcctgcttgcacaaaagcaatgactatgtcatttaatccaaacccgtgttctgatgcatggagtttggaatttctgaagcgtaccggatttcattgtgatatcatttgtgtcactggatggactgccaccccaatgcaggatgttcaggttacaattgattggtttatttcctctcaggaatgtgttcccaggacctattgtgttttaaatccacagaatccttttgtgttaaatatgtggatgggaaaactgactttccctcagggcacatcccgaagtgttaagagaatgcctctttcgataggggga

SEQ ID NO: 288 - DNA, 359 bp, Glycine max
  Clone ID: LIB3027-007-Q1-B1-B11
catagctggagagtttcgacatggcactctgcctggactactatccatttcatcaaagtttcttcccacatttatgaaccttatcaaacgtcttgctgaagaagctcaggggaatcaaacccctcaagaatcacaagggtcagcttctcagacacagatcttcagaaatcaagtgcacaaaccagattcagtatcaacctcaatttccaatgtatcgagtgttggcttgtctgttgatgataacgaatactcaaccacaaacttgtctcagaggcgaagaacaaacgctcccgaagctgaattttcatgacaaaattcatgacaatttgatttgaagacggttggcatcagatttggca

SEQ ID NO: 289 - DNA, 373 bp, Glycine max
  Clone ID: LIB3027-007-Q1-B1-B5
gctgtcaacaatggcgatttccggcgatctcagagtctcagcaacacttcctctgtatcgctcccactcgcctccactccgaacctcttctcagtcttccccaaaggtagactttcatcgtttcttgaacagagcttgtagcatctctgaattcactccaaaatgcccttacctgacaattgtacgatgcaatatgcgtgggtattgcaagccagttgctgcggtccttggaggtcctaaatttacatcaaattcagttagccaagaaaccgagaactttctccttgatgctgttaaaatgaacttctttgagcggttaaatttggcttggaagataattttcccatcgggaacatctagaaaaaactccaat

SEQ ID NO: 290 - DNA, 377 bp, Glycine max
  unsure (1)..(377): unsure at all n locations
  Clone ID: LIB3027-007-Q1-B1-B6
cctaatcaaacttcactctcaaaatgagtgatcccacactagcacaacagcatctagtcaaagtccacacaacaacacacgaaacagttgttaccacacacaatcataaccaaacaccctcaataaatgcctcaggtgaaaagaagaagattgtgggggtgttctacaaagggaatgaatatgctaaattgaatccaaattttgttggatgtgttgaaggtgcattgggaatacgtgagtggctggaatcacagggtcatcagtacattgtcactgatgacaaagaaggacctgattctgaacttgagaaacacattccagatgcacatgtcatcatatctactccattccancccgccctatgtcaccgcagaaag

SEQ ID NO: 291 - DNA, 319 bp, Glycine max
  Clone ID: LIB3027-007-Q1-B1-B8
tgttttcaagctatttgctgccaaccaacataagccagctgatatcgtcagtatatttgttgcgaacaaaagtaagatgctgagactattggaagacttcaaaattgataaagaggatgaacaatttgaagccgacaaagctcaagtgatgagggaaattgaagctctttaaacaagggaacaacgacgcacctgaactgcaaattgtgttaagtggcaagttgcaatgtggcatttcactttagcgaattgtgtattgtaatagttctgttagtctttatcacgatatgagaccatccgtttcatacagacttcaatg

SEQ ID NO: 292 - DNA, 341 bp, Glycine max
  Clone ID: LIB3027-007-Q1-B1-B9
tctgctctcaagactgtgaattatggaatcctgcttgcacaaaagcaatgactatgtcatttaatccaaacccgtgttctgatgcatggagtttggaatttctgaagcgtaccggatttcattgtgatatcatttgtgtcactggatggactgccaccccaatgcaggatgttcaggttacaattgattggtttatttcctctcaggaatgtgttcccaggacctattgtgttttaaatccacaaaatccttttgtgttaaataggtggatgggaaaaactgactttccctcagggcacttcccgaagttgtaaagagaatgcctctttctaaagggggag

SEQ ID NO: 293 - DNA, 360 bp, Glycine max
  Clone ID: LIB3027-007-Q1-B1-C11
gattatgctagttttgatggtttgattaccaagcaagttatgagcaagatggcagaaatgataaacagtctttgtggtggtgatgaaaaattgatgcgtgaaaggacgcacctgctgttggcttgttgttcaaggatggcaatttgtaagaaagatgtttggagagttgaatgtggaatcccttctggatttccgctcacagttatttgcaatagcatttttaatgagatgctcattagatatagctatgaaaaattactgcgccaggctaaagctccaagtatgtttttacaatccttcacaaattttgtttctttgtgtgtgtatggtgatgataacttaattagtgttcaagaatat

SEQ ID NO: 294 - DNA, 384 bp, Glycine max
  Clone ID: LIB3027-007-Q1-B1-C2
gattagtaccacaaaaatggagaaatagaataactgaatatcgtatagctcaaaataaagatttaaccaaatgcaattcatatgaaaaaagccaattaattctttacaaagaacaacaagtaaacgcattaaaaaaaaaaattagaaaacaatatagatacgatcttttatcctataattttatcaattatgcagataagaaagactcatatatttatggatatagatccctatttcaagtaaaaaaaaaccaagtgatttcttctaattacaacacgtataaaaaagaattattggatatcatagataatctctttatcaagaattatatattggaagatgcgattctagatatgggaaaaaatatgtatagaaagtattttg

SEQ ID NO: 295 - DNA, 345 bp, Glycine max
  Clone ID: LIB3027-007-Q1-B1-C3
gatcaattggagcttgtgagattttcttccaagaagatcacagacttgggattcaaatttaaatacagcttagaggacatgtacactggagcaattgacacatgcagagacaaagggcttcttccgaaacctgcagaaaaagggctttttactaaacctgcagaaactccagtgaatgccatcatgcataaataggcattcatatctttgtatctgtgtgatggctgtgcaacttgcttttcttattccgtttcttgattaacgtttctgttttatgaaaaattagaaatgtgagtggcttgttaggccaagttatcttcaataagttaataaaaaccatcttct

SEQ ID NO: 296 - DNA, 214 bp, Glycine max
  Clone ID: LIB3027-007-Q1-B1-C4
cttcataaaatatatgtatgtatgtttaggtagcaagataccttggatatgcctgtatatagcaaaaatatctcacaaaacatatatatgtatgtttagatagcaagataccttggacacgcatgtatatagcaaaatacctcacaaaaatatacgtatgtttaggtagcaaaatacctcatggaaaaaaagagagcaaaaagagcgagcatcg

SEQ ID NO: 297 - DNA, 320 bp, Glycine max
  Clone ID: LIB3027-007-Q1-B1-C8
gcaccatttcgagtccaaggcagacgccggtgcctccaaaacctaccctcagcaagccggtaccattcgcaagaacggctacatcgtcatcaaaggacgcccctgcaaggttgtggaagtttcgacttccaaaactggaaagcacggtcacgccaagtgccactttgttggaattgatattttcactgccaagaaacttgaggatattgtgccctcttctcacaactgttatgttcctcatgttaatcgtactgattaccagctcaatgatattgctgaggatggatttttgagtctgcttaatgaaaatgggaacacca

SEQ ID NO: 298 - DNA, 347 bp, Glycine max
  Clone ID: LIB3027-007-Q1-B1-D10
aaaagagagaataggaaagacactgagtaagcaatgaaatttccaaattctcaattgtttcttccattcttgttgttgttgttcttcgcgataactccctttcgcggttcagggcaacaaacggattggcacagcgaagagactcaacatggaaatggggttcgccgcagagttcttctgagtttcaaagagaagccctcatgaagtaacgttacctttgaatgtactccttcgggtccttgtgtgccctgtctctactctgagaatggtgatgagaaatatcgatgcagtgagactggctaccgaattccattcaaatgtttagagattaaagattcaacgaagga

SEQ ID NO: 299 - DNA, 158 bp, Glycine max
  Clone ID: LIB3027-007-Q1-B1-D2
gtagtacgtctacttcttgtgttattactcctaggagtttctctttgcagacatgaaataagaagggtttcaatttagtctgaatccttccatgtatatttgagagtggctttgatttcagtgaatgtttccccttttgtattaattcaacaatcttt

SEQ ID NO: 300 - DNA, 55 bp, Glycine max
  Clone ID: LIB3027-007-Q1-B1-D3
gtgcagggaaaggtgtagctgggatccgagttaaattaatggatgtttttagatc

SEQ ID NO: 301 - DNA, 55 bp, Glycine max; identical to SEQ ID NO: 300
  Clone ID: LIB3027-007-Q1-B1-D4

SEQ ID NO: 302 - DNA, 394 bp, Glycine max
  Clone ID: LIB3027-007-Q1-B1-D6
cttgcatgcgtccaggtcgaatctaaaggatcccctcggggaattccaattccacattttcaagaaataaggaggcaaaaatgttcatatatgaattggaattatttgttttcttattaggcctatcctgaagccaaaggaaatgagatcggaattcctcggggaattccaattccacattttcaagaaataaggaggcaaaaatgttcatatatgaattggaattatttgttttcttattaggcctatcctgaagccaaaggaaatgagatcggaattcctcggggaattccaattccacattttcaagaaataaggaggcaaaaatgttcatatatgaattggaattatttgttttcttattaggcctatcctgaagccaaaggaaatgaga

SEQ ID NO: 303 - DNA, 312 bp, Glycine max
  unsure (1)..(312): unsure at all n locations
  Clone ID: LIB3027-007-Q1-B1-D9
tganaatgcagttcgtagtatttttgtcgcgcctttcagaggcggaaggcctattcgggtggttacatttccgaataccattgtgcagattgaaccagacatgaattcaaggtttcagcttttgagtaccactaccaatggtgattttgttcaaggaaaagatctcgcaatggttaaagttaatgtancatgtgctgctgttggcttgacatcaagttacactccaactccattgttggaatctggtttgcaaaaagacagagggttaattgtggaatattttggaaggatgtcttacgttgctcataacgt

SEQ ID NO: 304 - DNA, 344 bp, Glycine max
  Clone ID: LIB3027-007-Q1-B1-E3
gcaagagagcgtgattgtggaaatctcgaaggaacagattcgggcactgagcaaacgtgccaaatctagttcaaggaaaaccatttcttctgaagataaaccttttaacttgagaagccgcgaccccatctactccaacaagcttggcaagttctttgagatcaccccagagaaaaacccccagcttcgggacttggatattttcctcagtattgtggatatgaacgagggagctcttcttctaccacacttcaattcaaaggcgatagtgatactggtaattaatgaaggagatgcaaacattgaacttgttggcctaaaagaacaacaacaggagcagcaac

SEQ ID NO: 305 - DNA, 381 bp, Glycine max
  Clone ID: LIB3027-007-Q1-B1-E4
aacaaacagcaacagtacagagcattttgatgcatgtaagtggacaaaatcagaaccacattcctgggaattaatcttcccaatagaggtatgtggtcctaataatggttttgaaatgtggagttctgagtgggcaaatcaaacttcatggcatttgagtttccttattgacaatcccaaacagtctacagtttttgatattctcttgggaatctctcaagattttgaaattgctggtaatactcttatgccagctttttctgttccacaggctactgccagatcttctgaaaatgcggaatcctctgcatgatctggaattcgtgttttctttcgcttgtttgtttgtttaattcaataaaggaaatttggcatgaacct

SEQ ID NO: 306 - DNA, 390 bp, Glycine max
  Clone ID: LIB3027-007-Q1-B1-E5
ttgcacgcgtccaggtcgaatctaaaggatcccctcggggaattccaattccacattttcaagaaataaggaggcaaaaatgttcatatatgaattggaattatttgttttcttattaggcctatcctgaagccaaaggaaatgagatcggaattcctcggggaattccaattccacattttcaagaaataaggaggcaaaaatgttcatatatgaattggaattatttgttttcttattaggcctatcctgaagccaaaggaaatgagatcggaattcctcggggaattccaattccacattttcaagaaataaggaggcaaaaatgttcatatatgaattggaattatttgttttcttattaggcctatcctgaagccaaaggaaatg

SEQ ID NO: 307 - DNA, 309 bp, Glycine max
  Clone ID: LIB3027-007-Q1-B1-F1
atgtcactgaaaaagggaagttcttcttgacctggtattctaacaaattgctgaatcatggtgatcaaatactagatgaagccaacaaagctttcctgggctgtaaagtcaaattagcaatcaaagtatctggaattcactggtggtacaaagttgaaaatcatgctgcagagcttactgctggatattacaaccttaatgatagagacggataccgccccattgcaaggatgctgtctcgccatcatgccattttgaactttacatgtcttgagatgagggactcagagcaaccctcagatgccaaaa

SEQ ID NO: 308 - DNA, 380 bp, Glycine max
  Clone ID: LIB3027-007-Q1-B1-F10
aggtccactctaaaggatcacctcggggaattccaattccacattttcaagaaataatgaggcaaaaatgttcatatatgaattggaattaattgttttcttagtaagcctatcctgaagccaaaggaaatgagatcggaattcctcggggaattccaattccacattttcaagaaataaggaggcaaaaatgttcatatatgaattggaattatttgttttcttaataggcctatcctgaagccaaaggaaatgagatcggaattcctcggggaattccaattccacattttcaagaaataaggaggcaaaaatgttcatatatgaattggaattatttgttttcctagtaggcctatcctgaagccaaaggaaatgag

SEQ ID NO: 309 - DNA, 374 bp, Glycine max
  Clone ID: LIB3027-007-Q1-B1-F2
gctagaatggaatttcgatgctcagtcatctcttttaccattctcttctctcttgctcttgcaggagagagccatgtccatgcatcgctacctgaggaagattattgggaagctgtttggccaaacactcccattcccactgcactgcgagagcttctaaagcctctccctgcaggtgttgaaatcgatgaactccctaagcaaattgatgatacacagtacccaaaaacattcttctataaagaagaccttcatccaggcaaaacaatgaaagtacaattcaccaagcgtccctatgcacaaccttatggtgtatatacatggttaacggatattaaagacacctctaaagaaggatatagtttttaagagat

SEQ ID NO: 310 - DNA, 360 bp, Glycine max
  Clone ID: LIB3027-007-Q1-B1-F7
gtgagatacaggtttgttgtggatgtcaaaggcagcaaacttgtcgatcagtaaaagaaagaaagtatactactagcacgacacacgcaacatccatccttccatcatgaagagtctggaaaagttattaattaattgagaactaaagctgtatttgttgttcactctaaaaaagaagctgtgttttgtttattaaaaagagtgctctgttttctctgttttggttacacgacgttcattaaaatatagtatttgatatcaaaaaaaaaaaaaaaaaatttttttttaattaaaaatttataatatatataataatttttttatattaatttataatatttataaaaaaaaaaagggggg

SEQ ID NO: 311 - DNA, 354 bp, Glycine max
  Clone ID: LIB3027-007-Q1-B1-F9
aagcaaagcaatggctacttcaaagttgaaaacccagaatgtggttgtatctctctccctaaccttaaccttggtactggtgctactgaccagcaaggcaaactcagcggaaactgtttctttcagctggaacaagttcgtgccgaagcaaccaaacatgatcctccaaggagacgctattgtgacctcctcgggaaagttacaactcaataaggttgacgaaaacggcaccccaaaaccctcgtctcttggtcgcgccctctactccacccccatccacatttgggacaaagaaaccggtaacgttgccagcttcgccgcttccttcaacttcaccttctatgcccctgacac

SEQ ID NO: 312 - DNA, 360 bp, Glycine max
  Clone ID: LIB3027-007-Q1-B1-G10
cttcgggaagtgccctggggaggagctggtgcaaagaatgctattctcatgaatatgccaaatgctgttctttcaatgtggagatattttgttggagatctcgtctttgaagtttctaagatgacttctccctacattaaatgtacagtctctttcttcatagcatttggaaatttggctgatgacaccatcaattttgaggcttttccccacaagctggtgcaatttggagagattcaggaaaaagttgtattgaaattttcacaagaggaatttcttacagcttggtcaactcaggtgcgtcctacaacaactctgttggctgatgggtggtcatatttgtatgctatggtgcatgat

SEQ ID NO: 313 - DNA, 363 bp, Glycine max
  Clone ID: LIB3027-007-Q1-B1-G11
gtcacagtttccacatttctcctacgccaacgaccttacattccgaaaagtcaaaactacccatccacccaggcaacgatggacgtaggaaccgccgacgatcattccccggaagccgccatatcgcggtggaaattcgcggtgtcgcggcagtaccagcacatgctggacaaaacgacgccgcacgtgctccgacggtggatcgggtgcctggtggttgccgccgtgtacgtgctccgcgtgtacttggtccaaggcttctacatcgtctcctacgccctcggcatttacatcctcaacctcctcatcggcttcctctcccctcaggtcgatcccgagattagcgaccgccccaccctcccc

SEQ ID NO: 314 - DNA, 285 bp, Glycine max
  Clone ID: LIB3027-007-Q1-B1-G12
cttaaacgtaccaagagcacgaaaaattgagcgtttcatatcacaaccttttttcgtaacacaagtttttaccggttcgccggggaaatatgttagtctagcagaaacaattagacggtttaaattgattcgttctggagaattagatggtcttcctgaacaagcccttttatttggtaggtaatatcgatgaacctactgctgaagctacgaacttagaaatggagagcattttgaaaaaatgactttaaatctgtgtgtactgacccccattcgaattgtttg

SEQ ID NO: 315 - DNA, 349 bp, Glycine max
  Clone ID: LIB3027-007-Q1-B1-G2
tgaatcgtaagcagcggctaccctaatcctctcctcttcctctctactaatttcagctatggccgacgaagctgtggttgttccagatcccacccagatcgatgtcaagctctttaaccgctggagcttcgacgatattgagattactgacatttctctggctgattatatcggagtggcgacatccaagcacgccacgtatgtgcctcacaccgccggcaggtactcggtgaagcggttcaggaaggcgcaatgccccattgttgagaggctgaccaactctctcatgatgcacggtagaaacaatggcaagaaactcttggctgttaggatcatcaaacatgctatg

SEQ ID NO: 316 - DNA, 323 bp, Glycine max
  Clone ID: LIB3027-007-Q1-B1-G3
gtcggtgaacgagggacaccctgacaagctctgcgaccaaatctccgatgctgtcctcgacgcttgcctcgagcaggacccagacagcaaagttgcctgcgaaacatgcaccaaaaccaacttggtcatggtcttcggagaaatcacgaccaaggccaacgttgactacgagaagatagtgcgtgacacctgcaggaacatcggcttcgtctcaaatgatgtgggactggatgccgacaactgcaaggtcctcgtcaacattgagcagcagagccctgatattgctcaaggtgtacacggccaccttaccaaaaaacctgaag

SEQ ID NO: 317 - DNA, 368 bp, Glycine max
  Clone ID: LIB3027-007-Q1-B1-G7
aaaacaaagaaaaaaaaaacccttagccaacacaaccatcatggccacctctgctattcagcaatcagcattcactggtcaaactgctctgaagcagctcaatgagttcgtccgcaagaccggtggcgccggcaaaggtcgcactaacatgcgccgcaccgtcaagagtgctcctcagagcatttggtatggccctgaccgtcccaagtacttgggtccattctcggagcagattccatcatacctgaccggagaattccctggtgactacggatgggacactgctggattatcagctgacccggaaaccttcgccaggaaccgggagctggaggtgattcacagcagatgggcaatgcttggtgccc

SEQ ID NO: 318 - DNA, 210 bp, Glycine max
  Clone ID: LIB3027-007-Q1-B1-G8
gaggtcgttgaaccaggcattcactcaggagctctgcgagcaagtctaccatcttgtcctagagtcattcctctaacaggctggagtgatcatggttacatgtgatacatgtgtaaaattgttatcggcacagacttccacacaactatagaagacggtcacatatgatgtcgagactgaggtgcctaacaactgcacgaacacagattt

SEQ ID NO: 319 - DNA, 55 bp, Glycine max
  Clone ID: LIB3027-007-Q1-B1-H1
tattccgcgagatgtagattgcctatttggcaccaaagctggttttcctttcacc

SEQ ID NO: 320 - DNA, 381 bp, Glycine max
  unsure (1)..(381): unsure at all n locations
  Clone ID: LIB3027-007-Q1-B1-H12
aaaccctacaagtcacgaatttgagattctaagaccctcctctctctcgtacttcatcggaaccgaaacccttcgccgcaaaaaatgcctcccaaatctgccaaatccaaggaagctccagctgagcgacccatcctcggtcgattctcttctcacctcaaaattggcattgttggcttgccaaatgttggaaaatctactctctttaatactctcaccaagttggcaatacctgctgagaacttccccttttgcaccattgagcctaatgaggcgcgggtcaatgtacccgatgaacggtttgagtggctttgccaattattcaagccaaaaagtgaggtctcggctttcttagaaatccatgacatanctggattggtc

SEQ ID NO: 321 - DNA, 102 bp, Glycine max
  Clone ID: LIB3027-007-Q1-B1-H2
ctcaaatatctggttgatgagtgtccttttgcatttgtgaactagtatgtaatattttattcacttaaataaagcgcattactatgtgcaatgagtgtgttt

SEQ ID NO: 322 - DNA, 394 bp, Glycine max
  Clone ID: LIB3027-007-Q1-B1-H5
ggggaattagggtgaatggtgtggcacctggcccagtttggacgccaatacaaccagcttcaaagcctgctgagatgattcagaacttggggtgtgaggtgccaatgaaccgcgtggctcagccttgtgagattgcaccatgttatttgttcttggcaacttgtcaggactcttcctactttactggccaagtcctccatccaaatggtgggatggtcgtcaacgcttaagctatagtgtgccttcacctatttcctattgaactggtttttctagctttaccctcctgaataagcagtgttaccttcggatgcatattttacgttgaaatacattgtgtttggaacatataagccttgagattgaataacctttacgtgagttaattaacctc

SEQ ID NO: 323 - DNA, 214 bp, Glycine max
  Clone ID: LIB3027-007-Q1-B1-H6
ttcggctcgagctcgagccctcgagccgctcgagccggattcggatccgagagagttgatccttttccagtagctttactggctgttctttctggcgttaagggtgaagttcggagttctaacgccactaaccctatgctgacgcgacttcttgagaactgtaagagtctcaagtagcgtggttgatgagtgtccttctgcatttgtgaactag

SEQ ID NO: 324 - DNA, 345 bp, Glycine max
  Clone ID: LIB3027-008-Q1-B1-A1
gacaaatagaaagaaggaaaaaagccttcaccatttgttgttctgcttcctgagaccgtgttccatggcatgctctccttctacaactcttgtgtcaaattctcttctccttaacaaaacgactagtcagtgtcggcttcatgttcatcccaccctttcacttaatcaaaaccttccaatatattctaataacctactcaaactctcaacaattcaataccatgcaacaaccacaccctttgttgctgcttctgcaggagttgagtctccggtgttgggtgaggataccacgagttcactggattcggtgaaagtgtttgatttgaatggaaacgggattccaat

SEQ ID NO: 325 - DNA, 325 bp, Glycine max
  Clone ID: LIB3027-008-Q1-B1-A3
ctcgagccgaatcggctcgaggtttctcttgaggaacagcaacaacaacaaaatcctttcattgtttcttcttttggctgcgaagataaacagaaccagtttattttttcaccaccgtccattcagacaccgacaaatgggaagttctgtcgcaacagattcatgggcaacgacaacaaggttgtcggtggtgctgacgttaatggcccagatctcgcgtgggtgaacgagttgctgatgtaataggtgaaagatggtgacgacgaaaattaatggtagtgatcgatgactcatatcagtgaatgaaagtgtaaatacagcagag

SEQ ID NO: 326 - DNA, 343 bp, Glycine max
  Clone ID: LIB3027-008-Q1-B1-A6
gaattctccagagagaagaagaaacttaatcgatcatcacttcacttcactaatacatcatggcagacgagacccagaacaagtatgagagctctgaggttgaggtccaggatcgtggtgtttttgactttctcggtaagaaaaaggatgaagaagacaagcctcatcctcaggaggaggtcatcgccaccgagtttcaaaaagtcactgtctcagaccaaggagagaacaagcacagcctcttagaaaagcttcaccgatctgacagcagctctagctcttcaagtgaggaggaaggagaagatggagagaaaggaagaagaagaagaaggaaaagaaaggg

SEQ ID NO: 327 - DNA, 344 bp, Glycine max
  Clone ID: LIB3027-008-Q1-B1-A7
caatttctcttccaaaccaactcgcttcccactttggcctacaacgccaattcaccacttgcctttctcgctaccctacttcaaagggtgctataatattcggggatgcacctaacaacatgcgacagtttcaaaaccaagatattttccacgatttggccttcaccccattaaccatcaccctgcagggagagtacaacgtgagagtcaactcaataagaatcaaccagcacagtgtgttcccactgaacaagatatcatccaccatcgtagggtcgacctctggaggaaccatgattagcacctcaactcctcacatggttctccagcaatccgtgtaccag

SEQ ID NO: 328 - DNA, 401 bp, Glycine max
  Clone ID: LIB3027-008-Q1-B1-B11
atgccatatgtgaggcagataaatcagctgaattctgccaagacttatgcgacaaggactatcctttttttgagagaagatggaactttaaagccagtggccatcgaattaagtttgccacattctgctggggatctgtcagctgccgtcagtcaagtcgtcttacctgctaaggaaggtgttgagagcacaatttggctactagccaaagcttatgtcatcgtaaatgactcttgctaccatcaactcatgagccattggttaaatactcatgcggcgatggagccattcgtcatagcaacacaccgacatcttagcgtgcttcacccaatttacaagcttctgactcctcactatcgtaacaacatgaacatcaacgcacttgccaggcaatctctaat

SEQ ID NO: 329 - DNA, 340 bp, Glycine max
  Clone ID: LIB3027-008-Q1-B1-B2
cattttctttgccaaccagacatatcttccaagtgagacaccagctccactagtcaaatatagagaagaagagttgcataatttaacacgagatggaactggagaacgcaaagagtgggaaaggatctatgattatgatgtctagaatgatttaggtgatccggagaaaggtgaaaatcatgcccgtcctgttcttggaggaaatgacacctttccttatcctcgtaaggggagaactggtagaaaaccaacaaggaaagatcctaatagtgagagtatgagcaatgatgtttatcttccaagagatgaagcttttggacacttgaagtcatctgacttt

SEQ ID NO: 330 - DNA, 343 bp, Glycine max
  Clone ID: LIB3027-004-Q1-B1-G12
cagtactgcgctgcgttgttgcgacagtgttaacgacccctacgtcactgtacacgctggagatcatcgattgatcaagacctccgttatgacgaataggttgaaccctcaatggaaggaaagttttgttgtaccgatcagccaccatgtggaagcactcgaattcagagtaaaggactcggacttcaacggtgcgatgaaccttctcgggaagacatttctctctataagtgatatacttaaactcaataaagagggaatacctcgcaggacagggattcacaaagtcgttcatttggatggaaaacctcgacatgggtcgtttgcatacattgtggagtac

SEQ ID NO: 331 - DNA, 388 bp, Glycine max
  Clone ID: LIB3027-001-Q1-B1-C10
aagaaagtcttccatagccccccaaaaatgaagagcaccatcttctttgctctctttctcttttgtgccttcaccacctcatacctaccttcagccatcgctgatttcgtgctcgataatgaaggtaaccctcttgaaaatggtggcacatattatatcttgtcagacataacagcatttggtggaataagagcagccccaacgggaaatgaaagatgccctctcactgtggtgcaatctcgcaatgagctcgacaaagggattggaacaatcatctcgtccccatatcgaatccgttttatcgccgaaggccatcctttgagccttaagttcgattcatttgcagttataatgctgtgtgttggaattcctaccgagtggtctgttg

SEQ ID NO: 332 - DNA, 379 bp, Glycine max
  Clone ID: LIB3027-001-Q1-B1-C11
ctggagattggatcacacttatacaaaattctccaattagtaacttgttgagagttgctgcttggaagaaaggctgtttaatggtcaagattgtgatgtctgggaatgcagcagtcaaaaggagtgattgggcctcattggtacaagtgtttttaacaaacagcaacagtacagagcattttgatgcatgtaagtggacaaaatcagaaccacattcctgggaattgatcttcccaatagaggtatgtggtcctaataatggttttgaaatgtggagttctgagtgggcaaatcaaacttcatggcatttgagtttccttattgacaatcccaaacagtctacagtttttgatattctcttgggaatctctcaagattt

SEQ ID NO: 333 - DNA, 391 bp, Glycine max
  Clone ID: LIB3027-001-Q1-B1-C12
gaattttcttcatccttctctgttctcctagaacttgattacttgaacattccctatgacagatgaggtggttcttctggatttctggccaagtccatttgggatgagggtcaggattgcacttgctgaaaagggtatcgaatatgagtacaaagaagaggacttgaggaacaagagtcctcttctcttacaaatgaacccggttcacaagaagattccggttctcatccacaatggcaaacccatttccgaatccctcattgctgttcagtacattgaggaggtttggaatgacagaaatcccttgttgccttcagacccttaccagagagctcaggctagattctgggctgattatgttgacattaagatacatgatcttggaaagaag

SEQ ID NO: 334 - DNA, 388 bp, Glycine max
  Clone ID: LIB3027-001-Q1-B1-C6
aatggctgcaaaaagctgatgtgcctaccatagcacagattgaagagttccattcgatgcagaggatgatgaatgctcctgattcaaatgataatattgatctactgttgagcattgatttgttgggtttacaaggagcaggcaaagcttttccaaacaagattgtttttgatgataagcttgtgttggctaacacacaagaattctttgatggaaattttccagtggattcttggttaccaatttttgtgaattgtctttatcctgtaagtcaattaccttcagaagctgtcgttgtaaatgtcacatgtggtagtggacgtggtggtttacccaccactgcttggattagttctgcagttaacaatcgctcctcagatatcaacaa

SEQ ID NO: 335 - DNA, 399 bp, Glycine max
  Clone ID: LIB3027-001-Q1-B1-C7
attgttgtgactcgttcttcttcgtcgttatcttcttcttttgttgtttgtgtgtttgttttttctctcaactgaaaatgtcttgctgcggtggtaactgtggttgcggaagcgcctgcaaatgcggcaacggctgcagaggctgcaagatgtacccagacttgagctacaccgagtcaaccaccaccgagaccttggtcatgggagtggcaccagttaaggctcaattcgagagtgctgaaatgggtgttcccgctgagaacgatggctgcaaatgtggagctaactgcacctgcaacccctgcacttgcaagtgaggtgttggagagctaaagcttcaagcagaaatggcccttagaaataatgataaaaactatatgtagtttcaaaacttcaaaa

SEQ ID NO: 336 - DNA, 201 bp, Glycine max
  Clone ID: LIB3027-001-Q1-B1-C8
gcattttcagaggaaaatggcgggtacggtttcgacttgtttcttcttcgtgtttcttctttctctccttcttccttttcagatctccgctgaggaatcctcggagaagaattcgtactcaaaatgggttaatccaactttcaagaaacttgtcagcaagcacgatttcatcgtcgtcaagttcaacgccccatggtgtgc

SEQ ID NO: 337 - DNA, 386 bp, Glycine max
  Clone ID: LIB3027-001-Q1-B1-D11
aagggagctcttcttctaccacacttcaattcaaaggcgatagtgatactggtaattaatgaaggagatgcaaacattgaacttgttggcctaaaagaacaacaacaggagcagcaacaggaagagcaacctttggtagtgcggaaatatagagccgaattgtctgaacaagatatatttgtaatcccagcaggttatccacttgtggtcaacgctacctcaaatctgaatttctttgctactggtattaatgccgagaacaaccagaggaacttcctcgcacgttcgcagaacaatgtgataagccagatacctaatcaagtgcaggagcttgcattccctgagtctgcacaagctgttgagaagctattaaagaaccaaagaga

SEQ ID NO: 338 - DNA, 383 bp, Glycine max
  Clone ID: LIB3027-001-Q1-B1-D12
agaaaacctaaccttagaattagaaacacagaagagaagaaaggaaagaattgatcgttgaaaatgcacggaggaaagaaagcgggagagtccattaaggaaacagctacaaacattggtgcttctgccaaggctggcatggagaagaccaaggccactgtccaagagaaggcagaaagaatgacagcacgtgatccggtgcaaaaggagttggcaacccaaaagaaagaggcaaagatgaaccaagcggagctggacaagcaggcggcgcgtcagcataacacggcggccaaacagtccgccaccacggctgggcacatgggacatggccaccacaccaccggaaccgggactggaaccgccacgtattccaccaccgggga

SEQ ID NO: 339 - DNA, 241 bp, Glycine max
  Clone ID: LIB3027-001-Q1-B1-D2
cgagaaagttgggttgtagcgtaccacaccgaaccaaaaatggatgtcgccgtctccggaaactctctcgccggaacttccacaccctataaccgtttgcaagaactaaaggccttcgacgaatccaaagctggagttaaaggcctggtcgactccggcatcaccagactcccataaattttcgtccggacgccaaaggacctcaccgccgccgacccagtatccggcaaccctgccggtg

SEQ ID NO: 340 - DNA, 362 bp, Glycine max
  Clone ID: LIB3027-001-Q1-B1-D6
ataagaatgatggtgttaataaaagagtaagtgaagatgatgaattgggtgatgctactaactctgcagcaataggaaatgatgcagactcaaacagtggaacagaggatggcattcattcttcaactgcctttgaattctacttacaaggaatagagagggcgaagataatagtgaaaaaaccattaccacaagtcacaacattgcctggaaagctgcctgtggtagttgtcttgtggtcggataagatgcttaaaatgtatgatacatacctgcttgactcattgcctgaggttttcaagccccagctatttgccaagagaatgcaagaatcagtttctatttacaagtgccttgaagcc

SEQ ID NO: 341 - DNA, 378 bp, Glycine max
  unsure (1)..(378): unsure at all n locations
  Clone ID: LIB3027-001-Q1-B1-D7
acacttccttagttcaatatggggaagcncttcactctctctcctttcttccctttgcttgcaacccttgtcaattgcatgcttggcaataactccaaccagcccaaccaattgcaaatcaacaacctccaagccttgggaacccaacaacggctttaattccaaaggtggttggatcaaacctgggactcccaacaacctgaactcaaatgcgccggtgtgacaggttccaaactcacactcacaagcgaaggggtctacatgtgataccacacacattatacccgggggatcttcacagcccacagggaaagggcacatggggttgcaaatcccggatgtcctgagacatttgtggagccacaagaacaatcaaac

SEQ ID NO: 342 - DNA, 327 bp, Glycine max
  Clone ID: LIB3027-001-Q1-B1-D8
ggggaagtgggttgttaaaggacaatttgatttaaacaatggggcaaaaccctccgctgaaggttgaggaaaagatgagggagttgatgatgcagctgttaaggttgttgacattgttgacacattcagacttcaggagcaacccgcattcgataagaagcagtttgttaccttcatgaagaggtttatcaagaatttgactcccaagctcgatgcagagcaacaggagttgtttaagaagcacatcgagggagcaactaaatacctgctctctaagattaaagatttccaattttttgttggtgagagcatgggtgatgatgcttg

SEQ ID NO: 343 - DNA, 350 bp, Glycine max
  Clone ID: LIB3027-001-Q1-B1-D9
gctgtttctttctctcacgctaccgccatcgttcatcaatggccaccctcaacctctcttcgttgcaagctctctcctcccatcgtttatgctcttcttttccccaaaatacccctaccccttccttcaatttccagctaaaaccctcaattaacccgcgcccaatttctctgaaaccctacgtttccgagaagcctcgcgcgcgcgtggtggcattggccgtgaagagcctcggcgatacggaggcgctggcggtgtcgcctgaaaatgacggccccgccggagaactgccgtcgggcgccggcgtctacgccgtgtacgacacgaacggcgacgttcagttcatcggt

SEQ ID NO: 344 - DNA, 396 bp, Glycine max
  Clone ID: LIB3027-001-Q1-B1-E10
ttgattctcaggaaaactttgcaccactagacaagaagctgaaggaacatgagggtgggagaacttctaatcgcctgttttatctttcaattcctcctaatatattcatagatgctgttaaatgtgcaagcttgtcagcttcttctggtaatggttggaccagggttattgttgaaaagccttttggccgtgattcagaatcttcggctgcattaacaaaatcactcaagcagtatctgacagaggatcaaattttcaggattgaccactatcttgggaaagagcttgtggaaaatctttctgttctccgattctcaaatctcatcttttgaacattatggtcaaggcagtatataagaaatgtacagttgatattctcagaagattttggcactg

SEQ ID NO: 345 - DNA, 354 bp, Glycine max
  Clone ID: LIB3027-001-Q1-B1-E11
aaggctgcactctcttttatccctcaaaaaccaaaaccctaatggcagaacgcggacgtggcgaccgtggcagcgaccgtggcggtttcggacgcggctttggtgggcgatggcgcggaggtgacaggggccgaggccggcgccgaggtccccgccgcgaggaagaggagaaatgggtcccagtgaccaaactgggccgcctggtgaaggagggaagaatccgaagccttgaacagatctacctccactcgctcccgatcaaggagcaccagatcatcgacacgctcgtgggtcccaccctcaaggacgaggtgatgaagatcacgccggtccagaagcagacccgggccgggc

SEQ ID NO: 346 - DNA, 346 bp, Glycine max
  Clone ID: LIB3027-001-Q1-B1-E4
ggtccactctaaaggatacctcggggaattccaattccacattttcaagaaataaggaggcaaaaatgttcatatatgaattggaattatttgttttcttattaggcctatcctgaagccaaaggaaatgagatcggaattcctcggggaattccaattccacattttcaagaaataaggaggcaaaaatgtccaagcataaattggaataattggtttcctaataaggccaacctcagacccaacggaattgatatgggaattccgcggagaattccatccccatatttacaagacataggggggcaaaggtgttcatatagcatttggatatatttgttttcat

SEQ ID NO: 347 - DNA, 406 bp, Glycine max
  Clone ID: LIB3027-001-Q1-B1-E5
agaaaacctaagcttagaattagaaacaaagaaaagaagaaaggaaagaattgatcgttgaaaatgcagggaggaaagaaagcgggagagtccattaaggaaacagctacaaacattggtgcttctgccaaggctggcatggagaagaccaaggccactgtccaagagaaggcagaaagaatgacagcacgtgatccggtgcaaaaggagttggcaacccaaaagaaagaggcaaagatgaaccaggcggagctggacaagcaggcggcgcgtcagcataacacggcggccaaacagtccgccaccacggctgggcacatgggacatggccaccacaccaccggaaccgggactggaaccgccacgtattccaccaccggggaatatggtcagcccatgggggccc

SEQ ID NO: 348 - DNA, 325 bp, Glycine max
  Clone ID: LIB3027-001-Q1-B1-E6
tccaaaacaaaatgaacaagttcaaaatcctcctcatctctcctctcttctgcatcgcccaaaattgcaacgcctccaaatgggagcaccaacaagatagctgccgcaagcagctccaaggggtgaacctcacgccctgcgagaagcacatcatggagaagatccaaggccgcggcgatgacgatgatgatgatgacgacgacaatcacattcttaggagcattcggggaagaatcaactacatgacgaggaacgaaggacaagacgaacaccaagaacaagaaggacacatgcagaacatcttcacaaaaatgaactaactcac

SEQ ID NO: 349 - DNA, 365 bp, Glycine max
  unsure (1)..(365): unsure at all n locations
  Clone ID: LIB3027-001-Q1-B1-E8
ccttctgccaaaagtgaaaatccagtagtagattcagaagtcaaacaagaacgacctgcccggaaaagaagatgggtcactaactgaataagaaatctggggcattattattttgcccggagtctaatctatagtttggcccagggaaaatttcagctttgcctgatattttttataattctagaaccctgcaagccagccatgcttagtatctctatctctatcactatcctctatcactatcaaacgttgaaaatggcatctgtagggtttgggacaatttgtacttcagtaatgtcatcttgtagaccttactacctatacatttactgtacactgtatatatacaagtanaatgtaaaaca

SEQ ID NO: 350 - DNA, 366 bp, Glycine max
  Clone ID: LIB3027-001-Q1-B1-F1
cgagaacaaaaaaaaaaaaaaaaaaaatccgcgattcgctcttctcttggaaaagtgaaaaccagaagtacgaacgaaagagaagagcgatttagaagtgagagaagatggggttgtcgttcacgaagctgttcagcaggttgtttgcgaagaaggaaatgaggattctgatggtaggtctcgatgctgctggtaagacaaccatcttgtacaagctcaagcttggagaaatcgtcaccactatccccaccatcggatttaatgttgagactgtggagtacaagaacatcagcttcactgtgtgggatgttggtggtcaggacaagatccgtccactgtggaggcattatttccagaacactcagg

SEQ ID NO: 351 - DNA, 378 bp, Glycine max
  unsure (1)..(378): unsure at all n locations
  Clone ID: LIB3027-001-Q1-B1-F10
tgccattttaggataattttcatttgggggttttgttgactttttttttgtattttaaaaaatattaattttgtgggttaattggaaggtttttacttttaaaaaaaattattgttgttggtttgagttttgatttgaattggttgttctgtgttgcagggtttgaatcaaaggtcaaagactaaagttcctgtggttggaactgcagctttgaatctagctgattttgcatctgtggttgatcaaaaggattttgatttgaacattccactcacagtttctggtggctctgtggagtcttctccttcacttagtatatcgattagtttggtggagttaagagcggttcangagagcacagagttaattcataataaa

SEQ ID NO: 352 - DNA, 379 bp, Glycine max
  Clone ID: LIB3027-001-Q1-B1-F12
ggggaattcaaattcaaaattttcaaaaattaaggaggcaaaaatgttcaaatatgaattggaattatttgttttcttattaggcctatcctgaagccaaaggaaatgagatcggaattcctcggggaattccaattccacattttcaagaaataaggaggcaaaaatgttcatatatgaattggaattatttgttttcttattaggcctatcctgaagctaaaggaaatgagatcggaattcctcggggaattccaattccacattttcaagaaataaggaggcaaaaatgttcatatatgaattggaattatttgttttcttattaggcctatcctgaagccaaaggaaatgagatcggcattcctcgggggtaccg

SEQ ID NO: 353 - DNA, 360 bp, Glycine max
  Clone ID: LIB3027-001-Q1-B1-F2
gaaagtcttccatagccccccaaaaatgaagagcaccatcttctttgctctctttctcttttgtgccttcaccacctcatacctaccttcagccatcgctgatttcgtgctcgataatgaaggtaaccctcttgaaaatggtggcacatattatatcttgtcagacataacagcatttggtggaataagagcagccccaacgggaaatgaaagatgccctctcactgtggtgcaatctcgcaatgagctcgacaaagggattggaacaatcatctcgtccccatatcgaatccgttttatcgccgaaggccatcctttgagccttaagttcgattcatttgcagttataatgctgtgtgt

SEQ ID NO: 354 - DNA, 384 bp, Glycine max
  Clone ID: LIB3027-001-Q1-B1-F4
tgaaaaattactgcgccaggctagagctccaagtatgtttttacaatccttcaaaaattttgtttctttgtgtgtgtatggtgatgataacttaattagtgttcatgaatatgtcaagccttactttagtggttctaaattgaaaagctttctagctggtcataatatcaccattactgatggtattgacaaaactagtgcaactttgcaatttagaaagttagcagattgtgattttctcaagagaaactttaagcagatgtctaatgttttgtgggtggctcctgaggacaaggcgagtttatggtcacaacttcattatgtttcgtgtaataatctggaaatgcaagaagcttatcttgtcaatctcgtaaatgtgttacg

SEQ ID NO: 355 - DNA, 403 bp, Glycine max
  Clone ID: LIB3027-001-Q1-B1-F5
ctcccctttccctaacctccttcttcttcactactaatcttcacaaccatatcatccccaaaacaaaaaaaatccacgtatttgaaatccgacgctgtttttgatggatttagcgtgcaacgatgaaccacctaccgcgaatattcggcaatagaaagaagcaagcctccgacatggacccgacgaagaagaagaagaagagtaagggtaagaagcatcagcagccgaagctcgagcgccgcaacgccgccaagcacttcgaatacgacgccggatcgttgtgctcgtcgcgcgatgagtacgacgcctcgacgtcgtcgtcgtcgtcgttgcactgcacgcgctcgatggagctcttcgaccgcaagagcttccgaatcgagggcgtggagggcgagttcga

SEQ ID NO: 356 - DNA, 359 bp, Glycine max
  unsure (1)..(359): unsure at all n locations
  Clone ID: LIB3027-001-Q1-B1-F6
gaaagtcttccatagccccccaaaaatgaagagcaccatcttctttgctctctttctcttttgtgccttcaccacctcatacctaccttcagccatcgctgatttcgtgctcgataatgaaggtaaccctcttgaaaatggtggcacatattatatcttgtcagacataacagcatttggtggaataagagcagccccaacgggaaatgaaagatgccctctcactgtggtgcaatctcgcaatgagctcgacaaagggattggaacaatcatctcgtcnccatatcgaatccgttttatcgccgaaggccatcctttgagccttaagttcgattcatttgcagttataatgctgtgtg

SEQ ID NO: 357 - DNA, 138 bp, Glycine max
  Clone ID: LIB3027-001-Q1-B1-F7
caaagatttgttcagttcatgaagatcacattgcttacatataaacttggttgatagatcatatgtaaatatatcggtaatggatcccggagttatgagatcttttttgtctttaataaatatcgccatctaactcac

SEQ ID NO: 358 - DNA, 389 bp, Glycine max
  Clone ID: LIB3027-001-Q1-B1-F9
taaaaatgttggaagtgaaacaaggtgagaagtatgcccctggaaatcaaatattggagaactcctctaacactgggcttgataaggaggagaatgtacaagatatattagaagaaagctccaatcattctacccgcaaagaacattttgatcatcatgaatttgaagatcgcactgattctcaagttagagcatctcatcaaaataccacaaccttcaaaaccattgaccaaaaccagatgatagatggaacaagcactcacaccaataacctcagcaagacttgtaaaccttcagaggaagatggtagcctgctaaaagctgataaacatagagttgatgatcaacttggtggcaattctcaaagaagaaaaaacacaactgttgat

SEQ ID NO: 359 - DNA, 303 bp, Glycine max
  Clone ID: LIB3027-001-Q1-B1-G10
atagaaaataaataagaagaatttagaaaccctaaccatcatgtctccaaaatcaaaggctaaagctatgttcatcatcttcaaaatattaatgttaaatcttttgccaccaatatatgcatgtgggccatgcactacgccacgttaccccaaagggccgccccatcacggaggaggccggccgaaagtgtcgcctccgctgccgccaatcataatcaaccctccggtggtaccgccaccggtggtgatataccctccaccaatctcaccgccatacccgccgccgcacggtggtggtggttc

SEQ ID NO: 360 - DNA, 394 bp, Glycine max
  Clone ID: LIB3027-001-Q1-B1-G11
ggactggcttgatatgtttaggctatgctatatgttagatatagtgcataaggaagacactcattcaggagcataattaaaaagaaactgaaacttcatgcctgcatttgaatttccaatgaagcataacaataatattatggtatatgaacattttgataccaaaatgacttctttttcaggcataccttgctttctttgtcatcaatgacctacaaatggcccaatcagccaaagctttggtaatctacaaattttgtccattttaagttcattgtagttcatttagcttcaaataatttgaagtttgaatgatggcatggctgattacactgcctgatgatgttttacataggttcctgctctcatatacatctgcagctttgttgtgtcc

SEQ ID NO: 361 - DNA, 327 bp, Glycine max
  unsure (1)..(327): unsure at all n locations
  Clone ID: LIB3027-001-Q1-B1-G4
gagaaacaaagaaaggaaataattgatctttgaaaatgcatggaggaaagaaagctggagagtccatcaaggaaacagctgcaaacattggtgcttatatgcttttcatttgctgttactaattacagatatgcaatttggaatttactcaaaacattttgttttaggaatgtgtacgagctttcataacagaaagcacagatggagatattcttgaactacatattcaggatccttttcatagattgttactgcatggagtttgtgaggtaatataacatatgcttctccctgtgtnaatggtgaaaactcgatgtgctattaact

SEQ ID NO: 362 - DNA, 366 bp, Glycine max
  Clone ID: LIB3027-001-Q1-B1-G6
catttttcatgtttgcatttgctttagcgtctgtggtattgataataggctggttaatggatttgtgttttctatgtttcaacacctatatgtctcacctattcccagatctccactcaattggtggtttggttcctcttcttggttacctaaagaattctcatgccaatattcgagcaatggctgctgatgttgtgaccacaatagtccagaataatcctcgaagtcagcaacttgttatggaagcaaatggctttgaacctcttatttctaattttagttcggatcctgacgtgactgttagaactaaagcactgggtgcaatatcttcactaattcggcacaacagaccaggcattactgcat

SEQ ID NO: 363 - DNA, 398 bp, Glycine max
  Clone ID: LIB3027-001-Q1-B1-G7
cataattccggggtcttttcatgtatgcatttgctttagcgtctgtggtattgataataggctggttaatggatttgtgttttctatgtttcaacacctatatgtctcacctattcgcagatctccactcaattggtggtttggttcctcttcttggttacctaaagaattctcatgccaatattcgagcaatggctgctgatgttgtgaccacaatagtccagaataatcctcgaagtcagcaacttgttatggaagcaaatggctttgaacctcttatttctaattttagttcggttcctgacgtgactgttacaactaaagcactgggtgcactatcttcactacttcggcacagcagaccagtcattcctgcatttcgtttggcaaatgggtat

SEQ ID NO: 364 - DNA, 388 bp, Glycine max
  Clone ID: LIB3027-001-Q1-B1-G8
aagttattatcaaataattaattaaattcctcgtggaatcttgttgaagccatgtctacagctggtcaggtcatcaagtgcagagctgcggtggcatgggaagcagggaagccactatcgatagaaaccatagaagtggcaccaccccagaaaggtgaagtgcgtttgaagatcctcttcaactccctttgccgtacagatgtttactggtgggatgctaagggccagactccgctgtttcctcgtatcttaggccacgaagcttcggggattgtggagagcgtgggcaagggtgtgacacatctgaaaccaggtgaccatgctctcccaatattcactggggagtgtggtgaatgcacctattgcaagtctgaagagaacacctgtg

SEQ ID NO: 365 - DNA, 336 bp, Glycine max
  Clone ID: LIB3027-001-Q1-B1-H10
gccctctcatatgtagcaagaaaaggctgaaccatggtgtgttacttgtgggatatggtgcaaaaggcttctcaattcttaggcttggcaacaaaccatactggatcatcaagaattcgtggggggagaaatggggagaagatggctattacaagctctgcagagggcatggcatgtgtggaataaacactatggtttctgctgcaatggtgcctcaaccacaaacaacacctacaaagaattatgcttcttattagctatgcacttaaggaaatctaaataaatatttttcattctaagtgatgtatcatgtatgtaccaaaatattttggtacg

SEQ ID NO: 366 - DNA, 380 bp, Glycine max
  Clone ID: LIB3027-001-Q1-B1-H12
ctagctagctagcaagcaagcacagagatggaggcaaagcgaggccatgccctcatgtgcttggcacgtgtttcactcttcctctgcgctctaaccctatccgctgctcacggaagcaccacggttcaagacatcgcgagaaagttgaaactcggggacaacgagcttctgcgcacggagaagaagttcaaggttttcatggagaattacgggaggagctactccacagaggaggagtatttgcgccgtttggggattttcgcccagaacatggtcagagcggcggagcatcaggcgctggaccccaccgccgtccacggcgtcacgcagttctccgatctcaccgaggacgagtttgagaagctctacactggcgtcaa

SEQ ID NO: 367 - DNA, 333 bp, Glycine max
  Clone ID: LIB3027-001-Q1-B1-H3
atgatgcctccaccagcctcttggttgcttctttggtctacccttcacagagaaccagcaatatcctctccgatgtggtcgatttgaagacttctcttcccgagtgggtgaggatagggttctctgctgccacgggactcgacatacctggggaatcgcatgacgtgctttcttggtcttttgcttccaatttgccacacgctatcagtaacattgatcctttggatcttacaagctttgtgttgcatgaggccatctatatgtgacagatcgaacgaagaacgtgtaatatgacgactctcatgactcgatagtgagtgattgcacatgata

SEQ ID NO: 368 - DNA, 398 bp, Glycine max
  Clone ID: LIB3027-001-Q1-B1-H4
ggcacgaggtaccatgttgacaattgcggcgtgtgcaaaaaagctgttataatggttaatgattgtgatgtctggaaatgcagcaatcaaagtgagtgattgcgccacactggtacaagtcattttaacatgcagcaacagtacagagcattttgatgcatgtaaatggacacaatcggtcccagattcctgggaattgatcgtcccacatagagggacgtggtcccaataatggttttgaaacgtggagttctgagtgggcagatcaaacttcatggcatttgagtttccttagtgacaatcccagacagtcgacagtttttgatatgctcatgggaatttctcaggattttgaaattgctggtaatactcttatgcgagctttttctgttccacaa

SEQ ID NO: 369 - DNA, 390 bp, Glycine max
  Clone ID: LIB3027-001-Q1-B1-H6
gatagcgatgatgttgtttgccatgaactgtaactgcactagtgttggccacatgccttcaaccaaagaggaaggtcacgattttcaggaggctaaagccaagacaacacaaactgcgaacaaggccatggaaactggtaaagatgggaaagaagccgcagagtcatggacagaatgggctaaagagaaactcactgaaggtcttggcttcaaacatgatcaagaatccaccactaagaaagtctctgactatgccggtgatgctgctcagaaatcaaaggactatgccggtgacactgctcagaaaaccaaggactatgccggtgacactgctcagaaaaccaaggactatgccggtgacactgcacagacatcaaaggactatgcccg

SEQ ID NO: 370 - DNA, 395 bp, Glycine max
  unsure (1)..(395): unsure at all n locations
  Clone ID: LIB3027-002-Q1-B1-A1
ttttgatgcatgtaagtggacaaaatcggaaccacattcctgggaattgatcttcccaatagaggtatgcggtcctaataatggttttgaaatgtggagttctgagtgggcaaatcaaacttcatggcatttgagtttccttattgacaatcccaaacagtctacagtttttgacattctcttgggaatttctcaagattttgaaattgctggtaatactcttatgccagctttttctgttccacaggctactgccagatcttctgaaaatgcggaatcctctgcatgatctggaatttgtgttttctttcatttgtccgtttgtttaattcaataaaggaaattaggcatgaccctcttgttgagtatgctctgcctatttganaatttcacac

SEQ ID NO: 371 - DNA, 393 bp, Glycine max
  unsure (1)..(393): unsure at all n locations
  Clone ID: LIB3027-002-Q1-B1-A2
aacttaattagtgttcatgaatatgtcaagccttattttagtggttctaaattgaaaagctttctagctggtcataatatcaccattactgatggtattgacaaaactagtgcaactttgcaatttagaaagttagcagattgtgattttctcaagagaaactttaagcagatgtccaatgttttgtgggtggctcctgaggacaaggcgagtttatggtcacaacttcattatgtttcgtgtaataatctggaaatgcaagaagcttatcttgtcaatctcgtaaatgtgttacgagaattgtatttgcacagtccagaggaagctcgccaattgagaaggaaagctctctctcgtattgaatggctgcanaaagctgatgtgcctaacata

SEQ ID NO: 372 - DNA, 400 bp, Glycine max
  Clone ID: LIB3027-002-Q1-B1-A3
catcacacacaactactacaagtacttccttacaatcaaaaccaacaacaactatggcaagttatcaaaagcactacgatgatcagggtcgcaaggttgacgagtatggcaacgttgagaagcaaaccgacgaatacggcaaccctgttcatgctgctagtgtcacctatgtaaccaccagaactgctgctggtggttacagtgatgacattaataagcaacatgataccaccaatgcctacggcgtagacactggtagacagcattctagtggtggctacgatggtgacactaataaacatcatggaactactggtggctataatgatgacaccaatagacatcatggaactaccggtgtctatggtatagacaccgataggcaacaacatgggactac

SEQ ID NO: 373 - DNA, 399 bp, Glycine max
  Clone ID: LIB3027-002-Q1-B1-A5
gcctgataacccataaccgaccgcaccaccgttttcctttgctttgcgttctacaatgtcgaaaacctcagagattattacatgcaaagctgctatttgctggggaataggaaaacctgtgactgtggaagagatacaagtagaccctcccaaagccaccgaagttcgagttaagatgctttgtgccagtatatgctccacagacatctctagcacaaaaggattcccacataccaattttcctatagcacttggacacgaaggagttggtattatagagagtgtcggtgatcaagtaacgaatctgaaagaaggggatgtggtaattccaacatacataggcgagtgccaagaatgtgagaattgtgtttcagaaaaaaccaatttgtgtatgacata

SEQ ID NO: 374 - DNA, 400 bp, Glycine max
  Clone ID: LIB3027-002-Q1-B1-A9
caaaaccctgaagaaagacacagccattgtttgtttactttccattgattgagcgaaagctttgttttttctgcgatcattttccattgggtggaagaaagtctcaacctttagtcgaaagagcaaggatctgagtgagtgagcgatcatgtgtggtggtgcgattatctccgacttcattccagcgggtcccgccggcggggcgcagcgcgtgaccgccgacatcctgtggccgaatttgaggaagcggttctcgaagtcgctgctggacgatgatttcgaggcagggttcagagaattcgaggatgactcggaaatcgaggatgtcgatgatgaggacgatgaagaggaggaggagttgaagaagaagaagccctttgggttctctcgctccaacaac

SEQ ID NO: 375 - DNA, 398 bp, Glycine max
  Clone ID: LIB3027-002-Q1-B1-B1
gttcttcttcgtcgttatcttcttcttttgttgtttgtgtgtttgtttttttctctcacctgaaaatgtcttgctgcggtggtaactgtggttgcggaagcgcctgcaagtgcggcaacggctgcggaggctgcaagatgtacccagacttgagctacaccgagtcaaccaccaccgagaccttggtcatgggagtggcaccagttaaggctcaattcgagagtgctgaaatgggtgttcccgctgagaacgatggctgcaaatgtggagctaactgcacctgcaacccctgcacttgcaagtgaggtgttggagagctaaagcttcaagcagaaatggcccttagaaataatgataaaaactatatgtagtttcaaaacttcaaaattatgtagtat

SEQ ID NO: 376 - DNA, 215 bp, Glycine max
  Clone ID: LIB3027-002-Q1-B1-B11
ttggacacaggaatatttggcattttgcaagaacaataaatagttgtatatatagctttagaacgtgtgtcaagtatcatggttgtagaattatcgtcactactcattcttgttcgatcatctgtgtcggctgcgaggctttctaaaagtgccatttatactggtgattatgactctgtatcatcatcattatttttttttctggtttacatatc

SEQ ID NO: 377 - DNA, 397 bp, Glycine max
  Clone ID: LIB3027-002-Q1-B1-B3
gagctgaagaaaacctaagcttagaattagaaacaaagaaaagaagaaaggaaagaattgatcgttgaaaatgcagggaggaaagaaagcgggagagtccattaaggaaacagctacaaacattggtgcttctgccaaggctggcatggagaagaccaaggccactgtccaagagaaggcagaaagaatgacagcacgtgatccggtgcaaaaggagttggcaacccaaaagaaagaggcaaagatgaaccaggcggagctggacaagcaggcggcgcgtcagcataacacggcggccaaacagtccgccaccacggctgggcacatgggacatggccaacaacacaccgggaccgggactggaaccgcacgtatttcaccacgggggaatatggtc

SEQ ID NO: 378 - DNA, 387 bp, Glycine max
  Clone ID: LIB3027-002-Q1-B1-B4
aaaaccgtttccaactttacattttcccaccaaccctcctctccattcctcaaaacaatcgttaatctcttctccattgtgaactctgatattctccaagtacacaacacaaacacacatcaatttatagcacccgatttctcttttccccctcaaattcagctccattttgttacagattcaaataataagccaagcagccacaccatgatctcgtcaatgaaatgcacagcctcatctctcacatgttctgctttctcaaacagaaagcttcccattgcaaggcctcaactcgtgacattaccaaccatcaacaacgttgaacaaaacatgggtccctctcagttgtgttcacagaagcctctctacctttcatccaccgagaac

SEQ ID NO: 379 - DNA, 389 bp, Glycine max
  Clone ID: LIB3027-002-Q1-B1-B8
ggctgaccaaatgctgccaatctgaagtatttgcatcttgcctcaaaactaaataagaaaggacatgaagccattaattgattacaccacaatggcataccacaaatggagacagccaaagagtccctcatctgttgctctagcttctctgtcaacttactgcttacaaactcaatctgtgggacagaaggaactgttatttttagactatccaggttatcaactttcccttgggcaaaagcacaaattctttcacgcgacataaggtgaaatataattctgaaatctggctttaaccaggttttctccattgatcatcttcggattttcaatgaagaagaacttgagcgaatgctttgtggagagtatgactcttgggctgtcaacga

SEQ ID NO: 380 - DNA, 390 bp, Glycine max
  Clone ID: LIB3027-002-Q1-B1-C12
cattaatgtgtgtttgtcacgagacccatagtgctgccaaattatagtaactctctttctctatctgaagaagaagaagttctgaagaagcatgtgtggaggtgctatcatctcagacttcattggtgtgaagcgtggccgcaacctcgccgcgcaggaactgtggtccgagcttgaccctttctctgacctccttggcttcgataccaccaccaccaccaccaaccaaccaccccttccagacaaaaaagtggtgtcatcatgtgagaagaagaagaagaaaagtgtgagtgcagaaaagaagagtggtgggcgagctcggaagaacgtgtacagaggaatcaggcaaaggccgtggggcaagtgggccgcggaaataagggaccacat

SEQ ID NO: 381 - DNA, 390 bp, Glycine max
  Clone ID: LIB3027-002-Q1-B1-C2
ggaattttagtggacaaaactggagattggatcacacttatacaaaattctccaattagtaacttgttgagagttgctgcttggaagaaaggctgtttaatggttaagattgtgatgtctgggaatgcagcagtcaaaaggagtgattgggcctcattggtacaagtgtttttaacaaacagcaacagtacagagcattttgatgcatgtaagtggacaaaatcggaaccacattcctgggaattgatcttcccaatagaggtatgtggtcctaataatggttttgaaatgtggagttctgagtgggcaaatcaaacttcatggcatttgagtttccttattgacaatcccaaacagtctacagtttttgatattctcttgggaatttct

SEQ ID NO: 382 - DNA, 294 bp, Glycine max
  Clone ID: LIB3027-002-Q1-B1-C4
gaaagtccaccaataatacttgttggcaacacttgctatgcctgatgttcactggtgatgatgaaggtttttcttctgacaatttgcttcaatggcatatgctgtgaaagctgcttgattcctcgcccaagcaatattcagaaaatttcttatcgattaaggtgtaaggattacttagttgcactcgttatatgcttgtatgttagtttttcacgttgttcacattacgttattcacagtgtattggacaggtatagttggcttaagtatgatgtaaatatacgtgttgatatc

SEQ ID NO: 383 - DNA, 437 bp, Glycine max
  Clone ID: LIB3027-002-Q1-B1-C9
aggtccactctaaaggatcacctcggggaattccaattccacattttcaagaaataaggaggcaaaaatgttcatatatgaattggaattatttgttttcttattaggcctatcctgaagccaaaggaaatgagatcggaattcctcggggaattccaattccacattttcaagaaataaggaggcaaaaatgttcatatatgaattggaattatttgttttcttattaggcctatcctgaagccaaaggaaatgagatcggaattcctcggggaattccaattccacattttcaagaaataaggaggcaaaaatgttcatatatgaattggaattatttgttttcttattaggcctatcctgaagccaaaggaaatgagatcggaattcctcggggaattccaattccacattttcaagaaataaggaggcaaaaa

SEQ ID NO: 384 - DNA, 407 bp, Glycine max
  Clone ID: LIB3027-002-Q1-B1-D1
cagtctactctagacgatcccctcggggaattctagttccacattttcaagaaataaggaggcaatcatgttcatatatgaattggaatgatttgttttcatatcaggcctatcctgaaaccaaaggaaatgagatcggaattcctcggggaattccaattccacatttgcaagaaataaggaagcagaattgttcatagaggacttgcaattacttgttttcttataaggcctatcctgaagccaaaggaaatgagatcggaattcctcggggaattctaattccagattttcacgaaatatcgaagcaatcatgttcacatatcaacttggattagttgttttcttatgatgcctatcctgaagccatacgacatgagatccgaattcctcggggggtacaagct

SEQ ID NO: 385 - DNA, 358 bp, Glycine max
  Clone ID: LIB3027-002-Q1-B1-D2
cttgatccttctttttctccttgaactcaaacatggcagatgaggtggttctgctagatttctggccaagtccatttgggatgagggtcaggattgcacttgctgaaaagggtatcaaatatgagtacaaagaagaggacttgaggaacaagagtcctcttctcctccaaatgaacccggttcacaagaagattccggttctcatccacaatggcaaacccatttgtgaatccctcattgctgttcagtacattgaggaggtttggaatgacagaaatcccttgttgccttctgacccttaccagagagctcaggctagattctgggctgattatgttgataagaagatatatgatct

SEQ ID NO: 386 - DNA, 150 bp, Glycine max
  Clone ID: LIB3027-002-Q1-B1-D3
cttgaatataatactcagcatggctaagcttgttctttccctttgttttctgcttttcagtggctgctgcttcgctttcagtttcagagagcagccacagcaaaacgagtgccagttccaaggcctcatggccctcaaacgggataaccg

SEQ ID NO: 387 - DNA, 398 bp, Glycine max
  unsure (1)..(398): unsure at all n locations
  Clone ID: LIB3027-002-Q1-B1-D5
gaaaaaagagaagaagatgggtttgaagaacaacatggtggtgctaaaggtgtgtttggtgctacttttccttgtggggggtactactagtgccagcttgaggctgagtgagcttggcctgctcatgaaaagtgatcatcatcaacactcaaatgatgatgactcttcaaaaccatgctgtgatcaatgcgcatgcacaaagtcaaaccctcctcaatgccgctgttcagatatgaggctgaattcgtgccattcagcttgcaaatcttgtatttgcgcattatcgtatcctgcacagtgtttttgtgttgacataacggatttctgctatgaaccttgcaagcccagtgaggatgacaaggaanactactaatgaacaagtgttatgcatgtaagct

SEQ ID NO: 388 - DNA, 395 bp, Glycine max
  Clone ID: LIB3027-002-Q1-B1-D6
agagtacgaagaagacgacgacgaagaaaacgtgccctctccctccaccgctctcgctgtcaccgtcgccgtccccggttccgccgtctccaacggcggcggtggctctccaatttcgaagcccaccgccaccgccaccaccgccaccatcgtcctcgccgactcatccgatccgaagcggcgtcgcctggagctaatcgaggagaaaaagccgccgccgccgctggatgactcgcggcggctgtttcagcggctgtggaccgatgaggatgagatcgagctcttgcaagggttcctcgactacacatcgcagcgaggatcctcgcaccacaacgacaccgctttgttctacgaccaaatcaagtcgaagctccaactcgatttcaacaagaatc

SEQ ID NO: 389 - DNA, 373 bp, Glycine max
  Clone ID: LIB3027-002-Q1-B1-D7
ggagatgcaaacattgaacttgttggcctaaaagaacaacaacaggagcagcaacaggaagagcaacctttggaagtgcggaaatatagagccgaattgtctgaacaagatatatttgtaatcccagcaggttatccagttgtggtcaacgctacctcaaatctgaatttctttgctattggtattaatgccgagaacaaccagaggaacttcctcccaaggtcgcaagacaatgtgataagccagatacctagtcaagtgcaagagcttgcattccctgggtctgcacaagctgttgagaagctagtaaagaaccaaagagaatcctactttgtggatgctcaacctaagaagaaagaagaagggaataagg

SEQ ID NO: 390 - DNA, 381 bp, Glycine max
  unsure (1)..(381): unsure at all n locations
  Clone ID: LIB3027-002-Q1-B1-D8
gccagttctgatatttacaccatctgctctcaagactgtgaattgtggaatcctgcttgcacaaaagcaatgactatgtcatttaatccaaacccgtgttctgatgcatggagtttggaatttctgaagcgtactggatttcattgcgatatcatttgtgtcactggatggactgccaccccaatgcaggatgttcaggttacaattgattggtttatttcctctcaggaatgtgttcccaggacctattgtgttttaaatccacaaaatccttttgtgttaaataggtggatgggaaaattgactttcccccagggcacttcccgaagtgttaagagaatgcctctttctatanggggaagagctggtgcaaagaatgct

SEQ ID NO: 391 - DNA, 404 bp, Glycine max
  Clone ID: LIB3027-002-Q1-B1-D9
cggatgtgtgagtttgcatggttggatagcaatggcagcaaagaaggtgtgtgtaacaggtgctggaggattcgtagcgtcttggcttgttaagcttcttctttccaaaggctacattgtccatggaactgtgagagaccctgaacctgctactcagaaatatgaacacttgctcaaactccacggagcttctgaaaacctcactctcttcaaggcagatctcttgaactacgaatctcttcgctcagcaatttctggatgcactgcagttttccatcttgcttgccctgtaccctcaatcagtgttcccaaccctcaagttgaaatgattgagcctgctgtgaaaggaacaactaatgtacttgaagctagccttgaagctaaagtgcaacgacttgtctttg

SEQ ID NO: 392 - DNA, 398 bp, Glycine max
  unsure (1)..(398): unsure at all n locations
  Clone ID: LIB3027-002-Q1-B1-E10
ctacttatcgtctaagctcagtgatcacaacctacgccgagtgaaaccccaatcccaatacactcccaactcacaaagccatgtctccaggtcctgttgtcgacgcttcncctgagttgaagcagagcaacaacttccctccgtcgatgacgcaacccagttgaagaaatcccaaccgcaggaggatgatgctcccgttgtcgaggacgtgagggatgatgacaaggacgacgacgatgaggacgacgacgacgatgatgaagatgacaaggaagacgatgctctaggtggtgctgagggtcanagcagagcagaagtgagaagaagagtcgaaaagcaatgttgaagctgggactaaaacctgtcaccggtgttagtagggtcacaatcaagagaac

SEQ ID NO: 393 - DNA, 121 bp, Glycine max
  Clone ID: LIB3027-002-Q1-B1-E11
cgtttgtttaattcaataaaggaaattaggcatgaccctcttgttgagtatgctctgcctatttgaaaatttccacacctcttttaattgtcgtaatgatgtgtgaagtgtgtgttatttt

SEQ ID NO: 394 - DNA, 407 bp, Glycine max
  unsure (1)..(407): unsure at all n locations
  Clone ID: LIB3027-002-Q1-B1-E12
ctgattttgtgaacccgaaagatcacaacaaaccagttcaagaggtcattgctgaaatgactaatggaggagtagatcgtgctattgaatgcacaggaagcatccaagcatcaatctcggcatttgaatgcactcatgatggttggggtactgctgtccttgttagtgtgccaaagaaggatgcagaattcaaaactcatcctatgaagttcatggaagggagaactcttaagggtaccttctatggtcactatagaccccgcactgacattcctggtgttgtggagaagtacctcaacaaggagctggagctggacaaatttatcactcactctgtcncattctcagagattaacactgcatttgatcttatgctgaaaggcgaaggaataaggtgcctcatctgc

SEQ ID NO: 395 - DNA, 391 bp, Glycine max
  unsure (1)..(391): unsure at all n locations
  Clone ID: LIB3027-002-Q1-B1-E6
acgtattcttctctctccgtctctctctctctctctctctcttcacagtgccaatggcggatccaatcgcgaaggttctgatcgcgtttgcgctcttagcttccctcttgctgtgttcgcacgcttcctccgacgttcccttcatcgttgctcacaagaaggcctccctcaacagactcaagtccggcgccgaaagggtctccgtcaccatcgacatcttcaaccaaggaacctcgacggcctatgatgtaagcttatcagacgatagctggccaagtgatgcttttgatgtaatcagcggtagcacttcaaagtcatgggaaaggcttgatgctggtggcatcctttctcacacatttgagctggaggcanaatcaaagggagtatttgc

SEQ ID NO: 396 - DNA, 331 bp, Glycine max
  Clone ID: LIB3027-002-Q1-B1-E7
ggaggcgagctggaggcatcggcggcgcgtgagggaccaggtgaaggtggtgtggttgtagactagggaagggacgtgggcgtagacggtggctgctctgtccaagaaggcgagtggagtgagaggggatgagttaggagcgcttggcttcagctgttccattaggagaaagattctctgaagcaaaacacacacccacgctgcttctgaatgaatgaacagaacgtatatacacagcgtcttgctcgtgtagtgatgagggagaaatatatgttaaatcattcatttcctctaatatttaagaatgatttagttagatcttttcgtccat

SEQ ID NO: 397 - DNA, 128 bp, Glycine max
  Clone ID: LIB3027-002-Q1-B1-E8
agtccttactgcaaacgatgtgaccagtacgccaacactgtgacatgtaacgtcaagaggtcgcgtaaccgacgatttgcgtcatgtacttccacgccgagatgcaccacactgaatccacggtcatt

SEQ ID NO: 398 - DNA, 404 bp, Glycine max
  Clone ID: LIB3027-002-Q1-B1-E9
aattaagctttcaagagacaaactgctttgaaaaatgggatccaaggttgttgcatccgttgcccttctcctctccatcaacattcttttcatttccatggttagctccagcagccactacgatccacagccccaaccttctcacgtcactgctcttattacacgacctagttgtccggatctgagtatttgcctcaatattttaggcgggtctctaggaaccgtggatgattgttgtgccctcatcggtggtcttggtgacattgaagccattgtgtgcctttgcatccaactcagggccctcggaatattaaaccttaaccgtaatttgcagttaatattaaactcctgtggacgaagctacccgtcaaacgccacttgcccccgaacctaagaacaggata

SEQ ID NO: 399 - DNA, 395 bp, Glycine max
  Clone ID: LIB3027-002-Q1-B1-F1
gttctttgagatcaccccagagaaaaacccccagcttcgggacttggatatcttcctcagtattgtggatatgaacgagggagctcttcttctaccacacttcaattcaaaggcgatagtgatactggtaattaatgaaggagatgcaaacattgaacttgttggcctaaaagaacaacaacaggagcagcaacaggaagagcaacctttggaagtgcggaaatatagagccgaattgtctgaacaagatatatttgtaatcccagcaggttatccagttgtggtcaacgctacctcaaatctgaatttctttgctattggtattaatgccgagaacaaccagaggaacttcctcgcaggttcgcaagacaatgtgataagccagatacctagtc

SEQ ID NO: 400 - DNA, 365 bp, Glycine max
  Clone ID: LIB3027-002-Q1-B1-F2
aaaaccccccttttccaacccaatttttctccataaaccctagattcaacgaacccgccgaccaagctcgaacctcacgtcgcaaaaaaacacttcttttcccctctccgaggttgtcgtgtcggagcatagccatgttgttccctcgaggaaattgatgatttttcataacattggggtctcgttttgcttgtggggtcaccttgaaggagggaaaagtaacgagctttggggctgaatcgtggtgggtctgttgagtatgcatagatctggagctacgatggcgtggaacgtgttcaagttctgcactgctctgcgtggattgggctcgatcatgatcctgttggttcttggcgttgttggtg

SEQ ID NO: 401 - DNA, 390 bp, Glycine max
  Clone ID: LIB3027-002-Q1-B1-F8
aaaatggctgatacaagtggaggagatgcagtgagaccggtggtaatatgtgataacaagtgtggctgcacagttccatgcactggtggttccacttgcaggtgcacaagtgtcggcatgacaactggaggcggtgatcacgtgacatgctcgtgcggagagtactgtgggtgcaatccatgctcatgtcccaagactgcggcttctggaactggttgcagatgtggcacagattgctcatgtgcctcttgccgcacttaacatcataccttaattaagtctcaaacttcacaaatcttgaatgtgctttaaatctagctatgtactagatagtctcgttcaatgttagtgttcaaattgtggatgtgatttctaatattagtctactac

SEQ ID NO: 402 - DNA, 440 bp, Glycine max
  unsure (1)..(440): unsure at all n locations
  Clone ID: LIB3027-002-Q1-B1-G1
ctctcgggctgcaattctcaagttcacaaagtgttccatcaacaatatgggagtgtcatgaatctgctcccattactatgctaacatgcgatagctagctctggttgtatcgatagtgcactgtgctcatacctcaaagcctcacccgganataaagatcttggaatccgcgtcggacattccattgtccacattttcagataaatagatgaggaatcacatgttcagagatggatctgtgcaataagtgttttctgatgcacgctatcgagaatcactctgaaatgacatcaggattctacgtcagaatgccacctcaacatgtgcaactggttgggacgcagaattgttcattggtcatatagactaatgagcatgcttatgaggccaatgttaaacctgttcgacatgcaatgtgcattcatctcaggtaaccatct

SEQ ID NO: 403 - DNA, 406 bp, Glycine max
  Clone ID: LIB3027-002-Q1-B1-G11
ggctcgaggggaaaacagactatctgctcccgtgaattatgtggccatatcaaaagaagatgctgcttcccatgtttctggtactgaacccatcccggcatcaccctaataacgagatcttcattttcaaccctataatttcatctttgtagcattgtcaaattactagttactgctttaggaattataatatgggagtgacaagtaattagagagatactgttctgagctgtgtatgttcaatttgccatttggaggttttctgaatacatatgccctataatatgaaaatatacagtcttcagtgctagtcttgcctttttccaaaccctagcttctattcgttggtttggttcactttccgtgtgtttgaaatggtgttacatactcttaaaaaaatgatgtt

SEQ ID NO: 404 - DNA, 398 bp, Glycine max
  Clone ID: LIB3027-002-Q1-B1-G5
tgttgttgtaacacgttcttcatcttttgttgttctgtgtttgtgtttgttttttctctcacctgaaaatgtcttgctgcggtggtaactgtggatgcggaagctcctgcaagtgcggcaacggctgcggatgctgcaagatgtacccagacttgagctacactgagtcaaccaccaccgagaccttggtcatgggagtggcacctgttaaggctcaatttgagggtgctgaaatgggtgtgcccgctgagaacgatggctgcaaatgtggaccaaactgctcctgcaacccttgcacttgcaagtgaggtgttgggagagcaagcttcaagcagagatagcccttaattaagaataatgataaactattaatgtgtagctaaaaacttatgtattat

SEQ ID NO: 405 - DNA, 406 bp, Glycine max
  unsure (1)..(406): unsure at all n locations
  Clone ID: LIB3027-002-Q1-B1-H10
cgaggacacagctgagaaacttcggtctccagatgacgaaaggaagcagatcgtgacagtggagggaggcctcagcgttatcagccccaagtggcaagaacaagaagacgaagacgaagatgaagacgaagaatatgaacaaactccctcttatcctccacgacgaccaagccatggaaagcatgaagatgacgaggacgaggacgaagaagaagatcaacctcgtcctgatcaccctccacagcgaccaagcaggcccgaacaacaagaaccacgtggaagaggatgtcagactagaaatggggttgaggaaaatatttgcaccatgaagcttcacgagaacattgctcgcccttcacgtgctgacttctacaacccanaagctggtcgcattagcaccctcaac

SEQ ID NO: 406 - DNA, 376 bp, Glycine max
  unsure (1)..(376): unsure at all n locations
  Clone ID: LIB3027-002-Q1-B1-H11
tcttaattcatagtctcttggtccttccttccttcttctgctcaataagtgtgtgccactctaattaattaccacccccttctagacatagttcttctccctctgttctctattctctacactgtgaaaccaagatgaaggtagcatttgcagctgttctacttatatgccttgtcctcagctcctccttgttcgaggtgtcaatggctggttctgctttctgttcctccaagtgctcgaagaggtgttctanagctgggatgaaggacaggtgcatgaagttctgcgggatttgctgcagcaagtgcaactgtgtgccatctgggacttatgggaacaagcatgagtgcccttgctacagagacatgaagaactc

SEQ ID NO: 407 - DNA, 367 bp, Glycine max
  Clone ID: LIB3027-002-Q1-B1-H2
cttggaaggaaggtgaggagtaaagacacggattcctgtaacagatctgcaattgtggtactaattctcaattgatactgctcaaataatgtaagtgtttttttttccactgcaaaacttaggttgcttgcaatgtgtttgatgaaattgtcttatttcttctttgctttagtttgagcacttcatctaattttcatttcactgttagttttgctctaaattttgaatggcaaggtgcaatccaatagcttgttgccttgattccatgcttataaaacaatcacatagcacacaaaaagtttttctaatgttgcaagcttaaaattgtcctcattcattgtgaaattgatcaaatatcaatttttgt

SEQ ID NO: 408 - DNA, 370 bp, Glycine max
  Clone ID: LIB3027-002-Q1-B1-H3
cacgtctacgctagctcatcatgccgctgtaattctacattcacgaatttgcaaagctctgcagttagctgaatctgttcatagtatcagggtagaagtagtttgcgttctgagagcgcttacgcttcctcgactcagtgatgcgctgcgcactcgtcttcggtagcgaccaccagttccatatcatgcatcggcggaaattcggttacatataatatcaggggctagtgtaggattgttcatgtcacaaaattgcaaacaacatgccagcaagcgtcataaagtcgtgttgctggggtgtttcaataagtgcggtaactcagattagcagcatagcgctcaatgctcactttacaggtgggaaaactgt

SEQ ID NO: 409 - DNA, 394 bp, Glycine max
  unsure (1)..(394): unsure at all n locations
  Clone ID: LIB3027-002-Q1-B1-H4
tgcacttctggtcatcattttaccaacatgcaggttttgagttgttggtttttgaatataaatggacgccaaacggttcatccagctggttgaggagaagaagaagaagattatggagagaaaggaagctcctctgaaatgggagcagaagctggaagctgctgctgaaactaaagagaggaagctgaaggctacaaagcataaaaaaagatctggctctgatagtgacagtgataatgacagtgatgatgagagtagaaagacaagtaaaagatctcacaggaagcacagaaagcattctcactatgactctggtgaccatgagaaaaggaaagaaaaaagttccaaacggaaaacaanagaatcatcctctgagactagtgattatgatgac

SEQ ID NO: 410 - DNA, 404 bp, Glycine max
  Clone ID: LIB3027-002-Q1-B1-H5
gttgcaacctccttaaggtggagaaagaagaatgtgagaaggtgaaattccacgaccacgaccacgaccacaacacccggagagggaacctcagcaacccggtgagaaggaggaagacgacgatgagcaaccacgtccaatcccattcccacgcccacaacctcgtcaagaagaagagcacgagcagagagaggaacaggaatggcctcgcaaggaggaaaaacgcggagaaaagggaagtgaagaggaagatgaggatgaggatgaggaacaagatgaacgtcaattcccattcccacgcccacctcatcagaaggaagagcgaaagcaagaggaagatgaggatgaggagcagcagcgagagagcgaagaaagtgaagattctgagttacgaagacataaga

SEQ ID NO: 411 - DNA, 340 bp, Glycine max
  Clone ID: LIB3027-002-Q1-B1-H6
atttgcctggctttggtcctgttgttcctcaagaatgcagtgattgtgggaaaaaattcaacatgggtgcgcctatatggtctgctcctatccatgaccaagaatgggtggctgctattctggctgatgtaaaatatatgaaagacagatatccagcttatgatcgcatttcagctgtgttgactacaatatcagaggaattgcctgatgttcccctctttttgagtctgcacaacctctgtgcaaccctcaaatgcacttctccgtcagcaattattttccgttctgcggtgatcaatgcatgctatcgtatatctggaactcatgttaatccagtggg

SEQ ID NO: 412 - DNA, 371 bp, Glycine max
  Clone ID: LIB3027-002-Q1-B1-H8
atggcttccttaagctccttagtgctgctccttgcagctctaattctatcccctcaagttcttgcaaactatgagaatcccccagtgtacaagcctcccactgagaaaccaccagtttataagcccccagttgagaagcctcctgtttacaaacctccagttgaaaaccccccaatttataagcctccagtagagaagccaccagtgtacaagcccccagttgagaaacccccagtgtacaagcccccagttgaaagaccaccagtgtacaagcccccagttgagaaaccaccagtgtacaagcccccagttgagaaacccccagtttacaagcgcccagttggaaaaaccccaggtgtacaaggccccag

SEQ ID NO: 413 - DNA, 411 bp, Glycine max
  Clone ID: LIB3027-003-Q1-B1-A1
ggtcgactctaaaggatcccctcggggaattccaattccacattttcaagaaataaggaggcaaaaatgttcatatatgaattggaattatttgttttcttattaggcctatcctgaagccaaaggaaatgagatcggaattcctcggggaattccaattccacattttcaagaaataaggaggcaaaaatgttcatatatgaattggaattatttgttttcttattaggcctatcctgaagccaaaggaaatgagatcggaattcctcggggaattccaattccacattttcaagaaataaggaggcaaaaatgttcatatatgaattggaattatttgttttcttattaggcctatcctgaagccaaaggaaatgagatcggaattcctcggggggtacgagctcgaat

SEQ ID NO: 414 - DNA, 349 bp, Glycine max
  Clone ID: LIB3027-003-Q1-B1-A10
gtcagggaaggacaacacccaagggttcctgcagcagacaggggagaaggtgaagggcgcagcccaaggtgctacagaggctgtgaagcaaacccttggcttgggcgagcatgatcaagacaaccgcagaaattactaatactataatttgaagtgctttcttgtagtagtggtttacgcagcatggctttttaaataagctgctattccctacactcctacctaaggagtgtactattatccgcagtttctattctctctagctactttcatgtatgttcaatgctatatatagccttgaattaatgtcaactatgttctaattaatgctatagcttcggtttgtgtt

SEQ ID NO: 415 - DNA, 309 bp, Glycine max
  Clone ID: LIB3027-003-Q1-B1-A11
ggaatatgaagacaaaatgcgggagaagggtgagaccccagttatgttcagtcatttggggcttcctcgaaggagaacaactgcagaagaagaagaaagggttaagcacccaaagcctgaggactctgtttattaccatcctacattaaaccctacaggggctccaccaccagggaaacctcctatgtttaaatcatctataggacccagaattcctttgtctggtgcttcatcaagtgctggtgcatcatcctcaggaacagagttggaggatgatgttttaactgtacctccacctcccccgccgcc

SEQ ID NO: 416 - DNA, 347 bp, Glycine max
  Clone ID: LIB3027-003-Q1-B1-A3
cggctcgagggacaggaaacgaagatcacaagaagggtttggtaatttgtttgattagctacgggttgttatgatttccaaccatgtaattccccacaaccaggctcaccgaagttgcaatttcaatccattttcatttgccggtacacaataagtcatgattccctcccgcatttacccttgtttgtgtaaagtactaccagaatgagactaggtatcatcgatgggagggtacatgggcgatgacgagtaagattacctcctcatgctggatctcatcggagattccggtgtcggtaagtcgaacctgctttcgcgcttcacgagggaggagttccacttggggt

SEQ ID NO: 417 - DNA, 326 bp, Glycine max
  Clone ID: LIB3027-003-Q1-B1-A4
ctcacttttgatggcaaggaatagaagatggtcaaacattgcttgaaaacattattcatagtgaagttacctttcatggtgtcaataaaattcatcttgcggggttctcgaaatcccttttacaatttgttctcagttaccttaaccaaatgtacattgttcaacttaatccttcttctttaaggatctgagcaaactgaatccggtgagtaaattctacacttgcatcccgaattcattcaatacatggggatctatctggaaagactggaagggctttcaaggatgagattcacaaataaattgcgaaatggcacgagacccct

SEQ ID NO: 418 - DNA, 395 bp, Glycine max
  Clone ID: LIB3027-003-Q1-B1-B6
gcaaaatgaccaagttcacaatcctcctcatctctcttctcttctgcatcgcccacacttgcagcgcctccaaatggcagcaccagcaagatagctgccgcaagcagctccagggggtgaacctcacgccctgcgagaagcacatcatggagaagatccaaggccgcggcgatgacgatgatgatgatgacgacgacaatcacattctcaggaccatgcggggaagaatcaactacataaggaggaacgaaggaaaagacgaagacgacgaagaagaaggacacatgcagaagtgctgcacagaaatgagcgagctgagaagccccaaatgccagtgcaaagcgctgcagaagataatggaggaacagagcgatgaactggaggagaagcagaag

SEQ ID NO: 419 - DNA, 164 bp, Glycine max
  Clone ID: LIB3027-003-Q1-B1-B7
gcataatgaccaagttcacaatcctcctcatctctcttctcttctgcatcccccacacttgcagcgcctccaaatggcactatcatcattatatctgccgtacgcatgtccaagggttcaatctcacgccttgtcatatgtctatcatgttgcatatccaaggc

SEQ ID NO: 420 - DNA, 416 bp, Glycine max
  Clone ID: LIB3027-003-Q1-B1-B8
ggaggaacaatttggattgactctcctgtgctatcttcgaatatgcggaatgaccaggatcgagtaagggagttagaaagtgcagttgtgaaagaaactgaagataaaatgagcgaccgaaaaaggacagttgtggagagtacaacggatagtacctatgattctgctgttattacaggacatgatcgtgcagatgaaaaattgtatgaagatgatgatgatgttggaagattcttgtacttggaaggagtggaatatatcatgtggtgtacatatgatgtgcacttctatgcctcatttgcccttcttgagctctttcctaggattgaattaaatatacagcgtgactttgctagagctgtcttgtgtgaagatggaagaaaagtaaagtttctggcagagggaaattggggcat

SEQ ID NO: 421 - DNA, 401 bp, Glycine max
  Clone ID: LIB3027-003-Q1-B1-C2
acagaatcaaagtttgcattgttgtgagaagatgagcagagttggtgctgatgttttgaacgtggacttggctgctgcagtgaacaacctcttcaatcttcctgaaaccatgcagaagttcatttttccttcttctcgtgctcctgatcaacatgagaccagagggatttctagcatcattccagtggacattttggacacttccaaggagtatatattcttcatggatgttcctggtctctccaagtctgaaattcaggtgatcgttgaagatgagaacacacttgttatacgaagcaatgggaaaaggaagcgtcaagatggagaggatgaagagtgcaagtatcttacgttggagaggagaggtcctcagaatttgctgaggaagttccgtttgcctg

SEQ ID NO: 422 - DNA, 258 bp, Glycine max
  Clone ID: LIB3027-003-Q1-B1-C3
ctctaaccctatccgctgctcacggaagcaccacggttcaagacatcgcgagaaagttgaaactcggggacaacgagcttctgcgcacggagaagaagttcaaggttttcatggagaattacgggaggagctactccacagaggaggagtatttgcgccgtttggggattttcgcccagaacatggtcagagcggcggagcatcaggcgctggaccccaccgccgtccacggcgtcacgcagttctccgatctcaccg

SEQ ID NO: 423 - DNA, 414 bp, Glycine max
  unsure (1)..(414): unsure at all n locations
  Clone ID: LIB3027-003-Q1-B1-C4
agtttctccggctcaaacccttccccccttccaaacagttaccaattaaaattcccctttttccccggggaattccctaaaaaacccccatttccccggaatcggccgattcacggttcgatcccggggtttcgtctttttttcntcttcaaccccttcgtccatttcctcttccttcttcttcttcatcttcccccacccgccccgcctccgccgagcccttttttccttttcaattttcaattttttattcgaaaaaagataagagactacagcataataggatcaatgaacgatcatctggtgctgttcgtggaccatctggtgcggcccgtgccggtggtcgagccgctggcccaacaaacccccgagcccgtgacgcccgttaatgaggtccctgtggcgggtccctcc

SEQ ID NO: 424 - DNA, 390 bp, Glycine max
  Clone ID: LIB3027-003-Q1-B1-C5
gtcaactctaaaggatcccctcggggaattccaattccacattttcaagaaataaggaggcaaaaatgttcatatatgaattggaattatttgttttcttattaggcctatcctgaagccaaaggaaatgagatcggaattcctcggggaattccaattccacattttcaagaaataaggaggcaaaaatgttcatatatgaattggcattatttgttttcttattaggcctatcctgaagccaaaggaaatgacatctgaattcctcggggaattccaattccagattttcacgaagtaaggacgcaaaaatgttcatatacgaattggcattaattgttttcttaggaggccgatcctgaatccagcggacatgacatgggaattcct

SEQ ID NO: 425 - DNA, 406 bp, Glycine max
  Clone ID: LIB3027-003-Q1-B1-C8
ggggaaaagaaaggccaagagagtcgagaaacggcactctcaccggcgcgcgcaccctctactctgatccagcgactcctaattaagttggtaataatcagccacacttcaagcaggaacataaaagacttcaaatttccaagatggctgcaatctttgcttccagatgctctcgtgtgggccgttctctgttcggtggattaagcaacagttcccctggtttatttaccacattacatgagatgacatgcaaaaatatgttttctcagcaacaacgtaccttcatacagatgaggactgttctcaaggttgtggataactcgggggctaaaaaggtgatgtgcatacaggcattgaaagggaagaaaggggcaagattaggtgacacaataatagcatctgtgaa

SEQ ID NO: 426 - DNA, 347 bp, Glycine max
  Clone ID: LIB3027-003-Q1-B1-D10
gggactgaagggcgataacaagaactctaagattttgaagaatgctcaacctttcattgattggcttcagagtgcagaatcagaaaccgaggaagaataatttttcctacattctccgttacttatgtttacttgattgtgtcatgttctttatttccaataaaggttattgtaggccccatgtgttgttgaactactatactgtgcgaatggtgcatgcttgctggaccagtatgtatgcctcagtgcgttttgtgatgtgcggttctaatgtaattttgtttttggttgttgatgattaaaaaaaaaaagaaaaaaaaaaaaaaaaaaaaaaagaagagaagagg

SEQ ID NO: 427 - DNA, 396 bp, Glycine max
  Clone ID: LIB3027-003-Q1-B1-D12
ctcgagccgcttctttctctgcgattttttcttcaatttccagatcacgaaactaaagaagatggagaaagcgatcagcagacagaagattttgcttcatcatctcaacccttcatcgtctacccacgtcaacgaatcatcctccctctatgcttcagcatgtgtggcgggggacagcgctgcttatcaaaggacatcgacattcagggatgatgttgtgatcgtggctgcttatcggactgctcattgcaaaggtaaacgtggtggtttcaaagatactcttcctgatgatctactggctcctgttttgaaggctgtaattgagagaaccaatgtgaaccccagcgaagttggggatattgtcgtagggagtgtattggctcctggagctcaaag

SEQ ID NO: 428 - DNA, 332 bp, Glycine max
  Clone ID: LIB3027-003-Q1-B1-D3
cactctagatgatcaccttcggggaattctaattctacaatttcaatgaattacggtggaaacattttcacatatgaaattggaataatttgctttctaataaggccaatcctaaagccaatggaaataagattgggaattcctcggggaatatcaattcaaaattttcattatgtaaggtggcatcattgttataatatgaaatggaattacttgttttcatagtacgccaatcctgaatccacatgacatgagatctgaattcatcggggaattccaattccacattttcaagaaataaggatgcacaaatgttcacatatgaattggga

SEQ ID NO: 429 - DNA, 409 bp, Glycine max
  Clone ID: LIB3027-003-Q1-B1-D5
tttgtgcgttaagaaagaaagaaaaaaaaaaaaaaagtcatggcagcgagtgacggttgcagcagcttcttaacattgtcgtgtgcaggtgcagtgcaaaatcaacatgtatcacaccctacaacgtttttgggagttcctaaaaacaatcagagaaaaaggaaaacaccgcacaggttagttgtggttgcggtgactcaaggctctgctgaatcaagcaagtccgatgaaaaaatcccttcgtgggccaaaccggactccgatgaacctccgccgtgggcccgggacgagcccaacaacaacagttcgcaacaagaaggatttgagatcccgttctatgcttatttgtttgcctctgctatcactgctattgccgctataggctccattttcgaatatgtgaatcaaa

SEQ ID NO: 430 - DNA, 169 bp, Glycine max
  unsure (1)..(169): unsure at all n locations
  Clone ID: LIB3027-003-Q1-B1-D9
gacttcacatgacagattgtcccgtgaacaatacaagaatctcttgcaatctaagtgcacggttgaatttttggattgctgatatgtgatcatggatatcaagagtgtggagttctggtgcttgcaagctataaatatgtatnagcacatatacgatgaatcccgttgt

SEQ ID NO: 431 - DNA, 443 bp, Glycine max
  unsure (1)..(443): unsure at all n locations
  Clone ID: LIB3027-003-Q1-B1-E4
cgtaaaactcggaatantcggctcgagctgcgcacctcanttgcaaacaacaacagcctgccacaaaaaatcttcaacggcaaaaacaaatctctcgcgatggacgattcattgaccgctgccttcagtacccgcggcgaaagcaacgctttcgcctcgcaccaacaagtggaggataatgaaaatgctaacaacattagcagcagcagcggcaacaaatacaataccggttctgggtttctgcccgcgtctttggacactgacaacattgcggagacaatcaagactttctttcctgtggaagcgacctcgacgtcgtttcagagttacccgccggcgccaccggatttagggcaccaagatctgcggctctcgttgcagtcctttcacgaccctattatgcttcagcaccagcctcatagccaccaccaaccggttctctt

SEQ ID NO: 432 - DNA, 427 bp, Glycine max
  Clone ID: LIB3027-003-Q1-B1-E8
gcatttcaattccaatttgcaaactgtaaagtttaaaccaaaccccacataagaaaatagaaaaaaagacattacttttttaatttctccttcttttaagcaaccataaataagtgtagtgtgttggtgtgtgactaggtttctgccagcttaggggctaatgggtaactgcctagattcttcagccaaagtagaagctgctcacagttccagaaccccttctggaatttcaaaaactagtccttcatctgttccttccaacttatctattctgtcatatagtgaagcaagtgatttctcaaatcttccaacaccaaggtctgagggcgaaatcttgtcttccccaaatcttaaggcctttaccttcaatgagctaaagaatgccaccaggaactttcgcccggacagtcttcttggtgaaggggga

SEQ ID NO: 433 - DNA, 415 bp, Glycine max
  Clone ID: LIB3027-003-Q1-B1-F1
tctccattggtccttaaacactcatcagtcatcaccatggccaagctagttttttccctttgttttctgcttttcagtggctgctgcttcgctttcagttccagagagcagcctcagcaaaacgagtgccagatccaaaaactcaatgccctcaaaccggataaccgtatagagtcagaaggagggctcattgagacatggaaccctaacaacaagccattccagtgtgccggtgttgccctctctcgctgcaccctcaaccgcaacgcccttcgtagaccttcctacaccaacggtccccaggaaatctacatccaacaaggtaagggtatttttggcatgatatacccgggttgtcctagcacatttgaagagcctcaacaacctcaacaaagaggacaaagcagcagaccac

SEQ ID NO: 434 - DNA, 395 bp, Glycine max
  Clone ID: LIB3027-003-Q1-B1-F11
gcccttcactctctctctttcttccctttgcttgctactcttgtcgagtgcatgctttgctattagctccagcaagctcaacgagtgccaactcaacaacctcaacgcgttggaacccgaccaccgcgttgagtccgaaggtggtttgattcaaacatggaactctcaacaccctgagctgaaatgcgccggtgtcactgtttccaaactcaccctcaaccgcaatggcctccacttgccatcttactcaccttatccccggatgatcatcatcgcccaagggaaaggagcacttggagttgcaattccaggatgtcctgagacgtttgaggagccacaagaacaatcaaacagaagaggctcaaggtcgcagaagcagcagctacaggacagtc

SEQ ID NO: 435 - DNA, 421 bp, Glycine max
  Clone ID: LIB3027-003-Q1-B1-F2
aaaagttcatgaatcctctgccgcgacacgatcgagtaaggcgcaaccgtgaaatcgattcaacgagctcactcagccgccactgtcagtgttttcaacgcccgtgttttgttccctctgtgctatgccccaaacccctaatctatctatctatctatccatcttttcttcattccccttcttctcttctgaattcgaatttcgaaaatgttgggtggtctatacggagaccttcctccaccttcttccgccgaggaagacaacaagcccacccccaacgtctggtcctccagcaccaagatggctcccgccacgctccgcaagcccgcctccctcttcgcgcccccccaaaccctcctacgggcccaccccaagcccaagcccaccgccaagcccgtcctctccttcacaaccccgccct

SEQ ID NO: 436 - DNA, 384 bp, Glycine max
  Clone ID: LIB3027-003-Q1-B1-F3
atcaattcctttctcagatgatgagctcgactatatatatcatctagacccatttcgtgattcagaaatgcttagaatggagcttcccatgattcgagaagcatgcttgcgggttttggttctctgcactatcttcctcaaggaatccgcagcttttggtctttgcctagcagagattggtgacatgatgagtagggaatttcagggtctcgatgaagagccaagtgagcttgagcttatctgtattgaagcaaagaaactgttagatcaggaagaattattttcctttgaagctgaggtaggagacaaagatgtgactcagtttcagttagattgtgaggatcaggatttggatttcactacaaacatagaagagaaactgac

SEQ ID NO: 437 - DNA, 394 bp, Glycine max
  Clone ID: LIB3027-003-Q1-B1-F4
caagaagtagtgagaagaaaggagagaatggagaaaaaggcaaaacctgaacaaaaaaaaataggtataaccaagacttggttaaaaaagcaccgtcttctttacaatggagccactagacaccctcttattattagcattcgcgatggcaccatcaacactgcttccttcaaaacatggctcgcacaagattacttgttcgttcgggcgtttgtcccatttgtggctagtgtgctgataaaagcgtggaaggaatcagattgcagtggtgacatggaagtcatattggggggcatggcttctctggaggatgagatttcatggttcaagacagaagccaacaagtggggtatttcactttctgacgttgttcctcagcaagctaacaaaaact

SEQ ID NO: 438 - DNA, 391 bp, Glycine max
  Clone ID: LIB3027-003-Q1-B1-F6
gccaggagagatgactgttgagataagtggtactgcttcacaaatacaggctgcccaacagctagtgcagaatttcatggctgaagctgcaagtgcggcacaggatcatatggggggttcaattaaccaaggttacaattcctatcctacaaatcctgtctatgcatctccgccctcaagtgctgctggtcatgcgggccatgcaccttctgcagattatggttccgtttacggcaccaattatggctattgagaacattactttacattcaattttaaatgaggagccctacgttttgtaaacattgagagttcaatttcagttctagttctcgtgggtattgcaaccgggcctctgcgtgtcctgtcttatatcccctatattttcgct

SEQ ID NO: 439 - DNA, 396 bp, Glycine max
  Clone ID: LIB3027-003-Q1-B1-F8
cacacaactactacaagtacttccttacaatcaaaaccaacaacaactatggcaagttatcaaaagcactacgatgatcagggtcgcaaggttgacgagtatggcaacgttgagaagcaaaccgacgaatacggcaaccctgttcatgctgctagtgtcacctatgtagccaccagaactgctgctggtggttacagtgatgacattaataagcaacatgataccaccaatgcctacggcgtagacactggtagacagcattctagtggtggctacgatggtgacactaataaacatcatggaactactggtggctataatgatgacaccaatagacatcatggaactaccggtgtctatggtatagacaccgataggcaacaacatgggactact

SEQ ID NO: 440 - DNA, 398 bp, Glycine max
  Clone ID: LIB3027-003-Q1-B1-G12
gtgattttctcaagagaaactttaagcagatgtctaatgttttgtgggtagctcctgaggacaaggcgagtttatggtcacaacttcattatgtttcgtgtaataatctggaaatgcaagaagcttatcttgtcaatctcgtaaatgtgttacgagaattgtatttgcacagtccagaggaagctcgccaattgagaaggaaagctctctctcgtattgaatggctgcaaaaagctgatgtgcctaccatagcacagattgaagagttccattcgatgcagaggatgatgaatgctcctgattcaaatgataatattgatctactgttgagcattgatttgttgggtttacaaggagcaggtaaagcttttccaaacaagattgtttttgatgataaa

SEQ ID NO: 441 - DNA, 358 bp, Glycine max
  unsure (1)..(358): unsure at all n locations
  Clone ID: LIB3027-003-Q1-B1-G8
ggagttctgagtgggcaaatcaaacttcatggcatttgagtttccttattgataatcccaaacagtctacagtttttgatattctcttgggaatttctcaagattttgaaattgctggtaacactcttatgccagctttttctgttccacaggctactgccagatcttctgaaaatgcggaatcctctgcatgatctggaatttgtgttttcttttgcttgttcgtttgtttaattcaataaaggaaattaggcatgaccctcttgttgagtatgctctgcctatttgaaaatttccacacctcttttaattgtcgtaatgatgtgtgaagtgtgtgttantttaaaaaaaacaaaaa

SEQ ID NO: 442 - DNA, 359 bp, Glycine max
  Clone ID: LIB3027-003-Q1-B1-H12
caaagtttggcagagatagtggtggtggttgaagagaaggaccaaaaccaaaaccaaaagcaagatagtcatagtagtagtactttttttgggggtaacaattcattgtttgattgtatttacttgggaaagatcctacaagtgctagaactaccacttggcttaccaagaaggcttacaatcccagtggtgagtgaggagaaatggtcaaagccatatgcagtaatatctgtcacactagcacctgttttgttggcaattcttttcaacacacaaagtgaaaacgtgggttcaaggagtggtattgtcacatacatagtagctgcattgattgggatagttttgggcaacattgcatg

SEQ ID NO: 443 - DNA, 416 bp, Glycine max
  unsure (1)..(416): unsure at all n locations
  Clone ID: LIB3027-003-Q1-B1-H3
ccttgctctatactacacagtacacacacttagaagaataatggcttcgatcctcgactactttttagccctctctctttcttgctcatttcttttcttcttaaccgactcagtcatccctacacaactaataaaccttgttgttctacccgttcaaaatgatggttccacagggctccattgggccaacctccaaaaaagaacccctctaatgcaagtaccagtcctggtggacctcaatggaaatcacttgtgggttaactgtgagcagcagtactcatccaaaacgtaccaagcacccttctgccactccacccaatgctctagagccaacacccaccaatgcctcagttgccccgcggcatcaaggccaatgtgccacanaaacacgtgtggcctcatgttcactaatccca

SEQ ID NO: 444 - DNA, 420 bp, Glycine max
  Clone ID: LIB3027-003-Q1-B1-H7
catttttcatgtttgcatttgctttagcgtctgtggtattgataataggctggttaatggatttgtgttttctatgtttcaacacctatatgtctcacctattcccagatctccactcaattggtggtttggttcctcttcttggttacctaaagaattctcatgccaatattcgagcaatggctgctgatgttgtgaccacaatagtccagaataatcctcgaagtcagcaacttgttatggaagcaaatggctttgaacctcttatttctaattttagttcggatcctgacgtgactgttagaactaaagcactgggtgcaatatcctcactaattcggcacaacagaccaggcattactgcatttcgtttggcacatgggtatgcagctttgaaagatgctctagcctctgaaaatg

SEQ ID NO: 445 - DNA, 360 bp, Glycine max
  Clone ID: LIB3027-004-Q1-B1-A10
ctcgagccgctcgaaccgctccaaccggtccaaggaactgttaaggatccaaactaaatttcttaacatcaccaccagaaaatccccctgtggtgaaggcaccaacacatgggacagatttgagctgcgtgtacacaaaagagtcattgacctctacagttcccctgatgtggttaagcagataacctcgatcacaattgaacctggtgtcgaggttgaggtgaccattgcagatgcttgattttggcatgctagttgattttgtaatttagccccttggctaggaatatgttgagtcaaatacaccagggttaatgcatttccttttgccttttcaatttttgaagttgattattgtgg

SEQ ID NO: 446 - DNA, 354 bp, Glycine max
  Clone ID: LIB3027-004-Q1-B1-A12
gccactattggcatcacactcttgctcctgtctgggttgaccctcacaggcactgtcataggtttgatcattgcaacccctcttcttgttatcttcagccccatccttgtccctgctgcgtttgtgctgttcctagttgcttctggctttttgttctctgggggctgtggtgtggctgccattgctgctttgtcttggatttacaactatgtgtctgggaaccagcctgcgggttatgacacccttgactatgcaaaagggtaccttgccgataaggcaagggatgtaaaggagagggcaaaggattatggaagttatgctcaaggtagaattaatgaggccacacaaggagct

SEQ ID NO: 447 - DNA, 346 bp, Glycine max
  Clone ID: LIB3027-004-Q1-B1-A2
tgttgcattgcagaagcgtctccattttctttcgcgatggacgcgcgagccctgttgaccagaaaaaccctagccaccgttctccgcaacgacgcgaagcccataatcggagctggcatagctgcagctactcattctcgtgggttgcacgtgtacacgctccccgatctggattacgactatggcgctctggagccagccatcagcggcgaaatcatgcagctgcaccaccagaagcaccaccagacttacatcaccaacttcaacaaggccctcgagcagctccaagacgccgtcgccaagaaagattcctccgccgtcgttaagctccagggcgccatcaagt

SEQ ID NO: 448 - DNA, 342 bp, Glycine max
  Clone ID: LIB3027-004-Q1-B1-A3
cagctatgcccggtcatggaaccggacagcccacgggccatgtcaccgagggagtggtgggctcacaccctattggaaccaacagaggcccgggtgggactgctacggcccataatacccgtgcggggggaaacccaaatgattatgggtatggaactgggggtacttacaattaaataatgatgatttagaaaaggaaagctacgacccataagaaggtttagttaagagtatgacttttgttgtggttatcttcttgtttggttatctttttgtttgtgtctccttttctctccatttttgttgtggagaattgggtgtggttacacgacagtgttttca

SEQ ID NO: 449 - DNA, 382 bp, Glycine max
  Clone ID: LIB3027-004-Q1-B1-A4
atctaacccaggcgttttctgggttgcaaaggattaccaatttcatacagcatatcattcaattgggttggaaattcaataagagagggaagccaataatcatagatccggggctttatagccttaatagatcagcaatttggtgggttattaagcaaaggagtcttccaacatcttttaagctctacacaggttcagcttggacaatactatcaagatcttttgcagaatattgcatagtggggtgggaaaatttgccaatgaccctcctcctctactacaccaactttgtgtcatccccagaaggatatttccaaacagttatatgcaactctgaagactacaatgacacaactgttaaacatgatcttcactacattac

SEQ ID NO: 450 - DNA, 285 bp, Glycine max
  Clone ID: LIB3027-004-Q1-B1-A5
ctttccttagttcaatatggggaagcccttcttcactctctctctttcttccctttgcttgctactcctgtcgagtgcatgctttgctaatacctccaaccaggttcaacgattgccaattcaacaacctcaacgcgttggaacccgacaaccgcgttgagtccgaaggtggccttattgaaacatggaactctcaacaccctgagctgcaatgcgccggtgtcactgtttccaaacgcaccctcaaccgcaacggcctccacttgccattacacaccttttccc

SEQ ID NO: 451 - DNA, 334 bp, Glycine max
  Clone ID: LIB3027-004-Q1-B1-A6
atttttccacctcactctctcgctccactcctcaacatcaaatcttcactctcatgaattctcatggttcgctctctgcatgccatgtcaaattctctcttttgctcaaaacccattgtttcaagtctcacaaagaattagacttcatctcccaaatcttcatcgggcacaagctggttggctcatgctcaacagggcctaacagctttggatatctccttggcactcaactttagcccagttttgtttagtggcaatgcaatggcatctgaatttgatgtgcttaatgatggtccatgcaaagattcgtatgtgattgatgatgcatgaatgc

SEQ ID NO: 452 - DNA, 357 bp, Glycine max
  Clone ID: LIB3027-004-Q1-B1-B10
tagcaagcagagcttttgtcagttttctattgaccttctcggtggaggaatcttagtggacaaaactggagattggatcacacttatacaaaattctccaattagtaacttgttgagagttgctgcttggcagaaaggctgtttaatggtcaagattgtgatgtctgggaatgcagcagtcaaaaggagtgattgggcctcattggtacaagtgtttttaacaaacagcaacagtacagagcattttgatgcatgtaagtggacaaaatcagaaccacattcctgggaattgatcttcccaatagaggtatgtggtcctaataatggttttgaaatgtggagttctgagtgggcaaa

SEQ ID NO: 453 - DNA, 358 bp, Glycine max
  Clone ID: LIB3027-004-Q1-B1-B12
cttaattattaacacttccttagttcaatatggggaagcccttcactctctctctttcttccctttgcttgctactcttgtcgagtgcatgctttgctattagctccagcaagctcaacgagtgccaactcaacaacctcaacgcgttggaacccgaccaccgcgttgagtccgaaggtggtttgattcaaacatggaactctcaacaccctgagctgaaatgcgccggtgtcactgtttccaaactcaccctcaaccgcaatggcctccacttgccatcttactcaccttatccccggatgatcatcatcgcccaagggaaaggagcacttggagttgcaattccaggatgtcctga

SEQ ID NO: 454 - DNA, 361 bp, Glycine max
  unsure (1)..(361): unsure at all n locations
  Clone ID: LIB3027-004-Q1-B1-B3
gggtttctctcttcaaactagggttttacagaatataagctctctctatctttggttttcgtcattcaaatccaatccaatatcaaatatgagtcgtcatcccgaggttaagtgggctcagagacttgacaaggtctatatcacggtgcaattggctgattcaaaaaatgccaaggtggatcttacaccagatggtatttttaccttctctggtagtgctggtgctgaagaccatcagtatgagctaaaactggagctctttgacaaggttaatgtanaggagagcaaaattaatgtaggagtgcgaagcatattctgtgtagtgcagaaggcanaggatggatggtggaaaaaggtactg

SEQ ID NO: 455 - DNA, 382 bp, Glycine max
  Clone ID: LIB3027-004-Q1-B1-B6
ggctctcaaaatatcttaccatacattgaatctttctttgtggtttgtgagaaattgcatcctgctcagccaggtgatagtcatgactcaagtatccctgttatttctgatgttgagtatgccaccacatctgcaactccccataaagcatctggaactgctgtgaaagtagatgagaaacatatgccttttgtccggttctcagagaagcataggaagctactaaatgcattcttaaggcacaaccctggtttgcttgagaaatctttctcactcatgctaaaggttccaagatttattgattttgataacaagcgtgcccacttccgatcaaaaattaagcatcagcatgaccatcaccatggcccattgagaatatcag

SEQ ID NO: 456 - DNA, 333 bp, Glycine max
  Clone ID: LIB3027-004-Q1-B1-B9
gcatttcgttactttcatttgttgtgcaatcttacaagttccaaacttctctattttgttattatttgttctcacttctcacacatacagatttgagccttttatattatcatggcttctaaggtggtttcggttttggttatagcgatgatgttgtttgccatgaactgtaactgcactagtgttggccacatgccttcaaccaaagaggaaggtcacgattttcaggagtctaaagccaagaccacacaaactgcgaacaaggccatggaaactggtaaagagggacaagaagccgcagagtcatggacagaatgggctaaagagaaactc

SEQ ID NO: 457 - DNA, 343 bp, Glycine max
  Clone ID: LIB3027-004-Q1-B1-C11
cagagagtggcgaaatggcgactaggagcaaaagagaagcagaaggtgttggtgatggtgatggtaataagatcgtgtggaacgaagcgcagcagaggttcgagacgcaggacaaagaggcgttcgtagagtacgccctgaaagaaaaagggaaggtcatggtcatggatttgatccacactttcgtgcccccttccaagagaggccttggcttggcttcccacctctgcgtcgccgcctttcagcacgcccaatctcactcgctatccatcatccccacctgctcctatgtctctgacacatttcttccccggaacccgtcttggaattctgttgtgtacac

SEQ ID NO: 458 - DNA, 373 bp, Glycine max
  Clone ID: LIB3027-004-Q1-B1-C2
gggagctctttttctgccacacttcaattcaaaggccataatggtactaatgattaatgaaagagaagcaaacattgaacttgttggcaataaagaacaataacaaaaggaacaacaagaagagcaacctttggaagtgccgaaatatagagctgaattgtctgaacaagatatatttgtaatcccagcaggttatccagttgtggtcaacgctacctcagatctgaatttctttgcttttggtatcaatgccgagaacaaccagaggaacttccttgcaggttcgaaagacaatttgataagccagatacctagtcaagtgcaagagcttgcgttccctgggtctgcaaaagatattgagaacctaataaag

SEQ ID NO: 459 - DNA, 342 bp, Glycine max
  unsure (1)..(342): unsure at all n locations
  Clone ID: LIB3027-004-Q1-B1-D11
ctagtataccttaataaataatttaagatactatgatgagagcacggttcccattactgttgctgggacttgttttcctggcttcagtttctgtctcatttggcattgcttactgggaaaaagagaaccccaaacacaacaagtgtctccagagttgcaatagcgagagagactcgtacaggaaccaagcatgccacgctcgttgcaacctccttaaggtggagaaagaagaatgtgaagaaggtgaaattccacgaccacgaccacgaccacaacacccggagagggaacctcagcaacccggtgagaaggangaagacgaagatgagcaaccacgtccaa

SEQ ID NO: 460 - DNA, 405 bp, Glycine max
  Clone ID: LIB3027-004-Q1-B1-D2
tgcgtccaggtcgactctagatgatccctcggggaattccaattccacattttcaagaaataaggatgcaaaaatgttcatatatgaattggaattatttgttttcttattaggcctatcctgaagccaaaggaaatgagatcggaattcctcggggaattccaattccacattttcaagatataaggaggcaaaaatgttcatatatgaattggaattatttgttttcttattaggcctatcctgaagccaaaggaaatgagatcggaattcctcggggaattccaattccacattttcaagaaataaggaggcaaaaatgttcatatatgaattggaattatttgttttcttattaggcctatcctgaagccaaaggaaatgagatcggaattcctcgggggt

SEQ ID NO: 461 - DNA, 296 bp, Glycine max
  Clone ID: LIB3027-004-Q1-B1-D3
cagtgaaatccaagtgcacattttcaagatttaaggatgaccttaatgttcatattacactatgggattatttgttttcgtattaggcgtatcctgaatccattggaaatgaaatcagaattcctcggggaaatccagttcctcattttcaagatttaacgacgcaacaatgttcatatatgaattggaattaattgttttcgtagtaggcctatcctgaagccacaggaaatgagataggtattcctcggggaagtcgaattcgacattttcaagaaatatcgaggcaaaaatgt

SEQ ID NO: 462 - DNA, 391 bp, Glycine max
  unsure (1)..(391): unsure at all n locations
  Clone ID: LIB3027-004-Q1-B1-D4
ctccattggtccttaaacactcaacaatcaacaacaagggcaaaccaattttttccccttggtttccggctttcaattggcggcggctccccttcaattccaaagagcaacctcaacaaaacgaagtgcagattcaaaaactcaatggcctcaaaccggataaccgtatagagtcagaaagagggctcattgagacatggaaccctaacaacaagccattccagtgtgccggtgttgccctctctcgctgcaccctcaaccgcaacgcccttcgtagaccttcctacaccaacggtccccaggaaatctacatccaacaaggtaangggtattttggcatgatatacccggggttgtcctagcacatttgaagagcctcaaacaactcaac

SEQ ID NO: 463 - DNA, 365 bp, Glycine max
  Clone ID: LIB3027-004-Q1-B1-D5
gagctgcaagagggaggggtgctgatcgttccacaaaactttgcggtggctgcaaaatcccagagcgataactttgagtatgtgtcattcaagaccaatgatagaccctcgatcggaaaccttgcaggggcaaactcattgttgaacgcattgccagaggaagtgattcagcacacttttaacctaaagagccagcaggccaggcaggtgaagaacaacaaccctttcagcttcctggttccacctcaggagtctcagaggagagctgtggcttagagagccctttttgcatgtgctaccacacttttgtccttttgggctctagctagtgctggtagcagtaaataagaatgaataaaagaaac

SEQ ID NO: 464 - DNA, 324 bp, Glycine max
  Clone ID: LIB3027-004-Q1-B1-D7
gcagcttgctctccgtagacaacgaatcaaagtcttcttcttcttctttctattcttcactcaagttctttcattgttcgttagggttagggatgcgtcggaacagccctgcatactacagtcctccgcggcgaggatacggcggtggtggccgaggaggaggaggaggaggaggaggaggagggtccggcaggagggggttcggtggaggcatgcgcagggacagcaatgggagcctcttggttcgtaacattcccctcgattgcagacccgaggagcttcgcgtccctttcgagcgatttggacctgttcgtgacgtttaca

SEQ ID NO: 465 - DNA, 407 bp, Glycine max
  Clone ID: LIB3027-004-Q1-B1-D8
ctatcttgctgggaaccaagagcaagagtttctaaaatatcagcagcagcagcaaggaggttcccaaagccagaaaggaaagcaacaagaagaagaaaacgaaggaagcaacatattgagtggcttcgcccctgaattcttgaaagaagcgttcggcgtgaacatgcagatagtgagaaacctacaaggtgagaacgaagaggaggatagtggagccattgtgacagtgaaaggaggtctaagagtcacagctccagccatgaggaagccacagcaagaagaagatgatgatgatgaggaagagcagccacagtgcgtggagacagacaaaggttgccaacgccaaagcaaaaggagcagaaatggcattgatgagaacatttgcacaatgagacttcgccaaaaca

SEQ ID NO: 466 - DNA, 332 bp, Glycine max
  Clone ID: LIB3027-004-Q1-B1-E1
gcagctttctctccgtagacaacgaatcaaagtcttcatcttcttctttctattcttcactcaagttctttcattgttcgttagggttagggatgcgtcggaacagccctgcatactacagtcctccgcggcgaggatacggcggtggtggccgaggaggatgaggaggaggaggaggaggagggtccggcaggagggggttcggtggaggcaggcgcagggacagcaatgggagcctcttggttcgtaacattcccctcgattgcagaccctaagggcttcgcgtacctttcgagcgaatttgacctgttcgtgacgtttacatacccaag

SEQ ID NO: 467 - DNA, 371 bp, Glycine max
  Clone ID: LIB3027-004-Q1-B1-E11
cacaatcctgaacccaacattcgcgtacaatgggctcgcgctcaaagcatgagacacaacgagcaatggcttcaccaaagtcccactgagatgctggtgtcgtccagtccggggctgtttctcgatttcatagcattgcgggacattgaagaacgggaagaagtctttattgactacgggccaaaatgggaattggcatggcaggcacacgtcgagtactggacgacaagcaactacagtcacagctatcagtcggcgcgggtgtacagtaaagctaatgcgaataaaccctttcggtcacaaagtgagcaagaggtggatccatatccttcttactacgaattccgctgcttagacgtggcttggtacaa

SEQ ID NO: 468 - DNA, 399 bp, Glycine max
  unsure (1)..(399): unsure at all n locations
  Clone ID: LIB3027-004-Q1-B1-E2
aaaagaggcaactcttgctgaagccaagggtatcaatggtttgcgagctgtttttggggaaatgtaggtctatcctgatcctgttagagttgtgtcaattggacanaaagttgaggatctccttgctgacccaaagaatgaaaaatggttatctttttcgtcagagttatgtggaggtacccatatttcaaacacacgagaggcaaaagcttttgcacttttatctgaggagggaattgcaaaaggaatacgcagaataacagctgttacaactgatcgtgcttatgatgcaatgaaagtggcagatgaatttgatcagcaagtagacgatgcggctaagttagaaggaagtttgctagaagagaaagtttcatcattgaaaagcaatattgaaacttt

SEQ ID NO: 469 - DNA, 326 bp, Glycine max
  Clone ID: LIB3027-004-Q1-B1-E4
gaaacagagcagagcgaccttgaagagctatggctgtcggaaagaataagaggatttccaagggaaagaagggtggcaagaagaaagccgctgatccctttgccaagaaagactggtacgatatcaaggccccttccctcttccaggtcaagaatattggcaaaaccctcgtctctcgtacccagggaaccaagattgcatccgaaggactcaaacatcgggtttttgaggtctcattggctgatctccaaggggatgaagaccactccttcaagaagattcgtttgagagctgaggacgttcaagggaagaatgttctgacaaac

SEQ ID NO: 470 - DNA, 378 bp, Glycine max
  Clone ID: LIB3027-004-Q1-B1-F3
agaccagcttgaatgcgtccaggcctactctagatgatccctcggggaattccaattccacattttcaagaaataatgaggcacaaatgttcatatatgaattggaattatttgttttcttaataagcctatcctgaagccaaaggaaatgagatcggcattcctcggggaattccaattccacattttcaagaaataaggaggcaaaaatgttcatatatgaattggcattatttgttttcctattacgcctatcctgaagccaaaggaaatgagatcggcattcctcggggaattccaattccacattttcaagaaataacgacgcaaaaatgttcatatatgaactcggattacttgttttcttattaggcctat

SEQ ID NO: 471 - DNA, 359 bp, Glycine max
  Clone ID: LIB3027-004-Q1-B1-F4
gaaattggactgatcctttctctctctctctctctctttctcctcaacgcctcttcctttcaatttaatccaacaataataattattcgcaaaaaaacgttgaacagataccatcatcatcacccacatcatcagaatttcaaggtcttgtattgcaaggttattgaggatatgatggtgtgtgtggagtagagccggtgtttgtgtagaagatgaaaagggaacagcaagagggatgccgagctttgattcacaattgcccaattccaatgcatgctatacagagggaagcgcaattgattctttttgtgtgtttgactttgatcaatcagttggatatcgcatagaggattgtgttg

SEQ ID NO: 472 - DNA, 365 bp, Glycine max
  Clone ID: LIB3027-004-Q1-B1-F5
ctttctagggatggcattcctcatctatcgttggatttggttctggactccgattccgagctttcccacacttcaaaaagtgccagtgtctttttctgtgggtacagagtactaactggcggcaacaatgcttctgatttttctgatagtgaagaggatgaggaacttgcattggagggtcaagataatgatgaaggtgcaaaggttaccaaaccttctaaacctgttcccaagattggtgccccagcaaaaacagctgatcctaagaaagacgagggtgatgattctgatgatgaatcggatgatgatcttgctggtgaagatgaatttggaagttccgatgagatggatgatgacagcgatag

SEQ ID NO: 473 - DNA, 245 bp, Glycine max
  Clone ID: LIB3027-004-Q1-B1-F7
aatcataagtctgctgcaaggattattgagataatcaggtacaaatgtagctaacctctacactggactcttggaattagtcgcacgcttactcagaaaagtggagaggccgagtgacgacacatgagaacgcctaagggaaatacaattccagatctgcagacagcatacgacgcaacagtgttcatatacactatggggaaatgaggctcctcagggggccaaagctgaatcctgtggaaagt

SEQ ID NO: 474 - DNA, 369 bp, Glycine max
  Clone ID: LIB3027-004-Q1-B1-F8
ggatgaggagcagcagcgagagagcgaagaaagtgaagattctgagttacgaagacataagaataagaacccttttctcttcggctctaacaggttcgaaactctcttcaaaaaccaatatggtcgcattcgcgtcctccagaggttcaaccaacgctccccacaacttcagaatctccgagactaccgcattttggagttcaactccaaacccaacaccctccttctccccaaccatgctgacgctgattacctcatcgttatccttaacgggactgccattctttccttggtgaacaacgacgacagagactcctacagacttcaatctggtgatgccctgagagtcccctcaggaaccacatacta

SEQ ID NO: 475 - DNA, 330 bp, Glycine max
  Clone ID: LIB3027-004-Q1-B1-G10
gcaaatcaaacttcatggcatttgagtttccttattgacaatcccaaacagtctacagtttttgatattctcttgggaatttctcaagattttgaaattgctggtaatactcttatgccagctttttctgttccacaggctactgccagatcttctgaaaatgcggaatcctctgcatgatctggaatttgtgttttctttcgcttgttcgtatgtttaattcaataaaggaaattacgcatgaccctcttgttgagtatgctctgcctatttgaaaatttccacacctcttttaagtgtcgtaatgatgtgtgaactgtgtgataattt

SEQ ID NO: 476 - DNA, 395 bp, Glycine max
  Clone ID: LIB3027-001-Q1-B1-B9
gacaaggataagaaaaggcctgtctctcgttcatcccgtgctgggatccagtttcctgtgggtcgtatccataggcagttgaagcaaagggtgcaagcaaatggacgtgtgggggcgactgctgctgtgtacttggcctccattctggaatatctgactgctgaggtgctggagctggcggggaatgctagcaaagatctgaaggtgaagaggatcacaccaaggcacttgcaactcgctatcaggggagacgaagagcttgacaccctcatcaaagggaccattgctggtggtggtgttatccctcacattcacaagtccttgatcaacaaagctgccaaagaatgaaaatcaaatgcctctttgtttctcctattatgtgttcctttaagttt

SEQ ID NO: 477 - DNA, 378 bp, Glycine max
  unsure (1)..(378): unsure at all n locations
  Clone ID: LIB3027-001-Q1-B1-A1
gaaaagccatttccatagcagcctaagaaaatgaagagcactagcttgttcgctatctttctactttgcgccttcacctcatacctaccttccgccaccgcccaggacgtgctcgacgtggatggcgatccgattcggaacggtttcatatactacgttttgccggcaataagaggaaacggtggcggaatagaacgagccgcactcgggaaagacacttgccctatcactgtagtgcaatctcccaatccaaactctaaggggttagaaattaagtttgaatctgcataccccgcctattacataaacgaaaccctaattttgcaaataaagttcagttacccacagcagtgtgaaaganagaatccttggtgggcc

SEQ ID NO: 478 - DNA, 398 bp, Glycine max
  Clone ID: LIB3027-001-Q1-B1-A11
ctgaactcggctcgagggggagtgaagaggctttgggcgattgtgaactttattctcgcgattgggttcggaatgacggtggtgatcaccaaggtggcggagcaccagcgccggatgaaccccgccgccgtgggccacccctccgagggggtggtggttgggtccatggttttctttggggttcttggagttccccttgcgattactttcagtgtcccttttgctctagcatcaatatactgcagcgcttcaggagcaggacaaggtttatctttgggagttctcaatcttgcaattgtggtaccacagatggtggtgtctgcattaagtggtccttgggattccttgtttggtggtggcaacttgccggctttcatggtgggtgctgcggcagccgc

SEQ ID NO: 479 - DNA, 308 bp, Glycine max
  Clone ID: LIB3027-001-Q1-B1-A12
ggccgctttactgggatttttcaagatgctccgcactgctgactttaatcacacgaatggattctcaaatcagaggtggataaacacggtggactatcaagatagcaggcttttccccgtggaagttcgctagtgcgctcacgtggtcctagcttggtgcatagctgtcattggtgttcctgtctctcttcttgaaactaggtgcattctcacatttgatccagtatgaatctcatgtaggtgttcgtcattaggacaaagctgagctgtgtgaattaacactccgttcagtgtgatagcagagactt

SEQ ID NO: 480 - DNA, 387 bp, Glycine max
  unsure (1)..(387): unsure at all n locations
  Clone ID: LIB3027-001-Q1-B1-A4
ggtcctccaatctcgaatcggagttcgacttaatccgatgcgtcatcgattcgttccctctcatctcgatggacaccgagttccccggtgtcgtcgtgcgtcccgacgccggcgacccctccttccggcaccgccaacccgtcgcgcactacgccgtactcaaagccaacgtcgaccgcctccacctgattcagatcgggcttaccctttccgacaaggccggaaaccttcccaccctcggcagctccaacgccttcatctgggaattcaacttcaaagatttcgacgtcgcgcgtgacgcccacgctcacgactctgtggagttgctgcgccgccagggcatcgatttcgagaagaatcgcgatttcnggattgactcgttccggt

SEQ ID NO: 481 - DNA, 403 bp, Glycine max
  Clone ID: LIB3027-001-Q1-B1-A6
ctctccattgtctttgaacactcatcaccatggccaagcttgttctttccctttgtttccttcttttcagtggctgcttcgctctgagagagcaggcacagcaaaatgagtgccagatccaaaagctgaatgccctcaaaccggataaccgtatagagtcggaaggtgggttcattgagacctggaaccctaacaacaagccattccagtgtgccggtgttgccctctctcgctgcacccttaaccgcaatgcccttcgtagaccttcctacaccaacggtccccaggaaatctacatacaacaaggtaatggtatttttggcatgatattcccgggttgtcctagcacttatcaagagccgcaagaatctcagcaacgaggacgaagccagaggccccaaga

SEQ ID NO: 482 - DNA, 401 bp, Glycine max
  Clone ID: LIB3027-001-Q1-B1-A7
cttgatcacagtttcctctattaacactccacattctcacatcttcactcctatatctcgccgagaaaacttctcagctaacagttagcaatggcgccacccgccacctccaccggcggtacgctgccggagctaactaaccgaaccccctttctcggcctcaaactctacgtcctactcctaattgcagttctaatcgtgatcgcaacggtgatcctgatcctcgtgtgcgttcgccggagccggagctcgaagaagcggaaaatgcgagtgaagcacagctccggcgcgatccctctggtgtcgaaggagatcgtggaggtgaatactctggagctgaaaatcgatgaggaggtggagattgagattgaagagagtgcgtcggcggagtcgccgaacat

SEQ ID NO: 483 - DNA, 397 bp, Glycine max
  Clone ID: LIB3027-001-Q1-B1-A8
cttggcttgtgaatcagcaccacattcacctgagctttttgtgaggattccaaagcatggcttcccttgcagcatccactgctgctgcttcccttggcatgtcagaaatgcttggaaaccccatcaacctcagtggtgccacaaggccagctccatctgcctctagccctgcctccttcaagactgtggctcttttctccaaaaagaaggctgcacctccaaaaaaagctgcagctgctgctcctgccaatgatgagcttgccaagtggtatggtcctgacagaaggatcttcttgcctgagggtctcttggaccgatctgagatcccagagtacttgaccggagaagtccccggagactatggttatgacccatttggtcttagcaagaagccaga

SEQ ID NO: 484 - DNA, 371 bp, Glycine max
  Clone ID: LIB3027-001-Q1-B1-B10
gacaaggataagaaaaggcctgtctctcgttcatcccgtgctgggatccagtttcctgtgggtcgtatccataagcagttgaagcaaagggtgcaagcaaatggacgtgtgggggcgactgctgcggtgtacttggccaccattctggaatacccgactgctgacgtgcaggagctggcggggaatgctagcaaagatctgaaggtgaagaggatcacaccaaggcacttgcaactcgctatcaggggacacgaagagcttgacaccctcatcaaagggaccattgctggtggtggtgttatccctcacattcacaagtccttgatcaacaaagctgccaaagaatgaaaatcaaatgccctctttgtttc

SEQ ID NO: 485 - DNA, 392 bp, Glycine max
  Clone ID: LIB3027-001-Q1-B1-B11
gattaataacactcgccatacccgttaacaagcctggtagatttgagagtttcttcctatctagcactgaagctcaacaatcctacttgcaaggattcagcaggaacattttagaggcctcctacgataccaaattcgaggagataaacaaggttctgtttagtagagaggaagggcagcagcaaggggagcagaggctgcaagagagcgtgattgtggaaatctcgaaggaacagattcgggcactgagcaaacgtgccaaatctagttcaaggaaaaccatttcttctgaagataaaccttttaacttgagaagccgcgaccccatctactccaacaagcttggcaagttctttgagattcacccagagaaaaacccccagcttcgggac

SEQ ID NO: 486 - DNA, 385 bp, Glycine max
  Clone ID: LIB3027-001-Q1-B1-B3
aagatgagtttgaagaacaacatggtggtgctaaaggtgtgtttgttgcttcttttccttgtgggggttacagctgcacgcatggaactgagcttcttcaaaagtgatcagtcatcaagttatgatgatgatgagtattcaaaaccatgctgtgatctctgcatgtgcacacgctcaatgcctcctcaatgcagctgtgaagatattaggctgaattcatgccactcagattgtaagagctgtatgtgcacacgctcacagccaggacagtgtcgttgtcttgacaccaacgacttctgctacaaaccttgcaagtccagagatgactagaaaaactaatagctctctcaaatggacgaagcccctttaggctttgtttgttatg

SEQ ID NO: 487 - DNA, 404 bp, Glycine max
  Clone ID: LIB3027-001-Q1-B1-B4
gagattgtgaagtagaaatcggtgcaagaaattctccactttatctaaaaaaattcggtgagtttgtgaagacaaaaaatcactagctactcaaaaatggccacagtaggaaggaacgttgcagctcctttgctgtttcttaacttgatcatgtattttattgttcttggctttgctagttggtccctcaacaggttcatcaatggccaaacttaccaccctagttttggtggaaatggtgcaaccatgtttttcttaaccttctccatactagcagctgttctgggcatcgtgtccaaacttttgggtgggaatcacatgaggacatggaggagtgacagtttagcatctgcaggagccacatcaatggttgcttgggcagtcacagctctagcatttgggtt

SEQ ID NO: 488 - DNA, 58 bp, Glycine max
  Clone ID: LIB3027-001-Q1-B1-A9
taatgagtcactcaagtacctatgcgggaaaagcataaataaaagaagaaattccaat

SEQ ID NO: 489 - DNA, 246 bp, Glycine max
  Clone ID: LIB3027-001-Q1-B1-D4
attaaactcctgtggacgaagctacccgtcaaacgccacttgcccccgaacctaagaacagaatatgtatggcactaattaccatattacttcgtatcatggtgtttgtttgttttgtcagtgtttaaagttaaggatgttatacccttcgtgcctgctacatatatatagtgggcactataatattaccaataaattaacgtccatatataagaataataataaataaataaatatttctataca

SEQ ID NO: 490 - DNA, 80 bp, Glycine max
  Clone ID: LIB3027-001-Q1-B1-H5
caattatcctgaattgttaccgggttaaccttaaataccatatatggatcgtatcttcattttatggaaagatattgtag

SEQ ID NO: 491 - DNA, 54 bp, Glycine max
  Clone ID: LIB3027-002-Q1-B1-B6
aaaaaaaaaaaaaaaaaaaaaaaaaaaataaaaaaaacaaaaaaaaaaaaaaaa

SEQ ID NO: 492 - DNA, 179 bp, Glycine max
  Clone ID: LIB3027-002-Q1-B1-B9
aaagattttctgcctaagtttatggtaggtgctgtgctaggtgtgcatatctcatccaacctagagatctttaacaacggaccgagtggaagagatctctaggttggatgattttttatttaccactagaaatttagaatctgtaagtactgtactaaatttatttatttactttgaaa

SEQ ID NO: 493 - DNA, 56 bp, Glycine max
  Clone ID: LIB3027-002-Q1-B1-C11
aaaaaaaaaaaaaaaaaaaaaaaaaaaaaaaaaaaaaaaaaaaaaaaaaaaaaaaa

SEQ ID NO: 494 - DNA, 119 bp, Glycine max
  Clone ID: LIB3027-002-Q1-B1-C5
ctaaaactatacatggctttcgtactagtagtattacttatcatacttgtgaacaacatgttttaggatgtctatccatagactataatggataataaattccattaagagactaccac

SEQ ID NO: 495 - DNA, 114 bp, Glycine max
  Clone ID: LIB3027-002-Q1-B1-C6
ctaaaactatacatggctttcgtagtagtagtattacttatcatagttgtgaagaacatgttttaggatgtccatccatatactataatggataataaattccaataatagact

SEQ ID NO: 496 - DNA, 287 bp, Glycine max
  Clone ID: LIB3027-002-Q1-B1-C7
gaggatttgtgccagacactaccactaagaagggaaaagactaccctgttggcccagtgctgctcggtttcttcgtctttgttgtcattggatcatctctcttccagataatcaggacagcaacgagtggaggcatggcttaaatggagctttgttttggattttgtgtcatcttctctttcttagcctcctcgtagaaaatgctaatacttctctacatgtactgtacttgtactagaccctgttcctgttcatgttttaatgaactttataagaattttgaatta

SEQ ID NO: 497 - DNA, 282 bp, Glycine max
  Clone ID: LIB3027-002-Q1-B1-D11
aacaaaaagattcgcacagcacttgggaaaggtaagaaaattgtttttcttactagagttgatccttttccagtagctctactggctgttctttttggcgttaagaatgaaattctgagttccaacgccactaaccctatgctgacgcgacttcttgagaactgtaagagtctcaaatatctggttgatgagtgtccttttgcatttgtgaactagtatgtaatattttattcacttaaataaagcgcattactatgtgcaatgagtgtgtttaaatataaa

SEQ ID NO: 498 - DNA, 104 bp, Glycine max
  Clone ID: LIB3027-002-Q1-B1-F11
atatgtactgtacgtagtgtgaagatatagtattgtatgctgcagaatatgattgtctaataaggtggactagctgtaataaaagatatttccaggttgaaaac

SEQ ID NO: 499 - DNA, 161 bp, Glycine max
  Clone ID: LIB3027-002-Q1-B1-F12
tcggggaattccaattccacattttcaagatataaggaggcaaaaatgttcatatatgaattggcattatttgttttcttactacgcctatcctgaagccaaaggaaatgagatcgggactcctcggggaattctaagtccacattttcaacacctaaaga

SEQ ID NO: 500 - DNA, 352 bp, Glycine max
  Clone ID: LIB3027-002-Q1-B1-H12
cagggtcatgagtcctcgctccatggccaaggatctcagtggaaccattaaggagattctcgggacttgcgtttcggttgggtgcaccgttgatgggaaggaccccaaggatctgcagcaggagatttctgatggagatgttgaggttcctcttgaatgaagttgctgaaatttcagtggttttttgttgtttcgtttatgttgttttttttgggcaattttggtttttttttctttttataaaggaatttgagtcataggaatggtatgatagttaagactttggtaaatgatatcacattgttgggtttttgagtaattttgtaatggagttgtgatttgtattgttgcc

SEQ ID NO: 501 - DNA, 131 bp, Glycine max
  Clone ID: LIB3027-003-Q1-B1-B4
ttcccccgggaagcacctcgtgagctctcctgatctgagacgccgcttaccggatatgtgtatgaatttctcacttcgggaagcgtggagctttcacagagctcactcaggatgtatctcagttccgtatc

SEQ ID NO: 502 - DNA, 225 bp, Glycine max
  Clone ID: LIB3027-003-Q1-B1-C12
agagaatcctactttgtggatgctcagcctaagaagaaagaggaggggaataagggaagaaagggtcctttgtcttcaattttgagggctttttactgaataagtatgtactaaaatgtatgctgtaatagctcatagtgagcgaggaaagtatcgggctatgtaactatgactagagcttcaactatgaataaataaatcgacagcatatgatgcttttgttta

SEQ ID NO: 503 - DNA, 340 bp, Glycine max
  Clone ID: LIB3027-003-Q1-B1-C7
attgcacttgactcaaataaaatataagcaaaccagggagggcaacacctcagaaaatggaagaaatgattcaaatttgggttccctgtttatctgcagattttggagacaccaagcctcttggctgagggctcgtccggtgtgaaaaaaaacatcttcaagcagaaacccccacagtctgatgcatcaagtagtggctgctgctcatggtgattgtcatgttcacgaggggcactcaccttccacttcttggtatgatctgggtttcaagtgcgtcaatttcattacatgtatcaactatcaaaaataattttattacaacccatatatctagattaaa

SEQ ID NO: 504 - DNA, 261 bp, Glycine max
  Clone ID: LIB3027-003-Q1-B1-E3
tcaacatgtgaacaattagccatcagaacgctaggaagtgtcgcaaggccattttgctggggtttttccaaaggctccacgccgctgagtaggatcatcaacatcagaactcaagtcacacgttggtgagcccgacattgtactatacagataccatttggtttcggcccttgaagcggcctcagtgcgcgctcctgttccgaccatgatgcatagtgtatacgtgtcttgttttctcacttcggtaagagtgtcgctttc

SEQ ID NO: 505 - DNA, 93 bp, Glycine max
  Clone ID: LIB3027-003-Q1-B1-F7
aaaaaaaaaaaaaaaaaaaaaaaaaaaaaaaaaaaaaaaaaaaaaaaaaaaaaaaaaaaaaaaaaaaaaaaaaaaaaaaaaaaaaaaaaaaaa

SEQ ID NO: 506 - DNA, 79 bp, Glycine max
  Clone ID: LIB3027-003-Q1-B1-G3
gttgtataactgtaagtggtgctgcaacatgttgtttctttcttttaagcttgtgagatatgttactacttttctggta

SEQ ID NO: 507 - DNA, 289 bp, Glycine max
  Clone ID: LIB3027-003-Q1-B1-H9
cccaaacagtctacagtttttgacattctcttgggaatttctcaagattttgaaattgctggtaatactcttatgccagctttttctgttccacaggctactgccagatcttctgaaaatgcggaatcctctgcatgatctggaatttgtgttttctttcatttgtccgtttgtttaattcaataaaggaaattaggcatgaccctcttgttgagtatgctctgcctatttgaaaatttccacacctcttttaattgtcgtaatgatgtgtgaagtgtgtgttatttta

SEQ ID NO: 508 - DNA, 358 bp, Glycine max
  Clone ID: LIB3027-004-Q1-B1-C3
tcggggaattccaattccacattttcaagaaataaggaggcaaaaatgttcatatatgaattggaattatttgttttcttattaggcctatcctgaagccaaaggaaatgagatcggaattcctcggggaattccaattccacattttcaagaaataaggaggcaaaaatgttcatatatgaattggaattatttgttttcttattaggcctatcctgaagccaaaggaaatgagatcggaattcctcggggaattccaattccacattttcaagaaataaggaggcaaaaatgttcatatatgaattggaattatttgttttcttattaggcctatcctgaagccaaaggaaatgag

SEQ ID NO: 509 - DNA, 395 bp, Glycine max
  Clone ID: LIB3027-004-Q1-B1-E7
tcggggaattccaattccacattttcaagaaataaggaggcaaaaatgttcatatatgaattggaattatttgttttcttattaggcctatcctgaagccaaaggaaatgagatcggaattcctcggggaattccaattccacattttcaagaaataaggaggcaaaaatgttcatatatgaattggaattatttgttttcttattaggcctatcctgaagccaaaggaaatgagatcggaattcctcggggaattccaattccacattttcaagaaataaggaggcaaaaatgttcatatatgaattggaattatttgttttcttagtaagcctatcctgaagccaaaggaaatgagatcggaattcctcgggggtaccgagctcgaattccct

SEQ ID NO: 510 - DNA, 146 bp, Glycine max
  Clone ID: LIB3027-004-Q1-B1-F1
agtggatttgccgcgtaatgacttgtgtgcattgtgaaacagcttgtagcgatccatggctataatgtaaaaatatgtggaaagtgttctgcttataactttcttccttaaatgcacactccatagaacaatattattggtactaa

SEQ ID NO: 511 - DNA, 227 bp, Glycine max
  Clone ID: LIB3027-004-Q1-B1-H11
gaaccaaagagaatcctactttgtggatgctcagcctaagaagaaagaggaggggaataagggaagaaagggtcctttgtcttcaattttgagggctttttactgaataagtatgtactaaaatgtatgctgtaatagctcatagtgagcaaggaaagtatcgggctatgtaactatgactagagcttcaactatgaataaataaatcgacagcatatgatgctaaa

SEQ ID NO: 512 - DNA, 300 bp, Glycine max
  Clone ID: LIB3027-005-Q1-B1-F8
gaaagtccaccaataatacttgttggcaacacttgctatgcctgatgttcgctggtgatgatgaaggtttttcttctgacaatttgcttcagtggcatatgctgtgaaagctgcttgattcctcccccaagcaatattcacaaaatttcttatccattaaggtgtaaggatgacttagttgcactcgttatatgcttgtatgttagtttttcacttttttcccattacgttattcacggtgtagtggagaggtagagttggcttatgtatgatgtaaatttacgtgttgatatctgaaaa

SEQ ID NO: 513 - DNA, 133 bp, Glycine max
  Clone ID: LIB3027-006-Q1-B1-A1
gtttgtttaattcaataaaggaaattaggcatgaccctcttgttgagtatgctctgcggatttgaaaatttccacacctcttgtaattgtcgtaaggatgtgtggagtgtgtgttatgttaaaaaaaagaccc

SEQ ID NO: 514 - DNA, 261 bp, Glycine max
  Clone ID: LIB3027-007-Q1-B1-D1
ccatttcggtaataacacaatcgcaatccgttactcactctcttccatggcgacagggtgactgaagatggcggcgcatcgtgtcccctcctcgccggcgttcaagctggccattctccgggcccacgcgtcggaggcacaggccccacgactataacgatacgaggcgtttcaccctggaagcacacccttcacactcacggttggaaccccgagaacacctcatagccctagctcattgactaccagattaacctaaag

SEQ ID NO: 515 - DNA, 221 bp, Glycine max
  Clone ID: LIB3027-007-Q1-B1-D11
ctgtggcttagagagccctttttgcatgtgctaccacacttttgtccttttgggcgctacctaatgctggcagcactaaatactactgcagaacacaaacaaaggcttaaatgccctttgttaagtgtagaataacgggtatactaactatgtatccttgtgtaatgagtcactcaaatacctatgccggaaaagcatcaataaaataagaaattccaata

SEQ ID NO: 516 - DNA, 219 bp, Glycine max
  Clone ID: LIB3027-007-Q1-B1-H3
agagttgatccttttccagtagctttactggctgttctttttggcgttaagaatgaaattctgagttctaacgccactaaccctatgctgacgcgacttcttgagaactgtaagagtctcaaatatctggttgatgagtgtccttttgcatttgtgaactagtatgtaatattttattcacttaaataaagcgcattactatgtgcaatgagtgtgttt

SEQ ID NO: 517 - DNA, 348 bp, Glycine max
  Clone ID: LIB3027-008-Q1-B1-C4
tcggggaattccaattccacattttcaagaaataaggaggcaaaaatgttcatatatgaattggaattatttgttttcttattaggcctatcctgaagccaaaggaaatgagatcggaattcctcggggaattccaattccacattttcaagaaataaggaggcaaaaatgttcatatatgaattggaattatttgttttcttattaggcctatcctgaagccaaaggaaatgagatcgggattcctccgggaattccaattccacattttcaagaaataaggaggcaaaaatgttcataaatgaattggaattagttgttttcttattacgcctatcctgaagccaa

SEQ ID NO: 518 - DNA, 358 bp, Glycine max
  Clone ID: LIB3027-008-Q1-B1-F1
aacctcggggaattccaattccacattttcaagaaataaggaggcaaaaatgttcatatatgaattggaattatttgttttcttattaggcctatcctgaagccaaaggaaatgagatcggaattcctcggggaattccaattccacattttcaagaaataaggaggcaaaaatgttcatatatgaattggaattatttgttttcttattaggcctatcctgaagccaaaggaaatgagatcggaattcctcggggaattccaattccacattttcaagaaataaggaggcaaaaatgttcatatatgaattggaattatttgttttcttattaggcctatcctgaagccaaaggaaa

SEQ ID NO: 519 - DNA, 62 bp, Glycine max
  Clone ID: LIB3027-008-Q1-B1-G9
aaaataaaaaaaaaaaaaaaaaaaaaaaaaaaaaaaaaaaaaaaaaaaaaaaaaaaaaaaaa

SEQ ID NO: 520 - DNA, 255 bp, Glycine max
  Clone ID: LIB3027-008-Q1-B1-H12
cttcctggttccacctcaggagtctcagaggagagctgtggcttagagagccctttttgcatgtgctaccacacttttgtccttttgggctctagctagtgctggtagcagtaaataagaatgaataaaagaaacaaaggcttagatgccctttgttaagtgtagaataacgggtatagtaactatgtacccttgtgtaatgagtcactcaagtacctatgcgggaaaagcataaataaaagaagaaattccaat

SEQ ID NO: 521 - DNA, 68 bp, Glycine max
  Clone ID: LIB3027-009-Q1-B1-D5
aaaaaaaaaaaaaaaaaaaaaaaaaaaaaaaaaaaaaaaaaaaaaaaaaaaaaaaaaaaaaaaaaaac

SEQ ID NO: 522 - DNA, 230 bp, Glycine max
  Clone ID: LIB3027-009-Q1-B1-F7
gtaatactcttatgccagctttttctgttccacaggctactgccagatcttctgaaaatgcggaatcctctgcatgatctggaatttgtgttttctttcatttgtccgtttgtttaattcaataaaggaaattaggcatgaccctcttgttgagtatgctctgcctatttgaaaatttccacacctcttttaattgtcgtaatgatgtgtgaagtgtgtgttattttaaa

SEQ ID NO: 523 - DNA, 221 bp, Glycine max
  Clone ID: LIB3027-009-Q1-B1-G11
gcttcaaaaaaaaaaaaaaaataaaaaaaaataaaataaaaaaaaaaaaaaaaaaaaataaaaaaaaaaaaattaaaaaaaaaattaaaaaaaaaaaaaaaaaaataaaaaaaaaagggggggctcccaataattaacttctttaacccggaatttatttctgaactgttacttaaatgtttacaatttttccctatattaattcatattaaatcttggtt

SEQ ID NO: 524 - DNA, 100 bp, Glycine max
  Clone ID: LIB3027-010-Q1-B1-F11
aaattaggcatgaccctcttgttgagtatgctctgcctatttgaaaatttccacacctcttttaattgtcgtaatgatgtgtgaagtgtgtgttatttta

SEQ ID NO: 525 - DNA, 91 bp, Glycine max
  Clone ID: LIB3027-010-Q1-B1-H10
acggatttgcgcgctctgcaggaaaaaatctgccaagccgctgggagaggcggtttagctttcccgagattgactcgtattagagacttgg

SEQ ID NO: 526 - DNA, 149 bp, Glycine max
  Clone ID: LIB3027-011-Q1-B1-B7
aaaattttatttatcctttgttagaccttgacacattgttttgatttaggataaggaggaaaaaacaatggtcaaacctgaaacttgatttgattctatgttgactttgctttcgaatttattttgatggctgtttattggcctttgca

SEQ ID NO: 527 - DNA, 277 bp, Glycine max
  Clone ID: LIB3027-011-Q1-B1-C6
cactgactttatcggcgatagcagatcaagtatttttgatgcaaaggctggaattgcattgaataagaactttgtgaagcttgtttcttggtacgacaacgagtggggatacagctcacgtgtcattgatcttcttgtattcgttgccaagaagtctctttaaggtgttacttcaaagtagcttgtcttcacattattaccgtatgtttatgtttagctgcgatttagtgtcttgctcgagcaaaaaatgagaggtctgaataaatcggtttctgaa

SEQ ID NO: 528 - DNA, 57 bp, Glycine max
  Clone ID: LIB3027-011-Q1-B1-G5
aaaaaaaaaaaaaaaaaaaaaaaaaaaaaaaaaaaaaaaaaaaaaaaaaaaaaaaaa

SEQ ID NO: 529 - DNA, 85 bp, Glycine max
  Clone ID: LIB3027-001-Q1-B1-E9
atttatatgtcacgaatctagtttaaggagaacaatgtgatatattactactacaatttatatgttacactaaattacttaaaaa

SEQ ID NO: 530 - DNA, 391 bp, Glycine max
  Clone ID: LIB3027-001-Q1-B1-F11
gaaaatttgaagagtttgttaattgtgaaaaaaagaaaaatgcatgcagcatagatagccatatagacctttaaggaaaccgcagccaacattggcgcctctgccaagtctggcttggagaaaaccaaggccactatccaagagaagaatgagaagatgaatgcagaagatcaaactcaaatggatatggctaccaagaggaaagaagagaagatcaaccaggctgagatggagaagcagcaggcccgtaagtactacgccgctgcaaaacaatacgccatggctgagcacatggcaaagggcaaccacgacaccgccgggcctagaatcgagactgccacacacatcaccagtgggcccgggactgacaatgctatgtactctaacactg

SEQ ID NO: 531 - DNA, 53 bp, Glycine max
  Clone ID: LIB3027-001-Q1-B1-G9
aaaaaaaaaaaaaaaaaaaaaaaaaaaaaaaaaaaaaaaaaaaaaaaaaaaaa

SEQ ID NO: 532 - DNA, 233 bp, Glycine max
  Clone ID: LIB3027-003-Q1-B1-D2
gttggagatgcatgattgtggtgtgccttggtttcatttcatcataatgacagccttgtgggtttctttggtgtttcttgatgcatacttaatttacattaatattgtgtagttatctcttccatttacaacaagaaaagtttgtgtaggtttccttctttgaagtaaaaagaaattaaatatgtactgaaaatggaataatagtgtgttttagttgtgtttacaatacagtg

SEQ ID NO: 533 - DNA, 216 bp, Glycine max
  Clone ID: LIB3027-005-Q1-B1-G3
gcgatcaacattatgaaagtcgcgttgctggcctttttcgaaacgctccgcactcctgattagcatcataatgtatcgacgctcaattcaaaagttgcgaaaaccattgggattagattcataccagcagtttcttcgtgaaatttccatcgtgcgtccccgtggtcggactctgctgcgtaacgagtgagcagtcggctcatactctacttcggg

SEQ ID NO: 534 - DNA, 114 bp, Glycine max
  Clone ID: LIB3027-006-Q1-B1-D12
caagtctggaccggtccctgccggcgtaccagccttccctagagtgagtcgtagtacagcgtggcgtcgtcatggtgatagctgtctcctgtgtcaatgtgtgaccctctcacg

SEQ ID NO: 535 - DNA, 318 bp, Glycine max
  Clone ID: LIB3027-006-Q1-B1-G10
atagattgtggaatttgtgatcacacaacataagcatatatatagaaagatgtcaggggcacaaggagcacaaccaaaggagtcagaaacagcaacaccatatgagtcagtagaaggacgagagaaccgaacaaggactgacttgctttcaagggaggatcaaggctgcattcaagtggaaaaacttcaggagaaggtccatgatcctgctggcaaaggtggtcctgtctttggtgctggcaacgatgaagacaaacaagaccttggagttactggcacaggctaattaacctactatatatattactacgatatact

SEQ ID NO: 536 - DNA, 289 bp, Glycine max
  Clone ID: LIB3027-008-Q1-B1-C9
gttgattcgagctaagttccataaaaacaccagccctttttaaaatgtcctgaacagttcctgtaggttgagcgcctcgttcaaggaaatatagaataacaggaatatttaaataggtttgattctttattggatcataaaaacccactttccgaagatctcttccctctcttcgagatcgaacatcgattgcaacgattcgataaacggctcattgggatagagatagataaataatgcaccccccccctagaaacgtataagaagttttatcctcgtacggctcgag

SEQ ID NO: 537 - DNA, 126 bp, Glycine max
  Clone ID: LIB3027-009-Q1-B1-D2
caggcttcaacgccgcttcgtccaacaaccaaaacaacaagccgggaaccaatttgttcggaccaaaattaaacccccgcaacaatttgcaacggcccttgcagggccaaccgggaggtggcaacc

SEQ ID NO: 538 - DNA, 364 bp, Glycine max
  Clone ID: LIB3027-009-Q1-B1-D8
tctgcctcgaccccgcttactgccacgatgcacacgagtcattcggctaccagtatctgtgcaccacattcaatcgccgtaatacttgtgtaacagcacgtcaagggataacgcatgagtggaaatgtcaatcaacagccagcgtatggccaccaattgttgtaccgccccgttgctaacgtttttcaacacgctcagcgccccttacaagtattccagcgttctacgctcaacttagatgtgccgaatcacgacacgacgaaacggacagcaagcatattcccctatacgctgccacattcgctcacctgttccgattcagctgcatcaccgagaactgtccccctttctcgcttcaggaagc

SEQ ID NO: 539 - DNA, 57 bp, Glycine max
  Clone ID: LIB3027-009-Q1-B1-F1
ggaccggtacttgcaggcttacaacctttcccaaaattgagtcgtattaaagcttgg

SEQ ID NO: 540 - DNA, 93 bp, Glycine max
  Clone ID: LIB3027-009-Q1-B1-G5
gccttccggaccgctacctgcgggcgtatccgctttcccgatagtcggtcgtcttagagcttggcgtacgggtggtcatagctgtatcggggt

SEQ ID NO: 541 - DNA, 307 bp, Glycine max
  Clone ID: LIB3027-010-Q1-B1-A11
gagagatgtaaagagaacaacagtgacagcaacaaccgcaaccgcatgaacgtgatgagtattaatgtgttgttatgaacttatgatgttggtttatgtggggaaataaatgatgtatgtacctcttcttgcctatgtagtaggtttgggtgttttgttgtctagctttgcttatttagtaattagtagaagggacgttcgttcgtgtctcataaaaaggggtactaccactctggcaatgtgatttgtatttgatgaattcaatgtgaaatgtgttttgccttggtgtacgtaagaactcgtcaag

SEQ ID NO: 542 - DNA, 156 bp, Glycine max
  Clone ID: LIB3027-010-Q1-B1-D6
ttttctttcgcttgttcgtttgtttaattcactaaaggaaattaggcatgaccctcttgttgagtatgctctgcctatttgaaaatttccacacctcttttaattgtcgtaatgatgtgtgcactgtgtgttattttagcagccggggcggcggag

SEQ ID NO: 543 - DNA, 563 bp, Glycine max
  Clone ID: LIB3027-008-Q1-B1-E1.F2
tgcccatctttcccctaatgctggtggtgggttcagttttttggtgaggaaggataataaagaaggaagctttttttgtgtgagagaaggaagaggagaaaagaagcatggggagagggaagattgagattaagaagattgagaatttgaacagcagacaagttaccttctccaagaggagaaatgggttgttgaagaaggccaaagagttgtctgttctctgtgatgcagaggttgctgtcatcatattctccagcactggcaagctttatgagttctcaaacacaagcatggagcataccctttcgaggtacagtaaaggcgcagaatcagattctgcagagcaacctattgatgtgcccccaacagatgttatggctgtggagcctgatactaaccttttgatggaggaaataacaaagcttcgatcagcatacttaaggatgatgggtaaggagcttgatggattgagccttaaagaactgcaacaactagaaaatcaactaagtgaagggatgcaatctgtcaaagacaagaaggaacaagtacttgtggaacagctt

SEQ ID NO: 544 - DNA, 115 bp, Glycine max
  Clone ID: LIB3027-008-Q1-B1-E1.R1
agacagcactttatttatatatttttatttattttatataataatatgaactaaaatgaactaaaagaaatttacaaaaaagagagaagaagataaaatatataagccaatagat

SEQ ID NO: 545 - DNA, 496 bp, Glycine max
  unsure (1)..(496): unsure at all n locations
  Clone ID: LIB3027-008-Q1-B1-E1.R2
gaactaaatgactaaagtatttcaatagggtgagtcatttagcatgtaaacttacacctaatttagcaatcaaacgctggtgaaagccaaaaatttgtgaactaaatataaatttattaaatttagcctaaactatttctataagctaaacttaatgtgaccagataaagaactaggccatgtttcccatgttctaaaggtaagctttcagtactaaaatgtcaatgtgaagccacttgactccctgagtcgttgcaaggttccatcttcaatgctttcctctggcgaccataatctgttgacaaccctaactgcaaggaagtatctgaaaggtcattttcctctgaagcacaattgaaaagggattttgaaccattcttggaaaatgtcctatccaaagagctgaattcaaggaactgtgactttgttttattttgnatttcctcaagctgtttgcgcagaacttcattttccagcatggccttttgctcctgta

SEQ ID NO: 546 - DNA, 380 bp, Glycine max
  Clone ID: LIB3028-019-Q1-B1-A10
caaaaaatggcagatattcctcgggtgaagcttggaagccaaggcctggaggtttccaagttaggatttggttgtatgggcctaagtggagtgtacaacgatcctgttcccgaagaggttggcatctctttgatcaaacacgcattcaccaaaggggtcactttctttgattctgcagatttttatggagcacgtgccaatgaagttttggtcggaaaggctctcagggactttcctcgagatcaatttcagattgccacaaagtttgggattgtcaaaatggaaaatggtaatgtgatagtgaacggttcccctgaatatgttcggtcctgttgcgagggtagcctccaacgccttggtgtcagctacattgatctcta

SEQ ID NO: 547 - DNA, 392 bp, Glycine max
  Clone ID: LIB3028-006-Q1-B1-A8
ctttctctttattctctcacacaaaataatggacaagaagcttggcaacacgtctcatgatcctgaagtgagaaaggggccatggacaatggaagaagacttaatcttgatcacctatattgccaatcacggggaaggggtttggaactctttggccaaggctgctggacttaaacgtaccggaaagagttgccggctccggtggctaaactacctccgtcctgatgttagaagagggaatattacacccgaggaacagcttttgatcatggaacttcatgcagagtggggaaacaggtggtccaaaattgccaagcatctacccggaaggactgatactgagattaagaactactggaggacaatgatccagatgcacctcaagcaagctt

SEQ ID NO: 548 - DNA, 361 bp, Glycine max
  unsure (1)..(361): unsure at all n locations
  Clone ID: LIB3028-007-Q1-B1-B1
ggttcgtggaggccgtggaggtggacgaggtgggggacgtggatttggacgtggtcgtgggtttagtcgtgactcctcgaatgatgagaactcattccctaccagcagagctccttataatcagggtccttttgaagaaggagatgctgggaagtcttctgaaagacgcagttatggtggaccacgagttccttaccgtggtggtcgtcgtggaggtttcagcaatggtgaaactggtgaaggtgaagacggacgacctcgaagagcatttgatcgtcgcagtgggactggacgaggaaatgaattcaaacgtgaaagttcaggacgangtaactggggaacccaaactgatgaacttgct

SEQ ID NO: 549 - DNA, 418 bp, Glycine max
  Clone ID: LIB3028-007-Q1-B1-D7
tctgtctcctcctcaatcttcattgtcctgttctttcccttggtgacaaaccaagactaacacacacagaacatagcttgtgttggtgaggtgagaagataaagaaagaatggcatttgcaggaacaacacagaagtgtatggcctgtgacaaaaccgtttatctggttgataagttgaccgcggataaccgagttttccacaaagcttgcttcagatgccatcactgcaaaggaaccctcaagctgagcaactacaactcttttgagggagttctttattgtaagccacactttgaccaactgttcaaaagaacagggagccttgacaaaagctttgaaggaacaccaaaaattgccaagccagagaaaaatttggaagagaaacctgcagcagccaaagtctcaagtatgtttgga

SEQ ID NO: 550 - DNA, 410 bp, Glycine max
  Clone ID: LIB3028-002-Q1-B1-B2
gcctgaggacaatgtggcaacaaaggaagccttggtattggagttaagcagtcaacaagaatacttgaggctgaaagcacgttatgaagctctacaacgttctcaaaggaaccttatgggagaagatcttggccctctaagcagcaaagagcttgaatcacttgaaaggcagctagattcgtctttgaagcaaatcagatcaataaggacccaattcatgctggatcagctttctgatctacaacgtaaggaacactttctaggtgagtcaaacagagatctcagacaaaggttggaagagtttcaaataaatccactccaactgaatcccagtgctgaagatatggggtatggacgccatccaggtcagccccaaggccatgctctctttcaaccattggagtgtgagc

SEQ ID NO: 551 - DNA, 365 bp, Glycine max
  Clone ID: LIB3028-030-Q1-B1-G8
atagctaataagctaggttcagtagttagtgagtgatcgatatctggagatgggtcgaggcaagattgagataaagttgattgagaaccccaccaacaggcaagtcacttactccaagcgaaggaatggtatcttcaagaaagctcatgaactcagtgttctctgtgatgccaaggtttcacttatcatgttctctaaaaacaacaagatgcatgaatacattagccctggcctcacgacaaaaaggatcattgatcagtatcagaagactttgggggatattgatctgtggcgttctcactatgagaaaatgcttgaaaacttgaagaagctgatagatattaacaacaagctcagaagacaga

SEQ ID NO: 552 - DNA, 412 bp, Glycine max
  Clone ID: LIB3028-003-Q1-B1-G10
cggctcgagcttgatcctgcccttatgcgttctggtcgattggatcgaaaaattgagttcccacacccaactgaagaagcaagagcccgaattctacagatccattctcggaaaatgaatgttcaccccgatgtcaactttgaagaattagctcggtccacagatgatttcaatgcagcacaacttaaagctgtctgtgttgaggctggcatgttggcccttcgccgtgatgcaactgaggtgaaccatgaggactttaatgaaggcatcatccaagtccaagcaaagaagaaagcaagcttgaattattatgcataggcactcaacgcaaggaaaaacgagcattgaagtttgacttgtttgctagattgatcttactcgaatcatatgtaacatacagcttgctaattta

SEQ ID NO: 553 - DNA, 408 bp, Glycine max
  Clone ID: LIB3028-004-Q1-B1-A10
aaattgagtttccacacccaagtgaagaagcaagagctcgaattctacagatccattcgaggaagatgaatgttcacccagatgtcaactttgaagaacttgctcggtccacagatgatttcaatggagctcaactgaaggctgtttgtgttgaggctggcatgttggctctacgccgtgatgcaactgaggtgaaccatgaggactttaatgaaggtattattcatgtccaagcaaagaagaaagcaagcctcaattattatgcataggctggattttggaacaagctatttttcagtttacgaagatctattgagacatatcaagccaatggaaaacctaagtcgatgtttgacatttgttatctatttcttttcttttttttggcaatctaatggtatgataacc

SEQ ID NO: 554 - DNA, 407 bp, Glycine max
  Clone ID: LIB3028-004-Q1-B1-B1
gaagcattgaaggacgtagctgctatggctcgaggaaagatccagatcaagaggatagagaacaccaccaaccgccaggtcacttattctaaacgacggaatggccttttcaagaaggccaacgagctcaccgttctatgcgatgccaaggtttctattattatgttctccagcactgggaaactccacgagtacatcagcccctccacctcaacaaagcagttcttcgatcagtaccagatgactctaggagtcgatctctggaactctcattacgagaatatgcaagagaacttgaagaaactcaaagatgtgaataggaatcttcgtaaggagattaggcagaggatgggagattgtctgaacgatctgagcatggaagatctcaagctccttgaggaagaaat

SEQ ID NO: 555 - DNA, 406 bp, Glycine max
  Clone ID: LIB3028-011-Q1-B1-B6
tgggaaggtccccttgctgtgagaaagcacacacaaacaaaggtgcatggaccaaagaagaagatcatcgcctcatttcttacattagagctcacggtgaaggctgctggcgctctctccccaaagccgccggccttctccgttgcggcaagagctgtcgtctccgctggatcaactatctccgccctgacctcaagcgcggcaatttctccctcgaagaagaccaactcatcatcaaactccacagcctccttggcaacaagtggtctctaattgctggtagattgcccggtagaactgacaatgagatcaagaattactggaatactcacatacgcaggaagcttctgagcagaggtattgaccctgccactcacatgcctctcaacgactcttcccatcaaga

SEQ ID NO: 556 - DNA, 352 bp, Glycine max
  Clone ID: LIB3028-012-Q1-B1-D11
tgggaaggtccccttgctgtgagaaagcacacacaaacaaaggtgcatggaccaaagaagaagatcatcgcctcatttcttacattagagctcacggtgaaggctgctggcgctctctccccaaagccgccggccttctccgttgcggcaagagctgtcgtctccgctggatcaactatctccgccctgacctcaagcgcggcaatttctccctcgaagaagaccaactcatcatcaaactccacagcctccttggcaacaagtggtctctaattgctggtagattgcccggtagaactgacaatgagatcaagaattactggaatactcacatacgcaggaagcttctgag

SEQ ID NO: 557 - DNA, 345 bp, Glycine max
  unsure (1)..(345): unsure at all n locations
  Clone ID: LIB3028-028-Q1-B1-F3
caaagagagagagagagaagaccaaaggagggtaaggaaaaacttcagcagaggaattccttgcagaagggtgcaactttactccctctctttctctcttgctctttcttgtcanggtttggtcatataagaagccatggccagttttggaggaaccacacaaaagtgcatggcttgtgccaaaactgtgtatcttgttgataagttaactgcagatagccgtgtctatcataaggcttgcttccgatgccaccattgccgtaatacccttaagcttagcaactactgttcttttgagggggtgctctactgcagacctcactatgatcaactctacaagcgaac

SEQ ID NO: 558 - DNA, 324 bp, Glycine max
  Clone ID: LIB3028-009-Q1-B1-G12
gaaaaataacacacatttgaaactcaaactgaaatgggtgcatagctttggggcaaaaactacacaaaactcctcattgcccccaagttttttctttcaaagcaattttgcacttttttgctttcattgtcttcaatttgtagtaagaggaaattgttgtttcctacttagcttgattattattatcaatggcttctttagtatcttcacaatttacactaccaagttctaaacctgaccagcttcattctcttgctcagaagcatctttttctccactctttccttcccaagaaggccaattacaatggtagcagctcaaaat

SEQ ID NO: 559 - DNA, 392 bp, Glycine max
  Clone ID: LIB3028-007-Q1-B1-A8
ggccgatacatcaagcccatgcttccaaagggccctgtaaagagattagctgtagatgcaacccttagagctgctgcaccttatcaaaaattgcgaagggcaaaagattctggaaacaatagaaaggtatttgtggagaaaacggacatgagggcaaagagaatggcacgtaaggcaggagcattggtgatatttgttgttgatgcaagtggaagcatggcattgaacaggatgcagaatgcaaaaggtgcagcacttaagcttctggctgaaagttatacaagcagggatcaggtatctataattccattccgtggagatgcagctgaagttctcctgccaccttctagatcaatttcaatggcaaggaaacgtcttgaaaggcttccatg

SEQ ID NO: 560 - DNA, 354 bp, Glycine max
  Clone ID: LIB3028-025-Q1-B1-D1
ctcgagccgaatcggctcgagtgttgaacaagggtttctctgtctgcttcttcactttctctcgtttcaatcgaaaccaaaacaaaaacatgggcagaaaattcttcgtcggtggcaactggaaatgcaatgggaccactgaggaggtaaagaagattgttactactttgaatgaggctaaagtccctggagaagatgtcgtagaagttgttgtgagccctccttttgtgttccttcctgttgtaaaaagtttgctgcgccctgatttccatgtttcggcacaaaactgttgggttcgcaaaggtggtgcttataccggtgaggttagtgctgaaatgcttgttaatttgggaa

SEQ ID NO: 561 - DNA, 356 bp, Glycine max
  Clone ID: LIB3028-010-Q1-B1-G9
ctacctctttttcttctctctcaacaacttcaccttcttcctcctcgatcatgtctcacttcaagggcaagtaccatgatgagcttatcgccaatgctgcgtacattggcactcctggaaagggtattcttgctgctgatgagtcaacagggacaattggcaagcgtttggccagcatcagtgtagagaacattgaatccaacaggcgagctcttagggagctgcttttcactgctcctggtgttcttcaatatctcagtggtgtcatcctctttgaggaaaccctctaccagagcacagctgcaggcaagccctttgtgaatgtcttgaaggaagctggtgtgcttcctggcatc

SEQ ID NO: 562 - DNA, 405 bp, Glycine max
  Clone ID: LIB3028-030-Q1-B1-C9
ctcaagtccaacctacccctttttcttctcccaccaacttcaccgtcttcttcctcgatcatgtctcacttcaagggcaagtaccatgatgagcttattgccaatgctgcttacattggcactcctggaaagggtattcttgctgctgatgagtcaacagggacaattggcaagcgtttggccagcatcagtgtagagaatgttgaatccaacaggcgtgctcttagggagctgcttttcaccgctcccggtgctcttaaatatctcagtggtgtcatcctctttgaggaaactctctaccaaagcacagctgcaggcaaccccttgtggaagtcttgaaggaggctggtgtgcttcctggcatccaagttgacaagggcacagtttgagcttgctggcactaat

SEQ ID NO: 563 - DNA, 370 bp, Glycine max
  Clone ID: LIB3028-011-Q1-B1-B9
tacaaaggttgctgtaggagataagattgcagtagtgctaagtgctaacacctgcagtgaacaatggcctctgcatcagcatctctgctcaagtcttcacttgttcttgacaagtctgagtgggtgaagggacaaacccttcgccaaccttctgcatcagttgtgagatgcaaccccaccagcccatcaggcctcaccatcagagctggttcctatgctgatgagctcgttaagaccgcgaaaacagtggcttcaccagggaggggtattttggccatggatgagtccaatgctacctgtgggaagcgtttggcttcaattgggctagagaacactgaagctaaacgccaggcataccgttacctcctcg

SEQ ID NO: 564 - DNA, 418 bp, Glycine max
  Clone ID: LIB3028-011-Q1-B1-F2
agataagattgcagtactgctaagtgctaacacctgcaatgaacaatggcctctgcatcagcatctctgctcaagtcgtcacttgttcttgacaagtctgagtgggtgaagggacaaacccttcgccaaccttctgcatcagttgtgagatgcaaccccaccaccccatcaggcctcagcatcagagctggttcctatgctgatgagctcgttaagaccgcgaaaacagtggcttcaccagggaggggtattttggccatggatgactccaatgctacctgtgggaagcgtttggcttcaattgggctatagaacactgaagctaaccgccatgcatagcgtaccctcctcgtgacagttccaggccttggtcagtacatctctggtgccattctctttgaggaaacactctaacaat

SEQ ID NO: 565 - DNA, 396 bp, Glycine max
  Clone ID: LIB3028-026-Q1-B1-B7
gactctttctcttatctctaagtcaacatggctcaccttgaagattcaagtgcatggaattcgagtatacctcaccctaagctcaatgaaagaattctgtcttctctgtcacggagaactgttgctgctcacccctggcacgatttagagattgggccaggagctccagctgttttcaactgtgtggttgaaattggcaaaggcagtaaggttaagtatgagctggacaagacaagtggacttataaaggttgatcgtattctttactcatcagttgtctacccacacaactatggttttatcccaagaaccatttgtgaagacagtgatcctatggacgtgctggttctaatgcaggaacccgtgcttcctggttccttccctcgtgctcgtgct

SEQ ID NO: 566 - DNA, 403 bp, Glycine max
  Clone ID: LIB3028-026-Q1-B1-F6
gaaatatcatttctcatgccaatttactgctgatctttttgcaatgaaccacacagactttatcatcaccagcaccttccaagagattgctggaagcaaggacactgttggacagtatgagagtcacactgccttcacccttccaggactttaccgtgttgttcacggtattgatccatttgatccaaagttcaacattgtctctcccggtgcagacatgggtatatacttcccatacactgaaactgagcgtaggttaacagaattccactctgacattgaagagcttctttacagctcagtggagaatgaggaacacatatgcgtattgaaggaccgcaacaaaccaataatcttcaccatggcaaggcttgaccgtgtgaagaacaacacggggcttgtc

SEQ ID NO: 567 - DNA, 380 bp, Glycine max
  Clone ID: LIB3028-008-Q1-B1-H3
aaggctttggggagatgatgatcaatttggtccctacagtagcaagagtgtcccttgcagatgcaactgcctataagaaattcccttctggagccactgccaatgttgctgttggaatttgtagactaagaggctcagcagctttcattggcaaggtgggaaatgatgaatttggacatctgttatctgatattctgaaacaaaatggtgttgacaattctggcctgctctttgatgatcatgcaaggacagcgttgggaatttatgctcttaagagtaatggagaacctgaattcatgttttaccgaaatccaagttctgatgtgctccttcgtcctgatgaaattgatatggacctcataaagaaagcacaatatttc

SEQ ID NO: 568 - DNA, 368 bp, Glycine max
  Clone ID: LIB3028-009-Q1-B1-F3
atcctggaacaactattgtcacagacagtgtgacttctgatgggcttaccacgtttattgagaagaaacttggtggcagacaccatcggttcaaaagaggctacaaaaatgtgattgatgaagctattcgtttgaattctattggtgaggagtcacatttggcaattgaaactagtggacatggagctctcaaggaaaatcattggcttgatgatggcgcatacctaatggtcaagatcttaaataaacttgcttctgcaagagcttctggaaagggtggtggaagtaaggttttgactgatctaatagacggacttcaggaaccagattttgctgtagaactgagattaaagataaaccaaaaccat

SEQ ID NO: 569 - DNA, 412 bp, Glycine max
  Clone ID: LIB3028-003-Q1-B1-B11
gaaccttccggatttcgttttgctttgttcaggtagccagccagtcatggtgctcttcaatgtttcacgcgtagagaccactcccttcgatggccagaagcctggaacctctggtctccgcaagaaggtgaaagtgttcgtgcaacctcattacctccataactttgttcagtcaacattcaatgcattaactgtggaaaaagttagaggtgcaacgctagttgtatctggtgatggtcgttatttttcaaaggaagctattcagattataactaaaatgtcagcagcaaatggagtaagacgtgtttggattggtcaaaatggattgctttcaactcctgcagtatctgctgttatacgtgaaagagttggagctgatggattcagggcaacaggtgcatttatactgaca

SEQ ID NO: 570 - DNA, 400 bp, Glycine max
  Clone ID: LIB3028-005-Q1-B1-A11
ctcttttgtcagacacgtataagtgtatgacattctctactacaactacttggtgtttcccataccgaacactcttcttcaatcaagcgaaggtggtctcgattgcaagtgatccacgatacactctacgcttcacaaaaccttcaaacccaattccacagaattcttctgcttcaccatgccaccaaagcctttagactatgggtcaataaatgaaaacgtgaaaaaaagtcaatatgctgtcagaggtgaattataccttcgagcttctgaaacttcagaaagagggcaaaaggattatctttactaatgttggcaacccgcatgcattgggacagaaaccaatgagcttccctccccaagttgttgctttgtgccaagctccattcctacttgatga

SEQ ID NO: 571 - DNA, 410 bp, Glycine max
  Clone ID: LIB3028-010-Q1-B1-C7
cttccttccgcaaatggcttctcacgacagcatctccgcttctccaacctccgcttctgattccgtcttcaatcacctcgttcgtgctcccgaagatcctatcctcggggtaactgtcgcttagaagaaagatccaagtccagttaagctcaacttgggagttggtgcttaccgaactgaggaaggaaaacctcttgttttgaatgtagtgaggcgagttgaacagcaactcataaatgacgtgtcacgcaacaaggaatatattccgatcgttgggcttgctgattttaataaattgagtgctaagcttatttttggggctgacagccctgctattcaagacaacagggttaccactgttcaatgcttgtctggaactggttctttaacactttgcggtgaatttttgg

SEQ ID NO: 572 - DNA, 339 bp, Glycine max
  Clone ID: LIB3028-012-Q1-B1-F10
cggctcgattgtcatatgcttggatgattaccaccctttggataaaactggcagaaaggagaagggtgtcactgcccttgatcctagagccaatgattttgatctcatgtatgaacaagttaaagctcttaaggatggaattgctgttgaaaaaccaatctacaaccatgtcactggtctcctggatccccctgagctcattaaaccccccaaaatcttagtcattgaaggcttgcacccaatgtatgattctcgggtcagagatctcttggactttagcatctacctagacattatcactgaggtcaaattcgctttggaaattcagagagacatggc

SEQ ID NO: 573 - DNA, 402 bp, Glycine max
  Clone ID: LIB3028-004-Q1-B1-C2
gcacttctgctccgcaattatcatgggcaaggtcaagatcggaatcaacggatttggaagaattggccgtttggtagccagagtggctctgcagagagacgatgttgaactcgttgccgttaacgaccctttcatcaccaccgattacatgacatacatgtttaaatacgacagtgttcatggacactggaagcatcacgatgtcaccgttaaggacgagaagacccttctcttcggtgacaagccagtcactatttttggacacagaaaccctgaagagatcccatgggggtcaactggagctgacatcattgttgagtccaccggagttttcaccgataaggacaaggccgccgcacatttgaagggtggtgcaaagaaggttattatttctgcccccag

SEQ ID NO: 574 - DNA, 344 bp, Glycine max
  Clone ID: LIB3028-009-Q1-B1-C6
aacaacttctgctacttcctactccaaccgcacttccggcccgccattaaccagggccaaggccagattcggatccaacggattgggaaaattttggccgttgggaacccaaattggctctgcaaagacacaatgttgaactcgtcgccgtaaacaaccctttcatcaccaccgattacatgacatacatgtttaaatacgacagtgttcatggacactggaagcatcacgatgtcaccgttaaggacgagaacactcttctcgtcggtgacacgccagtcactatttgtggacacaaaccccctgaaaatatcccaggggggtcaactggacctgacatcatt

SEQ ID NO: 575 - DNA, 402 bp, Glycine max
  Clone ID: LIB3028-008-Q1-B1-F6
ctatactgcttcaccttctgctctagaaaattcagtgctgaaacatggcttcggctactctctctgtagccaaaccagcccttcaggcaaatgggaaaggcttctctgaattctctggcctccgaagctcatcaggcttccttcccttttctagaaaatcttcagaggatttccattctgtcattgccttccagacctatgcagttggaagcagtggaggatacaagaagggtgtgacagaagcaaaactgaaggttgccataaacgggtttggaaggattggaaggaacttcttgaggtgctggcacggtcgcaaagactcccctcttgatgtcattgccatcaacgacaccggcggcgtgaaacaagcctctcaccttctcaaatacgattccatcctcc

SEQ ID NO: 576 - DNA, 393 bp, Glycine max
  Clone ID: LIB3028-003-Q1-B1-D12
gtttcttacaaggctctactctactgcttcaccttctgctctagaaaattcagtggtgatacatggcttcggctactctctctgtagccaaaccagcccttcaggcaaatgggaaaggcttctctgaattctctggcctccgcagctcatcaggcttccttcccttttctagaaaatcttcagaggatttccattctgtcattgccttccagacctatgcagttggaagcagtggaggatacaagaagggtgtgacagaagcaaaactgaaggttgccataaacggatttggaaggattggaaggaacttcttgaggtgctggcacggtcgcaaagactcccctcttgatgtcattgccatcaacgacaccggtggcgtgaaaaaagcctctc

SEQ ID NO: 577 - DNA, 410 bp, Glycine max
  Clone ID: LIB3028-007-Q1-B1-C11
agaagctggctgatctcagtggaaagggggtgaccacaattatcggaggaggagattctgttgcagctgtggagaaagtaggagttgctagtgtcatgagccacatatctactggtggtggtgccagtttggagttattggaaggcaaagagcttccaggagtccttgctctcgatgaagccgtcccagttgccgtgtaagacaattttcagcttggaaaatttttccatcctcagatttcggtgttgtcaatcttgtaaaagagcatatgttgtaggacccttcggagtctgttagtgtaaattttatcatgcttgagttattattggcttcacacataaattgcgtgtaactgtaaaccctggctgagagccataaattcgaataaatcttttagttgctgccaaaaa

SEQ ID NO: 578 - DNA, 404 bp, Glycine max
  Clone ID: LIB3028-006-Q1-B1-C12
ggaatggaccaatgggagtgtttgagtttgacaagtttgctgttggtacagaggctattgcaaagaagctggctgatctcagtggaaagggggtgaccacaattatcggaggaggagattctgttgcagctgtggagaaagtaggagttgctagtgtcatgagccacatatctactggtggtggtgccagtttggagttattggaaggcaaagagcttccaggagtccttgctctcgatgaagccgtcccagttgccgtgtaagacaattttcagcttggaaaatttttccatcctcagatttcggtgttgtcaatcttgtaaaagagcatatgttgtaggacccttcggagtctgttagtgtaaattttatcatgcttgagttattattggcttcacacataa

SEQ ID NO: 579 - DNA, 400 bp, Glycine max
  unsure (1)..(400): unsure at all n locations
  Clone ID: LIB3028-001-Q1-B1-A12
aaaaaaaccttgggggacctgagcgcggcggacctgaaggggaagaaggtcttcgtcagggccgacctcaacgtcccgctcgacgacaaccagaacatcaccgacgacaccagaatccgcgccgccattcccaccatcaaacatctcatccaaaacggcgccaaagtcattctctccagccacttggggcggccgaagggtgtcactcccaaatacagcttggcgcctcttgtaccccggctttctgagctcattggtatccagattgtcaaggccgaggacagtattggtccagaagtagaaaagttggtggcttctcttccagatggaggtgttctccttctagaaaatgtgaggttttacaangaggaagaaaagaatgaccccgagcatgcaaaaa

SEQ ID NO: 580 - DNA, 292 bp, Glycine max
  unsure (1)..(292): unsure at all n locations
  Clone ID: LIB3028-009-Q1-B1-D4
nngtattgagaactaagaaggacaagcaaatggcttcctcaatgatctcttccccacctgttaccactgtcaaccgtgccggtgccggcatggttgctccattcactggcctcaagtccatggctggcttccccaccaggaagaccatcaatgacattacctccattgctagcaacggtggaagagtgcaatgcatgcaggtgtggccaccagttggcaagaagaagtttgagactctttcctacctgccagaccttgatgatgcacaattggcacaggaagtanaatacct

SEQ ID NO: 581 - DNA, 349 bp, Glycine max
  Clone ID: LIB3028-012-Q1-B1-B8
gttctgtgggtatccttgtttgtttgctcacaaccttatttgcaactgacttctttgagatcaaggctgtaaaggagattgagcctgcattgaagaaacaactcatcatttccactgccctgatgactattgggattgcaattgttagttggattgcactcccaacttccttcactatcttcaattttggagttcagaaagatgtcaagaattggcagctattcttgtgtgttgctgttggtctttgggcaggtcttattattggatttgtaactgagtactatactagcaatgcatatagtccggtgcaagatgttgcagactcctgcaggactggtgctgcaactaa

SEQ ID NO: 582 - DNA, 378 bp, Glycine max
  Clone ID: LIB3028-012-Q1-B1-A6
gttctgtgggtatccttgtttgtttgctcacaaccttatttgcaactgacttctttgagatcaaggctgtaaaggagattgagcctgcattgaagaaacaactcatcatttccactgccctgatgactattgggattgcaattgttagttggattgcactcccaacttccttcactatcttcaattttggagttcagaaagatgtcaagaattggcagctattcttgtgtgttgctgttggtctttgggcaggtcttattattggatttgtaactgagtactatactagcaatgcatatagtccggtgcaagatgttgcagactcctgcaggactggtgctgcaactaatgttatatttggccttgccttgggataca

SEQ ID NO: 583 - DNA, 253 bp, Glycine max
  Clone ID: LIB3028-056-Q1-B1-D5
gttacaagttctcaaaaactgctgtgtaaggtatctttctattttggtctttcaaaatatatgcaacaatattatgttgctccataatttacaaatacatgaatttgtaccctaaaatacatgcaatatcaaatcggttctcccacttcccctcaatgttcgtttcagaatcccacaccaaaaaataagataacaatctaagacgaatgcaaggccacatgagtgacgtttttgtattaagcagataccaagt

SEQ ID NO: 584 - DNA, 389 bp, Glycine max
  Clone ID: LIB3028-056-Q1-B1-D6
atcagaactaagaatttctcagagcctgaaaatctttctgcatatgatggtttggagttccgcctaaaaggtgatgggcgtagatataaaatcattgttcgcacaagcagtgattgggacactcttggttacactgcaggctttgacactgagaaaggaaaatggcaatcaattcaagtgccattttcttccctgagtcctgtatttcgagcaagaacagtgtccaatgctccaccatttgatccaagcattgttgtatcattacagctcatgttcagcaagtttgagtctgatggtaaattaaatgaaacttttgtggaaggtccatttgagcttccggtgtctagcatacgggcatatataaaggatccaataacacccaggtttgt

SEQ ID NO: 585 - DNA, 385 bp, Glycine max
  Clone ID: LIB3028-056-Q1-B1-D7
tttctactcaaaacaaaacaaaacatcaatttctgtttcagttcgcggagatcaatatttgtcgctgaggtcgatcgtcgataaaaggcaatgtttttgtgggattggttttatgggattctaccgtcgcttggcctgtggcataaggaggccaagatcttattcttgggcctcgataacgctggcaaaaccagcttgcttcacatgcacaaagatgagagattagtccagcatcagcctactcaatatcctacatcagaggagttgagtattgggaagatcaagtttaaagcttttgatctcgggggtcatcagattgctcgaagagtttggaaagattactatgcccaggtggatgcaatggtgtacttggttgatgcttatg

SEQ ID NO: 586 - DNA, 385 bp, Glycine max
  Clone ID: LIB3028-056-Q1-B1-D8
tagcactcaccctcattaccaacacgaaagcatagccaaaaccttttttcgaagtctctgattttcctaatggctccggcaaaggcagagaagaagccggcggagaagaagccagcggcggagaaggcaccggcggagaagaagccgaaggcggagaagaagatctcgaaggaaggagggagcgagaagaagaagaagcgcacgaagaagagcgtggagacctacaagatctacatcttcaaggtcctcaagcaggttcaccccgacattggtatttccagcaaggccatgggcatcatgaacagcttcatcaacgacatcttcgagaagctcgcccaggaagcgtcgcgtttggctcgctacaacaagaagcccaacatcacct

SEQ ID NO: 587 - DNA, 383 bp, Glycine max
  Clone ID: LIB3028-056-Q1-B1-D9
ccgcatttccttcccgacgataaccttttcggctctaactcttggaatcagacttggcaatgttgggtggaaataaaagttgagaactcaacacaacaattacgagaaccaaaattgagctgggcaggaaaggttcaggactctaaccagtttttactataggggagcacaaggaatcattctagattggatgaccccaaattgaaatagagtctgttagtcaaggatctcaccatgcaaacgacatcgtatagtcatcctctattctgtttctcttgcagaaacatcagtacaaatgggaagagtaagggttctgtgaaattccgtgcaccatatccctctcaactgggtcggaaatgtggattcaatgggagacctcgtgt

SEQ ID NO: 588 - DNA, 397 bp, Glycine max
  unsure (1)..(397): unsure at all n locations
  Clone ID: LIB3028-056-Q1-B1-E1
gatttgaagtttaaaccttcaaattaatcaaaccattttaatttgcctatagattctgagtcactgctgctatggcgctacgcgtacttcttgtgttggggatgttgctgatgttgtgccttgttaaggtttcatctgatccaaagatagaagaagaaatactggaagcagaagaagaactgcagtttcccgataacgagccacttatcgtgagagacgcgaacagaaggctaatgcaagatatggattgtggtgggttgtgcaagacgaggtgcagtgcacattcgaggcccaacttgtgcactanggcgtgtggcacgtgctgtgtgaggtgcaagtgtgtcncacctggtacatctggaaatanggaactatgtggaacctgctacactgatat

SEQ ID NO: 589 - DNA, 391 bp, Glycine max
  unsure (1)..(391): unsure at all n locations
  Clone ID: LIB3028-056-Q1-B1-E10
ggtggttggtgcaaccctcctttgcaacactttgatatggctgaacctgccttccttcaaattgctgaatatagagctggaattgtgcctgtggccttcaggagggttccttgtgtgaaaaagggaggaataaggttcacaatcaatggccactcttacttcaacctagttttgatcaccaatgtggctggagctggtgatgtgaattcagtgtccattaaagggtccaaaactgggtggcagcccatgtcaagaaactgggggcaaaactggcagagcaactcatacctcaatggacaatcnctctcttttcaagtcaccaccagtgatggcagaactgtgacaagcttcaatgtggcaccagccaattggcaatttggccagaccttcc

SEQ ID NO: 590 - DNA, 400 bp, Glycine max
  Clone ID: LIB3028-056-Q1-B1-E11
gcccaaagctagccatgcacttcaaataaaaccccacctccctcccctcattccaacacaaggctacgtacgtcacctttctctctctccatttgtctctgatcttccaacaccttctccagagaagagacaaaatggatcatcattccacttccaaaacctctctcattcttttcatatccctctcctccctcctcttcctcgcaaccgccacgcgcaacatccacatcggccgtcccgacatccactccgacatcaccgaattctgcaagaaaaccaccaaccccgccgtctgcgcccagaccatccaaccccacttcctcaaaaacaacctcgaccccttaaaggcactcgacgtcgaagttgatgccacactggcctctgccaaaaaaaccctaat

SEQ ID NO: 591 - DNA, 402 bp, Glycine max
  Clone ID: LIB3028-056-Q1-B1-E12
ctaatcaataccgcaagggtccaagcccaacgctacacatacgcctatcaagagcccatgccagttgagcagttagttcagtctctctgcgataccaagcaaggttacacccaattcggtggtcttcggccatttggagtttcgttcctatttgcaggatgggacaaaaactttggctttcagctttacatgagcgaccctagtggaaattatggtggctggaaagctggagccattggggcaaataaccaggcagcacaatcaatactgaaacaggactacaaggatgacatcacaagagaagaagcagtacaacttgcattgaaggtgttaagtaaaaccatggacagcacaagtctaacctcagaaaagcttgaacttgcaaaggttttcctttcaccc

SEQ ID NO: 592 - DNA, 390 bp, Glycine max
  unsure (1)..(390): unsure at all n locations
  Clone ID: LIB3028-056-Q1-B1-E2
gcaatcttgcagctacatatgatgctatgggaagagtgggagatgcgattgaaatcttagaatatgtgctcaagttgagggaggaaaagcttggaatagcaaatcctgattttgaagatgagaagcgtcgtctggccgagcttctgaaagaagcaggcaagacacgggacagaaaagcaaaatctctggaaaaccttattgatcctggctcaaagaggacaaagaaggagggggcaaagaggtggcctggtttggggtttagaatttaaccatatttttgttcattaatatatatattgaatgcacattctgtaacatacgatatcttgtatagggttgaatttgggaaggagcttccctgtntcttgaaaattgttcatgcatttgttt

SEQ ID NO: 593 - DNA, 398 bp, Glycine max
  Clone ID: LIB3028-056-Q1-B1-E3
cgagaacaaaaaaaaaaaaaaaaaaaatccgcgattcgctcttctcttggaaaagtgaaaaccagaagtacgaacgaaagagaagagcgatttagaagtgagagaagatggggttgtcgttcacgaagctgttcagcaggttgtttgcgaagaaggaaatgaggattctgatggtaggtctcgatgctgctggtaagacaaccatcttgtacaagctcaagcttggagaaatcgtcaccactatccccaccatcggatttaatgttgagactgtggagtacaagaacatcagcttcactgtgtgggatgttggtggtcaggacaagatccgtccactgtggaggcattatttccagaacactcagggtctcatttttgtggttgatagcaatgataga

SEQ ID NO: 594 - DNA, 393 bp, Glycine max
  unsure (1)..(393): unsure at all n locations
  Clone ID: LIB3028-056-Q1-B1-E4
ctctanggaatcaagaaaattattataccctttaagatgaaaccgtacctacgtgcaatattcctattattccttatccttctcgaccaatccatttcggcgagtgcttttttaaatttaaatggattgctaaacattgaaaagtggccctctggcgagaaaagtttggaaatgggaaagatagggaaggagacgacagatcatatcaaagaccttttaaagaaactgattgagtcccctcccgaaccaccgaagcaaatcaatattgaagttgaaggcctgtctgtcgtcaaggattacttatctgactacggctacattgaatcctctgggccatnttacaatattttcgaccaggaaacaatgtcagccattaagacctaccagaaattt

SEQ ID NO: 595 - DNA, 375 bp, Glycine max
  Clone ID: LIB3028-056-Q1-B1-E5
cggttgagtcatacttggaacaaattttatcacatggtttcttccatgctgaccctcatcctggaaatattgcagttgatgatgtcaatggtggaagattgatcttctatgattttggaatgatggggagtatcagtccaaacattcgagaaggtttgctcgaaacattttatggggtttatgagaaagatccagacaaggttctacaagcaatgattcaaatgggagttcttgtccccactggagatatgactgctgttagaagaacagcacaattcttcctcaacagttttgaagagcgcctggctgcacaaaggagagagagagaggaagcaacaactgaacttggattcaaaaaaccattaagcaatgacg

SEQ ID NO: 596 - DNA, 384 bp, Glycine max
  Clone ID: LIB3028-056-Q1-B1-E6
gaaagataaagcattccatagcctcccataaaaatgaagaatactatcttctctgctctctttctactttgtgccttcaccacctcatacctaccttcaaccaccgcggtggtcgataccgacggtgatattcttcagaatcctggcacatactttatcttgtccgtttttcgacccggcggcggagtagaattcgccgccactggaaacgaaacttgccctctcactgtcgtgcagactctcttcgggaggggctttccagcaatattatcgtcccggttacgaatccctttcatcggcgaaggacaactcttcagcatcctgttccgtattgtgccatggtgcgccaccactccttctaagtggaccattgtggagggttta

SEQ ID NO: 597 - DNA, 392 bp, Glycine max
  Clone ID: LIB3028-056-Q1-B1-E7
cgactcgatattggggcagtgctgcgagatgccgatagggttcgtgcagatccccgtgggagtagcggggccattattgttggatggaaaagaattcaccgtgcccatggccaccactgaagggtgtctggttgcgagcaccaacagaggttgcaaagctatatacgtctccggtggggcctcctcggtgttgcttagggatggtatgaccagagcacccgttgttcggtttccctccgcccagcgcgccgcgcagttgaaattcttcttggaggatcctctcaacttcgattctcttgctgtcgttttcaataagtcaagcagatttgccaggttgcagaatattcagtgtgctattgcgggcaagaatttgtacatgagattccgatgca

SEQ ID NO: 598 - DNA, 394 bp, Glycine max
  unsure (1)..(394): unsure at all n locations
  Clone ID: LIB3028-056-Q1-B1-E9
gaggtgcctcatcgacccttcagatcctccatgtctcgtctgcactcaatctctctccctcccacctcacctaaaccctaactacaggtgcaatacctctctgttaatcgattattactctcaaagcgacgccactcacaaatatatattgatcgacgctggcaagaccttcagggagactgtacttaggtggtttgttttccatcacattccaagaatagattctattcttttgactcatgaacatgctgatgcagtccttggattggatgatatacgagctgtgcagccgtttagtcncactaatgatattgatcccacccccatttacttaactcggcattcaatggatagcatggaaaaggtgtttccttatttggttcaganaaaacac

SEQ ID NO: 599 - DNA, 397 bp, Glycine max
  Clone ID: LIB3028-056-Q1-B1-F1
ggtgaggtcagcggggttttccttgacactttgcttgaattcgctgaggatgagaccatggagatcaaaatcaccaaggaccacatcaagggtcttgttgtcgactttttctcggcaggaacagactccacagcggtggcaacagagtgggcattggcagaactcatcaacaatcctaaggtgttggaaaaggctcgtgaggaggtctacagtgttgtgggaaaggacagacttgtggacgaagttgacactcaaaaccttccttacattagagcaatcgtgaaggagacattccgcatgcacccgccactcccagtggtcaaaagaaagtgcacagaagagtgtgagattaatggatatgtgatcccagagggagcattgattctcttcaatgtat

SEQ ID NO: 600 - DNA, 399 bp, Glycine max
  unsure (1)..(399): unsure at all n locations
  Clone ID: LIB3028-056-Q1-B1-F10
tataccttcctctattggccgtctctcacatttgcaaattatgaacttgtctaccaatttcttctctggtgaaattcccgacattggagtattaagcacctttgacaagaactcgtttgttggcaatgtagatctttgtgggcgacaagtccaaaagccatgtcgaacatcacttggtttccctgtggtgctaccacatgctgaaagtgatgaagctgcagtccctaccaaaaggccttcacattacatgaagggggtcctaattggagcaatggcaattttgggtctcgcacttgtcataatcctttcattcctctggactcgtttgttatcaaagaaggaacgagcagcanagagatacactgaagtcaagaaacaagctgatccaaaagcaagcac

SEQ ID NO: 601 - DNA, 390 bp, Glycine max
  unsure (1)..(390): unsure at all n locations
  Clone ID: LIB3028-056-Q1-B1-F11
aaaggagaagatgaaatgggatatgcagatggaggaaatcgaagcgattatggagaaaatttgggacctccacgataagctcagcgacgccattcactccgtctccagatcccactttctcacttccgtcaaaaccctcaaactcaacaactctccaccgcaccttcccaacgccgccgtcgccgctgccgatgaccgctcctccggtttcgttttcgtcaaggactttagaccgctcgccgtcgccgataacgacaacgatgacgatgactccgccgtccgcgaagccaagagcctcaacgccatccggaccgccctcgagaacctcgaagaccagctcgagttcttccatactattcanacccagcagcgtgttgagagagatgccgc

SEQ ID NO: 602 - DNA, 393 bp, Glycine max
  unsure (1)..(393): unsure at all n locations
  Clone ID: LIB3028-056-Q1-B1-F12
tgaatttgttgttgaagatgtgtccactcagcacgtaactgttaaagtttatgattctgagggtttacagtcatctgaattgattggatgtgctcagctacagcttagtgaacttcaacctggtaaagtaaaggatgtttggttgaagttggtcaaggatttggagattcaaagggatacgaagaacagagggcaggtacatttggagctcttgtactgtccatttggcatggagaatagctttacaaacccatttgctcccaactactcaatgacatctttggaaaaggttcttaaaaatgcgaatggagtanagtctaatggaaatgaaaacgcagttacccaaaagaaaaaggaggttattattagaggagtcctttctgttactgtaat

SEQ ID NO: 603 - DNA, 379 bp, Glycine max
  Clone ID: LIB3028-056-Q1-B1-F3
caccgattcattaacttcacacacagacacggtgtttccaccacaccatagcatatagtactagtagattaaacgccaaagaaataaattactcactttcacgtaaaccataacgtgcttccaccgcaaccaaccacaatgggtgccgttaggtccataacggtgttgctactagtgttatttatggccatgagctccggcgtgcgctcgtgtccgccgtcggacagggcggcgctgctggcattcaaggcggcgctccacgaaccctacctgggaatcttcaactcgtggatcggcgccgactgctgccacaagtggtacggcgtgagctgcgaccaggagacccgccgcgtcgccgacatcaacctccgcggcgagt

SEQ ID NO: 604 - DNA, 376 bp, Glycine max
  Clone ID: LIB3028-056-Q1-B1-F6
gccctatctcatagggtttccaccctctctctcatgcatttttgctctcacgagttcttctttgccgttgccctcttattctttgctgtatttggagccttcttttgtgtggaacagagcagatttcacctccctgggttttttgaaccgtgcccatgtctaaagttttcagctttaccggaaatgatgatttctaccatgggggccctatttatcctaacccgaaggaaccatgtctcttcttgtctcttggccgtcaagttgatgtttaccttcctcttcagaagaggtctcgcttcagtgttccatttgatatcagcggagaatggtttgagcagaagcagaagccaaagacatctattgaatctttgccaga

SEQ ID NO: 605 - DNA, 393 bp, Glycine max
  Clone ID: LIB3028-056-Q1-B1-F7
acttgccttatttttggttttgagattgagctaaaggccaactcaaccatcgaatttgttggtgattgaaagagaaggaagaagaagcaggaaatggaagcagtgagagctggtcgagaaggagcaataggtctaggtcaaggtgatggcgtagccaaggacagcactgagactgaactcaccaaaatccgtctcctcagggcaattgttgaaacccgtgatccctcttccaaggaagaggatgattttatgattagaagattcctgcgtgctcgtgatttagatgtagagaaggcttcggcaatgctcctcaagtacttgaaatggagaaattcatttgttccaaatggctctgtatctgtgtcagatgttcctaacgaacttgcacaagat

SEQ ID NO: 606 - DNA, 395 bp, Glycine max
  Clone ID: LIB3028-056-Q1-B1-F8
aggtctactctaaaggatactctcggggaattccatgttccacattttcatgatataatgaggctaaaaggttcatctatgatttggattgatgtgttttcttattaagcgtatcctgaacccgaaggagatgagatgggaattcctcggggaattccaattcgacatgttcaagagatggcgatgccaaggtgttcatagatgaagtggacataattgtctgcctcgtcagggtatctggtgaccaccggaattgagattcgaatgcctcggggaattctaattccacattttccctgcgtgcagatgcattagtggtcatgtatgcttcggcaatacttctcatgttattacgctgaacatgatcccttgggcaatgaggatccgatatccgt

SEQ ID NO: 607 - DNA, 399 bp, Glycine max
  Clone ID: LIB3028-056-Q1-B1-F9
ctgcaattacgatggcgcccagggacaagactagtgccgttaagcctagcggtaacgccggggtgaaggacctgcattttcgtggagtcaggaagagaccgtgggggaggttcgccgccgagatcagagatcccgccaagaagacccgcgtctggctcggaaccttcgacaccgcggaggaggcggcccgtgcctacgacgccgccgcgcgggagtttcgcggccctaaggcgaagacaaacttccctctcccttcggaaaattttaagaacgcgagccctatccaaagcagcacggtggagtcctccagccgcgaccgcgacgtcgccgccgattcctctccgctcgacctcaacctcgcccccgtcgccgtctcctccgctcgattccccttccgga

SEQ ID NO: 608 - DNA, 397 bp, Glycine max
  Clone ID: LIB3028-056-Q1-B1-G1
gttgatttaattggaaagccaggaaacttatccgagcctgattccttgctcaatggtccatcttccatctcattttcttcacccttgcgctttccacgacttaaaccagctgaaactaccattgatttcaggtcactggccaaacagtatttctcggactgtgtgtctcttgagcttgtctttgacaacaattctgcagaacagtttgatgggaagtgtaaagacaggaataaccctaggccaattttgactgacagcaatagaagttctcaccttcctctgcatcctcaagattctcatccaagctcacgggaacaaggttccgaaacatatcaatcatgtaaccctcctcagaacattgtagactcgactgtgggaaagtatccaccaccaataa

SEQ ID NO: 609 - DNA, 380 bp, Glycine max
  Clone ID: LIB3028-056-Q1-B1-G10
aaaaaaaatatccatagtataaattaatgacaattatttagaacacatggcttaaggtcaaacagaatgatacaacttacagctgatctggaaagacaacaaagcaatgaatcgagagatccctaaaaacacagaaaaaacgtcttccctagtatataaagtgcctcaacatcaaacacgactctcgcctcgaaggcctcatcaagatggcagatctcactattaatctggctgcgatttgcactcccgcggattacaacactcgccctctcgacaccatttacagcaatttcatcgacgcgctccccgtggtgaaatactgttccgagaacaacaagcgccttatccatttctccacttgcgaagtgtacgggaaaacg

SEQ ID NO: 610 - DNA, 398 bp, Glycine max
  unsure (1)..(398): unsure at all n locations
  Clone ID: LIB3028-056-Q1-B1-G12
tcacctgaaccctgctcactacattagtgagattattagagaaggcactaaaaatggcactgctttctttaagtgccatggccatgagcaatttgagatgacaggtttggaccctgagtataatagattgttcaatgagggcatggtgtgcactgctagggttgtgtccaaggctgtgatcactgggtacaaagatgggttcaaccagattaagtccttggttgatgttggaggtggcattggagggtctctttctgagattgttagggcttatcctcacatcaatgccatcaactttgacttgcctcatgtggttgccactgctcctaagtatgatggaatcacncatgttggaggtgacatgttcgtgttcattccagatgctgatgctatttaca

SEQ ID NO: 611 - DNA, 396 bp, Glycine max
  Clone ID: LIB3028-056-Q1-B1-G3
attgcttccctctatcgtcttctccccccttccttcaatggtcctaagggttccggggtccaggcgtaacagctccgcactaatgcgcttttggaacccgtgttcatctgtatccaacgatttactagaaggaggtcgcaatttctccatcttcacatttcgctagcacgtgaaatcaaaagttatcgacactttcgcgcgacacgaaatattgggaaccaagcaaaatatctatggctgacgaaccattatatccaatagcggtgcttatagatgagttgaaaaatgatgacatccagctgcggttaaactcaattcgtaggctatcaacaattgcacgtgctcttggggaggagcgaacccgtcgagaattaattccatttttaagtgaaaata

SEQ ID NO: 612 - DNA, 350 bp, Glycine max
  unsure (1)..(350): unsure at all n locations
  Clone ID: LIB3028-056-Q1-B1-G4
ctctcacacaaaataatggacaagaagcttggcaacacgtctcatgatcctgaagtgagaaaggggccatggacaatggaagaagacttaatcttgatcacctatattgccaatcacggggaaggggtttggaactctttggccaaggctgctggacttaaacgtaccggaaagagttgccggctccggtggctaaactacctccgtcctgatgttagaagagggaatattacacccgaggaacagcttttgatcatggaacttcatgcaaagtggggaaacaggtggtccaaaattgccaagcatctacccggaaggactgataatgagattaagaactactggangac

SEQ ID NO: 613 - DNA, 116 bp, Glycine max
  Clone ID: LIB3028-056-Q1-B1-G5
atttcattatttatttcaatattagataatgcagaataattgtctatttttaaattttcttttcccctgtatcctaccattttttaaatagaaaatatcctaccaattttagattc

SEQ ID NO: 614 - DNA, 238 bp, Glycine max
  Clone ID: LIB3028-056-Q1-B1-G7
tcgcaatcaacgcgcatttcagacgcgtctacatccgtcacgagcaccttgatagcacggagtttccccctttcaccatcctcacagtgcgctcgcgttctgacactgacgtttaccggacattcgcccgacattatctcttcgggaagcgtcacgatttctatggctgacgaagcattagatccaagatcggtgcatgtcgatcacttgaagtttggccgtgtccatctgccgttcg

SEQ ID NO: 615 - DNA, 390 bp, Glycine max
  Clone ID: LIB3028-056-Q1-B1-G8
agaacttcaactgagggtgagagtgacacaaatctagggagcactactctaaaagttctattagattcttcaaaacatgaccatgcatcgcgagtcttgggcttttgtcttcggcgttatgggcaacatcatctcctttggagtgttccttgctccattgccaaccttttaccaaatctacaagaagaaatccactgaagggttccagtcacttccttatgttgttgcactgttcagtgcaatgctttggatttactatgctttcgtcaaaagggaagctgccctccttctcattaccattaacacatttggaattgttgtggagtcaatttaccttgcaatcttcctactttatgccccaaggaagcctaggcttacaaccatcaagct

SEQ ID NO: 616 - DNA, 387 bp, Glycine max
  Clone ID: LIB3028-056-Q1-B1-G9
cgttctttctctcgcaatcttcactacattcaccgagcatttgcattcacattgaatatggctgagactacacaatctaatgctgagttgttggagtggcctaagaaagataagcgccgcttcctgcatgttgtgtatcgtgttggtgatcttgatcgcaccattaagttttatactgaatgttttgggatgaagcttttgaggaaaagagatattccagaggagaaatatgccaatgcttttcttggatttggccctgaacaatcccattttgttgtggaattaacatacaattatggggtgacctcatatgatattggaactggatttggacattttgctatcgcaactccagatgtttacaaattggttgaagacatccgggct

SEQ ID NO: 617 - DNA, 397 bp, Glycine max
  Clone ID: LIB3028-056-Q1-B1-H11
aacgccgttgccaaaaaatagatacttgtttcttattcacgtagtattttaatacttagtcaaacacgatagcatgaacccaagatttttgacaattgtttctcaacaagagagattttgattttagcagacaagcaatggcaagtgcgttgggtagcagagttgaatctgttcgaaactctcacttactaagcttttcgctcaactccattagatccttgagttcatcttcgtcatccgccgtttcttctgctcagaaccctaagactaagaaatcgaagcgaagaaagaagaacttgttcgatgtggctcagttcttacctaactggggaatcggctaccacatggccaagactcactggaatgaagtttcttacgaaatcactagaatcaatct

SEQ ID NO: 618 - DNA, 349 bp, Glycine max
  unsure (1)..(349): unsure at all n locations
  Clone ID: LIB3028-056-Q1-B1-H12
aaatagcaagagagaaagggttggaattggaaatatcttaccggagaatgggcgacggcagcatcgtgggccacctgccggaggagattctgttgaacgtgttctccgccgtgtccgacacgcgcacgcggaacgcgttgtcgttggtgtcctggagcttctaccacttagagcgcaagacgcgcacctcgctcacgctccgcggcaacgcgcgtgaccttcatctcatcncgacctccttcaagcacgtcacgcacctcgacctctccttcctctcgccttgggggcacgcgctcttttgctcctcctctgccaacggtcggcaacagagcctcctcgcgcaacaact

SEQ ID NO: 619 - DNA, 396 bp, Glycine max
  Clone ID: LIB3028-056-Q1-B1-H3
tttgcaaccattaaccatctccactttcaggcatattacttggctctgccttttccaattgagaaggcccctactaagaaaattgccaagttaagcggtggagtgaaaatatctaaactgttaaactatcctgtcagaggccttgtctttgagggcggtcattctctagagggtttagcaaatgttgtttcagaagcctgcatctgccttcagcacaacaacataccttacaatatacttatttcagactgtggaaggcaaatctttctcttaccacagtgctatgcagagaaacaagcccttggagaagtgagtgccgagcttctggagacacaagtgaatcctgctgtgtgggaaatcagtggtcacttggtgctgaagaagaagaaggactat

SEQ ID NO: 620 - DNA, 392 bp, Glycine max
  unsure (1)..(392): unsure at all n locations
  Clone ID: LIB3028-056-Q1-B1-H5
aaaagcatgcatatacggcatccagtacggtgacagttcgttctccgttggctacttcagccgcgagcggctctccgtgaccgccaccgacatcgtcgacaacttcctcttcggttgcggccaaaacaaccagggcctctttggtggctccgccggcctcatcggcctcggccgccaccccatctccttcgtccaacaaaccgccgccgtatatcgtaaaatcttctcctactgcctcnccgccacctccagctccaccggccgcctctccttcggcaccaccaccacttcctacgtcaagtacacccccttctccaccatctcccgcggctcctccttctacggcctcgacatcaccggcatctccgtgggcggcgccaaactcccagtct

SEQ ID NO: 621 - DNA, 393 bp, Glycine max
  Clone ID: LIB3028-056-Q1-B1-H7
gctggacattacattccagctcttgcatccagggttcaccaaggaaacaaagcaaaagaaggaattcatataaatctaaagggatttgctattggtaatgggttaaccaatcctgaaattcagtaccaggcgtatacagactacgcattagacaggggactaattaaaaaggctgaatataacagtatcaacaagttgatcccaccatgcaagcaggccatagaagcttgcgggactgaaaggtggagaaacatgcgtatcttcattatatgtttgcaataagatattcaatcggatcatgaccattgctgatgatgttaattactatgacattagaaagaaatgtttgggagtctcgtgttatgacttctctgtgatggaggatttcttaaa

SEQ ID NO: 622 - DNA, 350 bp, Glycine max
  Clone ID: LIB3028-056-Q1-B1-H9
atcaatggcaccgaaacagaccaaggctgagaagaagatcgcttacgatgcgaagctgtgcgacctaatggaggagtacggccaaatcctcgttgtaaactccgacaacgtgggatcgaaccagctccagaacattcgcaagggtctccgcggcgactctgttgtcctcatggggaagaacaccatgatgaagcgctctgtcaggatgcacgctgagaaaaccggaaacaatgcctatctcaaccttatccccctccttgtcggcaatgtgggattgattttcaccaagggtgacctgaaggaggtcagtgaggaggttgctaagtacaaggttggagctcctgctcgtg

SEQ ID NO: 623 - DNA, 197 bp, Glycine max
  Clone ID: LIB3028-056-Q1-B1-D4
caatcttccagccgaggatgccaaatatgtgaggtgcattacttgcgattggtggttttgatggacttcaagggtgctgttgagtcataaatttgtaaatataacaagttaaattatcgtttgatgtttccctccacctggtttggccttattttactttgccattttgtggtttatgcaaattatattttgacttc

SEQ ID NO: 624 - DNA, 266 bp, Glycine max
  Clone ID: LIB3028-053-Q1-B1-F4
cgaggtagactatgaaaagattgtccgcgacacatgccgcgaaattggattcatctctgatgatgttggtcttgatgctgacaaatgcaaggtgttggtcaacattgagcaacagagcccggatatcgcccagggtgtgcacggccacttcaccaagcgcccagaggaggttggtgctggtgaccaaggtcaaatgtttgggtatgccagcgatgaaactctcgactacatgaccctcacccatgtccttgccaggaaacttggtg

SEQ ID NO: 625 - DNA, 233 bp, Glycine max
  Clone ID: LIB3028-053-Q1-B1-F5
ccggaagaggaagatttctagtgacgtcaacatcacgatggatcagaaaatatacacatgtgagcatcaccaatgctgttaaatcgaagttcgccttggtcacgatgataagtttgcaagggagaatcatcatatgaactgtgtatacacactcacttctggatatgatggtcgtggtctgaaattctgtgctagtgaagataagccagtgatagtccacgagtcccttgtgc

SEQ ID NO: 626 - DNA, 322 bp, Glycine max
  Clone ID: LIB3028-053-Q1-B1-F6
gaaattacctctaggttgttaggaaggaaaggaggttattctgggacgattgttcttctcacaaactcagccatcggatacattctacaggaacgttcttcatgactatttggtacaaatgatacctcaacataacacctgtgtgtagacactctctgtctgatgtggtgtgctgaatctgcgagactgttttgtgccaactaacatggggacgtgccaggatacgcgaatgttgctcatttatgaagaacggacatctgatggtttgttatacacacttctcgttgtcaatgatttgacattttcggttgttaagtttttg

SEQ ID NO: 627 - DNA, 168 bp, Glycine max
  Clone ID: LIB3028-053-Q1-B1-F8
tacagatgaagatcttgatagaattattgctaaaggagaggaggcaactgctgagctagatgccaagatgaagacatttactgaccatgccgtcagagttaacatggatgacactgtcgagttatatgagtttgacgatgatgttgatgcagccacatggcgattcgc

SEQ ID NO: 628 - DNA, 323 bp, Glycine max
  Clone ID: LIB3028-053-Q1-B1-F9
caagtagttgagaactaagaagaaggaaatggcttcctcaatgatctcctccccagctgttaccaccgtcaaccgtgccggtgccggcatggttgctccattcaccggcctcaaatccatggctggcttccccacgaggaagaccaacaatgacattacctccattgctagcaacggtggaagagtacaatgcatgcaggtgtggccaccacttggcaagaagaagttcgagactctttcctacttgccagacctcgatgatgcccacttggcaaaggaagtcgaataccttctaaggaaaggatggattccctgcttggaat

SEQ ID NO: 629 - DNA, 178 bp, Glycine max
  Clone ID: LIB3028-053-Q1-B1-G1
cagaatttgtgtttaagttggaatcaggagaagatactgcagtcattcagagggcactaggtgagcttatggagcaggttgttttactcttgcaacttgtagatgcaagaaaaaaacaactgaatttccctgtaattctgatgagagagttgaaggaaactatgccagcagttgtaag

SEQ ID NO: 630 - DNA, 278 bp, Glycine max
  Clone ID: LIB3028-053-Q1-B1-G10
gggttcacgaatggaagcggatccacgaggaagagagtttacagaggtggaccctctcggatggacatgctacccataagaaggagaagctctacgtatacgagatcgagagtcgtggacctcgtaactggtccctcatcatcaggtccatcccgggccgctctggcaactcctgtaggctttactggtgcacgcagctgtccccttcaggctcgcgcactcggccttcaaccactaatccgacgacaccactatcccggccccatgcccccttcggc

SEQ ID NO: 631 - DNA, 332 bp, Glycine max
  Clone ID: LIB3028-053-Q1-B1-G11
cgaaaatatttccatgggccggaacattccccctaccttcaagtctaaagagacttacagagttattgtgggagaaaattagtgatcctaaaagtattgctgaggtacttagtcaggtttatgcagatcattcaacaaacgtagataacgttttttcacgcatagttgaaaccacacggcatccagctgctgcagcgtcatttgcttcaatcatgtttgctcctcaaggagaactatcctttaatgacacattatccagatgtcgagcaaacactgtgccaatctgcctcatgtatggaaacgaagatctctgggttcgggccaacttgggg

SEQ ID NO: 632 - DNA, 323 bp, Glycine max
  Clone ID: LIB3028-053-Q1-B1-G12
cgcacgttagcacagcgtatcattgccatggcaacatggaactgcgcatctctctccttgacgggacgcgtctccttgacgtggactcgggatcaagctggagtcatcagccacacaggtgcgacgggtgcgcatgacgaacaccgtcaccaggcacgtctccacaggaagcccatggtacggcccagactgagtcaagtacttgggcccattctctggcgagcccccgtcctacctaaccggtgagttcccaagcgactacggctgggacactgctgggctttccgcagaccagaagacttcgccacgaaccgtgaactcga

SEQ ID NO: 633 - DNA, 222 bp, Glycine max
  Clone ID: LIB3028-053-Q1-B1-G2
actcaactttgtaattcgtggagggaatacttttccattacgcacgcactttaattacagacgagaaaattataattaatagtaatacagacagcagcatgcgcccaccggttattctcaaaactaccacctctcttttggattcttcctcttcttcaacaccctgtgatcgcagactcaacactctcgctagacacttcctttccgcaaatggcttctcac

SEQ ID NO: 634 - DNA, 285 bp, Glycine max
  Clone ID: LIB3028-053-Q1-B1-G3
ctcttctttattccttttgtaatttcattcattcttaatctttgtgaaaaataatgttcatcgagaattttaaggttgagtgtcctaatgtgaagtacaccgagactgagattcagtccgtgtacaactacgaaaccaccgaacttgttcacgagaacaggaatggcacctatcagtggattgtcaaacccacatctgtcaaatacgaatttaaaaccaacatccatgttcctaaattacgggtaatgcctgttggttggggtggaaacaacgggcccaaccctc

SEQ ID NO: 635 - DNA, 267 bp, Glycine max
  Clone ID: LIB3028-053-Q1-B1-G4
ggagggtgccaatctggtaaagttgtcgatcataattataaggttattggtgttgaagctttgagggtaattgatggatccacttttcatggctcaccgggtacaaatcctcaagctactgtaatgatgcttggaaggtatatgggagaaaagattataaaggaagattcttccataggcggaagtgaagggatcaattgagttcatactttccgttgttccatatttgtgttgttcttcgcaataattctctcacgaatcacaatt

SEQ ID NO: 636 - DNA, 331 bp, Glycine max
  Clone ID: LIB3028-053-Q1-B1-G5
gagttattgacagcatatgactcgcaacgtagggagttgccaccaccagtaattgtgtgggaatggggatggaccaaaagtgctgaaacttggaatggaagagcagctatgcttgctgtgcttcttctgttgtttttagaagtcaccactggtgaagggtttctgcaccagtggggaatattgcccttgtttaggtgagtgagtcctcagctaccctccatggcaatggaatttagttatgcttgtatatgtataccattagcatcatatgcgccttgacggaacgcattcaggagttctcacatgtagtttagacacagtaatttgtgga

SEQ ID NO: 637 - DNA, 157 bp, Glycine max
  Clone ID: LIB3028-053-Q1-B1-G6
tttcgagttgcgccattttcacctgtcctctctctctctctctcactctgtcaccgtgttgcaagtatgaaggactgttggttttttgacaacaatttcaatggtctgtcggatgagagtcttgatgagtgtgattgacaaggagcttttggatttg

SEQ ID NO: 638 - DNA, 253 bp, Glycine max
  Clone ID: LIB3028-053-Q1-B1-G7
caaattagttcattctctttgcgcagttccctacctctcctttcaagatgcagatcttcgtcaagaccctcaccggaaagaccatcacccttgaggtggaaagctctgacaccatcgacaacgtcaaggccaagatccacgacaaggactgaattcccccggagtagcaacgtcgcatcttccccggaaaccacctcaaggacggccgtaccctcgccgacagcagcgtcagaagggattcacccctgcacct

SEQ ID NO: 639 - DNA, 336 bp, Glycine max
  Clone ID: LIB3028-053-Q1-B1-G8
cgtgagtcaaacttgcagaaagagctgaaccgatacattcccacggccgcagcatttggaggcatctgtatcggtgctctgacagtgttggcagacttcatgggggccatcggttcaggaaccggaatattgcttgcagtaacaatcatctatcagtactttgagacatttgagaaggagagagctagtgagcttggcttcttcggtttctaagttctgccaagcaaataatgttggttggtgactccaacgagctctcccacaccccttgtttgagggatcgttatacttgtatgtcgtttaacatcgtccgggaggacattcctagttcgttgt

SEQ ID NO: 640 - DNA, 384 bp, Glycine max
  Clone ID: LIB3028-053-Q1-B1-G9
gttttctgtagcttcaggaattaccttcagtttttatcacttttcttgcatggagcatgggggaggtcattagatattcacattatgctttcggttgtttgggaaattgtccttcttggatgacctatctcaggtacactgcgtttattgtgctgtatcctttgggagtgggtcctggtgaaatatgggctctgtaccaggctcttccagttatactggagaagaatctctatgcagattccttttcaagcctcccatttagttattctgatttccttaaggtataagtaatcaataacccataatctctaacggatctggtacttgacatcacttatttatgggttttttgcttctcctaatgattcggccatttgattccgg

SEQ ID NO: 641 - DNA, 344 bp, Glycine max
  Clone ID: LIB3028-053-Q1-B1-H1
gcagatcttcgttaagaccctcaccggcaagactattaccctagaagtcgaaagctccgacaccatcgacaacgtcaaggctaagattcaggacaaggagggaatccccccagaccagcagaggctgatcttcgccgggaagcagctcgaggacggacgcacccttgctgactacaacatccagaaggagtcgactctccacttggtgttgcgtcttcgtggtggtatgcagattttcgtgaagactcttacgggtaagactattaccctcgaggtggagagctctgacaccatcgacaatgtgaaggccacgattcaggacaaggaaggcatcccaccggacc

SEQ ID NO: 642 - DNA, 295 bp, Glycine max
  Clone ID: LIB3028-053-Q1-B1-H10
catgaatacgtaagttcgggaaaggttttgcaccatacaatggagtgctcatccttgccttatcgcctgggagcagcatcttccatggctctctcatccccatccttggctggcaaggacatgaagctgggctcatcagccccagacgtgggaagggtgagcatgaggaagaccgtcactaagcaggtctcctcaagaagtccatggtacggcccagatcgagtcaagtacttgggcccaatctctggcgagcccccgtcctacctaaccggtgggtttccaccgcgaactatgg

SEQ ID NO: 643 - DNA, 346 bp, Glycine max
  Clone ID: LIB3028-053-Q1-B1-H11
ggaagctttacagaaacttggatccattccatcgagcagattattggcagttgaggtgttatggacaccacagaatgagaacgatactctctcagaacgtgagttacttgaagattacccacttttacggcctttgtaagttgtgaaggtatgcttgtcattctgcttctagccttctagagctatgaactgaaattgggttgtgattgcacaattaaggatcatctccagtagtactgaactaatatcgttaaaactgatgagattgtcctgctactcaatctgcaaggcaattttcagctgcggctaatgacgttgtatcacttatcaaggttcaatattaaat

SEQ ID NO: 644 - DNA, 59 bp, Glycine max
  Clone ID: LIB3028-053-Q1-B1-H12
ggtttcatgtttattgcattgatctagacatttgattttgcaaccttcatggtatgtat

SEQ ID NO: 645 - DNA, 393 bp, Glycine max
  Clone ID: LIB3028-053-Q1-B1-H3
aacatatcaatgggcagtatcatagcagtcttcatgcagcaagcactccagatctggggttcctaaacttgatgcagggttttcgaggagctcaatcatattaacatagtgaccatcttgataagtgcttatctagggcacggatttgaacaatggagcagtttggataaaatgattattcgtttatttgtcattgaaaactgacttggatatttatactcctggatgtttgagtgccatatgagaagcagccttctctgacacaagattcatctgcaaatttaaaatggctagaaacccgtccttctgatcatacgcaaaccatgttggttgttacaaacgtgtggcaatggagaccacataactcagtaagctgtatccatgattcaactc

SEQ ID NO: 646 - DNA, 94 bp, Glycine max
  Clone ID: LIB3028-053-Q1-B1-H4
tgattcggctcgagtaattttgcaagtggggtgttgtaaaatgtacctttgttgatgaatattgagatgtaaaaaaagtctcgacatataagag

SEQ ID NO: 647 - DNA, 382 bp, Glycine max
  Clone ID: LIB3028-053-Q1-B1-H5
ggcaagttatttctctgtctctctctatttgcttctccgttttgaatgaaggaacgtgctgcgtgttttgtttgctgagatgtcacgatttgctgcaactttagggctctgagctggaatttggacttacccttttttcttcttcgagattttctgcactgcttttcgtcccttgattcaggttaatttgcaatgaccgaaccttccaaggtcattcacgttcgaaatgtgggccacgaaatatctgaaaatgacttacttcagctgtttcagccttttggagtcataacaaagcttgtcatgctgcgtgcaaaaaatcaggctcttatccaaatgcaagatgttccttctgcagttaatgctttacaattttatgcaaatg

SEQ ID NO: 648 - DNA, 349 bp, Glycine max
  Clone ID: LIB3028-053-Q1-B1-H6
gcttctagggttttaggttccgtccaattagcggtttctctctctctctcttcagaaatggataacagtagctcagaacagaccgtgcaagatggcaaactctacagaaacctcaattctctcatcgtcgctcatcttcgcgacaacagtctcactcaggctgcaagtgctgttgcttcagcaaccatgactccactgaatgtagaagcccctcctaacaggcttctcgacctggtcgctaagggtcttgcagtggaaaagggcgacatcacaagaggcactggtttcactgctacactgcctctgcctcagacaacagctattgatttcagctctgtgcctgatgtga

SEQ ID NO: 649 - DNA, 385 bp, Glycine max
  Clone ID: LIB3028-053-Q1-B1-H7
gtcccaaagagctaacaagagattcaagaccggcatggctaatgaagaggaacagaaaaaccacctcttcggcatcaaagatctcggtcacaagactctccttcagagtgatgcactctatcagtatatacttgaaaccagtgtctatccaagagagcacgagtgcttgaaagagatacgcaagatgactgcaaaacacccactgaacatcatggcaacaccagcagacgaaggacaacttctgagcatgcttgttaagctcacgaattcaaagaacgccttggaaattggtgtattcactggttactctctgctctccactgccctggctcttccccctgatggaaagatcttggctttggatgtgaatcgcgaatactatgag

SEQ ID NO: 650 - DNA, 192 bp, Glycine max
  Clone ID: LIB3028-053-Q1-B1-H9
aaaaacctccaaaccaactctagttaactccatagacactctctctctctctctacaatggcctcagccgcagccctcagagctttctctctcctccactccatcaccccggcctcctcctcctcctccagctccgcctcccgctcgcacgtgcagctctcctcctcgctccgctcgcgcccgctcgtacgc

SEQ ID NO: 651 - DNA, 87 bp, Glycine max
  Clone ID: LIB3028-054-Q1-B1-A1
gattttcagaaatattagtatatatttatatgcatacaatgatgcaaacaaacaggaaccgtttggcagcttaatgcttcaagatct

SEQ ID NO: 652 - DNA, 378 bp, Glycine max
  unsure (1)..(378): unsure at all n locations
  Clone ID: LIB3028-054-Q1-B1-A10
caaaaataacccaaactctcttttaaaaaaaaacccgaacacatagaaacagagaaagtgtgagtatcgccgccgtagccctaccctctcttcatagtattctattgcctttctttaactccctcacttttttcaagtttttgaagcgcttccagtggcgtatttacggttatacccttcttgttatgatagcttccaatcggcgtcagccacagagccgaagctcttggcttccacacatattttcggtgctgtcgattgagatacaaagccgccaagccagccgagccaatcttcaaattcgaactttacccctaccggttaatattctcctcttttaacggctatttcgattcatgcanattcgaagaacaaccg

SEQ ID NO: 653 - DNA, 152 bp, Glycine max
  unsure (1)..(152): unsure at all n locations
  Clone ID: LIB3028-054-Q1-B1-A11
agcaggctatccagagcaagaagttgttcatcttagatcacatgactatctcattccatatttgaggaaaatanatgcaactacaacaaggccttaggcaacaggaaccaaattttccttgaaaagtgatggaaccttgacgccatgggcca

SEQ ID NO: 654 - DNA, 374 bp, Glycine max
  Clone ID: LIB3028-054-Q1-B1-A12
aaaactttctgactttggtcttgcgaagcttggtcctgttggtgacaaatcacatgtttctacccgtgtcatgggaacttatggttactgtgctcctgagtatgctatgactggacagctgactgtgaagtctgatgtatatagttttggggtggtcttcttagagctgattactggccgtacaagcaattgacagcacccagccgcagggagaacagaaccttgtcacatgggttttcctctattctttctcttgtcattttaattagtttggcaagcataaactaactgcagttttatatgtatgtttgtgcaggcacgtccactttttaatgaccgcaggaagttttcaaagttggctgatcccaggctgc

SEQ ID NO: 655 - DNA, 365 bp, Glycine max
  Clone ID: LIB3028-054-Q1-B1-A2
gatagctcgttcaggttacctcgttctgcgttctccttcaacacaaccgcgaaaaccttaactcagagctcgttcaccataccacccaaatcaattgtccaaaatcgcggctcaaaccgaacattcgaacttgaatcaggaattttggggcaaggttgctagtgttggcaggattcaggagtaactatagttcaaacctaatagtagaagaaaaggaacttcagctggttttatttgatagagaaaccactgttacagaaatatggaagaggaagaggtgaatcgatgccagattcaggaatggtatccaaagttcaaatctgtatccttcaagaccttaattcatcaacttcctgaatcattta

SEQ ID NO: 656 - DNA, 177 bp, Glycine max
  Clone ID: LIB3028-054-Q1-B1-A3
ataaaagaaatatgacgtcgcacgtacgtaacccggaatcggtccaattaaaatccaagagaaaaacaatgaaggacctgacggaggaatttctgaaagaaaacccgaacatgtgcgagtacatggcgccatcgctggacgtgagacacgacgtactggtgatggaagtgccgaagc

SEQ ID NO: 657 - DNA, 367 bp, Glycine max
  Clone ID: LIB3028-054-Q1-B1-A4
ggacggaactctaaaatttctgatttagatagttctccaaaagatgagccccaagaggacattgtcatctcttcctcggtagccaggcctcggtcaaatttccaaagaatgtctcccgttccatcgtttaaaatatcagcatgtctctaacgatgagaatgaaatgactgtagtgccagtaggtactgaggatacagagaataatcacgatcagatatatttgaagcttgatgacgaagctgaatctgactttgaatcggatgttgattcaaaggatgagtttttcttctcaaacatatggatggctgaattgtctgaggatgatgattctgagcaaacctataatgatgagagtgtggaagagcag

SEQ ID NO: 658 - DNA, 342 bp, Glycine max
  unsure (1)..(342): unsure at all n locations
  Clone ID: LIB3028-054-Q1-B1-A5
actccaacnnnnagnagngctctcaaaaacaatgaagctcattagcaccatcaaccccaaaaacctcaaactaagccccaaacgcttctttcgtaaaaaggaaccatctttagtctcacgctccgaaccgccttctttcggatccggatcctcttccgttgactcttccaacgcaaatcacaaaccttccggcggtaaccaaactccgaccaacgttctcccggaagtctccggcgagtggtccgaagtcgccaacgccgccgttgacgtgcggtgggaactcgcgcaagccttacgcctcatcgatcgcgacaacgaccgcgtcgtcacgcgccaggacct

SEQ ID NO: 659 - DNA, 362 bp, Glycine max
  Clone ID: LIB3028-054-Q1-B1-A7
agcagctcatctacagtagacatcttatcctccaattcgagtaacaaagcaccagtttcctcgttggatggtctctcatctctttcactttctacaaaaacaacttcaaatgctgctcctatgatggatttattggatggatttgcccccatcccgccaacaggttgtaaactttgtttagcatttgggcattgtcattgaatgaaatatagtcaaagtattgaattcttgtcctttcttatcttgagtagaaaacaatggaccggtttatccatctgtaactgcatttgagagcagctccttgaggttgacattcaatttctcaaaacaaccaggaaacccacaaacaacagttatccagg

SEQ ID NO: 660 - DNA, 361 bp, Glycine max
  Clone ID: LIB3028-054-Q1-B1-A8
gaaattgtgaaggaagtctcttcctacttgaagaaagtaggatacaaccctgacaagattccttttgttcctatctctggttttgagggagacaacatgattgagaggtccacaaaccttgactggtacaagggtccaactctgcttgatgcacttgaccagattagtgagcccaagaggccctctgacaagcccctcaggcttccccttcaggatgtgtacaagattggaggtattggaactgtgccagtgggacgtgttgagaccggtgtcttgaagcctggaatggtggtgacttttgcaccaactggactgacaactgaagtcaagtctgtggagatgcaccatgaatctcttacag

SEQ ID NO: 661 - DNA, 375 bp, Glycine max
  Clone ID: LIB3028-054-Q1-B1-A9
aatggcttccatgagctctctgaagatgatttcttccttcaagctctcccatttaagttgttctatctctcctctttcaacccaaaagcaagtaggttcaagtctctttcaatccttcccaaccaaaaccttaaaattctcagctactcctcaagtatctacatctagaagaagtaccaacaagactacaaccactgcattcttcttcaataaccaaaagcagcatcaagattcatcacagccaaccaaagttcaagagctctttgtctacgaaatcaacgaacgcgaccgaggaagtcctgcatacctcaagctaagccagaagcaagttaactctcttggagacttagtgccattcagcaacaagatatactc

SEQ ID NO: 662 - DNA, 365 bp, Glycine max
  Clone ID: LIB3028-054-Q1-B1-B1
ctcgagccgattcggctcgagctctcacacaaaataatggacaagaagcttggcaacacgtctcatgatcctgaagtgagaaaggggccatggacaatggaagaagacttaatcttgatcacctatattgccaatcacggggaaggggtttggaactctttggccaaggctgctggacttaaacgtaccggaaagagttgccggctccggtggctaaactacctccgtcctgatgttagaagagggaatattacacccgaggaacagcttttgatcatggaacttcatgcaaagtggggaaacaggtggtccaaaattgccaagcatctacccggaaggactgataatgagattaagaactactg

SEQ ID NO: 663 - DNA, 365 bp, Glycine max
  unsure (1)..(365): unsure at all n locations
  Clone ID: LIB3028-054-Q1-B1-B10
aagtttttgaaatgttgtcaccccttcttctatttctatgcctaactcttcctttgtttttgttgtccttcttcaaataccgtaaaaccttcaagaatccaccacttccaccaggtcctagaggccttcccataatagggaatcttcatcaactacgatagtcccttctcttcatgagcagctatggcatctctcaaagaaatatggtcctttattttcccttcaatttggattaaggccagccatagttgtttcctctccaaaattggccaaagaggtaatgaaagacaatgaccttgagtgctgtggacgacctaaattactaggccaacaganactaacctataatgggttagacatgggaa

SEQ ID NO: 664 - DNA, 275 bp, Glycine max
  Clone ID: LIB3028-054-Q1-B1-B11
agagaatacaccaaaacccaacatgaaaacccttaacaaagcctcacttattttattccctctcttgttcctttccctattcaagcattcccatgctgcaggaatcgctatctactggggccaaaacggtggagaaggcaccttagcagaagcttgcaacactagaaactaccaatatgtgaacatagccttcttgtccacttttggcaacggccaaactccacaactcaaccttgcaagtcattgtgaccccaacaacaatggctgcactgggt

SEQ ID NO: 665 - DNA, 352 bp, Glycine max
  Clone ID: LIB3028-054-Q1-B1-B12
caacagcaagcagccgttcttgtgggtgattcgacctgggctaatccatggttcagaatggtttgaaccattgccaagtgggttcctagagaatttgggaggaagaggctacattgtcaaatgggctcctcaagaacaagtgcttagccatcctgcagtgggagcattttgggatcataatggttggaactcaactctagagagcatatgtgaaggggttccaatgatttgtatgccatgttttgcagaccaaaaggtcaatgccaaatatgcaagcagtgtttggagggttggggtgcaattacaaaataagctagatagaggagaggtagagaagacattaaaacactca

SEQ ID NO: 666 - DNA, 367 bp, Glycine max
  Clone ID: LIB3028-054-Q1-B1-B2
ctctgcagcaactatgcctaaccctaaggtcttcttcgacatgaccatcggcggtcaatctgctggccgcatcgtgatggagctctacgccgacgtcactccccgcaccgccgagaacttccgcgcgctttgcaccggcgagaagggcgtagggcggagcggcaagcccctccactacaagggctcgtccttccaccgcgtgatcccgagtttcatgtgtcagggtggcgacttcaccgccggaaacggaaccggcggcgagtcgatttatggcgccaagttcgccgacgagaacttcgtgaagaagcacaccggtcccggcatcctctccatggcgaacgccggtcccggaaccaacggatctcag

SEQ ID NO: 667 - DNA, 341 bp, Glycine max
  Clone ID: LIB3028-054-Q1-B1-B4
catgaaccctaacctaaacccctgagaaatcattgaagttgatacatggcggaagttaacactctggtggtgcggaagccctgttttggtcttccaaacggttgccctcaatgcctatctgcttacatctatctcaaattcgctcaatttccattccaattggacatccatctcaacaaccctcagtctgatcaaatcccttactttgaaattggtgactatgtggcttattacaatgagaaataagggattaattaagtgtttgaagaaagatgttggggttgttgaattggatagtggggtttcttcactccctgagtggatttcaactaaagcaattc

SEQ ID NO: 668 - DNA, 363 bp, Glycine max
  Clone ID: LIB3028-054-Q1-B1-B5
ctgactcactcatcaatggctctgagactgaaccctatccccacccaaaccttctccctcccccaaatgcccagcctcagatctccccgcttccgcatggcttccaccctccgctccggttccaaagaggttgaaaatattaagaagccattcactcctcccagagaagtgcatgttcaagtaacccactctatgcctccccagaagattgagattttcaaatctttggaggattgggctgaccagaacatcttgactcatcttaaacctgtagaaaaatgttggcaaccacaggattttttacccgacccctcctcagatggatttgaagagcaagtgaaggaactgagagagagagcaaag

SEQ ID NO: 669 - DNA, 361 bp, Glycine max
  Clone ID: LIB3028-054-Q1-B1-B6
cggcgttttccactcgaagcacacaccagccataatcgattacacaccgtgataagataagattgaaaagatgtttagggacgtgtcaagctgcaacacgtacaactacggcgaggctgggtattgggacgcgcgctacatccaagagggtggttccttcgattggtaccagcgttactctgctctcaggccttttgttcgcaatttcatccctctttcttccaggattctcatggttggttgcggcaatgctgttatgtctgaggatatggtcaaagatggttacgaggacatcgtcaatattgatatttcttctgttgcaattgacatgatgagaacaaaatatgagtacatccctcag

SEQ ID NO: 670 - DNA, 361 bp, Glycine max
  Clone ID: LIB3028-054-Q1-B1-B7
ccaaaatcttttctaatttgttcataactcaataattctcatcatgggctccttgattgttccaggtgaacatgatcacaaactaaagcttgtttctcttccctttgtatcaaccagtcacctcattcccgtagtagacatagctaggctctttgccattcatggtgttgatgtcaccataatcaccaccacagccactgccgccattttccaaagctctatcgatcgcgaccgtgaccgcggccacgctattagaacccacgttgtcaagttcccatgtgaacaagttgggttgccagaaggagtagagagcttcaactccaacactcctcgggatttggtccacaaaatctaccaggga

SEQ ID NO: 671 - DNA, 321 bp, Glycine max
  unsure (1)..(321): unsure at all n locations
  Clone ID: LIB3028-054-Q1-B1-B8
gagcagccaaaggggaggaataataataagcctatattctaaggccggaaaaataaaaaaggaataacaaaaatgtctggaaaggtaattatctcggctgtttctctcatcctggtggttggagtggccataggtgtggtggtggccgtcaacaagaagggcgaggatcccacacttcaatctcaacaaaaatcagtangggttatctgccaaaacactgatgaccagaagctctgccacgaaaccctaagctccgtgaagggcatggacaccgctgatccaaaggcttacatcgccaaggcggtgaaagccaccatggac

SEQ ID NO: 672 - DNA, 361 bp, Glycine max
  Clone ID: LIB3028-054-Q1-B1-B9
ctcgagccgaatcggctcgagggagttgtaaattaagagcatggctgcacaagctcttgtatcatcatcatctcttaccttctcagccgaggctacaagacaaagtcttggaccaagatcactccaatctccatttggcttctcaagaaaagcctcctttcttgttaaggcagctgctactccccctgtcaagcaaggatcagacagacctttgtggtttgcatcaaagcaaagtctttcctacttggatggcagccttccgggtgactatggatttgaccctctgggactttcggaccctgaaggaacaggagggttcattgagccgaaatggctagcatatggtgagataatcaatggt

SEQ ID NO: 673 - DNA, 352 bp, Glycine max
  Clone ID: LIB3028-054-Q1-B1-C1
tgtttccatatacctaatagctctaggaaatggaggataccatcctaacattgctacatttggggctgatcaatttgatgaaggagatcccagggaacaacattaaaaaattgtatttttcagctatttttatttggctttgaacattgggtcactcttctccaacaccatattgaattattttgaggatgatgatggactatggactttgtggttctgggcttcagctggctcgatctgctgctctggcattgattttgtttctttgtggcacacgaaagtatagatactttaagcctaatggaaaccctcttcctagattttgccaagtttttgtggctgctacaagaaa

SEQ ID NO: 674 - DNA, 374 bp, Glycine max
  unsure (1)..(374): unsure at all n locations
  Clone ID: LIB3028-054-Q1-B1-C10
ccctagtctccatacatcaacttgggaagttaaagagacggcaacgttgtgctgtccgccttgaccgagccagagcttcgtcttggccctcgattttgccctgtaaaactaatcccagtcacaacagaaataatcaatggcaccgaaacagaccaaggctgagaagaagatcgcttacgattgcgaagctgtgcgacctaatggaggagtacggccaaatcctcgttgtaaactccgacaacgtgggatcgaaccagctccagaacattcgcaagggtctccgcggcgactctgttgtcctcatggggaagaacaccatgatgaagcgctctgtcaggatgcacgctgagaanaccggaaacaatgcctatctc

SEQ ID NO: 675 - DNA, 360 bp, Glycine max
  Clone ID: LIB3028-054-Q1-B1-C2
ggagagagaaaaaaaaaaaaaaacagaacaacacagaaactcaaaaccaaaataaaattattatggatcacattcataggttacgttgttttgggacaatacccaaaattccttttctattgctactttccctgcttctcttcagtttcgttaacgcatccttcgacctcgctactatacccttcaacgacggctattctccgctcttcggagctagcaacgttgttcgctccgaggatggatacggcgtacaactccgcctcgatcgctacacaggttcgggtttcatttcctccagtatgtaccagtatggattcttcagcgcgagaatcaagttaccatcgaattatagtgctggta

SEQ ID NO: 676 - DNA, 363 bp, Glycine max
  unsure (1)..(363): unsure at all n locations
  Clone ID: LIB3028-054-Q1-B1-C4
ctaaagatgtacctctctacgaagtcaactaaatccattaaagttttggcaaagatagaaagcttagaatcccttcataaactggaggaaatagtgcaagcttctgatgggatcatggtggctcggggtgaccttggtgtcgaaataccacttgaacagattcctacagtccaagaggatataatttacgtatgcagacaattaaacaagccagtgattgtagcttctcagcttcttgagtcaatggtcgagtatccaacgccaacacgtgctgaggtancanatgtttctgaagcatttcgacagtatgctgatgctttgatgtggtctggagagtcagctattggatcatatggacgaaaa

SEQ ID NO: 677 - DNA, 349 bp, Glycine max
  Clone ID: LIB3028-054-Q1-B1-C5
gggaactgtgtcaagagtgactctaaacgtatcaacatggtggggattcacactccaaagaaagacaatgaaccattgctacagtgcactcatcatatgtgtccaataagggtgcactggcacgtgaagctcagctatactgactattggcgagtcaaggttgctgtgacgaatttcaactacaggatgaattactccctctggactcttgctgttcagcatccaaatcttaacaatgtcacccaagtttttagctttgattacaatcctttacttcgctatgagtccataaatgacactggtatgttctatggcatgaaatactttaatgatctcttaatggaaactg

SEQ ID NO: 678 - DNA, 361 bp, Glycine max
  Clone ID: LIB3028-054-Q1-B1-C6
atcataaaccccctccagagaacaagaatcaaagaatggcaactatgactggtgtgagcctttcaagccccagggttttcttcaacgcatcaccctcaccgcaaaacacgtacgccgtaaagttcgcagttccactcagccaagggatgcgacttggtagtgtcaggttgggtcgggtgatgaggatccgacccgttcgcgcagctccagagcgcatttcggagaaggtggaggagagcataaagaacgcgcaggaggcgtgcgccggcgacccgacgagcggcgagtgcgtggcggcgtgggacgaggtggaggagctgagcgcggcggcgagccacgccaaatacaagcaaaaggaaaa

SEQ ID NO: 679 - DNA, 327 bp, Glycine max
  Clone ID: LIB3028-054-Q1-B1-C7
ctctctttcgatctgggtactaaccctaacccgcttcgaaccgtggcttcctcaggctcgcagaacctctctcgaagaaaaccttcttcttcttcgtcttcgtcttctcaacaaacacccgggtcgacccggatcgtttaccgagaatctcggatcccatcggaatccgatttcccgatctggcagcagaactggttcatcgcattgctcttcgtcatggctctcggattcttcgccctcgccattttcctcttcctcactctcgactctgacatcgctccttcttccaacgcctccgcctccgcctccgccgctttctccgaaggc

SEQ ID NO: 680 - DNA, 180 bp, Glycine max
  Clone ID: LIB3028-054-Q1-B1-C8
ttacgatatgggtagtaaccttaaaccgcttcgaatcgtggcttcctcatgctcgtagaacctctctcgaatactaccttcgtcttcttcgtcttcgtcttctcaacaaacagccgggtcgattcggatcgtttaccgagaatctccgatgtcatcggaagttgagttcccgatatggta

SEQ ID NO: 681 - DNA, 322 bp, Glycine max
  unsure (1)..(322): unsure at all n locations
  Clone ID: LIB3028-054-Q1-B1-C9
ggctttttaactttaagaaggatanggatggctactggaaatggtttgctggcaacttggcctctggtggtgctgctggtgcttcatcccttttgtttgtttactctcttgactatgcccgtacccgtcttgccaatgatgctaaggctgcaaagaagggaggagagagacattcaatggccttgttgatgtctacaggaagacattggcatctgatggtgttgctgggctctaccgtggtttcaacatctcatgtgttggaatcattgtgtatcgtggtctgtactttggattgtatgattccgtgaaaccagttgtcctc

SEQ ID NO: 682 - DNA, 119 bp, Glycine max
  Clone ID: LIB3028-054-Q1-B1-D1
ccaccccccaagttgtcgtcacttactagcaggttgtaaattatccggtttatccgagaaaaactccacagaaaaatttccaaggatatattaatataatatatgaaaagtttcctttt

SEQ ID NO: 683 - DNA, 428 bp, Glycine max
  Clone ID: LIB3028-054-Q1-B1-D10
gagagacttgcttgcatgcgtccaggtcgactctaaaggatcccctcggggaattccaattccacattttcaagaaataaggaggcaaaaatgttcatatatgaattggaattatttgttttcttattaggcctatcctgaagccaaaggaaatgagatcggaattcctcggggaattccaattccacattttcaagaaataaggaggcaaaaatgttcatatatgaattggaattatttgttttcttattaggcctatcctggaagccaaaggaaatgagatcggaattcctcggggaattccaattccacattttcaagaaataaggaggcaaaaatgttcatatatgaattggaattatttgttttcttattaggcctatcctgaagcaaaggaaatgagatcggattcctcggggtaacgaact

SEQ ID NO: 684 - DNA, 274 bp, Glycine max
  Clone ID: LIB3028-054-Q1-B1-D11
gtgactgtcagaaacaaacattatttggttttctgaattgtttggattgcgagaaaaaaaaagggggggaaatggcaaaggatattcgattcttcgacctcaacacgggcgccaagatcccttcagtcggcttgggaacttggcagtctgatcctggccttgttgctgaagccgtcgcggcggccatcaacgttggttaccgccacattgattgtgctcaaatctatggcaatgagaaggagattggctctttgttgaagaatctgtttgagga

SEQ ID NO: 685 - DNA, 362 bp, Glycine max
  Clone ID: LIB3028-054-Q1-B1-D12
ctctaacctacctctttttcttctctctcaacaacttcaccttcttcctcctcgatcatgtctcacttcaagggcaagtaccatgatgagcttatcgccaatgctgcgtacattggcactcctggaaagggtattcttgctgctgatgagtcaacagggacaattggcaagcgtttggccagcatcagtgtagagaacattgaatccaacaggcgagctcttagggagctgcttttcactgccctggtgttcttcaatatctcagtggtgtcatcctctttgaggaaaccctctaccagagcacagctgcaggcaagccctttgtgaatgtcttgaaggaagctggtgtgcttcctggcatc

SEQ ID NO: 686 - DNA, 368 bp, Glycine max
  Clone ID: LIB3028-054-Q1-B1-D2
gtgtgtttgttctctgagtagaagaagatcaagatcaaggaagaggatgtcgaaagaggatgtgtttgttggcgcgatcgaccaaggaacgagcagcagcaggttcataatatacgacgcgaagactggagtagtaggatgccaccacgtggagttcacccagttctacccgcaagccgggtgggtggagcatgaccccatggagatcttggagagtgtgaaagtgtgcgtggccaacgccgtcgacaaagccaccgctgatggcttcaacgtcgaagaaagcttgaaggccattggtctcaccaatcagagagagaccactctcctctggagcaaatccaacggcctccctcttcacaacgccattg

SEQ ID NO: 687 - DNA, 91 bp, Glycine max
  Clone ID: LIB3028-054-Q1-B1-D3
gttcaatgaaggcattgtgtccactgctaaggttgtgtccaaagctgtgattactgggtacaaagatgggttcaaccagattaagtccctg

SEQ ID NO: 688 - DNA, 144 bp, Glycine max
  Clone ID: LIB3028-054-Q1-B1-D5
tggaggaacccacttccattatggcgctggcaagtatattgcatcaattgccaatatgctcaactttccaaacaatgtgattaacattgaaggaaaacttcgcaatgtttttgatgttggctgtggtgttgcaagctttggagg

SEQ ID NO: 689 - DNA, 364 bp, Glycine max
  Clone ID: LIB3028-054-Q1-B1-D6
gaaaagagattctgagactgaaagtaaatcgaagcagagaagaagaaagaaagaaagatggtgaaagtggcgacgtacttcgcgatgacgctaggagccttcgtgttctggcagtccatggacaagctccatgtctggatcgctctccgtcaagacgaaaagaaagagaggttggagaaggaagccgagatcagaagggttagagaagaattattgcagcagcaggccagtcagaaggattctctttcttgaatttgaattatgttgtaattttgccttgtgctttgtaattttccttgtttttgtttttccaatgcaatgttcttgtgctcgaataaattctggtactcccgagcacttcaaa

SEQ ID NO: 690 - DNA, 147 bp, Glycine max
  unsure (1)..(147): unsure at all n locations
  Clone ID: LIB3028-054-Q1-B1-D7
canaatgactttcaattgccacaataacactgttgtcgccactagaatgctagttgtgatcactttagtccttgcactagtaagttgtgtcacatccgcgcaatcaccggcagcagcacaagccccggaaagcaacgggtgcttgat

SEQ ID NO: 691 - DNA, 363 bp, Glycine max
  Clone ID: LIB3028-054-Q1-B1-D8
cacgacacgaagtcaaacaggtgatttgttcactttgtgggactgaacaagaggttcagcaaaactgtacaaattgtggtgtttgtatgggaaaatacttctgtggaacatgcaagctttttgatgatgatatatctaatcagcagtaccattgctgtggctgtggaatttgcagaactggaggaagcgaaaatttcttccattgctacaagtgtggttgttgctactcaactcttctgaaaaacagtcacccttgtgtagaacgagcaatgcatcatgattgccctgtttgttttgagtatttgtttgaatcaagaaacgatgtcactgttatgccatgtggacatacgatccataagagct

SEQ ID NO: 692 - DNA, 353 bp, Glycine max
  Clone ID: LIB3028-054-Q1-B1-D9
gcagcagaacagagagagcaaaaccctagagcatccatcacaagcagaggaagaagatggtgaagttcctgaagcctaacaaggcagtgatcgtcctgcagggccgctacgccgggcgcaaggcggtgatcgtgaggaccttcgacgagggaaccagggagcgcccctacggccactgcctcgtcgccggaataaagaagtacccaagcaaggtcatcaagaaggactccgcgaagaagaccgcgaagaaatctagggttaaggccttcgtgaagctcgtgaactaccagcacctcatgcccacgcgctacacgctcgacgtggatctaaaggacgctgttaaccccgatgtt

SEQ ID NO: 693 - DNA, 359 bp, Glycine max
  Clone ID: LIB3028-054-Q1-B1-E1
gcgacacgtatcaacttcaataatcgcatcgcagaagcagtttccggtgcatctcatcgtctccgaaaatgaacgacgcagatgtctcgaagcaaatccagcagatggtgcggttcatccgccaggaagctgaggaaaaggccaacgagatctctgtctccgccgaagaggaattcaatatcgagaagctgcagttggtcgaagccgacaagaagaagatcaggcaagaatacgaacgcaaagagcgccaagttgaaattcgcaagaagattgagtactcaatgcagctgaatgcttctcggattaaagttcttcaagctcaagatgacgtgatcagttccatgaaagaagctgcatcc

SEQ ID NO: 694 - DNA, 311 bp, Glycine max
  Clone ID: LIB3028-054-Q1-B1-E10
ggaacatgcttagaaaactgccaagcccacccatattctctcaaaactttcaaccatgaactgaacaacaacaacaacaacaacagggccacccgtacagacccacctccaaagagatcatttttattaccaattttccgatttcacagagaaaattctttgtgggcatctcttcaaaaatgtcaagcttccccaacacggtggcggaaggccgcaggtccggcaaggcaccggaaaaatccaccttttctcagacttgcagcctcttgagccagttcttgaaggagaaacgtgcttctgctgattccacc

SEQ ID NO: 695 - DNA, 341 bp, Glycine max
  Clone ID: LIB3028-054-Q1-B1-E11
ctcgagccgattcggctcgagttcaattcaagcagctttggaaaacccaaccagccaacagttaagttctggagggaactgaaaagaaatctttatacaagattacaccttcagaagagtcttgccgaagtgtgtggaatctttgtgacagatgttggtttgattgtgtggacttaggagtgaatagtttgatatatgcgcatggaaggaagagaaggcttcagttctggggttacagtgataggggcagaagctccatcagcctatcatatggcaccaaggagtgaagctccaagtcaggttcctcctcctgttcctgaagcaacaactggagctattgg

SEQ ID NO: 696 - DNA, 368 bp, Glycine max
  Clone ID: LIB3028-054-Q1-B1-E12
cacgaattttcttgaagaggaataaacgtagatatgctggtaatgatgaattttcaagccaggctatggaaggactacaaattattaatggtctggagtgtaagatagcttgcagttcatctaaggtctcatatgttttagataccgaagactttttgtttcggataagaaggaaaaaaagagttttgcatccaaagagttcaggcgcccatgaacaggcacagttcctcaaagagttcaagcagagtacaacgattccgcaatttgttttccattacatgaaaatgtccattttgagctgggcatgtaacatttgtcaaatgtaaacattggcagaggcgctggatgaaaacagcatcctatccaag

SEQ ID NO: 697 - DNA, 371 bp, Glycine max
  Clone ID: LIB3028-054-Q1-B1-E2
gttgaaaacacaaaagaaaaaaaatgggttcttctctgtggacctgtctgattttgttatcacttgcttctgcttccttcgccgccaacccaagagcaccaattgatgtgccatttggcagaaactatgtgcctacctgggcctttgatcacatcaaatacctcaatggtggttctgagattcagcttcatcttgataaatacacaggtactggcttccaatcaaaagggtcctacttgtttggtcacttcagcatgtacataaaattggttgctggtgattcagctggcacagtcactgctttctatttatcatccacaaactcagaacatgatgaaatagactttgagttcttgggaaacagaaccggg

SEQ ID NO: 698 - DNA, 361 bp, Glycine max
  Clone ID: LIB3028-054-Q1-B1-E3
ggagacaccagccattgatgtgtgcaagggactactcggcgacaaggcgcgcctaagcatatatgatccacaggtcactgaggaccaaattcagagggatttatggatgaacaagtttgattgggaccaccctattcacttgcagccaactagtcctacaactgagaagaaagttagtgtggtttgggatgcttatgaggcaacaaaggatgcagatggtgtttgcattctaactgagtgggatgagttcaagagtcttgattatcagaaggtgtatgacaacatgagaaaaccagcatttgtttttgatggaaggaacattgtggatgtggagaagctacgtgagattggtttcattgtg

SEQ ID NO: 699 - DNA, 350 bp, Glycine max
  Clone ID: LIB3028-054-Q1-B1-E4
aagagatatgcgccagagttgaagcgagaaagaagggtccgcgcgccatggctggcatcaccacctcccccttcaaactctctcactttccgactctcttctcttcttctgattccaaactcttcggccttcccctctccaatccctattccctcaaattcgacccttcttctctctccactacctctctctcctacgtcaaagcccgctactacagcggctgcggcggccctctccgctcccccaacgactcccgcttccgcaagtcctccgattccgacgacgacgataaagctctcgagctctccactctcatgtcagataccgtgaggcttattgatcagagccag

SEQ ID NO: 700 - DNA, 318 bp, Glycine max
  Clone ID: LIB3028-054-Q1-B1-E5
gtttgtgaagagcgatggataacagttaccatcacaaccgtggcattggtgatagcttcctcagcaccattattattggcggcatgcccttacacctccatcttcagcttcggtgattcacttgcagacactggcaacttgtatttcagccactacccacccaccaatcactgccttttccctccctacggcgaaaccttctttcaccaagtcactgtacgctgctccgatggccgcctcatcatcgatttcatctctgagtcactggggattccacgggtgaagccgtacttgggattctggaatattgggagatgg

SEQ ID NO: 701 - DNA, 367 bp, Glycine max
  Clone ID: LIB3028-054-Q1-B1-E6
cataagcccaataataataatcttcagctcagctccacgaaaagcaaccttaataatcttaggaagtgataaatcaaaaatccaactaagaaccgagctagttttccttttacgtcctctgattccggctacgtactcgcatttcactttccttactcttatcgagagtgagcaattgtatcccgtgaggtgtgatttgtaagctgctacagtcagaaaacgaacagaagaaaccaaaactgttgcatttttttgccgaaggattaccaggaagcaaccatggatgttgatgcacagccaacgatggatgaaacaattctggttggtgatgatttaatgacaggtcctccatcacctgtagtaccac

SEQ ID NO: 702 - DNA, 354 bp, Glycine max
  Clone ID: LIB3028-054-Q1-B1-E7
ttcattctctttgcgcagttccctacctctcctttcaagatgcagatcttcgtcaagaccctcaccggaaagaccatcacccttgaggtggaaagctctgacaccatcgacaacgtcaaggccaagatccaggacaaggaaggaattcccccggatcagcaacgtctcatcttcgccggaaagcagctcgaggacggccgtacgctcgccgactacaacatccacaaggagtcaacccttcaccttgtccttcgtctccgtggtggcatgcagatcttcgtcaagactctcactggcaaaaccataaccctagaggtcgaaagctctgacaccattgacaacgtcaaggccaag

SEQ ID NO: 703 - DNA, 369 bp, Glycine max
  Clone ID: LIB3028-054-Q1-B1-E8
gtttcatcgaacccggcgagatcaaaaccaagtacgccatcgtcatcggcggtgccaacttcggttgcggctcctcccgcgagcacgcccccgtcgcgctgggcgcctccggcgccgccgcagtggtcgcggagtcgtacgctaggatcttctttcggaactccgtggccaccggcgaggtgtatccgctagagtcggagggacgcctctgcgaggagtgcaccaccggcgatgtggtgacgattgagctcggagagagccgcttgatcaatcacaccaccggaaaggagtatcgcttgaaaccgatcggcgacgcgggtccagtgatcgaggccggtggcatctttgcctatgccaggaaaaccggca

SEQ ID NO: 704 - DNA, 378 bp, Glycine max
  Clone ID: LIB3028-054-Q1-B1-E9
aaaaaaccctctctttctctctcttccaaaacctaattttcattttttctcttcaaacaaattttcaaaatgcgtgagatccttcacatccagggtggccaatgcggcaaccagatcggcgccaagttctgggaggtggtttgcgcggagcacgggatcgaccccactggaaggtacggtggggactcagagcttcagctcgagaggatcaatgtctactacaacgaagccagctgcggccggttcgtgccgcgcgcggttctcatggacctcgaaccgggcaccatggacagcgtccggtccgggccgtacgggcagatcttcaggcccgacaactttgtgttcgggcagtccggggcaggaaacaactgggccaag

SEQ ID NO: 705 - DNA, 357 bp, Glycine max
  Clone ID: LIB3028-054-Q1-B1-F1
ccagtctgccaaggaagaaagaatagcattgaggccaccaatgttgcaggtggttcggttggcttcatttcagcatgctccttcagttccacctttcatatcattaccaaaacaatctagagttgatagtgatgactcttggatggcaacagaagagagaaaggcaggtgaggtggcagttggtggtggtggggtgtctgtggcagttactcgttttccaatggagcagaagcgtcctgttgggcctcttgtggttgtaggtgtcagggatggagttctttggctaattgacaggtacatggttgctcatgccgtatccttgagtcatcctggtattcgttgccgatgtcttgctgc

SEQ ID NO: 706 - DNA, 353 bp, Glycine max
  Clone ID: LIB3028-054-Q1-B1-F11
ccaaaccaaagcaagaatagtgttctaagagtgagcaacaacttcaaacaccattgtgagaaatggcttccaagggtgcacttctcttgtgtctcaacattctcttcttcactgtggtaagctccacatatgtcccatgcaacccaccccctaaaactcctaaacacacacctgtcccaaagccaccttccccaaagcaaccaagttgccccaaagacaccattaagtttggtgtgtgtgctgatgtgttaggtttgattaacgtgcaacttgggaagccaccaaagaccccatgctgcaacctcattcagggtcttgctgatcttgaagcttccgtgtgcctttgcaccgct

SEQ ID NO: 707 - DNA, 379 bp, Glycine max
  Clone ID: LIB3028-054-Q1-B1-F12
ctcgagccgagaaatttaagtgaggagctagagaatgatgatgaagtctgctatgtgtgcagtggtggttgtagcacttcttcttctggcggaggtggggcccatggctgaggctgtgacatgcaccccaacagagttgagtccgtgtcttccagcaatcacttccggtgctaaaccttccaatgcttgttgcacgaagctgaagcagcaaaaaccatgcttatgtggctacctcaaaaacgctaagcttgaagcagtatgttaactctcctaaggccgaaaaaccgttgcttcttgtgggattccctttccaacttgttaattaattaagccttcttataattaaagtgtgggatatatatatatatatagataaaca

SEQ ID NO: 708 - DNA, 373 bp, Glycine max
  Clone ID: LIB3028-054-Q1-B1-F2
gttgcctataaaaataaaaactaagtcccccaaaacccaatcatatcatttcatttcttcctttgtcgtccatcccgtaaccatgtctcagactgttgtcctcaaagttggtatgtcatgtgaaggatgtgttggagcagtgaagagagttctaggaaaattggatggtgtggaatcatatgacattgatttgaaggaacaaaaggtggtagtgaaaggaaatgtccagccagacacagttctgcagaccgtttccaaaactgggaagaagactaccttctgggaaggtgaagcagcaacatctgaaactagcacagcaactgcctaaaacatttgcctctattctgtgcagaagaagtagctgtgtgaatca

SEQ ID NO: 709 - DNA, 358 bp, Glycine max
  Clone ID: LIB3028-054-Q1-B1-F3
cccgaaacctaagcacaagatgaagaagataagaggatatggagagaaatgagtgctcttgtggagaggatgtgttggaaaatagctgctaagaaggatcagactgttatttgggtcaagcctctcactaatagctgctacttaaagagattgcctggtactaagcctccactctgcagatctgatgatgatcctgatgctgttttgggagttaaaatgaaagcttgcatttcacgttattcagatcaaatgcacaaagcaaaaggaagtggtttggctccttggcctgctcgattgactactccacctcctcgtctggcagaaattcactattctactgaaatgtttgagaaggaca

SEQ ID NO: 710 - DNA, 57 bp, Glycine max
  Clone ID: LIB3028-054-Q1-B1-F4
aaataaatcacgtttccattactcaatggcaaaagtaatatttgttgttttattgcc

SEQ ID NO: 711 - DNA, 362 bp, Glycine max
  Clone ID: LIB3028-054-Q1-B1-F5
caattccattctctttgcctgcctagtttcaattctgtccaatttccaaaaccaaaacaagccacacaagttcatggcaactcccaataacagactctctcttgccatggagagaactgggcaatgggttttctctcaagacataccaactgatgttatagtggaagttggagaaacaactttctctctgcacaagttcatgctagtggcaaaaagcaactacataagaaaactgatattggaatcagatgagagcgaactcaccagaatcgacctctctgacataccaggaggcccttcaatcttcgagaaaaccgcgaaattctgttacggcgtcaacttcgagataacggtccacaacg

SEQ ID NO: 712 - DNA, 367 bp, Glycine max
  Clone ID: LIB3028-054-Q1-B1-F6
gctgaagacaaagaggacacaccgtttcatagtttttaagattgaggagcagcagaagcaggtcattgtggagaagcttggtgagccagcccaaggctatgaagatttcactgccagccttcctgctgatgagtgccgttatgctgtttatgattttgagtatctgactgaagggaatgtccctaaaagcagaatttttttcattgcatggtcccctgacacatcaagggtgaggagcaagatgatctatgcaagctccaaagacagattcaagagggagctggatggaattcaagtagagctgcaagcaactgatcctactgagatgggtcttgatgtgttcaaaagccgggccaactaaaatgat

SEQ ID NO: 713 - DNA, 126 bp, Glycine max
  Clone ID: LIB3028-054-Q1-B1-F7
atggaaatgaattgtagtggaaaatgtagtaagttttaatgaaattttgaattggtggatagattgtgctttgtttattattgactgagttatttagaatgtgaacatagtgctggactttattac

SEQ ID NO: 714 - DNA, 368 bp, Glycine max
  Clone ID: LIB3028-054-Q1-B1-F8
agcaactccatcgatgttaaattatctaaaaataccattgaaactggagatgattgtgtttccatgattcaaggagtcaacaatattactatcaacaaactgaaatgtggccctggacacggtattagtattggaagtcttggaaagtatgcggatgagcaagaagtgaaagacattcgcgtcaagaactgcacgatggttggcacaaccaatggcctcagaatcaagacatggccagataagtatccaggttcagcatcagctatcaccttcagtgacattgtcatggaaaatgttaaaaatcctatcatcattgaccaagagtatgattgcgaaccagcaaactgccaaaagaagccttcacttgt

SEQ ID NO: 715 - DNA, 369 bp, Glycine max
  Clone ID: LIB3028-054-Q1-B1-F9
gtaacacttgcaacacacatggctacaatcaccaacactttcatattcaaaccccccatctctcatcacccaaagcagcttctttattcccaccgctcttctctacgctttctcaccaaatttaaaaccccctccggagcgaattctcggcggctggttccgaaagccaaggcggccccggggccaagaagacagaaaagccgcacgagagagtccagcgagtccacagcgtggaggagttcgagtcggcgctcgaatccgccaaagacaggcttgtggtggtggaatacgctgccagcgacagcgaggagagcagccagatataccctttcatggtggagctgagccgcagctgcaacgacgtggagt

SEQ ID NO: 716 - DNA, 364 bp, Glycine max
  Clone ID: LIB3028-054-Q1-B1-G1
ctttttgagaacaatttagccaatgagcaagaattgaagaccatagagaagaaaatcgatgagatcctcgaggacgctgttgagtttgcagacaaaagccctcttccaccccgcagtcagcttctggagaatgtctttgctgatccaaaaggctttggaatcggaccagatggaagctatagatgtgaggatccaaagttcactcaaggcacagctcatgtctaatcttttcttgcttgcaagttggaactttcatttttgtatgactcttctttttcatatgccttatttagtgatcaaatgttacacaatgtctaatataaacaggatttgctctttaggttggtaatttggttttacgtgt

SEQ ID NO: 717 - DNA, 370 bp, Glycine max
  Clone ID: LIB3028-054-Q1-B1-G10
caatatattccattctctctgtgtatttccctacctctcccttcaagatgcagatcttcgtcaagaccctcaccggcaagaccatcacccttgaggtggaaagctctgacaccatcgacaacgtcaaggccaagatccaggacaaggaaggaatccccccggaccagcaacgtctcattttcgccggaaagcaacttgaggacggccgtacccttgctgactacaacattcagaaggagagtactcttcacctcgtcctccgtctccgtggtggcatgcagatcttcgttaagacaccaccggcaagaccataaccctagaggttgaaagctccgacaccatcgataacgtcaaggccaagatccaggac

SEQ ID NO: 718 - DNA, 378 bp, Glycine max
  unsure (1)..(378): unsure at all n locations
  Clone ID: LIB3028-054-Q1-B1-G12
ggaggagactctttctctcagtctcatccacgtaaacaactcattggttttcaccaatagactacacatcatcctccatttcactgctctatgtttcttggtttactacaggctttgtttcttctttcagaatccacaaaccagacgaggaactactttgttcccttggcttcttgtttttgcctctgaaatcattctctccttcatttggattcttggtcaaggtttccgctggcaccccatttcaagaactgtgtttcctgaaaggttaccacaggatgacangcttcctctcattgatgttttcatatgcactgcagacccaactaaggaancaactttggatgttatgaacactttgctatcagccatggcgct

SEQ ID NO: 719 - DNA, 373 bp, Glycine max
  Clone ID: LIB3028-054-Q1-B1-G2
ggaatagaaaaaccctaagcaaagcaaagcggtaaggatggggaacacggagaagctgatgaaccagatcatggaattgaaattcacttcgaaatcgctgcagcgtcaatcgcgtaagtgcgagaaggaggagaaatcggagaagctgaaggtgaagaaggcgatcgagaaaggcaacatggacggcgctcgaatctacgcggagaacgcgatccgtaagcgcacggagcagatgaactacctccgcctggcctcgcgcctcgacgccgtggtcgcccgcctcgacacgcaggcgaagatgacgacgatcagcaagtcgatgggcaacatcgtgaaatcgctggagtcatcgctggccacggggaacctccag

SEQ ID NO: 720 - DNA, 362 bp, Glycine max
  Clone ID: LIB3028-054-Q1-B1-G3
tttctcggttcattgtccccctttgacggtggtgctgtaagcattgacctcagcttgagcagtaaaacatcatcagcactactacggtaccatggctgtgctgcaatctttcgtttcggtccacccagattctcacttccccatacagaagctcccttagggagtcttcaagccccaatccgcttcgcctcctcgtcccggcgtcgccatctgcgacttcgtcctcgacctctccgaaatatcttccgctggtctcttcgacggtcctctcctcaaaaactccgatgcttttctccagcctaatctaaataagtttgtatcacttggaagaccagcctggaaggaagctcgtgctactcttc

SEQ ID NO: 721 - DNA, 224 bp, Glycine max
  Clone ID: LIB3028-054-Q1-B1-G4
tcaaacgtcacgtttctggcatcattacaaatgctccggtaccatgactatcatgaaatctttcgattctcgatctcacaggttctcaattcccaatagacaagctcccttacagagtcttcaagctccaatctgcttcgcctcctcgtcgctgcgtagctatctgctacttcgatcctcgacctctcctaaatatcttcggaaggtctcttctatcgacatct

SEQ ID NO: 722 - DNA, 250 bp, Glycine max
  Clone ID: LIB3028-054-Q1-B1-G6
caatagtattaaattttgcgaagtatgatgatttatctattgaggcctattctggaacctggggatgtggcatcggcattggcctgcgatgtccatgtccacactttgaataactatggaagcaacaatgttcaaacatgaattggacttacttgttctcctcctaagcctatcgtgaagccaactgatatgacatccggactcctcgcgggtagcgacctcaaactcgctattatgagtcatattaaat

SEQ ID NO: 723 - DNA, 360 bp, Glycine max
  Clone ID: LIB3028-054-Q1-B1-G7
aactgggttgtctgctccttataacaaccttgccataatctataagcagcaggggaattatgtagatgccatatcgtgctacaatgaggtcctccgcattgaccccttggcagctgatggactagtaaatagaggcaatacatataaggagattggtagagttagtgatgctatccaggattacatacgggcaattgttgtcaggcccaccatggcagaagcccatgctaatttggcttctgcttataaagatagtggacatgtagaggctgctgtgaagagctataaacaagcattgattcttcgtccagacttccctgaagcaacttgcaatctccttcatacacttcagtgtgtctg

SEQ ID NO: 724 - DNA, 372 bp, Glycine max
  Clone ID: LIB3028-054-Q1-B1-G8
agtagttgagaactaagaaggagaagcaaatggcttcctcaatgatctcttccccagctgttaccactgtcaaccgtgccggtgccggcatggttgctccattcactggcctcaagtccatggctggcttccccaccagaaagaccaacaatgacattacctccattgctagcaacggtggaagagtgcaatgcatgcaggtgtggccaccagttggcaagaagaagtttgagactctttcctacctgccagaccttgatgatgcacaattggcaaaggaagtagaataccttcttaggaagggatggattccttgcttggaattcgagttggagcacggtttcgtgtaccgtgagcacaacagggtcacag

SEQ ID NO: 725 - DNA, 385 bp, Glycine max
  unsure (1)..(385): unsure at all n locations
  Clone ID: LIB3028-054-Q1-B1-H10
caatacttgggaaccaagatcgatcccaaccggaggctcggaaagaccccgagcaaccgctacgcgccacgtgtcggcgacaaattgcctgattccgttgattggaggaaggaaggtgctgttcctcctgtcaaagaccaaggaggctgtgggagctgttgggcattctcagcaatcggtgcagtagaaggaataaataagatagtaacaggcgaactgatttcgttatcagaacaagaattggtggattgtgatactggatataaccaaggatgcaatggaggacttatggactatgcatttgagttcataatcaacaatggcggcattgattctgatgaggattacccnatacgtggtgttgatggtagatgcgacacatata

SEQ ID NO: 726 - DNA, 371 bp, Glycine max
  unsure (1)..(371): unsure at all n locations
  Clone ID: LIB3028-054-Q1-B1-H11
actgggtccagaagacaccagcaagaacatagtagagataatattccactccagctggctgaagaagcaatcaccagtgtgcaaaatagaccgcatcctcaaggtccacaacacacagaaaaccataaccaaattcgaagagtacagagactccataaaagccaaggccacgaagctctcaaagaagcaccctcgttgcatagcagacggcaacgagcttctcaggttccactgcacctccttcaattgctccctgggtctaaacggctcctccaacttgtgcaactcgataccacagtgcaacgtgtgcagcataatcaagcacgggttcaaggtcaccggaggangagccggcatcttgacgacggcga

SEQ ID NO: 727 - DNA, 72 bp, Glycine max
  Clone ID: LIB3028-054-Q1-B1-H12
aggaatgtgagatgtccatgaagatatatataatatattggctcctattataaataaataaatatatttttt

SEQ ID NO: 728 - DNA, 380 bp, Glycine max
  Clone ID: LIB3028-054-Q1-B1-H3
taaccccgaattccggtccaaaaaaaggttaaaccaagacaatccccaaagggaatcaagaatttgggctcctccaactccaaaggaaatcaaagtctcctctacctccagacctcatctcttgcatcctttttctttctccagatgcttgtcctccgtcctggatggacttaagtatgcagattcacacgaatgggtcaagcaccaaggctcagtctccaccattggtatcactgaccatgcccaggaccatcttggagaggttgtgtacgtggacctgccacaagcaagtggcacagttacccagaagtccggcttccgatccgttgaaactgttaaagcaacaagtgacataaactctctaatctccggggagattg

SEQ ID NO: 729 - DNA, 366 bp, Glycine max
  Clone ID: LIB3028-054-Q1-B1-H4
caaattttctaaaggtgaaacacaaaaagttaaatctgttgattgaaacaaatataactatcttagctaaatttctaaagcagtaaatatgactttccataatcttttgagcgaaaataagttcttattatatggctttgaacagagctcaaaagaatacttggaaaaacagatggcagaggtggaagccaatttgagagaactgctacaacaagatcctggtcttgctaggcaaatcatgtctatgaatgtaatgtaaactttccgttagtgaaattaacttaaagtggcagggttttctggtgcatttgagcaaatagaaaattcaggacttggtgagatgtgaggaaggatgtgtactgcctg

SEQ ID NO: 730 - DNA, 359 bp, Glycine max
  Clone ID: LIB3028-054-Q1-B1-H5
taacttttcaggctgaagaagttgatatgacagctctcaatcatatgactgatgaagatctcaaggctatgggcataccaatgggaccaagaaagaagatacttttagcactggagtcgaaagtctaacatttagttatggaattgattttctaagctggatggtggtgggaggagatcaggatctaaaaaccaagtgtaatagcatagttctttgattattttcgtttttaatattttcccttactttttagacattaatcaagttaattttggtgtttattttgctaaaccccgtcaatctcctgaaactctcttataatgcaattaatggatttgagagtttaccttttgaatcaa

SEQ ID NO: 731 - DNA, 372 bp, Glycine max
  Clone ID: LIB3028-054-Q1-B1-H6
gccaggaatagggcacaggatcaagaatagggacaacaaagataagagagttgagctgctacagaagtttgcacgcacacattttccttctgtgaaatacatggaatatgctgttcaagttgagacctacacgctcacaaaggcaaataatttagttcttaacgtagatggtgcaattggatctcttttcttggatcttcttgctggtagtggaatgttcaccaaacaagagattgatgaaattgtggagattggctatctgaatggcctctttgtgctggcacgctccattggtctgattgggcacacctttgaccaaaagcgattgaagcaaccactttaccgtcacccatgggaggatgttctctacac

SEQ ID NO: 732 - DNA, 358 bp, Glycine max
  Clone ID: LIB3028-054-Q1-B1-H7
gacgaacgcagcatcgaggatcttaggcggaaacggcgtcgtttaccgatccgtagcttcctctcttcgcctccgctccggcatgggcctccccgtcggcaaacactatgttcccgacaaaccccttcccatgaatgaggaactcctgtgggacaacggcactgcatttcccgaaccgtgtagagatcgtattgctgacactgtcggaaagtatgaagcattggcctggctgtgtgggggattgagttttttcgcgtcgctgggattgttggctgtgtggaatgacaaaacctccaagacaccgtttgcacccaaagtatatccatatgacaatctgcgagtggagcttggtggtgaa

SEQ ID NO: 733 - DNA, 366 bp, Glycine max; identical to SEQ ID NO: 729
  Clone ID: LIB3028-054-Q1-B1-H8

SEQ ID NO: 734 - DNA, 256 bp, Glycine max
  Clone ID: LIB3028-055-Q1-B1-A12
aaatctcgtcgagaagtttttgaaatgttgtcacaccttcttctagttctatgcccaactcttcccttgtgtttgttgtccttcttcagatatcgtacaacggtcaacaatccaccacttccaccacatctcataggccttcccataatacggaatcttcatcagctagacattccatcgcttcaataacagctatggcatctctcaaataaataaggtcctttactttcccttcaatttgaattaaggcccccca

SEQ ID NO: 735 - DNA, 213 bp, Glycine max
  Clone ID: LIB3028-055-Q1-B1-A5
aacattgcaactgaagtctccacctaatcgacgaaatcaagtaacaaatcagaagttactccgttggttggtatctcagctcttgcaggatctaccatgatatgttacagctacagatcctatgagggacttagtggaaggacttgctgacacccctgcacagagttgtgagctttgtatgtcatttgagtagtgtcactggatgaaacatcg

SEQ ID NO: 736 - DNA, 70 bp, Glycine max
  Clone ID: LIB3028-055-Q1-B1-A7
cgtatatgaaatgagtctttacaagtgatcgtccagcttgcgtaatagagtacaaactcagtggtaggat

SEQ ID NO: 737 - DNA, 115 bp, Glycine max
  Clone ID: LIB3028-055-Q1-B1-B2
aaatatttgacatgttgtcaccacgtcatctatttctatgccctcactcatcctttgccttcgctggcccacttcccaaaccgttcatccttaagctgtccgacacttccaccac

SEQ ID NO: 738 - DNA, 330 bp, Glycine max
  Clone ID: LIB3028-055-Q1-B1-B5
gagcaaccaaaagggaggaataataataagcctatattctaaggccggaaaaataaaaaaggaataacaaaaatgtctggaaaggtaattatctcggctgtttctctcatcctggtggttggagtggccataggtgtggtggtggccgtcaacaagaagggcgaggatcccacacttcaatctcaacaaaaatcagtaggggttatctgccaaaacactgatgaccagaagctctgccacgaaaccctaagctccgtgaagggcatggacaccgctgatccaaaggcttacatcgccaaggcggtgaaagccaccatggacagccttacc

SEQ ID NO: 739 - DNA, 267 bp, Glycine max
  Clone ID: LIB3028-055-Q1-B1-B6
gagcagtcaatggggatgaataataataacactatattctaaggccggtacaatagacaaggaataatcagagatgtctggaaaggtaagtatctcggttgtttctctcatcctactggttggagtggccataggtgtggtggtgtgtgtctacaagaagtgcaaagatcccacagttcaatgtcaacaaagatcactatgggttatctgccaaaacactgacgagcaaaagctctgccacgataccctaagctccgtgtacggcat

SEQ ID NO: 740 - DNA, 51 bp, Glycine max
  Clone ID: LIB3028-055-Q1-B1-B7
gttcttctagcgctaaaaacataacatcctaaaaaaatgtcaaagtaaggg

SEQ ID NO: 741 - DNA, 305 bp, Glycine max
  Clone ID: LIB3028-055-Q1-B1-D5
cacaacacgaactcttacaggtgatttgttcactttgtgggactgaacaagaggttcagcaaaactgtacaaattgtggtgtttgtatgggaaaatacttctgtggaacatgcaagctttttgatgatgatatatctaatcagcagtagcattgctgtggctgtggaatttgcagaactggaggaagcgaaaatttcttccattgctacaagtgtgggtgttgccactcaactcttctggaaaaacagtcacccttgtgtagaacgagcaatgcatcatgattgccgcgtttgttatgggtattt

SEQ ID NO: 742 - DNA, 129 bp, Glycine max
  Clone ID: LIB3028-055-Q1-B1-D6
cactacagtctctcttgccagtgatctcatcactgtctaggacagaaccacaggtcacactcacactgtacccagtgcggtgttggtgtgtgacacgagctctgtggaagatgccagctttttgatggc

SEQ ID NO: 743 - DNA, 317 bp, Glycine max
  Clone ID: LIB3028-055-Q1-B1-E2
caagaattttcttgaagaggaataaacgtagatatgctggtaatgatgaattttcaagccatgctatggaaggaggacaaattattaatggtctggagtgtaagatagcttgcagttcatctaaggtctcatatgttttagataccgaagactttttgtttcggataacaaggaaaagaagagttttgtatccaaagagttcaggcgccgatgaacaggcacagtcgccaaagagttcacgcagagttcaacgattcggcagtttgttttccattacatgagaatgtcgattttgagctgggcatgtaacatttgtc

SEQ ID NO: 744 - DNA, 78 bp, Glycine max
  Clone ID: LIB3028-055-Q1-B1-E4
gcaattttgatagagttgtgacggcacccattttgccaccgacgaatggaatagacactgtaactgctaagcggtact

SEQ ID NO: 745 - DNA, 185 bp, Glycine max
  Clone ID: LIB3028-055-Q1-B1-E5
gtttcatctagtgtggcgagatcattgccaagtacgccaacgtcaacggcggtgccaacttcggttgcggctcctcccgctagcactgcgcagtcgcgctgggcgcgtccggcgccgccgcagtggtcgcggattcgtacgctacgatcttctttcggaagtccgtggccaccggcgaggtgtat

SEQ ID NO: 746 - DNA, 218 bp, Glycine max
  Clone ID: LIB3028-055-Q1-B1-E6
gttacatcgaatccggcgagatcaaagtcaagtacgccatcgtcatcggcggtgccaccttcggttgcagctcctcccgcgagcacgcgcgcgtcgcgctgggcgcctcaggcgccgccgcagtggtcgcggattcgtgcgctacgatcttctttcgggactccgtggagaccggctaggtggtctccgcgagagtcggagggagcccgcctgcgagg

SEQ ID NO: 747 - DNA, 88 bp, Glycine max
  Clone ID: LIB3028-055-Q1-B1-F5
tgcaaaaatggcatcattcaccatgacagcttccatccttggcagcccagacgtcaccaaccggtcggcagtcgcaccgcacccggag

SEQ ID NO: 748 - DNA, 348 bp, Glycine max
  Clone ID: LIB3028-055-Q1-B1-G1
ggaggagactctttctctcagtctcatccacgtaaacaactcattggttttcaccaatagactacacatcatcctccatttcactgctctatgtttcttggtttactacaggctttgtttcttctttcagaatccacaaaccagacgaggaactactttgttcccttggcttcttgtttttgcctctgaaatcattctctccttcatttggattcttggtcaaggtttccgctggcaccccatttcaagaactgtgtttcctgaaaggttaccacaggatgacaagctccctctcattgatgttttcatatgcactgcagacccaactaaggaaccaactttgggtgt

SEQ ID NO: 749 - DNA, 266 bp, Glycine max
  Clone ID: LIB3028-055-Q1-B1-G2
tagggaggagactctttctctcagtctcatccacgtaaacaactcattggttttcaccaatagactacacatcatcctccatttcactgctctatgtttcttggtttactacaggctttgtttcttctttcagaatccacataccatacgaggaactactttgttcccttggcttcttgtttttgcctctgaaatcagtctctccttcatttggattcctggtcaacgtttcccctggcacaccatttccacatctgtgtttcctg

SEQ ID NO: 750 - DNA, 324 bp, Glycine max
  Clone ID: LIB3028-055-Q1-B1-G5
agtagttgagaactaacaatgagaagcacatggcttcctcaatgatctcttccccagctgttaccactgtcaaccgtgccggtgccgggatggctgctccattcactggcctcaagtccatggctggcttccccagcagtaaagaccaacgatgacagtacctccattgctaccaacggtggataagtgcagtgcattcatgtgtggccaccaattggcaacaccaagtttgagactccttccgacctgccagaccttgatgatgcacaagtggcaaaggaaatctaataccttcttatgaatggacggataccactgcctgga

SEQ ID NO: 751 - DNA, 54 bp, Glycine max
  Clone ID: LIB3028-055-Q1-B1-G6
cagacctagttagaccgcacaaggacaagcaactggcttagacaatgatctcct

SEQ ID NO: 752 - DNA, 202 bp, Glycine max
  Clone ID: LIB3028-055-Q1-B1-H2
actgggtccagaaaactccatcaagaacagaggacagataagagtctactccatctggctgaagaagcaatcagcaatgtgcatcctagaacgcatcctcaaggtccatatcacagagaaaaccataaccaaattcgactagtgcagagactccagatgggccaaggccacgaagctctcagagaagcagccctcgttgcat

SEQ ID NO: 753 - DNA, 261 bp, Glycine max
  Clone ID: LIB3028-055-Q1-B1-H3
gctgggtcgagaaccctacatcaggaccataggagagataagagtccactccacctggcctgctcaagcattcatcagtgtgcacaatagaacgcatcctcaaggtccacgtcagagagaacagcataagcaaattcgagcagtccagagacaccataagagccaacgcaacgactctctcaatgaaccaccctcattgcagtagcaacagcagacgagcttctcacgttccactgcacctccttcaactgctccctgggt

SEQ ID NO: 754 - DNA, 396 bp, Glycine max
  Clone ID: LIB3028-056-Q1-B1-A10
ggttcttccatttgactcttgttctgaacgacttttcaagagaatcaaaccatggcagtgaaagtatacggtccccactgtgcttccaccaagcgggtgctggtttgtctggttgagaaggaagtcgaatttgaggttgtccctgttgatgtcactaagggggagcagaaggatcctgagtacctcaaactacagccatttggagttgttcctgtcatcaagatggagattataccttatatgaatctcgtgctataatgaggtattatgcagaaaaatacagatctcaaggggttgagttgctgggaaaaacaatagaagagaggggtctagtggagcaatggctagaagttgaagcacacaactttcatccacaagcctacaacttgtgtcttc

SEQ ID NO: 755 - DNA, 304 bp, Glycine max
  Clone ID: LIB3028-056-Q1-B1-A11
tcgtaatcgccgaaaaagacgggtttccggcaagctttacattccgaaaaccacttagccaccaacgcaaaagcttcctattttagtttacttccacggcggcgccttcataattggaacaccgttttctccgaagtaccacaagctactcaacaacgttgtttcaaaggcgaatgtgataggcgtttccgttgaccacatgacggcacccgagcagccggttcccattgcccccgaggattcatggagtgctctcaaatgggcctattcggaaatctttggaatcggtgttgaatagtggccg

SEQ ID NO: 756 - DNA, 387 bp, Glycine max
  Clone ID: LIB3028-056-Q1-B1-A12
ctctctcctcctcgatcccaattccactagggattcaattccgatgcgattccgagcttgttagatccacgacaacgtttcgtttcccagattctcttgtaaaaaaaaataatcttcctttgcccaacaggtaagttggaaaaaaatggaccatgacaagactgggtgccaagctcctcctgaaggtcctatattgtgcatcaacaactgtggattttttggaagtgcagctaccatgaatatgtgttctaaatgccacaaagacatgttgctgaaacaggagcaggccaagcttgcagcatcatccattgggaatattatgaatgggtcttcaagcagcactgaaaaggaacctgttgttgccgctgctgctgctaatgttgatat

SEQ ID NO: 757 - DNA, 376 bp, Glycine max
  Clone ID: LIB3028-056-Q1-B1-A2
gttcggtggagggagggagccgtagcagcggaagctctagcttgggtagcgaatcacaatggcgagaggattaaagaagcatctgaagaggcttaatgccccaaagcattggatgcttgacaaactgggtggtgcatttgctcctaagccctcatctggaccacacaaatcgagggaatgcctgccactcatactcattttgcgaaaccggctgaagtatgctctaacataccgtgaagtcattgctattctgatgcagcgacatgtccttgttgatggcaaagtcaggactgacaaaacataccctgctggttttatggatgttgtatcaatccctaaaacaaatgagaacttccgcctgctgtatgacaccaaa

SEQ ID NO: 758 - DNA, 400 bp, Glycine max
  unsure (1)..(400): unsure at all n locations
  Clone ID: LIB3028-056-Q1-B1-A3
tggcaacaaccttcaagtactttacttccatcctcttcctcaccctcgtcatcaaagggtcatgtgatgactgttccttgaacaacatcaatattggcacatcaagaactgggagagaaatccagggccagcctgagtggaacgtgaccgtgatcaacaattgcaactgtgaacagagtcagataaagttgtcttgcaaaggttttcaaagtgcagaaagtgttgacccttcaattctttccatggaaggtgatagctgcttactcatcaatgggaatccaatgaagggttctgatactgttaacttctcctatgcctgggatcctccctttctgcttttgcctacaagctctgttttaggtccttgttcatanggatttgcttaacagaatatgaaaaa

SEQ ID NO: 759 - DNA, 314 bp, Glycine max
  Clone ID: LIB3028-056-Q1-B1-A4
tttctctcgcaagattctctttcttcctctcagaaagctggtctgcaatccatagagttttgccttttccccttttcagcattgatcatttgattacacagtgcatgcaattgagtatcagtgttttcaatttgatagaagatattgattcattgattctttaggtcgatcattcgccatgaatgaaagcaagacaaagaatctaaatttgatagaattgagtcaaaatttcgccatgagtttctctgaccatactccatccttcatgaggtcaccggcgtcattttccacagacaccgatgccattgacgtga

SEQ ID NO: 760 - DNA, 358 bp, Glycine max
  Clone ID: LIB3028-056-Q1-B1-A6
aagcaattaattaagcactctaaaacatatctttatttccttgtctacatatcttgaaaaactcaatcatggctagtgtttcttcggttttagctccatttagaaggcttgatgggaaggtggcgattatcactggtggtgcgagtggtctaggtgcagccactgcaagactcttctctaagcatggagcatatgtagtcatagctgatattcaagacgacttgggtctctctgttgccaaagagttagaatctgcttcctatgtccattgcgatgtgacaaaggaagaggacgttgaaaactgcgtgaacacaacggtttccaagtatggcaaattagatatcatgtttaacaatgc

SEQ ID NO: 761 - DNA, 310 bp, Glycine max
  unsure (1)..(310): unsure at all n locations
  Clone ID: LIB3028-056-Q1-B1-A8
tgaacggggaaagaagaaactcttggaagggaatagggttgaattcacagatggttcagatccctcactttattctggaaagataattgaatgttcttgggattttgacaaactggaatggaagtttatgcgaatcagaacagacaaatcaactccgaatgagtttaatacttacaggaaggtcatgcgaagcataagagacaacatcaacgagggaagatttgttgaatgaaataagtgagataattcgccttcccatgtatgctgacaggatcagaattgatagcanagcgaatcagcatgctaatgt

SEQ ID NO: 762 - DNA, 395 bp, Glycine max
  Clone ID: LIB3028-056-Q1-B1-B1
caaccaccaaaccacaccgtcgcacccattccatcgctgattcctccaatggcttccactaccaccactttctctctttctctccgcaccaaccaacaaactccattccccaaaccctctttcttctccaataacaaccatctgcatttcaactctaataattgggcctggacctctgtttccactgctcgcaagtcaaggatatgcgtcacttcctctcaagttttggattccttagcagcaaaatccgaacccgctcttcccaccaccgtcgaagtcgatttgggtaatcggagctatcccatttacatcggatccgggttactaaaccaacccgactatctccagaggcacgtgcatggaaagaaggtcctaattgtaactaacaaaacggt

SEQ ID NO: 763 - DNA, 386 bp, Glycine max
  unsure (1)..(386): unsure at all n locations
  Clone ID: LIB3028-056-Q1-B1-B10
gaacatgcttagaaaactgccaagcccacccatattctctcaaaactttcaaccatgaactgaacaacaacaacaacaacaacagggccacccgtacagacccacctccaaagagatcatttttattaccaattttccgatttcacagagaaaattctttgtgggcatctcttcaaaaatgtcaagcttccccaacacggtggcggaaggccgcaggtccggcaaggcaccggaaaaatccaccttttctcagacttgcagcctcttgagccagttcttgaaggagaaacgtgcttctgctgattccacccttggaattggtggaaaaatggaacctaaagcgaataccaaggctttgttangaagcttgcaaaactctgatgggg

SEQ ID NO: 764 - DNA, 352 bp, Glycine max
  Clone ID: LIB3028-056-Q1-B1-B11
cccgattcatttccaccagcacaagaagcatggctgcaatatcaataccttctcacatgaaagcttggacatactctgagtatggaaaatccaaggaagttctcaagtttaatcagagtgtggctttgcctgaggtgaaggaagaccaggtcctcatcaaggtcgctgctgcttcccttaaccccattgatcataagagaatggaaggcttttcaagaacagcgactcccctttacctactgctccgggttatgatgttgctggagtggtggttaaagtgggaagtgaagtgaagaaatttaaggttggggatgaagtttatggtgatatcaatgtgaaagctttggaatat

SEQ ID NO: 765 - DNA, 393 bp, Glycine max
  Clone ID: LIB3028-056-Q1-B1-B12
attccaatatattccattctctctgtgtatttccctacctctcccttcaagatgcagatcttcgtcaagaccctcaccggcaagaccatcacccttgaggtggaaagctctgacaccatcgacaacgtcaaggccaagatccaggacaaggaaggaatccccccggaccagcaacgtctcattttcgccggaaagcaacttgaggacggccgtacccttgctgactacaacattcagaaggagagtactcttcacctcgtcctccgtctccgtggtggcatgcagatcttcgttaagacactcaccggcaagaccataaccctagaggttgaaagctccgacaccatcgataacgtcaaggccaagatccaggacaaggagggtatccccccg

SEQ ID NO: 766 - DNA, 383 bp, Glycine max
  Clone ID: LIB3028-056-Q1-B1-B2
gaaaaatcttccagaaccaaccttggccaccatcaagattttggcatggaggcttactccatagatggtgtttcttcacaaagtgagtccaaattctacgatgatgatggtcatgttaaacgaacagggaacgtttggactacaagctcgcacataataacagcagtggtgggttctggggtgctgtctttggcatgggccatggctcaaatgggttgggttgctgggcctgtagttatgatcttcttcagtgctgttacgttgtatacgacgtcgcttctggctgattgttatcggtgcggtgaccccgttacggggaagagaaactatactttcatggatgcaattcaatccattcttggcgggtattatgatacgttttg

SEQ ID NO: 767 - DNA, 392 bp, Glycine max
  Clone ID: LIB3028-056-Q1-B1-B3
gaaacatggctgaagagggtcaggttgtcggcgtccacaccgttgatgcgtggaaccagcaactgcagaatggaaaagactcccaaaaattgattgtggtggattttactgcttcctggtgtggtccatgccgttttattgccccagttctggcagagattgctaggcatactcctcaagtgatcttcctcaaggtggatgtggatgaagtgaggcctgttgctgaggaatattccattgaggccatgccaaccttcctcttcttgaaagatggcaagatcgtggataaggttgttggtgctaagaaggaggagctgcaactcaccatagccaagcatgtatctgctgctgctgcttcttcttgaagtgaagtatcatcatatgaaagaaga

SEQ ID NO: 768 - DNA, 392 bp, Glycine max
  Clone ID: LIB3028-056-Q1-B1-B4
tgtgcctctcctctcgctgcgttttccaatggcggccataacccgcctcctaaatcgcacctcttccctctcttccgtggcgcgtggattctcatctcacgcatcgccgccgcgcaaggaggagaggaatgtccagtgggtgttcctgggttgccccggcgtcggaaaaggcacctacgccagtcgcctctgcaacctccaacggcccccctttcttcccagctatcagaaattgttaatcaaggaaaattggtgtcagatgaaatcatcataagtttattgtcaaagaggctggctgatggggaagctaaaggagaatcgggatttattcttgatggttttccacgaacaataaagcaagcggaaatattggaaggggtaactgacattga

SEQ ID NO: 769 - DNA, 392 bp, Glycine max
  Clone ID: LIB3028-056-Q1-B1-B6
aatcactccccttgtcccctcgaactttctctcttcgggttctcgtcaaaacgcaaagatgcaagttccattgatcgacatcgacagaatcaacgatctccaagtgggtctgaactctctgcagaacccatccttcccaatcccttctcagatcacaacctccctcgcttacaatttctgcaaatggggcgcagtcattctcgcccttgtcgccaccttctgcagcatcatcaacagagtcactatcttcatcatccgcttccgcgccaaagccccttctctcccatccctaaccctaaacgacgacaatttttacacctcctcctcctctgacgacgacgacgacgacgataacgacgacgacctaacctactcctcttccgagcccgaag

SEQ ID NO: 770 - DNA, 383 bp, Glycine max
  Clone ID: LIB3028-056-Q1-B1-B7
gcaaaaaaaaaagtcagtgaagtaaataagctgaaacaagaaaaaacgttgggttcagtttgcatcaatggcggatctgaagaaccgtaatttcctcacctacgcgtacattcttctctacattactctctccagcggccaaatcttcttcaacaagtgggttttgtcttctaaggaaattaacttcccttatcctttggggttgactctacttcacatggtcttctcctctgttctgtgttttgtgttaaccaagattctgaaggttatgaaggttgaggagggaatgactcctgaaatatacgctacttcggtagtgccaattggggccatgtttgcaatgactctttggctgggaaatactgcctacctgtatatttctg

SEQ ID NO: 771 - DNA, 351 bp, Glycine max
  unsure (1)..(351): unsure at all n locations
  Clone ID: LIB3028-056-Q1-B1-B8
gcggcttttggggaactccggacagtagcaggtggtaagaagggacacaagactagcaattaaatcccaaacactagaatctggtgtgagatatttgtccatttagctttgattttcatcatggaattatgttcaaacaaatctattgatttttttttcatttacatgatatccagagtttagtattatatccaatactcagatgtccaatgattaattataccttcagctacaagaaagtacaaagccttttgtaccatatatatgtaattctaacttgcctgtttgcaaggattgggttcacagatacattcanagaaggggtttatattggaacatgaatttagacat

SEQ ID NO: 772 - DNA, 376 bp, Glycine max
  Clone ID: LIB3028-056-Q1-B1-B9
cgcagccacgcgatcagctgctgaagatacttatcatattatccaaaagggtaagcaagcatttcacaaattctccaccccatttatttttcatgctattttccttttttctcggagcctaaagaggtaaaatttgattcttataacgttttttatttttactttccttgtttaaattcgggttatacaccaacgtgcaagtataaaataggttttattgtagtaccgtattttactttgcttctgtggtggcatcggttcaatgttcctggttgttttgatttgaattattgttattatctgcgaaggcctttgttgtcagactaattcaacatgtctgttccagggaatatctcaagtcatgatttcgagaaaa

SEQ ID NO: 773 - DNA, 396 bp, Glycine max
  Clone ID: LIB3028-056-Q1-B1-C1
ggatgatctatatcagatgctaccgatgagcttaaggttatctctcaaggccaaactgaagtcctatgtcaagagtttggccatatatgatgctcctcttgcccatgactggaaggagaatcttgatgggatactcaagtggctcgccccacttgggcataacatgatcagatggcaaagtgagcgtaattttgagcaacaccaaattgttagccggacaaatgttctgctacttcagactttatactttgctgacagggaaaagaccgaggaatcaatctgtgaacttcttgttgggttgaattacatatgccggtatgagcatcaacaaaatgctctactggattgtgcaagcagtttcgattttgaagattgtgtggagtggcaattgcaatg

SEQ ID NO: 774 - DNA, 399 bp, Glycine max
  Clone ID: LIB3028-056-Q1-B1-C10
gaacaactatactctctctatcgcactcactccctccgtcgcccgaacgcatctccgatcaaccaaccgccgcatttccagtgattagccactttgatcctcctgcagcgccgtcgtttcctcagatccgtggctgtaatgcgaaagttgttggaggcgaagcagcagcatccgcggattaggaagatccttcttcccaattcgttatcctagttagggttagggtttcaataatcattcccaagaaatgttcaagcgaatcatgaagggagggcagaagaagccctccaagacggacccgagcgatccgtcgcccttggctccggcggcggcgggtgcggcagccgctccggcgctggtggttcctccgccgtcgggcaccatagagcctctgcctct

SEQ ID NO: 775 - DNA, 379 bp, Glycine max
  Clone ID: LIB3028-056-Q1-B1-C11
actactttgactcctttaccataccattacaataattatcaaacctaaccagtaaaaatggtgaccgtggaggaaatccgcaacgctcagcgttcccatggacccgccaccatcttggccttcggcaccgccacgccgtccaactgcgtctcccaagccgattaccctgactactacttccgcattaccaacagcgaacacatgactgatctcaaagagaagttcaagcgcatgtgtgaaaagtccatgataaagaagcgatacatgcacctgacggaggagtttctgaaagagaacccgaacatgtgcgagtacatggcgccatcgctggacgtgagacaagacgtagtggtgatggacgtgccgaagctgggaaaac

SEQ ID NO: 776 - DNA, 172 bp, Glycine max
  Clone ID: LIB3028-056-Q1-B1-C12
gtttacttttgtctgttctacgaatgaacttggatggtttttcttatactgtaattgctggtagtctgcggcataggaatttgtttgtgactgagaggattgccttgtatgctggtaagttgttggcttttgcatgattcagtttgttaatgttagtctttaaatgtcttgt

SEQ ID NO: 777 - DNA, 398 bp, Glycine max
  Clone ID: LIB3028-056-Q1-B1-C3
cttcaatctcgatcagacatgttcatgggttttgatgaaaatgatggggacgatgatataagagaggagtttctctgcccattttgttctgagtattttgatatcgttggattatgctgccacattgatgaagagcatccaatggaggcaaaaaatggggtatgtccagtttgtgcattgagggtgggggttgatatggtagcacatataaccctacaacatgggagtatatttaagatgcagcgcaaaaggaaatcacggaaaggtggatcgtattcaacactatctttattgaggaaggaactacgagaaggaaatttgcaatccctttttggcggatcttcatgtatagtgtcctcatctaatgcagatccactgttgtcatcatttatattgcc

SEQ ID NO: 778 - DNA, 391 bp, Glycine max
  unsure (1)..(391): unsure at all n locations
  Clone ID: LIB3028-056-Q1-B1-C4
caaaggagatgattcaaacacattgccctgctccagcacaagatattaagatattgagatgtggccccccacctatgaacaaggccatggctgctcaccttgaagcccttggatatgctcctgagatgcagttccagttctgattctcttcattgggggtgcttaacattgcatggatttcatggcctaggccattgaaaaacatatagcaactttttgtttcttttttcctggctatgaatctgagaaacattggactgacagtgcattcagtttcacaaggttcttcanagttgaggcctgaataattgcttcttgtatgaaatgagattgataacaccatgtgctagagttgcaaactatgacttgttagtattgactaaaattgtca

SEQ ID NO: 779 - DNA, 395 bp, Glycine max
  Clone ID: LIB3028-056-Q1-B1-C5
gcaaaccaattcaacacagtgaccgcagatggaaccaagcagaagaacatggccacaggaattgtgctccagaactgcgagatcttgccggagcaggctctgttcccttcaaggttccaaacgaaatcgtacttggggaggccgtggaaggagttcgcgagaacagtggttatggaatcgaacattggcgacttcattcagccagaggggtggaccccttgggatgggaacctgtatcttgatacgttgtactatgctgagtatgctaacgttggacctggttctaacgttcaaggaagggtaaagtggaggggttaccatcccaatattaataagaacgaagctgcacaattcactgctgcccaattcctcagaggtggacctgctggagatgc

SEQ ID NO: 780 - DNA, 394 bp, Glycine max
  Clone ID: LIB3028-056-Q1-B1-C7
gttttattgaaagagttgaagacacaaatgaagtaatataagagtactgtgttgaagagaagaaagaagtaataaagagtgctctgttgaagaaaagaaagaagtaataagagttctgttcaaggtgatgttagtgtccttgaaggtttggaaggttgagtttgaattcattgtgaagaagttgaagtcttgaagagttcaatctcaattaatactttggcttctacgaggttagcaaatccatgtggtgtttataattgatttctatggagtgttgagaaagtgacttgtgatagtttgggagtcaggatcatatttgtggatatctgcaatcaagccaccttccgtatgcaggtgtgtttacttattaaaccatgcatatggtgtaacttaa

SEQ ID NO: 781 - DNA, 181 bp, Glycine max
  Clone ID: LIB3028-056-Q1-B1-C9
ggacaagtgaagaatgagcaaaccttgtgaatggtttttctaattacctctggcttaagtagctctagtatacaaacaaaatatagccttttttaggtcctaatttatataacacagtgcccagtgtacaattacacagttgctccactgcctttatattgaattatgcatcatcagtaat

SEQ ID NO: 782 - DNA, 370 bp, Glycine max
  Clone ID: LIB3028-056-Q1-B1-D11
cggatataaacaataaaataaaataaaacagaagagaaggaaacagaagtaaaaaaaaaataaaatgggttacacaagatcttctcttctgtccgtggctcttgtcttggcattctgttcaagcattcagggtttggacatcaccaaattgttgggcgaatatcccgaatatgcacagttcaacaaatacctaactgaaaccaagctggcggaccaaatcaacagccgtaacgccgttacagtccttgcccttgacgacgccgcaatggcttccctctccggcaagtcgcaagacgccgttaaggccatccttagcacccatgtgctcgtcaacttctacgacgagaagaagctgatggaagccgaaagt

SEQ ID NO: 783 - DNA, 400 bp, Glycine max
  Clone ID: LIB3028-056-Q1-B1-D12
gatcaagatgattatgaggttgtgcgcaaagtgggaaggggaaagtacagtgaggtttttgaaggcataaatgttaatagcaatgagcgttgtataatcaagattcttaagcctgtcaagaaaaagaagattaaaagagagataaaaatacttcagaacctttgtggtggcccaaatattgtcaagcttcttgatattgtcagagatcagcactctaaaactcctagcttaatatttgagtatgtcaacagtacagattttaaagttttgtatccaaccttgactgattatgacatacgctattacatatatgagcttcttaaggtaacgtgatccttcaatctctcatggtataccttgactggtgctctgtgtcctctccataatgtatatattggag

SEQ ID NO: 784 - DNA, 395 bp, Glycine max
  Clone ID: LIB3028-056-Q1-B1-D2
gctggtgcatgtttatttgaagagcttgggttattctacattggcccagtagatggccatgacatagaagaccttgtgcacatcctgaaaagtgtcaagggtatgccgacacttggacctgttctcattcatgtaatcactgagaaaggaaaaggttatcatccagctgaagttgctcctgacaagatgcacggtgttgtgaaatttgatcctaagtcagggaagcaattgaaatccaaagctagtacgcggtcttacacgcagtattttgcagaatctttgacagcagaagcagaagttgatgagaaaattgttgccatccatgctgcaatgggaaggggcacggggcttaacttgtttcaaaagcgcttccccgaacgatgttttgatgttgg

SEQ ID NO: 785 - DNA, 397 bp, Glycine max
  Clone ID: LIB3028-056-Q1-B1-D3
gaaaagatctcaccccggtttggtaaagttacatgtggagatattgtagtcttgcgcaatcctcaacaccctaggcactttatgaccaaacgtctggttggattggagggtgatagcgttacatacatttccaatcctgagaccaatgaatatgagggtgatagttttacacacatttcctctcctgataacggtgataagtctaagacgattgtggtgccaaagggtgccgtttgggttgagggagataacaagtataacagcaatgattcaagaaaatttggtcctgttccttatgaccttattgatggcaagatgttctggaggataacgccacttaaaaaatttggacctttctggaataaatgatctgaagcaaagcattctgtcatggaag

SEQ ID NO: 786 - DNA, 392 bp, Glycine max
  Clone ID: LIB3028-053-Q1-B1-F3
gctgcttctcctatggcaagccaactcaagtccaccttcactaaaactcttgtagctcccaagggcctctctgcctcttcaccactccacctcctgccttctaagaggcaatttagcttcactgttagggccatccaatcagaaaagccaacctatcaagtgattcaaccaatcaacggtgatcccttcattggaagccttgaaaccccagttacatccagccccttgattgcatggtacttatcgaacctccccgccatcaggaacgcaattaagcccactactaacagggatcgaggtgggcctggcccatggctaccttctggtggggccattcgtgaaggccgggcctctgaggaacacccagatcgccgggcaagcaggctctctcg

SEQ ID NO: 787 - DNA, 377 bp, Glycine max
  Clone ID: LIB3028-051-Q1-B1-E8
gtgggaaaccaactaaggaataccctttcaaaatggcttcttctgtgtcatccatggtttctaccaccctcctcctaattaccatctgcacactgtcctcacttctgtcagttgcatctgcagcaacagaggagggacgaacaaggccattcaaaagggtctatgcctttggagactctttcacagacactggcaacacccaaaatgcagaaggtccaagtggctttggccatgtttcaaactctccctatggaaccactttctttaaccactccaccaataggtactcagatggtaggcttgtgattgattttgtggctgaagcactttcactgccttacttgcccccctaccgtcatagcaaaggcaatgacact

SEQ ID NO: 788 - DNA, 61 bp, Glycine max
  Clone ID: LIB3028-051-Q1-B1-E9
acttaatgtacaatacatatcactgagatattaaggcatttggctttgttccttggaactc

SEQ ID NO: 789 - DNA, 411 bp, Glycine max
  Clone ID: LIB3028-051-Q1-B1-F11
tcggaatattccctttcttcgttttgaatcactggacggcatggccacttccaatggcttcgtcgacggcacttctccggaatccgcattgatctttctcggcagcggttgttcgagcatggttcccaacgtcatgtgcctccttcagccttctgaccctccctgccccgtctgcgtccagtcattgtctatccctcccgaacgaaaccctaattacaggtcctcttttctcttctttcatttcttttctctttcaagaaatttcctcaagatctcgatttgcaggtgcaatacgtctctcttaattgattactgcggcgacgccaacgctggtgatcgtaagtatatattgatcgacgtcggcaagaccttcagggagaccgtgcttaggtggttcgttgcccatcggat

SEQ ID NO: 790 - DNA, 269 bp, Glycine max
  Clone ID: LIB3028-051-Q1-B1-F12
ctcggtcagagtcttctcacagagaaaacaggaaagcgagaaccttcttaccccttcacctcttctctctttcttgggcctctcttttcctatttctttctttctctcacgtttcgttccatcttccctcacgcctcaccccacgtcacccaccttcttctttctctctttctccccttttccctttagtcttcgtttgttcttcccttttgggttcacttgtttctctttgatctcatggagaagatgaaaggggttgtctccttgga

SEQ ID NO: 791 - DNA, 371 bp, Glycine max
  Clone ID: LIB3028-051-Q1-B1-F2
gtgtattcccagtcactattcacttccctccggattatcctttcaagcctcctaaggttgcctttaggactaaggtgtttcacccgaacatcaatagcaatggtagcatttgtcttgatatcctgaaggagcagtggagccctgcactcaccatctctaaggtactgctttctatctgctcattgctgactgatccaaatcctgatgatccacttgttccggaaatcgctcacatgtacaaaactgaccgggccaagtatgaggccactgcacgcagctggacccagaagtatgccatgggctgatttgtgtttggataatgtatattgaaatggattgcatctatgaaaacctttgtgggtttgcttttc

SEQ ID NO: 792 - DNA, 384 bp, Glycine max
  Clone ID: LIB3028-051-Q1-B1-F3
agaaaaacaaaagagtagtggcctttaagtggtgaagaacaagagctcaaatcaaatcgaatcgaaaaaagaaagaaagatcatattcatggcgatggcaagcctggctcgacggaagggttacgccgtcgttttgtcgtcgaggtcgtcgttttgtctgacaagctggaggggattcgcgtccggatctgacgaaaacgacgtcgtcgtcatcggcggcggtcccggcggctacgtggccgccatcaaagccgcgcagctcggtctgaaaaccacttgcatcgaaaagcgtggcactctcggcggtacctgcctcaacgtcggatgcatcccttccaaggcacttctgcattcttcccacatgtatcatgaggctaaacatgc

SEQ ID NO: 793 - DNA, 376 bp, Glycine max
  Clone ID: LIB3028-051-Q1-B1-F4
tggttcttcagaatgatattgatttgctgaatcctccagctgagttggagaagagaaagcacaaactcaagcgtcttgttcagtcaccaaactctttcttcatggatgttaagtgccatggatgcttcaacataacaactgtgtttagccactctcaaactgttgtggtgtgcggaaactgccagactgttttgtgccaaccaacagggggacgggcgaggttaaccgaaggttgctcatttaggaagaagggagattgaatggtttgttaaacatacttttctttgtcaatgatttgacattttcggttgttaggtttttgagatggaatcaatttcagttatggtatactaattttgttaaattgtaagacaat

SEQ ID NO: 794 - DNA, 372 bp, Glycine max
  Clone ID: LIB3028-051-Q1-B1-F5
tgtgaggcgagggtaaggtcgcgttgtgttgcgtcgtgtcgtgcgctgttcctctgtttctcgtttttgtgttcagaccgaaccctagctccgcatcgcaaccatgtcgaccaagcaaggtggaaaagctaagcctttgaagaaacccaagtctgataagaaggattacgacgagattgatgtggctaacattcagaagaaaaaggaagaggagaaggcgctaaaggagttgaaagccaaggcgcaacagaagggaagctttggaggttctgggctcaagaaaagtggaaagaaataagggctctttatcatgattgtatgcattcaatattgagccctgtaattacagttgctaccatgataacttctctt

SEQ ID NO: 795 - DNA, 363 bp, Glycine max
  Clone ID: LIB3028-051-Q1-B1-F6
ttccagagaatatcacacgaatcccaccctcccccagggtacggatctccttaccctccaccccaaccgggttacccatccgcaccgcctcatgaagggtaccctccgccgccgccgcctcacggatacggtgggtaccctccgccgcagccgccgcagcgtccgccgtacgactcctatcagggttacttcgataacgggcatccaccgccgcctccgccgccgcactaccactaccagcacgtggatcaccatcaccaccatgaggagcctgggtgcttttcgttcctccgaggctgcatcgcagcgctttgctgttgttgtgtgctagaggagtgttgcttctgataatcacatcgtaaa

SEQ ID NO: 796 - DNA, 373 bp, Glycine max
  Clone ID: LIB3028-051-Q1-B1-F7
gtgaaaacagctgaggcaattgagaggattctgactcacaataggaaaggcatcaatttcacaattctgtcaaaccctgagtttcttgctgagggtacagcaattgcagacctgtttaagccggatcgagtcctcatcggaggcagggaaaccccagagggtcaaaaggctattcattctctgaagagtgtttatgcccattgggttcctgaggacagaatcctttgcaccaatttgtggtctgctgaactctcaaagcttgcagccaatgctttcctggcccagaggatctcctctgtgaatgccatgtcggcgctttgcgaggcaactggtgctgatgtctcccaggtgtcacactcaatcgggacagact

SEQ ID NO: 797 - DNA, 299 bp, Glycine max
  Clone ID: LIB3028-051-Q1-B1-F8
gagagagaggagcggaggagagaaaatgacgacgaggttcaagaagaacaggaagaagagaggccacgtcagcgccggtcacggtcgtatcgggaagcaccgcaagcatcccggtggtcggggtaacgccggtggcatgcaccaacaaccgcatcctcttcgacagttacaatccgggttccttcgaaaaggtggttatccccaacttcaacaacttcggcacaaattctaatggcccaaccttcacaatgattagctaagggcccccctaacccaagaaggccaaggacaaggccacc

SEQ ID NO: 798 - DNA, 385 bp, Glycine max
  Clone ID: LIB3028-051-Q1-B1-F9
cttgcatcttcttttcaaaattcttccccaccccacaagcaaagcacccttaacttttccacttcatttttttttttttggttcctctttatttctttctctctaccccatttttctttttctgggtttctgtgctttttgttgggatctacttcacaatgggtttctcacaagacccctgcactgattccaatgccccaacctcaacctcttccaccttagttgtagatcactactgtgactacgacaagctcaaattcaaaacctttctcagaaaaatgttctgggaattcggtctcgcctgtgtggccaacccttcccagcgccggagaagctccggcgacggcaaaaagacgaacatggagaacaacaaggcgtggctgct

SEQ ID NO: 799 - DNA, 363 bp, Glycine max
  Clone ID: LIB3028-051-Q1-B1-G1
caccagatcaacaacagcaccaccctcgtctcctccatgttccaggccaccggctcagcctccggcaccgccggctacgtcaacatcaccaacctcaaggccggcaaggtcggcttcgccgccgaagacaacgacggctccctccactccttctacgtcaaatccgtccaggaaatgccctactacatctccgtcctccaaatcagcgccgccataagctccgccgacgccgaggcccccaccgccgcaccctccgccatcgatctgatctccattatgtccaaacaaggctgcaaggcattcgcggaccttttaagaggctccaaagcgcttccggctttcaaggaaaacgttgacgggggc

SEQ ID NO: 800 - DNA, 409 bp, Glycine max
  Clone ID: LIB3028-051-Q1-B1-G10
cctgtttccatttcctctcacaaaaatcacttattatgaacacacgaaaagacatggaccggctcaaaggcccatggagcccggaggaggacgaggctctgcagaagctggtggagaaacacgggcccaggaactggtccctcatcagcaagtccatcccgggccgctccggcaagtcctgcaggctccgctggtgcaaccagctgtccccccaggtggagcaccgggccttcacccacgaagaggacgacaccattatccgggcccatgcccgcttcggcaacaagtgggccaccatagcccgcctcctccacggcagaactgacaacgccatcaaaaaccactggaactctcacttgaaacgcacgtgcacttcaaccatgattgacgacgacaacactccccggct

SEQ ID NO: 801 - DNA, 412 bp, Glycine max
  unsure (1)..(412): unsure at all n locations
  Clone ID: LIB3028-051-Q1-B1-G11
aattacccttcccaattttcaccaaaacctaatactcccacaccaatcttcgatcatggacgccgattcacaacctcaacaactcgaagagagaacagaggagcaagaactgaagtacctggaattcgtgcaattcgcgaccatacaggctctgatgcgctgcgccatcctctactcatacgccaaggagcgcgcgggtcctctgaagcccggtgtcgacaccgtggaggaggccgtgaagaccgtcgtggctccggtctacgataggttccaccttgtccccggcgaggtcctcaaatacgcggatcggaaggttgccgagttagacagccacgttccctccaacgtgaagaacgtctcctcncaggcctgctccgtcgtctctgaagtccgccgcgatggcgtctccgcc

SEQ ID NO: 802 - DNA, 202 bp, Glycine max
  Clone ID: LIB3028-051-Q1-B1-G12
atttctgcgtcaccattttcagatggcctcagaagtttgcaacgctgcttccataaccgcgacgtcctctctctcggcttccagcgcctcgaaaggacctgcggatgcagttgctacggtagtgtccttgaacttcaccatgcctcatgtccacagtctcaacggttccggcaatggctccgcgtcagcatcagcagcacca

SEQ ID NO: 803 - DNA, 312 bp, Glycine max
  Clone ID: LIB3028-051-Q1-B1-G2
gttgtggaaaatgtgcctacaaatagctccctgaaagcacatccacgctttcaagccgagaacttagacaagaacaagaatatatatgaacgaattgaaggccttgctaagaagcatcaggccactcctgcccagttggcattagcatgggtacttcagcaaggcgaggatgttgtacctatccctggaacaactaagattaagaacctggatcaaaacataggtgccttagcagtgaaactgtcagaaaaagacctgagagaaatttctgaggcggttcccattggtgatgtaccaggtggtagatactac

SEQ ID NO: 804 - DNA, 374 bp, Glycine max
  Clone ID: LIB3028-051-Q1-B1-G3
ccgagttcaaccattaacaagagctaattatcttgcttctcctcctcttgttgttgcctatgcccttgctggcacagtggacattgactttgacactgaacccattgggatagggaaggatggcacaaagatcttcttcagggatatttggccatccagtgaagaaatagcaaatgttgtacaatcaagtgtgctgcctgctatgtttagggacacatataatgcgatcacccaagggaatcccatgtggaataatttatctgttccaactggcactctttatgcttgggaccctacatcaacttatattcatgagccaccttattttagagatatgagcatgtctcccccaggctctcatggagtgaaagatg

SEQ ID NO: 805 - DNA, 346 bp, Glycine max
  Clone ID: LIB3028-051-Q1-B1-G4
gtgatttcagtgagtgatcggtgttcacttgatctcatcataatcgtcagcgtcaattgaagaagatgccgatcagaaacatcgccgtcggaaggcctgaagaggcgactcaccccgacacgttgaaggcggctttggctgagttcatctcaaccttcatcttcgtgttcgccggctcaggctccggcatcgcctacaacaagctcaccgacaacggcgctgccacccctgccggcctcatctccgcctccatcgcccatgcattcgccctcttcgtcgccgtctccgtcggcgccaagatctccggcggccacgtcaaccccgccgtcaccttcggcgccttcgt

SEQ ID NO: 806 - DNA, 372 bp, Glycine max
  Clone ID: LIB3028-051-Q1-B1-G5
tctctctctctctctttgtttcagtgtttgacaaatcacaaacgcaagggcgatctgagtggatgagatgagcacttcggagctgattcgccatcgccttccaacaaaacttcaaattagtataaataaaactttatttccttccccttttatttttcgtttcactttttctatcctcttttttttttttcttttgagattttcaattttcgagattacgttctatttttgtcttgctacggattctccaatatttcagaagctagatctaattgatatgctgtttggttgctcaggaattcgtgatcaggtatatcactgttaaaaaaaatacatatgcttttgcctctcttttttttcgtctttggattt

SEQ ID NO: 807 - DNA, 364 bp, Glycine max
  Clone ID: LIB3028-051-Q1-B1-G6
gccagctttgccctcggatggctcatcaccaatggtgcaggtcttgcatcatacccaattgacactgttagaagaagaatgatgatgacctctggtgaagctgtcaagtacaagagttccttggacgcattcacacagatcctcaagaatgagggcgccaagtccttgttcaagggtgccggtgctaacatcctccgtgccgttgctggtgctggtgtgcttgctggttacgacaagttgcaggttcttgtgttcggcaagaagtatggttctggtggtgcttaatttcagtgctgagtcagtgttattattattgttttttagatggcgatgataaaaaccgttctgagtttcaagagttttt

SEQ ID NO: 808 - DNA, 379 bp, Glycine max
  Clone ID: LIB3028-051-Q1-B1-G7
tgcaaacacacaaccctctcctctcctaatccataaaaactatctttcatttggcctcgagtagaagagaaagatgagtgtagaaattttggatggtgccaccattgtcaacttccttcaggatgaagaagcattcagtgcctcagttcttaaccggttcgcctaccttgacacagacaatgatggccttctctcgtatgcggagatgttgaaggagctccaaagcttgagggtgttggaaacgcactttggtattgatgtggagccagacccagatgagcttgctcgtgtttatgaatccttgttcgtacaattcgatcacaacttgaatggcaccattgatctcgacgaattcaagaaggaaacgaagcagatgatg

SEQ ID NO: 809 - DNA, 359 bp, Glycine max
  Clone ID: LIB3028-051-Q1-B1-G8
ccgagattccgtgagttgcaaaaatgaagacgattctttccaccgagaccatgaacatcccggacggcgtgagcatcaaagttcatgccaaggtcatcgaagttgagggcccccgcggaaaattggtgcgagacttcaagcatttgaatctcgattttcagctcattactgacgaaaacggtaaaagaaagctgaaaatcgacgcgtggtttggttctcggaaaacatccgccgccattcgcaccgccttgagccacgtggagaatcttatcaccggcgtcaccaagggctaccgctacaaaatgaggttcgtttatgcccattttcccatcaacgcaagcatcggcaacagcaacaag

SEQ ID NO: 810 - DNA, 409 bp, Glycine max
  unsure (1)..(409): unsure at all n locations
  Clone ID: LIB3028-051-Q1-B1-G9
atttccaaactcggggttcttctttaacttctggctctactgtcgcaacaacaaatcttcaaggagttcactctaatgatagaaggtttgcctctcattcttttcctgcaagccaagacagagcacagccatcagaacaatcgttctctgattctctgcgttccagatttaatgcagtatccacgagatacaaagaatcaatttcgaagggcacaaggggatggaaagagaggctgttctctcccaattcttctatgtcagaacttggttcagaagttaagagagaattgaatgccaaaattgctagcgtgtcncgattgatggagcgccttgaaacaacaagagaaaataatagggctgcaggaacttctttatcaaatccaaatcatttggtgaactgttccattgc

SEQ ID NO: 811 - DNA, 119 bp, Glycine max
  Clone ID: LIB3028-051-Q1-B1-H1
tacaaagaaaattcaatggtatacgtactttagaacatcatatataatactcaaagtacgtataccattgaatattatatatgatgttctaaagtgattttttttgcatgtatattttt

SEQ ID NO: 812 - DNA, 371 bp, Glycine max
  Clone ID: LIB3028-051-Q1-B1-H10
ataagacaaagcacaaagcaaagctcatccttgagttaaaaaatggcagcagcttcttccatggctctctcatccccatccttggctggcaaggccgtgaagctgggcccatcagccccagaagtgggaagggtgagcatgaggaagaccgtcaccaagcaggtctcctcaggaagcccatggtacggcccagaccgagtcaagtacttgggcccattctctggcgagcccccgtcctacctaaccggtgagttcccaggcgactacggctgggacactgctgggctttccgcagacccagaaaccttcgccaagaaccgtgaactcgaagtgatccactccacgtgggccatgctcggagccttgggctg

SEQ ID NO: 813 - DNA, 197 bp, Glycine max
  Clone ID: LIB3028-051-Q1-B1-H12
cgcgaacattagtaatcagattgttatttacgatgtttttccttcccttacctttttctgaccgacatgtattacaagcacttcagatcttaaaaagtaacaaattggttacaacggtttttgcagaataggagcttgtaacgtaagccatcgaattgattgacttgcaatggatgactatttcatttaattttaca

SEQ ID NO: 814 - DNA, 344 bp, Glycine max
  Clone ID: LIB3028-051-Q1-B1-H2
gggaggagtgtgtaaacctgagagaagtcaagtcattacgaaaaatgaatcacccaaatattgtgaagctgaaagaagttattcgagaaagtgatatcttgtactttgtttttgagtacatggaatgcaacctataccaactcatgaaagacagggaaaaactattttctgaagctgaagttagaaattggtgttttcaagtttttcaacgtcttgcttacatggcacagcgtggatacttccatcgtgacctgaagctgaaaactttcgggttacagggattcatcaaaatcgctgatttggactaacccgagaaatagttcacaaccaccctacactgagta

SEQ ID NO: 815 - DNA, 367 bp, Glycine max
  Clone ID: LIB3028-051-Q1-B1-H3
gttctctcacacactcactctccttctctctcctattgcggctagggtttgggtttttcactttcagcctctccattccttcaaccttcttcttctctttgatctctgatggagacgttccgtgtttagtagcaagggttagttgaggccttgtgtttggaaacgtacggtgtcgttttggagttgggaaaacaaataattctgagagatggcaaccacgaacccttttgatttgttgggtgacgacgctgaggacccttctcagctcatcgccgccgagcaactcaaggcggcggctgctgctgcggctgccaccgccgctcccaagaaggcgccggctcagcagatcaagccggctcagctccct

SEQ ID NO: 816 - DNA, 376 bp, Glycine max
  Clone ID: LIB3028-051-Q1-B1-H4
ccctccaccaccaacgtcgcatcctccaccttaccaccatgtgagccctccaccaccttctccatctcctcctccaccataccattacacatcaccacctcctccttccccagctcccgctcccaagtacatttacaaatcacctccacctccagtttacatatatgcttccccacctccagctatctacaagtaagttcgaattgcggaagcaccattcacgataaatcatgttctagtttttatcgaggaataaaggcaagctctatttggagtcaagtgaaacatctatcttcctgtccaagttctttgaataaaagtctgaatgtgtcatctctgcactaaaataattgtgattctgaccaagttgggtcca

SEQ ID NO: 817 - DNA, 362 bp, Glycine max
  Clone ID: LIB3028-051-Q1-B1-H6
cttccaacaaattatatttttcttacaaaaaaaatggcaggtgaggtggtgaagaaggaagagtctctcaacctgaaagtcactaacaagagccatgttcaatcagaggagaaaattggaagaaaagagtaccaattggtcacttttgatcttccctacttggccttttactacaaccagaagctcttgttttacaagggtgaagatttcgagggcatggtccaaaaactcaaagttggacttggagtggtgctgaaggagttccaccaacttgctggcaagttagggaaagatgaagagggggtgttcagagtggagtatgatgatgacatgcttggtgtggaggttgttgaagctgttgt

SEQ ID NO: 818 - DNA, 371 bp, Glycine max
  Clone ID: LIB3028-051-Q1-B1-H7
caagctcctacattctctctccaggttgggaattagtgcctttggtgatcatcatgttccttcttagaaggcaaacccagaataaccaggagaatgattcctcatatcaagatacaaaggtggctgaactcaagacaggtcttgggcccctctctggtcgtcgattaaagtattgcacagatgcatgtctaaggagatatttagaagcaagaaactggaatgttgataaagctaagaaaatgctggaggaaacactcaagtggagggcaacttataagccagaggaaatccgttgggctgaaatagcacatgagggtgaaacaggcaaagtctccagagctaacttccatgatcgacttgggaagactgtg

SEQ ID NO: 819 - DNA, 348 bp, Glycine max
  Clone ID: LIB3028-051-Q1-B1-H8
ctcattgctgttcaccattttcaattcattcctgtgttagattccaagtggtttggtttggtttgacataaataaacctttcaagatctcagaggggcagaagatcaaagccaagacaacacactctcatatataaaagagtgtctctgataatttgatctttgtttcttctctttctctcctttgagatttttcagcaccccaccaaggttttgtccgaaaagcttgaatttttcgcctaccctttacaatgatctcttcattgagacaacctgttgtagggatcagtggttctgatcttcttttgaggcaaagacatgcaaccctaattaaaggaaagtccctttt

SEQ ID NO: 820 - DNA, 410 bp, Glycine max
  Clone ID: LIB3028-051-Q1-B1-H9
gcttgataggaagactggcagcaacttacttcagtggcctgttgctgagatcgagagtttgagattgagaagtgatgaatttaaaaatttgaaggctaaaccagggtcagtggtgtcagtagatattgaaacagccacgcagttggacattgttgccgagtttgagatagacaaggaaacccttgacaaaattcctcaatccaacgaggaatacacgtgcagcaccagtggtggatctaaacaacgtggtgccttaggaccttttggtcttttggctttggcagatgaggggctttctgagtatactcctcagtacttttatgtcattaaagggagcaatggaaatcttaagacttccttttgtgctgatcaatcaaggtcttctcaagcaaatgatgttcgcaagcaaa

SEQ ID NO: 821 - DNA, 394 bp, Glycine max
  Clone ID: LIB3028-052-Q1-B1-A10
ctgagccccaatctcttgagcagcagaatcttcaggccaagccaggtaagcaagcacaacacaaccccgaaatggcttctgcttctgttcccatggctttctcgctgagctctgttatcaacaacaacaagccttcatccgaagccttcttcaggccactacccctacggcaaccaaagaggaccctcttcaccacaaaggcagtgtcaaactccaaggctcaaatcaatgcatctttgaaggagaaggcagttgcaggactcacagcagcttctgtgacagcatctatggtggttccggaggtggctcatgctgctggatatgagttctccccttccctcaagaactttctgctaagcatctttgctggtgggtttgttccaataaccaaaat

SEQ ID NO: 822 - DNA, 362 bp, Glycine max
  Clone ID: LIB3028-052-Q1-B1-A11
cagacatcgtaggaagaatactgtcctcgataagagatcaaaacaattgtgaagatcataatggcaccgaggtaaaacctcaagaagaaaaccagtcaaaggcttcccacatagcccaattccttccaacttctcgacgtattgtccagttttcaaatggcaagggtcctggaccaaatgcacgtattgtatacattgatggggcatttgatctcttccatgccggccatgttgagatacttaagagggctagggagcttggtgactttcttctagttggtatccactcagatgagacagtgagtgagcatagaggaaatcactatccaattatgcatctgcatgagcgtacccttagtgtg

SEQ ID NO: 823 - DNA, 411 bp, Glycine max
  Clone ID: LIB3028-052-Q1-B1-A9
ctcgagccgattcggctcgagttcataacataaagagtatagagcagcaaacgtaaaagtggatccaagaaggctacatggcaagcttccactatcttcacaagcatcagaggagaaagaggacacagtagaagagtttgatgcttataataattatgcatcttggtcttcagaaactgacatgtctgaaatggtttctgctcttgctcaagttatgggaactaccaatcggaacccatacatgccacaatcaacctcctttcctttctcaacttccgtggtcaaagatcaacctcaaccgtacccatctcaacctcctccagatcaagaggtggcaaagaagccacactacagaggagtgaggcagagaccatggggggaaatgggcagcagaaatccgtgacccaaaaa

SEQ ID NO: 824 - DNA, 409 bp, Glycine max
  Clone ID: LIB3028-052-Q1-B1-B12
aaaaaaactgattcatatttcactgtttggacactgcactgttgcaaaaccagtgaagaaaaagaaaaattcctggttttaattgtgtttggcactttggcttccatttagttgttgtagaaattttttaacactatttaactataaattgttacgaaatgttgttttctcatggaaatttactgtcatattgctttcatctttcaatttgttatctgggttgcaatcactgctaatttttattttacaggtatacttcaaggctacagatcctttcaatgagcgctggcaaagtgcttggatcatcactgcattctgggacattctagcatttgcattactctgtgttatatgctatctctgggccccatcccaaagctctcaaaggtatgcatattcggaggaagtg

SEQ ID NO: 825 - DNA, 401 bp, Glycine max
  Clone ID: LIB3028-052-Q1-B1-B9
cagcacccaaaaggtaaagagcacctggatgctgtatatttgacaggcgactgtgtcaagaaagatattgcttctgcattgtggtgtttccacagagcatcggaaaagggccatgctggggctgctatagcatatggatctcttcttcttaaaggtgttgaggttccagaatcggtaataaagttcagtttgacgagaggtgctgcagctcatagacgggggaggaataagggagctcttgcaattgatccagtagagatggcaagagaaaagtttcagatagcggcaaaagcagggtgtgagcttggattcaaatggcttgcaaggttagaggaggaagagaaacgggcactcacggaggaacattgagatgaaattgagacctttagtgtgcctttttt

SEQ ID NO: 826 - DNA, 355 bp, Glycine max
  Clone ID: LIB3028-052-Q1-B1-C10
gtcacacctcccagatatacgccatcaggcagagcatagccaaggctctcgtcgcttactaccagaagtacgtcgacgagcagtccaagaaggagatcaaggacatcctcgtcaggtacgaccgcaccctcctcgtcgccgatccccgccgctgcgagcccaagaagttcggtggtcgcggtgctcgcgccaggtttcagaagtcctaccgttgatttcctcctttttttttaagctattcatcataagttgttaaagtactttctctgttttattggttctgcgctgagttaagactaatcgaattctgaatacagttatacaatggttaacgttaagttatgtcgttattaac

SEQ ID NO: 827 - DNA, 361 bp, Glycine max
  Clone ID: LIB3028-052-Q1-B1-C11
gtgtctgcggaggacaaaaccactggacagaagaacaagattacaattaccaacgacaagggcaggctttctaaggaggagattgagaagatggtgcaggaagctgagaaatacaagtctgaggacgaggagcataagaagaaagtggaggccaaaaatgcattggaaaattatgcctataacatgaggaacacaatcaaggatgacaagattgcttccaaactgtcttctgatgataagaagaaaattgaagatgcgattgagcaggctatccaatggctagatggaaaccaacttgctgaggctgacgaatttgaggataagatgaaggagttggagagcatttgtaatcccatcatag

SEQ ID NO: 828 - DNA, 355 bp, Glycine max
  Clone ID: LIB3028-052-Q1-B1-C12
ggcggctataggttctctcaatgttccacgttctgcttcttcccgttcatcctttgtgggaagaaaaagcgttccacgcagcctttccttctctgcatcacaactttgtggagacaagattcccacagattcagttttattggcaccaaaaataggtcgcagtccagttatcgttactcctaaagcagtttctgattcccaaaactcacaaacgtgccttgatcccgatgctagcagaagtgtgcttggcattatacttggaggtggtgctgggactcggctttatccactcaccaagaagagggcaaagccagctgttcctcttggagctaactataggcttagtgatattcct

SEQ ID NO: 829 - DNA, 413 bp, Glycine max
  Clone ID: LIB3028-052-Q1-B1-C9
caaattagttcattctctttgcgcagttccctacctctcctttcaagatgcagatcttcgtcaagaccctcaccggaaagaccatcacccttgaggtggaaagctctgacaccatcgacaacgtcaaggccaagatccaggacaaggaaggaattcccccggatcagcaacgtctcatcttcgccggaaagcagctcgaggacggccgtaccctcgccgactacaacatccagaaggagtcaacccttcaccttgtccttcgtctccgtggtggcatgcagatcttcgtcaagactctcactggcaaaaccataaccctagaggtcgaaagctctgacaccattgacaacgtcaaggccaagattcaggacaaggaaggaaatcccccaagacaagaaaggtctcatcttcgc

SEQ ID NO: 830 - DNA, 362 bp, Glycine max
  Clone ID: LIB3028-052-Q1-B1-D10
caaaagctgaaatggagtccttactttggtgcattggccttaggcagaagacatgtatttctaatgaaggatccaagtttcatcgacgctgttgattgcacatttgacatgtggtggcagacttaacattggcataggtacagtgctcacaagaccaatgattatcatcagtcattctgcctaaggccaatgcaccaaaagctgaaatggagtccttactttggttatatcatatgctggctcctttttgtaatgctatttactgtgaaaggggcttaagtcgcttaagaagggttatcctgcttgcactcctattgaatacatcccaatttaatgtatataatgttttatcattaaaattt

SEQ ID NO: 831 - DNA, 379 bp, Glycine max
  Clone ID: LIB3028-052-Q1-B1-D11
cttgaatgaatatgcttattatgctcaggttgctggtttatattacagcataagtcacacagatggtggtttcgaggtgactctccgtggttacaatcacaaattaaggattctacttgaaactatagttgaaaagattgcgacatttgaagtgaaaactgacaggttttcagttatcaaggaaatggtaaccaaagaataccagaatttcaagtaccaacaaccttatcaacaggctatgtactattgttctttgatcttacaagatcaaacctggccttggatagaacagctagacgtacttcctgctcttcaagttgaagatcttgctaaatttgtaccagcaatgctctccaggacctttttagagttttatata

SEQ ID NO: 832 - DNA, 414 bp, Glycine max
  unsure (1)..(414): unsure at all n locations
  Clone ID: LIB3028-052-Q1-B1-D12
gtttgttgatcgagataactagaaacagtgtgatgaaaatgaaggtccttgttttcttcgttgctacaattttggtagcatggcaatgccatgcgtacgatatgttccctctccgaatgaacactggctatggtgcccgtactccggaggtgaaatgcgcaagttggaggcttgctgtggaagcacacaacatctttggctttgagaccattcctgaagagtgcgttgaagcaacaaaggaatacatccatggcgaacaatatagatcagactccaaaacagttaaccaacaagcttacttttatgccagagacctcgaagtccatcccaaggacacatttgtgttcagtatagatggcaccgtactctctaatattcatactacanaaaacatggatatggggtggagaaatt

SEQ ID NO: 833 - DNA, 368 bp, Glycine max
  Clone ID: LIB3028-052-Q1-B1-D9
aaaatcttcaggaaaaagtaaagacaaaaactgaaattcctgaacaactccacctttgtaggagttagttttatctttgttggcctatcctttctttccttcaaaaaaaaaaaaaaaaaacaccaaccctttaaactctccaatcaactactccaaaaatcaagagcaaaatcaaaagaaagaaaaggaaacaaacaccaacaccaacacctcatacacttgtctgtcatagggtgatctcctttagtgagaattgagaagccaagccactcaattcatcaccttctccctctccttttccaaggaaaaaagaaaaaaaaaatcatcaattccaatggaggtttcatgcaaaattttgagaagatcaa

SEQ ID NO: 834 - DNA, 313 bp, Glycine max
  Clone ID: LIB3028-052-Q1-B1-E10
aaatgctcccacgtttgatcacattgacagcaatgcgacacacaaggtcttaaatgaatgtgtggaagctgagaactggctcagggagaaacaacagcatcaggactcgcttccaaaatatgccacccctgtacttttgtcagctgacgtatgaccgaacgctgaagctgtggacaggttttgtaagctacctatgacgacaccaagtgccactgcgatccaagccagctacaccagaagcaccagcaaccccagctcctcacggtggtgagcagtagcaccaactacctcaaggagaatcctaatgccagta

SEQ ID NO: 835 - DNA, 263 bp, Glycine max
  Clone ID: LIB3028-052-Q1-B1-E11
gttcccagcttcttccttctgttatcaattattttatttaactttattcgcaccttgctaaattcttaagcttaggctggtgaatttccttttgttcagttatagaaagagaaggaaaatatgatttgactcctgagaaacaggggttgtaccggatcaagaaaaatgttttgaaatcggatggttgttgtgtctaattgtctatagcagctgatattatttattaacataccatttctgctgttgagggtagttgatgaatg

SEQ ID NO: 836 - DNA, 356 bp, Glycine max
  Clone ID: LIB3028-052-Q1-B1-E9
gacagttgccatgccctatgtatttagatatttggctgccgagttagcagcaatgaatataaaaatgactcttaagctcagtgatggagctggagccggagcctgatatgttatacttaaattgattggatgtgttaagtttgtgatttgtatcacaacaggaatgttcaatggaggctcagatgcttgctcacatcatggggagttaaaaaatttccaggccatgcattcatataggtgacatcacagactaatctgaattgctggctgcttttaacagatcctgatagtcgtgcaaggattgaagttagtcatgtgaaaatattgtttaatggattcaaatggtgggaggagat

SEQ ID NO: 837 - DNA, 368 bp, Glycine max
  Clone ID: LIB3028-052-Q1-B1-F10
gttgatccacaagtcgttacagcgctcgcaacttgtcatggacgcagcaacgggtgttggagtttgtgtcttcctattaatttcttacatggcgttcttaatcaaacgggctacagcaggttctgctcgcaagccaccggcagcatccggtggctggcctttgatcggtcatcttcacctcttgggtggctccggtcagcctctttacgaaaccctaggaacgttagcagacatgtatggcccaatattcagcatccgaattggtgttcaccctgccgttgtggtgagctcttgggagttagcaaaagagtgtttcaccactcttgacgtcactgtctcctctcgtcccaaattcagcgccgcaaaaa

SEQ ID NO: 838 - DNA, 378 bp, Glycine max
  Clone ID: LIB3028-052-Q1-B1-F12
ggttatattccatggaacccaattgaaccaaacacacaggattgctacttcgctgagtttggcaacactggaccaggttccgttgctcaagcaagagccaagtttggcaaaggtctcattagcaagcaggaggctgcacaattcactgctgagccttggctccaagctagcacttggttgcctgctgctggcgttcctttcgatgctagcttcaccaaagcttaaggatccgagacaaaccagcatcttgagtgttataatctcttttttagcctacctaaattaataaaactataaacaggaaatcgattacctaatttcaatgcagtcacacatagccactccattgtctgaggagctgatttgtaatcattcaat

SEQ ID NO: 839 - DNA, 363 bp, Glycine max
  Clone ID: LIB3028-052-Q1-B1-F9
cacccgacaacattggttctctaatgggacttcttggctccatcccggacaatgcatttcaaaagaatccggcagggataaactggaatctcaatcataggattgcatcagttgtatttggtggtttaaaacttgctagtgtgggatttatttcaagcataggagctgtcgcttcatcaaattctctatatgcaattcgtaaagtctttaatccagcagttgtcactgaacaacggattatgaggtcaccaatactcaaaactgcagttatatatgcatgctttcttggaatatcagcaaatctccgttatcagataattgctggggtagtggagcatcggctttctgaacagtttgcttctc

SEQ ID NO: 840 - DNA, 370 bp, Glycine max
  Clone ID: LIB3028-052-Q1-B1-G10
gcaattacgtactgtgtgggagagaaagagagatggctaagtggtgtatgttggtgttggttcttgctctagctctggctgtggccacaagtgccagagatgcactcgaagatgttggtctcaaggaccagaagaacttcatcagctatgctggagttggtggctattcaggaattggaagcaatggactaccttttggaggtgccggaataggtggtggcaccaccgggataggtggattgggaggattcggaggtcccattggcggtggtactggtggcagtgttggacgtggcgttggcggtggtagcatacctcatcgcaccccttgagtgaatgaacatgcatgcatgcatgcatatggaatttc

SEQ ID NO: 841 - DNA, 371 bp, Glycine max
  Clone ID: LIB3028-052-Q1-B1-G12
gattggtgaggtaaacttgaattgaagtgaagaaggagatggctgcaacctcttccttgtgctcatcgaccctccaatcccagatcaatggattcttccttcacaaaacctctctttcccatactccttccctcactttctccaggaggaaaatttcaaccacagtgaaggctacatctcgagtcgacaagttttcaaaaagcgatatcattgtctctccgtccattctttctgcaaacttttcagaattgggagagcaggtgaaagcagtggaattggctggttgtgattggattcacgttgatgtaatggatggtcgctttgttccaaatattacaattggacctcttgtggttgatgcattgcgccct

SEQ ID NO: 842 - DNA, 378 bp, Glycine max
  Clone ID: LIB3028-052-Q1-B1-G9
aaggacagcaccttttttgagagctgtggtgtagctgaccttatcacaacatgcttgggtggaagaaataggaaagttgctgaggcttatgcaaggaatggagggaagaggtcttttgatgagcttgaagcagaaatgctacaaggccagaaattgcagggtgtctcaactgcgagtgaggtttatgaggttctaagccatcgtgggtggctagagttgttccctctcttctcaacagtgcatgagataagcactggcctacttccaccatcggccatagttgaatacagtgagaagctacccaggtccttctaattcaaagcatatttgttgtataagaaaatataaattatagtgacagtatcaaggatatacaaa

SEQ ID NO: 843 - DNA, 357 bp, Glycine max
  Clone ID: LIB3028-052-Q1-B1-H10
gaagggtcgtagaattgagctgaaaacaaggcctgatacccctgatattagtaacctgcaaaaatgtgctgattttgcccatgctttcatgctgggttttgatgtcatagatgccattgctcttttgcgtttggatgagctctacattgagtcctttgagatcaaggatgttaaaacacttcgaggcgatcacttgtctcgtgctattggaaggttatctggtaaaggtggtaaaacaaagttcgccattgagaatgcatcaaagacaaggattgtgattgctgacaccaaaattcacatattgggatctttttccaacataaagattgccagagactctctctgtagcctgatcct

SEQ ID NO: 844 - DNA, 156 bp, Glycine max
  Clone ID: LIB3028-052-Q1-B1-H12
cgagataactagaaacagtgtgatgaaaatgaaggtccttgttttcgtcggtgctacaattttggtagcatggcaatgccatgcgtacgatatgttcgctctccgactgcacactggctatcgtgctcgtactccggaggtgaaatgcgcaagttg

SEQ ID NO: 845 - DNA, 378 bp, Glycine max
  Clone ID: LIB3028-052-Q1-B1-H9
caaagcagaaagcaaagctcatccttgagttaaaaaatggcagcagcttcttccatggctctctcatccccatccttggctggcaaggccgtgaagctgggcccatcagccccagaagtgggaagggtgagcatgaggaagaccgtcaccaagcaggtctcctcaggaagcccatggtacggcccagaccgagtcaagtacttgggcccattctctggcgagcccccgtcctacctaaccggtgagttcccaggcgactacggctgggacactgctgggctttccgcagacccagaaaccttcgccaagaaccgtgaactcgaagtgatccactccaggtgggccatgctcggagccttgggctgcgttctccccgaa

SEQ ID NO: 846 - DNA, 380 bp, Glycine max
  Clone ID: LIB3028-052-Q1-B2-A10
ctgagccccaatctcttgagcagcagaatcttcaggccaagccaggtaagcaagcacaacacaaccccgaaatggcttctgcttctgttcccatggctttctcgctgagctctgttatcaacaacaacaagccttcatccgaagccttcttcaggccactacccctacggcaaccaaagaggaccctcttcaccacaaaggcagtgtcaaactccaaggctcaaatcaatgcatctttgaaggagaaggcagttgcaggactcacagcagcttctgtgacagcatctatggtggttccggaggtggctcatgctgctggatatgagttctccccttccctcaagaactttctgctaagcatctttgctggtgggtttgtt

SEQ ID NO: 847 - DNA, 392 bp, Glycine max
  Clone ID: LIB3028-052-Q1-B2-A11
cagacatcgtaggaagaatactgtcttcgatacgagatcaacaaagttgtgaagatcataatggcaccgaggtaaaacctcaagaagaaaaccagtcaaaggcttcccacatagcccaattccttccaacttctcgacgtattgtccagttttcaaatggcaagggtcctggaccaaatgcaagtattgtatacattgatggggcatttgatctcttcgatgccggccatgttgagatacttaagagggctatggagcttggtgactttcctccagttggtatccactcaaatgagacagtgagtgagcatacaggaaatcactatccaagtaagcatctgcatgagcgtagccttagtgtgttagcctgccgttaagttgatgaagttatt

SEQ ID NO: 848 - DNA, 392 bp, Glycine max
  Clone ID: LIB3028-052-Q1-B2-A2
gtcaaatttgttggaggaatatctggatggacagctacgttactctttatgtggatgccagtttctcaaatgtggacaaattatctcaatcctgagaacatgaaaggcttgtcagctttttctatgctccttgccatgcttggaaatgggcttatgcttccacgtgctctcttgattcgcgatttcatgtggttcactggttcagtgtgggctactcttttttatggatatgggaatattgcttgcctatactatttaaacattatcagcaaggaattcttcttatcagcaaccgttggtctgatttcgtttataggaacagctttctggagagacagcgttgtccatggttacagctcaccttcggcttctttacgtgacctggtttttgg

SEQ ID NO: 849 - DNA, 374 bp, Glycine max
  Clone ID: LIB3028-052-Q1-B2-A3
aagaaaaaaaaaaacccttagccaacacaactatcatggccacctctgctattcagcaatcagcattcactggtcaaactgctctgaagcagctcaatgagttcgtccgcaagaccggtggcgccggcacaggtcgcactaacatgcgccgcaccgtcaagagtgctcctcagagcatttggtatggccctgaccgtcccaagtacttgggtccattctcggagcagattccatcatacctgaccggagaattccctggtgactacggctgggacactgctggattatcagctgacccggaaaccttcgccaggaaccgggaactggaggtgattcacaacagatgggcaaagcttggtgcccttggctgcacc

SEQ ID NO: 850 - DNA, 397 bp, Glycine max
  Clone ID: LIB3028-052-Q1-B2-A4
ccataagccccataggccataccactctcaattctgttctcacatttcctatatatatttgccactctttctgtgagcttctcaacagaaagacacaatgggcaaagaaagtagtacttgtgttcttctatcccttctcattctttcactctttgtggctgaaatatatggaaatagacaagttcaagctcttaacaaactgcacaagtccaccaagttcagaggaaattcacaaattgataggagtgagtttgaggtagaggagcttgcttatgatggcattgttcactctcaagagggtctcaaagagaaagatagaattgagagtcttccaggacaaccccctgtgagtttttctcactatggagggtatgtcactgtggataaagaagcaggt

SEQ ID NO: 851 - DNA, 375 bp, Glycine max
  Clone ID: LIB3028-052-Q1-B2-A5
aaaacactcataacacaaagcacaaagcaaagctcatccttgagttaaaaaatggcagcagcttcttccatggctctctcatccccatccttggctggcaaggccgtgaagctgggcccatcagccccagaagtgggaagggtgagcatgaggaagaccgtcaccaagcaggtctcctcaggaagcccatggtacggcccagaccgagtcaagtacttgggcccattctctggcgagcccccgtcctacctaaccggtgagttcccaggcgactacggctgggacactgctgggctttccgcagacccagaaaccttcgccaagaaccgtgaactcgaagtgatccactccaggtgggccatgctcggagccttg

SEQ ID NO: 852 - DNA, 391 bp, Glycine max
  Clone ID: LIB3028-052-Q1-B2-A6
gtcgaacccctaatggcttctcaagttcttcttcaacaggcactgtttgcccccaagctaagtttcccttcttcttctcgtaacgtcgcgttaatttctagggttccttccaccccaatttcatggcgttgcactcctctcattgctaagcctagtttcgctgtgagagctgactccaacgtcgaaggcgctggtgaagccaccgaggatgttccttcgtataatgttgatgaagtttcggaaggcgaacgagaacaagtttcggattctgaagctccaaaatctcgcagaaaagcccgagtcaagctcggagacgtcatggggatactgaatcagagggcaattgaggcatccgagaagcaaaggcgaactccagacattaggactgggg

SEQ ID NO: 853 - DNA, 124 bp, Glycine max
  Clone ID: LIB3028-052-Q1-B2-A8
gccccatcagagggtaactacaatttgacttgctattgtttgtgtgattcttggatttctgttcgtatcctagttcagctgatatcgtgattaaattgtcatatcatccgaaaatttttatggt

SEQ ID NO: 854 - DNA, 383 bp, Glycine max
  Clone ID: LIB3028-052-Q1-B2-A9
ctcgagccgattcggctcgagttcataacataaagagtatagagcagcaaacgtaaaagtggatccaagaaggctacatggcaagcttccactatcttcacaagcatcagaggagaaagaggacacagtagaagagtttgatgcttataataattatgcatcttggtcttcagaaactgacatgtctgaaatggtttctgctcttgctcaagttatgggaactaccaatcggaacccatacatgccacaatcaacctcctttcctttctcaacttccgtggtcaaagatcaacctcaaccgtacccatctcaacctcctccagatcaagaggtggcaaagaagccacactacagaggagtgaagcagagaccatggggaaatg

SEQ ID NO: 855 - DNA, 368 bp, Glycine max
  Clone ID: LIB3028-052-Q1-B2-B1
ctagtctaagcagaaatggcctcttcagtgatggcatctgtggccctcaaacctgcccctttcactgttgagaagtcctcagttagaggccttccctccctctcaaggaactcctcttcattcagagttgtggccactggtggcaagaagatcaagactgacaagccttatggaattaatggtggcatggctttgagggaaggagttgatgcatctggcaggaaaggaaagggaaaaggcgtttaccactttgtagacaaatacggtgctaatgtcgatggttacagtcctatctacgacaccaaggactggtctccaaccggtgatgtctacgctggcggtacgactggcttgggtatctgggctgt

SEQ ID NO: 856 - DNA, 381 bp, Glycine max
  Clone ID: LIB3028-052-Q1-B2-B12
aaaaaaactgattcatatttcactgtttggacactgcactgttgcaaaaccagtgaagaaaaagaaaaattcctggttttaattgtgtttggcactttggcttccatttagttgttgtagaaattttttaacactatttaactataaattgttacgaaatgttgttttctcatggaaatttactgtcatattgctttcatctttcaatttgttatctgggttgcaatcactgctaatttttattttacaggtatacttcaaggctacagatcctttcaatgagcgctggcaaagtgcttggatcatcactgcattctgggacattctagcatttgcattactctgtgttatatgctatctctgggccccatcccaaagctc

SEQ ID NO: 857 - DNA, 400 bp, Glycine max
  Clone ID: LIB3028-052-Q1-B2-B2
ctttcaactctctctctccccccctctttctctcacacacaaatgtctaaaataacaataacctctccaaaacactgtgctgacaaagaaggactaaaaatcaagaactacaagaagatctacttcactttctcagcatttttcatcacaatcctactactaatacttgttatatggctcatcctccaccctgcaaagcctcaattctccctcaaagaagtcgacatcttccaacttaacctttcaggcccaaacctcaactcctccatccaactcaccctcctctccaaaaacccaaaccagaaagttggcatttactacgacgagattcaactctatgcaacctacaagggccaacagattactggtgatacccctgtgccacccttttatcaaggcc

SEQ ID NO: 858 - DNA, 392 bp, Glycine max
  Clone ID: LIB3028-052-Q1-B2-B3
ggttgatgtatgcaatcggtgggagctcagggccaacaattctgagccaaggaaaccgtttcattgctccgaacaacgacaacgccaaggagatcactcacagggactacgccggacccgatgtgtggaagaattggcagtggcaatcagaaatggaccttttcatgaatggtgcaaagttcgtcacttcaggctcacccatcaagatgacatacaaaaagggtctcatcatgaagccaagagatggaactcatgtcagcaggttgacacgacatgctggtgccctaaactgcttcgttggcaagccttgttagagaacaacaaacattaatgttgttgttgttgttcgctttttcctttttttttttggcaagaaaaagaaaaccacattg

SEQ ID NO: 859 - DNA, 354 bp, Glycine max
  Clone ID: LIB3028-052-Q1-B2-B4
aataatagcaaaatagacaccattaggttttcattctctttctctctctctctgattcgatcgatttcgattgttgaattcatcccatcgtggagccttcaaatttgtagttgaacaacgatggtgctgccgctatttgctgctttcattcgcctttttgcttttaatccgaatggattgttagcagttccttccaacgtccccgcattcctttggtcagcacattatgaactggcctctgaaaatggattgaaggaatctgtaaattaccaagtcagttctccaaaagatctaacagaatctgttttttctgaagcaggctggtcaaattttctggtgcaaatggaaagaaac

SEQ ID NO: 860 - DNA, 396 bp, Glycine max
  Clone ID: LIB3028-052-Q1-B2-B5
aaatgatcccaagtttgatcacattgacatcaatgagaaacaaaaggtcttaaatgaatgtgtggaagctgagaactggctcagggagaaaaaacagcatcaggactcgcttccaaaatatgccacccctgtacttttgtcagctgacgtaagaaagaaagctgaagctgtggacaggttttgtaagccaattatgacgaaaccaaagccactgccacccaagccagctacaccagaagcaccagcaaccccacctcctcagggtggtgagcagcagcaacaaccacctcaggagaatcctaatgccagtactaatgaaaatgctggggacaatgctaatccagccccgccaccagcatctgctgaagcaatggagactgacaaaccagagaacac

SEQ ID NO: 861 - DNA, 365 bp, Glycine max
  Clone ID: LIB3028-052-Q1-B2-B7
gtccattattggcacgaagctagcagcagaggagaagaatcagaatttagaaggcatggctgaaggaagaagcgaagaagacaaagacgacagaaccatgaagcgccttcttctcacgagaaactgtctcttactcaccatcggcacctccggtgggcccctcgtcatgcgtctctacttcctccacggcggccaccgcgtctggctctccagcttcctcgaaaccgctggcttccccctcatgctcctccccctcgccgtctcctacctccgccgacgtcgcaccgcctccgccgccggaatcgccaaaccgaaattaatctcaatgaagcctcctctcctcgccgcctccagcttcatcggaa

SEQ ID NO: 862 - DNA, 322 bp, Glycine max
  Clone ID: LIB3028-052-Q1-B2-B8
tcttaagaatcctgttgtcacagagattgcagagagattggggaagataccagcacaagttgcccttcgatggggcttgcaagcaggtcatagtgtgcttcctaagagcactaatgagtccagaatcaagggaaattttgatatctttgactggtctattcctcaagatttgatgaccacgatctctgaaattaagcaggaaaggctacttaaggccagtttttttgttcacgagacctatggtgcctataggagcattgaagacttctgggatggtgaactctgagcaatatgcatctttgagacgttgaaaaatacattg

SEQ ID NO: 863 - DNA, 263 bp, Glycine max
  Clone ID: LIB3028-052-Q1-B2-C1
gtgttgtacaaggggcaattttttcaaaacctttttctctctcgcaacctcacctcgtcctccttcaatctctttcggaatttcccaaaatccttagtgggaggaagagatggttctgactcagaagcttcacgaagccttcaaaggcaccgtcgagaggattattggcccgcgaaccgtttccgccatcagagaaaaaggagttctcactgtcgctgacttcatcaccgctggtgataattccggtgccacatgctcgccgt

SEQ ID NO: 864 - DNA, 251 bp, Glycine max
  Clone ID: LIB3028-052-Q1-B2-C10
gtcacacctcccagatctacgccatcaggcagagcatacccaaggctctcgtcgcttacgaccagaagtacgtcgacgagcagtccaagaaggagatcaaggacatcctcgtcaggtacgaccgcaccctcctcgtcgccgatccccgccgctgcgagcccaagaagttcggtggtcgcggtgctcgcgccaggttccagaagtcctaccgttgatttcagccgtttttcttaagcgattcatcagaagtt

SEQ ID NO: 865 - DNA, 176 bp, Glycine max
  Clone ID: LIB3028-052-Q1-B2-C11
gtgtctgcggacgacaaaaccactggacagaagaacaagattacgcttaccaaccacaatggcaggctttctaaggaggacattgagaacatggtgcacgaagctgagacatacaggtctgaggacgacgagcatacgaagaaagtggaagccaaaaatccattggaaaattatgc

SEQ ID NO: 866 - DNA, 383 bp, Glycine max
  Clone ID: LIB3028-052-Q1-B2-C12
ggcggctataggttctctcaatgttccacgttctgcttcttcccgttcatcctttgtgggaagaaaaagcgttccacgcagcctttccttctctgcatcacaactttgtggagacaagattcccacagattcagttttattggcaccaaaaataggtcgcagtccagttatcgttactcctaaagcagtttctgattcccaaaactcacaaacgtgccttgatcccgatgctagcagaagtgtgcttggcattatacttggaggtggtgctgggactcggctttatccactcaccaagaagagggcaaagccagctgttcctcttggagctaactataggcttattgatattcctgttagcaactgcttgaatagcaatgtct

SEQ ID NO: 867 - DNA, 389 bp, Glycine max
  Clone ID: LIB3028-052-Q1-B2-C2
ctcgagtccaaagtctcctcctacccaaaatggatgcaagggcatcatcttcttcagcttcctcgattcttttccttgcagcaattgtagctgcttatttctagtcatcagaagcagctgtgtccaaaggatcttttgaggacaatttcagcataatgtggtctgaggaccattttactacctctaaagatggacagatctggtatctctcactagacaaagacacaggatgtggatttcaaacaaaacaacgctacagatttgggtggttcagtatgaagctgaagttggtagcaggtgactctgctggtgttgtgacagcttattataggtgctcagaaaatggtgcggggacagaaagagatgagcttgattttgagtttttgggg

SEQ ID NO: 868 - DNA, 380 bp, Glycine max
  Clone ID: LIB3028-052-Q1-B2-C3
taatccctctttcttcctcttcctcagtagtgcgattttcgattcacttctctgcaactatgcctaaccctaaggtcttcttcgacatgaccatcggcggtcaacctgccggccgcatcgtgatggagctctacgccgacgtgactccgagcaccgccgagaacttccgcgcgctctgcaccggcgagaagggcgccgggcggagcggcaagcccctccactacaaaggctcgtccttccaccgcgtgatcccgaacttcatgtgccagggcggcgacttcagcgccggaaacggcaccggaggcgagtcgatctatggcgccaacttcgccgacgagaacttcgtgaagaagcacactggtcccggcattttctccaag

SEQ ID NO: 869 - DNA, 385 bp, Glycine max
  Clone ID: LIB3028-052-Q1-B2-C9
caaattagttcaatctctttgcgcagttccctacctctcctttcaagatgcagatcttcgtcaagaccctcaccggaaagaccatcacccttgaggtggaaagctctgacaccatcgacaacgtcaaggccaagatccaggacaaggaaggaattcccccggatcagcaacgtctcatcttcgccggaaagcagctcgaggaccggcgtaacctcgccgactacaacatccagaatgagtcaaaccttcaccgtgtccttcgtcaccgtggaggcatgcaaatcgtcgtcaagacgcccactggcaaaaccataaccctagacgtccaaagctctgacaccattgacaacgtcaaggccagaatcaggacaagagggaatccccc

SEQ ID NO: 870 - DNA, 383 bp, Glycine max
  Clone ID: LIB3028-052-Q1-B2-D10
caaaagctgaaatggagtccttactttggtgcattggccttaggcagaagacatgtatttctaatgaaggatccaagtttcatcgacgctgttgattgcacatttgacatgtggtggcagacttaacattggcataggtacagtgctcacaagaccaatgattatcatcagtcattctgcctaaggccaatgcaccaaaagctgaaatggagtccttactttggttatatcatatgctggctcctttttgtaatgctatttactgtgaaaggggcttaagtcgcttaagaagggttatcctgcttgcactcctattgaatacatcccagtttaatgtatataatgttttatcagtaagattttcgtatggggtttctgcaaca

SEQ ID NO: 871 - DNA, 387 bp, Glycine max
  Clone ID: LIB3028-052-Q1-B2-D11
cttgaatgaatatgcttattatgctcaggttgctggtttatattacagcataagtcacacagatggtggtttcgaggtgactctccgtggttacaatcacaaattaaggattctacttgaaactatagttgaaaagattgcgacatttgaagtgaaaactgacaggttttcagttatcaaggaaatggtaaccaaagaataccagaatttcaagtaccaacaaccttatcaacaggctatgtactattgttctttgatcttacaagatcaaacctggccttggatagaacagctagacgtacttcctgctcttcaagttgaagatcttgctaaatttgtaccagcaatgctctccaggacctttttagagttttacataccagggaa

SEQ ID NO: 872 - DNA, 382 bp, Glycine max
  Clone ID: LIB3028-052-Q1-B2-D12
gtttgttgatcgagataactagaaacagtgtgatgaaaatgaaggtccttgttttcttcgttgctacaattttggtagcatggcaatgccatgcgtacgatatgttccctctccgaatgaacactggctatggtgcccgtactccggaggtgaaatgcgcaagttggaggcttgctgtggaagcacacaacatctttggctttgagaccattcctgaagagtgcgttgaagcaacaaaggaatacatccatggcgaacaatatagatcagactccaaaacagttaaccaacaagcttacttttatgccagagacctcgaagtccatcccaaggacacatttgtgttcagtatagatggcaccgtactctctaatattccata

SEQ ID NO: 873 - DNA, 371 bp, Glycine max
  Clone ID: LIB3028-052-Q1-B2-D3
tcctgaacgacaccgagaccagacacggtttggggcacagttaaggtggtagcagtagcattgttaggccatatctcctttttttctctgccttgtattgaggtaaaactcacaaatattataactttgatctggggaagcaatggcatggagaggacatctttcgaaaaacataaaagaacttcggtttttgatgtgccagtcatctcctgcaagctcacctgcaagggcttttgtggagaggaattataaggaactaaagacattgaacccaaaattgccaatattaattcgtgagtgcagtggaattgaacctcaattatgggcaagatatgatttgggtgttgagaaaggcatcaaattggaaagct

SEQ ID NO: 874 - DNA, 375 bp, Glycine max
  Clone ID: LIB3028-052-Q1-B2-D5
ctcgagccgaatcggctcgagggaagaagacttgatcttgataaactatattgcaaatcacggtgaaggtgtttggaactccttagccaaagcttctggtctcaaacgaacgggaaagagttgtcgactccgttggctaaactaccttcgtcctgatgttagaagaggaaacattacacccgaggaagagcttttgatcatagaacttcatgcaaagtggggcaataggtggtccaaaattgcaaagcatcttccaggaagaactgacaatgagattaagaacttctggagaacaaggatccaacagcacattaagcaagctgagacttcacaagaacatggtaattcagagaataatgatcatcaagcaagcac

SEQ ID NO: 875 - DNA, 365 bp, Glycine max
  Clone ID: LIB3028-052-Q1-B2-D8
ggatgaagaagattcagagggaagaactgctttgcattttgcctgtggatatggcgaggtaaaatgtgctcaagttctcctcgaggctggagcaaaagtggatgctttggataagaataagaacactgctctccattatgcagctggttatggcagaaaggaatgtgtggcccttctccttgaaaatggtgctgcagttactctccagaatatggatggtaaaactccaatcgatgttgcgaagctaaacaatcaaaatgaagtcctaaagctacttgagaaagatgcttttctgtagttgtaatgcatgatgccatgctgttaccaacaagcaaagggggaaactgaagggaagaaggcatggt

SEQ ID NO: 876 - DNA, 389 bp, Glycine max
  Clone ID: LIB3028-052-Q1-B2-D9
aaaatcttcaggaaaaagtaaagacaaaaactgaaattcctgaacaactccacctttgtaggagttagttttatctttgttggcctatcctttctttccttcaaaaaaaaaaaaaaaaaacaccaaccctttaaactctccaatcaactactccaaaaatcaagagcaaaatcaatagaaagaaaaggaaacaaacaccaacaccaacacctcatacacttgtctgtcataaggtgatctcctttagtgagaattgagaagccaagccactcaattcatcaccttctccctctccttttcaaggaaaaaagaaaaaagaaatcatcaattccaatggaggtttcatgcaaaattttgagaagatcaattcacagttttcttcaaaacta

SEQ ID NO: 877 - DNA, 383 bp, Glycine max
  Clone ID: LIB3028-052-Q1-B2-E1
acactgcaaatcttgatgctgttagacaggaacttaaagaattacacccacatgatccccaaattgttgtcctcaaacacggagtgtggagagtaaaaggcattattcaggtttctagatctataggtgacgtatatttgaaacatgcacagtttaaccgggaaccacttaatgcaaaattcagacttcctgaaccaatgaacatgcccatcttgagtgctaatcccactattctttctcatcctctccaaccaaatgattccttccttataatcgcatctgatggtttatgggagcacttgagtaatgagaaagccgtggatattgtaaacagcaatccacatgcgggtagtgccaagagacttatcaaggctgctctacag

SEQ ID NO: 878 - DNA, 263 bp, Glycine max
  Clone ID: LIB3028-052-Q1-B2-E11
gttcccagcttcctccttctgttatcaattaatttaattaactttattcgcaccttgctaaattcttaagcttaggctggtgaatttccttttgttcagttatagaaagagaagggaaatatgatttgactcctgagaaacaggggttgtaccggatcaagaaaaatgttttgaaatcgggtgggtgttgtgtctaaatggctatagcagctgatattatttattaacataccatttctgctgttgagggtagttgatgaatg

SEQ ID NO: 879 - DNA, 353 bp, Glycine max
  Clone ID: LIB3028-052-Q1-B2-E2
aacaactaatggaaacagcagatgcagaatggtagtcaaactatctgacaacatgcggaatgttaccacttccatgttttttgttcgcacaagaagttcatatggagtgcaaccactgattgtaagtaggcagcagattcaaaatcaggttgttaggccattccttgactgttgcagagtactgtcaatacgttgttgaggtgacttaccactgtgatgaaacacacatcctttctgaatagatttggttgtttccatgacactacaccatgccaatgagttcaggtggaaaaactgtagatacgattcatggacttcagaaatcagaacatagacttaccattttggcaaaa

SEQ ID NO: 880 - DNA, 331 bp, Glycine max
  Clone ID: LIB3028-052-Q1-B2-E5
ctaaatacaattaactaaaccaacaaacgcaaactcaattcctggtttattcgaaggcacgaaagcatacagaacagaatatgggggcttgctactcttccgtccagaagaaaatgccattcgcatgaagactggtgcccaacgaatgtgcatggcatcgccttccattgatcattttgttgatgctttcaagcaaactgtcgtggctaatatgcgttgggttcctccaccgggcaaaggactcttgtaccttaggcctctgctcctaggacctggtccggttttgggtttggctcctgcatctgaacacaccttcctcagagttgcttcc

SEQ ID NO: 881 - DNA, 380 bp, Glycine max
  Clone ID: LIB3028-052-Q1-B2-E7
cactctcattttccggtttcactcttctaaaatggcgaatctagcacgcttctccaagagagccctaagaagcgcacacgcgctagcaaggccccacgtgcagcctcagctgctgacagcagaacgcgctttttcgacggatgcgccgacatcgattaccccgtcggcggatcgcgtgaagtgggactaccgtgggcagaggaagataatcccgttggggcagtggctccccaaagttgccgtggatgcttacgtggcacccaacgtggtcctcgccggccaagtcaccgtctgggacggagcctccgtctggcccggttgcgtcctccgcggcgatctcaacaagatcagcatcggattcggctccaacgtccaggaac

SEQ ID NO: 882 - DNA, 383 bp, Glycine max
  Clone ID: LIB3028-052-Q1-B2-E9
gacagttgccatgccctatgtatttagatatttggctgccgagttagcagcaatgaatataaaaatgactcttaagctcagtgatggagctggagccggagcctgatatgttatacttaaattgattggatgtgttaagtttgtgatttgtatcacaacaggaatgttcaatggaggctcagatgcttgctcacatcatggggagttaaaaaatttccaggccatgcattcatatatgtgacatcacagactaatctgaattgctggctgcttttaacagatcctgatagtcgtgcaaggattgaagttagtcatgtgaaaatattgtttaatggattcaaatggtgggaggagataggtagattttataatgtcgtaaattg

SEQ ID NO: 883 - DNA, 339 bp, Glycine max
  Clone ID: LIB3028-052-Q1-B2-F10
gttgatccacaagtcgttacagcgctcgcaacttgtcatggacgcagcaacgggtgttggagtttgtgtcttcctattaatttcttacatggcgttcttaatcaaacgggctacagcaggttctgctcgcaagccaccggcagcatccggtggctggcctttgatcggtcatcttcacctcttgggtggctccggtcagcctctttacgaaaccctaggaacgttagcagacatgtatggcccaatattcatcatcctaattggtgttcaccctgccgttgtggtgagctcttgggagttatcaaaacagtgtttcaccactcctgacgtcaatgtctc

SEQ ID NO: 884 - DNA, 381 bp, Glycine max
  Clone ID: LIB3028-052-Q1-B2-F12
ggttatattccatggaacccaattgaaccaaacacacaggattgctacttcgctgagtttggcaacactggaccaggttccgttgctcaagcaagagccaagtttggcaaaggtctcattagcaagcaggaggctgcacaattcactgctgagccttggctccaagctagcacttggttgcctgctgctggcgttcctttcgatgctagcttcaccaaagcttaaggatccgagacaaaccagcatcttgagtgttataatctcttttttagcctacctaaattaataaaactataaacaggaaatcgattacctaatttcaatgcagtcacacatagccactccattgtctgaggagctgatttgtaatcattcaataag

SEQ ID NO: 885 - DNA, 305 bp, Glycine max
  Clone ID: LIB3028-052-Q1-B2-F2
gttgagataagtggtactgcttcacaaatacaggctgcccaacagctagtacagagctgcatataggagttcattccaagtatcaggtagtcctggtaggcaccaatggctgcaatcattaccggtgtgatccactccatagacagaaggatgtgcatcttttcttagttgtgacagaagtgttatgtcaagtagataaacttgattcttcatgttcttcaacactttgttcactatgtttgctgctggaggtagacctgctggatatgttgacccagctaatggttcaagttccccactacaac

SEQ ID NO: 886 - DNA, 383 bp, Glycine max
  Clone ID: LIB3028-052-Q1-B2-F5
ctcgagccgattcggctcgagcatctatctctcctctatccttcgtgcccacagtcaataatgtctcttccaactccatcgctcccccttctccgttgcatccattttcacgattccaatccattaaaaatagaaagccaaaaccccatcatattcctagaatcacatgcagtggaaaccaaaacaatccaacaccaaacgctaattcccagggagaacctccagatattgtcggacataggaggaacgttctacttggcctaggagggctttgtggtgctgttactcttaacaacaacaagccttttgcctttgcagctccaatatctcctcctgacctaaacacgtgcggtcgaccagacctacccgcacgtggtaaaccc

SEQ ID NO: 887 - DNA, 180 bp, Glycine max
  Clone ID: LIB3028-052-Q1-B2-F7
agaacactagggaaactgcctttgcaatcaggaagttgcccttggttaaagctaacaggtacttggaagatgttcttgcgcacaagcaggccattccgttcagacgtttctgtcgtggtgttggaaggacaactcaggcacagactcgcagctctactggccagcgacggtggcctgtcc

SEQ ID NO: 888 - DNA, 345 bp, Glycine max
  Clone ID: LIB3028-052-Q1-B2-F8
ggcactgctgcaagtgcaactccaagaagcggagtgcgaagccagcatgtttcaacattcaagagaagcctttttccttccacttttctctttggaattggttcttctgcttaccaggcagaaggagcagcaagtgtagatgggagaggaccaagcatatgggacacctacactagacagcatactgaaaagatttgggatcatagcaccggtgacatgggagctgatttttaacatcgatacaagggtgacataaagataacgaaagaaattgggccggactccttcagattctctatcccatggtcaagaatatttccaaagggcaagggagcagttaacccc

SEQ ID NO: 889 - DNA, 374 bp, Glycine max
  Clone ID: LIB3028-052-Q1-B2-G1
gcagatcaatctctctctctctctcaaccataatagtcatgggtttgaaggaggattttgagcagtatgctgagaaagcaaagactttgccaccgactcaatcaaacgaagacttgcttatcctttatggattgtacaaacaggccaccgttggacctgtcaacaccagccgtcctggaatgttcaacatgagggacagagctaaatgggatgcatggaaggctgttgaagggaaatccaaggacgaagcaatgggtgattacatcattaaggtgaaacagctgctggaagcagctggcttgcctgcttgataacattgtcatgccttgctttctgattctgtgctagaagttcacaacagtttgggaataaac

SEQ ID NO: 890 - DNA, 379 bp, Glycine max
  Clone ID: LIB3028-052-Q1-B2-G12
gattggtgaggtaaacttgaattgaagtgaagaaggagatggctgcaacctcttccttgtgctcatcgaccctccaatcccagatcaatggattcttccttcacaaaacctctctttcccatactccttccctcactttctccaggaggaaaatttcaaccacagtgaaggctacatctcgagtcgacaagttttcaaaaagcgatatcattgtctctccgtccattctttctgcaaacttttcaaaattgggagagcaggtgaaagcagtggaattggctggttgtgattggattcacgttgatgtaatggatggtcgctttgttccaaatattacaattggacctcttgtggttgatgcattgcgccctgtgacaga

SEQ ID NO: 891 - DNA, 219 bp, Glycine max
  Clone ID: LIB3028-052-Q1-B2-G2
ctttcacaccagcgtcgttcgagtacttcaccttctttctctctaagcgcaaaacctcgtactgtttttggccgttaaggatgtcagggaaaggagcgaacgggttgctcacaggcaaaacctccgccgccaacaaagacaaggacaagaagaaacccatctcgcgttcttctcgtgccggccttcacttcccacttggtcgtatccaccagcttttga

SEQ ID NO: 892 - DNA, 403 bp, Glycine max
  Clone ID: LIB3028-052-Q1-B2-G3
gccatgttgactctgggaagtcaaccaccactggccacttgatttacaagcttggaggtattgacaagcgtgttattgagaggtttgagaaagaagctgctgagatgaacaagaggtcattcaaatacgcctgggtgcttgacaagcttaaggctgagcgtgagagaggaattaccattgatattgcattatggaagtttgagaccaccaaatactactgcactgttattgatgctccaggacatcgtgatttcatcaagaacatgattactggaacttcccaggctgattgtgctgtccttatcattgattcgacaactggtggttttgaagctggtatttccaaagatggacagactcgcgagcatgctctacttgccttcacccttggtgtcaagcaaat

SEQ ID NO: 893 - DNA, 149 bp, Glycine max
  Clone ID: LIB3028-052-Q1-B2-G4
catgtcacagccatcccgtgcggttctcaaactttgcacagtgaatggacaacattttgaggagatcaaagtcgatttagccaaacgtgagcagttatctcgcgaagttcgaacggttaaccctttacggcaagtctctgccagtgttg

SEQ ID NO: 894 - DNA, 358 bp, Glycine max
  Clone ID: LIB3028-052-Q1-B2-G5
acctcatgttcttagagcatcacatatagaccaccaagtgggatcagcaccagttgttacagcctcaccctgggatagacaacattctttcttgggagagtcacctgatgcttctggttttagattgggttctgttggaagtccaggctttaatggtagctggcagttgcatcctcctgcttctcacaatatgtttcctcatgttggtgggaatggtacagaattgacgtcaaatgctgggcagggctctcctaagcagttgtcacatgttttccctgggaaacttcccatgactttggtttctaaatttgatacgaccaatgaacgactgagaaacctctattcccgtagaagtgaa

SEQ ID NO: 895 - DNA, 259 bp, Glycine max
  Clone ID: LIB3028-052-Q1-B2-G6
attttcctttgtaatggaaagttagaaaccctcatcgtcaaagcacgcgttttttttaatcgcgctctcccaacaaatatttgtgggtagattcaattcatcatgtcgagcttatcggggtacgctgaattttccgggcagaaaccggcgaagtcgccggagaaatcgagcttctctcagacttgcagtctgttgagtcaatacatcagggagaagggtagcttcggcgatcttaccctccgaaagagatcaggtgggt

SEQ ID NO: 896 - DNA, 392 bp, Glycine max
  Clone ID: LIB3028-052-Q1-B2-H1
aaaacacacaaacctcttcagttcacaaaccacacaacctcttctaatattcgttttctgatctacgcaaggttaaggttaatttgcttctatctacatggacattaacgagatcgatgttccttcattctttctctgccccatttcgttagaaatcatgaaggatccagtgacggtctcaacaggcatcacctacgaccgtgaaagcatcgaaacatggctgttctcgaagaaaaacacgacatgccccatgaccaaacagcccttgatagattacaccgatctcacaccaaactacacccttcggagactcatccaagcgtggtgtaccatgaacacttctcacggcatcgaaaggatcccaacccccaaaccccccattaacacaaatc

SEQ ID NO: 897 - DNA, 381 bp, Glycine max
  Clone ID: LIB3028-052-Q1-B2-H10
gaagggtcgtagaattgagctgaaaacaaggcctgatacccctgatattagtaacctgcaaaaatgtgctgattttgcccatgctttcatgctgggttttgatgtcatagatgccattgctcttttgcgtttggatgagctctacattgagtcctttgagatcaaggatgttaaaacacttcgaggcgatcacttgtctcgtgctattggaaggttatctggtaaaggtggtaaaacaaagttcgccattgagaatgcatcaaagacaaggattgtgattgctgacaccaaaattcacatattgggatctttttccaacataaagattgccagagactctctctgtagcctgatcctgggatctccggcaggaaaggtgta

SEQ ID NO: 898 - DNA, 376 bp, Glycine max
  Clone ID: LIB3028-052-Q1-B2-H12
cgagataactagaaacagtgtgatgaaaatgaaggtccttgttttcttcgttgctacaattttggtagcatggcaatgccatgcgtacgatatgttccctctccgaatgaacactggctatggtgcccgtactccggaggtgaaatgcgcaagttggaggcttgctgtggaagcacacaacatctttggctttgagaccattcctgaagagtgcgttgaagcaacaaaggaatacatccatggcgaacaatatagatcagactccaaaacagttaaccaacaagcttacttttatgccagagacctcgaagtccatcccaaggacacatttgtgttcagtatacatggcaccgtactctctaatattccatactac

SEQ ID NO: 899 - DNA, 364 bp, Glycine max
  Clone ID: LIB3028-052-Q1-B2-H3
gaaatttaagtgaggagctagagaatgatgatgaagtctgctatgtgtgcagtggtggttgtagcacttcttcttctggcggaggtggggcccatggctgaggctgtgacatgcaccccaacagagttgagtccgtgtcttccagcaatcacttccggtgctaaaccttccaatgcttgttgcacgaagctgaagcagcaaaaaccatgcttatgtggctacctcaaaaacgctagcttgaagcagtatgttaactctcctaatgcgcggaaaaaccgttgcttcttgtgggattccctttccaacttggtaattaattaagccttcttataaataaagtgtgggatataaatatatatataga

SEQ ID NO: 900 - DNA, 371 bp, Glycine max
  Clone ID: LIB3028-052-Q1-B2-H4
gtgactagtgccttaaatgggatgtgtgtgggcagtggttcagctctttatagattgttggcctgccacaaccaaaactgtacctcactcactcactcccctttccatcaccaccacacactttcatgtcttgctcttttgattcagtcagaatatgaatcctctgtgctgcattgctccggtttccatcgatcgggaccgccccaaccacgtgctggcaaaatcgcccgctcagtgtcagttaaggctcgatgcgtccatcaggacggtgaaccacgcctccaaatccagctcctccacgcaggattcctccgtcgccgtcgactctgtcaaggccacctccgccgtcccggatttcccggaggaggagg

SEQ ID NO: 901 - DNA, 270 bp, Glycine max
  Clone ID: LIB3028-052-Q1-B2-H5
agggtttgtaactttgtcttttgcttgcgaatctgaatcgaataataatcaatcaatcatcatgtcgtcggcgaagaagatcacactgaagagttcggacggcgaggctttcgaggtggacgaggcggtggcgctggagtctcagacgataaagcacatgatcgaggacgactgcgccgacagcggcatccctcggccgaacgtgacaagcaggatcctgccaaaggtgttcaattacggcaggaaccacttcaaggccgcaaatccgga

SEQ ID NO: 902 - DNA, 383 bp, Glycine max
  Clone ID: LIB3028-052-Q1-B2-H7
gattgaacagatgcagatcttcgtgaaaactttgaccggtaagaccatcacccttgaggtggagtcctccgacaccatcgataacgtgaaagctaagattcaagacaaggaagggatcccacctgaccagcagagacttatctttgcgggtaaacagcttgaggatggtcgaacccttgccgactacaacatccaaaaggaatccactctccacctcgtgcttcgcctcaggggtggcatgcaaatctttgtcaagactttgactggcaagaccatcaccctcgaagtcgaatcctccgacaccaatgataatgtcaagggcaagattcaagacaaggaaggtatccctccagattagcaccgggtgatactttgcgggaaac

SEQ ID NO: 903 - DNA, 297 bp, Glycine max
  Clone ID: LIB3028-052-Q1-B2-H8
gatttccttctctctttcatcaatcaacacaaactaagttcttccttctgttgaaagcgatagcaatggccacgaatccaatcgaagcggggaacggcgacgctgctcccaaccctaacgcgactaccaaatcctccgtgtacctgcaagactcggaggagctgaagcgagtcttcagccgcttcgacgccaacggcgacggcaagatctccgtctcggagttggacaacgtcctccgctccctcggatccggcgtcccgccggaagagctccaacgtgttatgggaagacctttga

SEQ ID NO: 904 - DNA, 387 bp, Glycine max
  Clone ID: LIB3028-052-Q1-B2-H9
caaagcacaaagcaaagctcatccttgagttaaaaaatggcagcagcttcttccatggctctctcatccccatccttggctggcaaggccgtgaagctgggcccatcagccccagaagtgggaagggtgagcatgaggaagaccgtcaccaagcaggtctcctcaggaagcccatggtacggcccagaccgagtcaagtacttgggcccattctctggcgagcccccgtcctacctaaccggtgagttcccaggcgactacggctgggacactgctgggctttccgcagacccagaaaccttcgccaagaaccgtgaactcgaagtgatccactccaggtgggccatgctcggagccttgggctgcgtcttcccggagttgctgtcc

SEQ ID NO: 905 - DNA, 180 bp, Glycine max
  Clone ID: LIB3028-053-Q1-B1-A10
gcaaagatggggaacacggagaagctgatgaaccagatcatggaattgaagttcacgtcgaaatcgctgcagcggcaatcgcgtaagtgcgagaaggaggagaaatcggagaagctgaaggtgaagaaggcgatcgagaacggctgcatggatggagggcggatctacgcggagaaggcg

SEQ ID NO: 906 - DNA, 368 bp, Glycine max
  Clone ID: LIB3028-053-Q1-B1-A11
atttgcagaactttgtttcccaacctccattgcctccgcttctacctcgctaccatgatcattcctgagaagaaccgcaaggagatctgcaaatacctcttccaagagggagtttgctttgcgaagaaggacttcactttggcgaagcaccctgagattgacgtgccgaatctgcaggtgattaagctgatgcagagtttcaagtctcgcgagtatgtgagggagacttttgcttggatgcactattactggttcctcaccaacgatggaatcgagtttctcagaacttaccttaaccttccttccgaaattgtccctgctactttgaagaaacaggccaagccacctggcacgccctttggcggccc

SEQ ID NO: 907 - DNA, 300 bp, Glycine max
  Clone ID: LIB3028-053-Q1-B1-A12
gaaatttaagtgaggagctagagaatgatgatgaagtccgctaagtgtgcagtggtggttgtaccacatcttcttctggcggaggtcgggcccatggctgaggctgtgacatgcagcccaacaaagttgagtctgtgtcttccaacactcacttccggtgctataccttccaatgcgtgtagcacgaagctgaagcatcacaaatcatgcgtatatggctacctcaaaaacgctagcttgaagcagtacgtcaactctcctaatgcccgaagcaccgttgcctcctctgggattcccttt

SEQ ID NO: 908 - DNA, 336 bp, Glycine max
  Clone ID: LIB3028-053-Q1-B1-A2
ctcgagccgaatcggctcgagaccaaatcaaagacacctgagccattcaattcccctcctttattgctttcaagtttcaacactaattttattatctgaaaaaatggctttcaaagtttcgtttttccttgcacttgttctagtttccaatatcctcctccttgatacaacagctgctggacgcagcattggcgaaaactccaactcagaggaaaagaaagagcctgagttcttgttcaagcatgaaggtggggtgtatattccagggattggacctgttggatttccacatagatgtcatctcagacctcaaaatcgattacctggtggcaatgg

SEQ ID NO: 909 - DNA, 385 bp, Glycine max
  Clone ID: LIB3028-053-Q1-B1-A4
tgcttcaccgtacccgaaccctcccctgcattaccctcagtaccattaccccggttactatccttcggtgccacctcccatgcctcatcatcctcatcatcaccatcatcaacatcatcatccacacatggacccggcgtggattcaggggcgttacccttgtgggcccatgatgcctaaccctgcacctttcgttgagcatcagaaagccgttaccataaagaacgatgtcaatatcaggaaagagacccttaggctcgaacccgatgaacaaaattctggccacctcctcgtttcgttttccttcgatgccaccgtttctgggagcattgccatatatttctttgcaaaatgaaagttgaaggtgcatcctcacaccaatgaa

SEQ ID NO: 910 - DNA, 366 bp, Glycine max
  Clone ID: LIB3028-053-Q1-B1-A5
gaggtttcaaactcaaccaatctgaaacccccccattacaaattgcagaggcagaatctaaagtgtatctcccagatcttggcaagggcttggggtgtgtggttcaaacaaaggatggaggctacttgacatctacgaatcctttacataatgctgtggctagaaatgagactccaaagctagccatgcagatgtcaaagccttatgtgttggcatcaaatcagtccccaaatgggttagagttgtttcagaaattggctggcattggtcttgatgaactcagctgtcaagttttctccatgatgcccctagattaactgataggtaaaactgctgaacagaatgcctttgaaggcattgcttctg

SEQ ID NO: 911 - DNA, 388 bp, Glycine max
  Clone ID: LIB3028-053-Q1-B1-A6
attcagcaagtgcgttttggaagcagagaccgaaatacttcgagatggcccgtacaaagcaaactgctcgtaagtcaactggaggaaaagctcccaggaagcagcttgcaaccaaggctgcacgtaagtctgcaccaacaactggtggtgtgaagaagcctcatcgttatcgccctggaactgttgctcttcgtgagattaggaaataccagaagagcactgagctcctaatcaggaagcttcctttccagaggttggttcgtgaaattgcccaggatttcaagactgatctgcgtttccagagccatgctgtgcttgcattgcaagaggcggctgaggcataccttggtgggctctttgaggacactaacttgtgtgccattcacgc

SEQ ID NO: 912 - DNA, 348 bp, Glycine max
  Clone ID: LIB3028-053-Q1-B1-A7
ataatgccccatttttctctctcccctctctcctgtgcaccttctcctctcccacctcgccgccgaatctttctcgctcctcaccgaaccgccgcatcttccgccaccgacgccgcttcctcttctacttcctcttccgcttcgaatttcgctcccaaagtcgtcgtcacgagagagcgcggcaagaacgccaagcttatcgccgctctggctaaacatgagatcaattgtttggagcttcctctcattgagcacattcaaggacctgatttaggcatgcgtccttctgtactaggtgacaatgcatttgattgggttgtgataacgtctccagacgcaggttctgtc

SEQ ID NO: 913 - DNA, 326 bp, Glycine max
  Clone ID: LIB3028-053-Q1-B1-A8
gccaatttcaagatgaaaagcttgcagcgagaatttgtcagaatggttgaatctgggttccgtccggatattacgacctttaatattcgtgctctggccttctcaaggatggctttgttctgggacctccaccttagcattgaacatatggaacatgagaatgtcattcctgatctagtgacttttgggtgtgtagttgatgcatacttggatagaatgcttggaagaaacttggattttgctctaaacatcatgaacttggatgattctccgcgattattaacagattcttttgtgtatcaggccttatgtaaatgggactttca

SEQ ID NO: 914 - DNA, 393 bp, Glycine max
  Clone ID: LIB3028-053-Q1-B1-A9
ctcaagggagcctgacaatccaactaagtcttgcaaggctagaggcgccgaccttagggttcatttgaagaacacaagggaaactgcctttgcaatcaggaagttgcccttggtcaaggctaaaaggtacttggaagatgttcttgcccacaagcaggcaattccattcagacgtttttgtcgaggtgttggaaggacagcccaggctaagaatagacactctaatggccaaggacggtggcctgtcaagtcagcaaaattcattcatgatttgctcaaaaatgctgagagcaatgctgaagtgaaaggtttggatgttgatgcactgtacatttcgcatatccaagtcaatcaagcagagaagcaaagacgccgaacataccgagcccatgg

SEQ ID NO: 915 - DNA, 189 bp, Glycine max
  Clone ID: LIB3028-053-Q1-B1-B1
attgtgccctccctctttctagctatttccctctcttaacacaattaacaaagatatatcatatcatatcaactccaaatgatgaaaaatattgggttgtttcttcttgtggtggtggctacttttgtggtggcacccacagctggtagcttttatcacgactttgatctgtcatggggtggtgagcgt

SEQ ID NO: 916 - DNA, 316 bp, Glycine max
  Clone ID: LIB3028-053-Q1-B1-B11
gaggctgcaacactctcaactacactacacgacgccggtttgcattttccaaaccagtcaagctatactattactatagtttcatttcatggagacgcaatcgcatgaagatttacagcaaccgccgccggttacttcaaatgaagctcacagtgatgatgcgtccgaccacagagacgctgagcaaaagcaagatattttgagtactgaagaagttgtgcagattctacaagttgttgcatctacggggaggttctggcatgactgggataagttgaagagtacgctatcggttcagctaccgcaggtacctgtc

SEQ ID NO: 917 - DNA, 287 bp, Glycine max
  Clone ID: LIB3028-053-Q1-B1-B12
caagggcaatggacagtggaggacactacaacccccgcaccgtcgaagaggttttccgggacttcaagggccgccgggctggcatgatcaaagccctcaccactgatgttgaggaattttaccagcagtgtgatcctgaaaaggagactttatgtctgtatggattccccactgaagaatgggaagtcaatttgcctgctgaagaagttcccccagaacttcccgagccagcagtgggcataaactttgctagggatgggatgccagacaaggactggcgatcttta

SEQ ID NO: 918 - DNA, 71 bp, Glycine max
  Clone ID: LIB3028-053-Q1-B1-B2
cgcaagcaaaaagacagaatcccaggcgaggagaaagatggaggggaaggagcacgatctgtcattgggag

SEQ ID NO: 919 - DNA, 87 bp, Glycine max
  Clone ID: LIB3028-053-Q1-B1-B3
caacaatacacacaactaacatataattaaatatcacatacttttgttgctttcattttaatcatcacgaacgaagagatgtatttg

SEQ ID NO: 920 - DNA, 240 bp, Glycine max
  Clone ID: LIB3028-053-Q1-B1-B5
gtttgaatcgctacctctccacacagctaatgcatgtccttataaaatggcggccgcagtgaaacacttccgtctgtttcttcaccagtggtctcactgtagctctcgtcaccgcatcatgtgaagtccgaatgagatgctacggatgctggcagtgattttcatcgacctcaaccaggggtacccagggaaccattgatcacgacacagaaatcgcagagtgtcaatgaagcacaggtt

SEQ ID NO: 921 - DNA, 241 bp, Glycine max
  Clone ID: LIB3028-053-Q1-B1-B6
gctgccaccacagccatgacaacaacggcatgaaaggcagtgacattggtattgtcatacttgatctttaccatacgattctcagactatcatggcagtggaccactcgtcatagctacggggatcatactgatgacgctacatgactgctggttgtgtttttctgcgacctcgacgtgctgtacccctggtaccatgaacctcgatgcagcaaccccagagtgtcaatggttcgctggtt

SEQ ID NO: 922 - DNA, 389 bp, Glycine max
  Clone ID: LIB3028-053-Q1-B1-B7
gagagagaacttcaagtgagggtgagagtgacacaaatctagagagagcactagtactctaaaagtctattatattcttcaaaatatgaccatgcatcgcgagtcttgggcttttgtcttcggcgttatgggcaacatcatctcctttggagtgttccttgctccattgccaaccttttaccaaatctacaagaagaaatccactgaaggtttccagtcacttccttatgttgttgcactgttcagtgcaatgctttggatttactatgctttcgtgaaaagggaaactgccctccttctcattaccattaacacatttggaattgttgtggagtcaatttacctttctatcttcctaatttatgccccaaggaagccaaggcttacaa

SEQ ID NO: 923 - DNA, 142 bp, Glycine max
  Clone ID: LIB3028-053-Q1-B1-B8
gaataaactctctgggcccattccggtgagtctgtttagttccggaatcagtgacttacacctgagccggaacgccttggagggaaacataccggacgcgttcggcgtgaggtcgtacttcagctgttctggatttgtcctc

SEQ ID NO: 924 - DNA, 360 bp, Glycine max
  Clone ID: LIB3028-053-Q1-B1-B9
caaatcttttcaaccaacgaaggagaaccggtctgccgctgaagcttgtaattgggggagtctttttcttgatgcctctaatccgtgtgcatgattatattattgttatagcttttgttacttgtgtttaatggaccggtgtagccaattatattcatataatgaggtattggaaactagtccaatcaggatttgagtctagagaataggggattattgtgtaccgatgttgcttaaatgtgaagcattgttcccccgtgtttaatcaggacgtagatggtcatagtaggtgtgttattattccagccatttaccataatgggtgtaccccgtggttatcattttgatcgacattatttc

SEQ ID NO: 925 - DNA, 230 bp, Glycine max
  Clone ID: LIB3028-053-Q1-B1-C1
gaacgaattctggtccagcaaggacatgagaccttcatatcaagttgttttcttgggcaacactccaccgttggcggagataaaggcgaaaaggacttctctggggttgccattgatcttgctagtaatgacaatgcagtcatagatgttgcaattttctcagtagcaattggtggtgtgccaatcgggtcaagtcaacattctcactggggtgcatcgttcttgacacg

SEQ ID NO: 926 - DNA, 114 bp, Glycine max
  Clone ID: LIB3028-053-Q1-B1-C10
cgaggagcgcttccgtagcttcaagaagaacttgctccgcgccaagtcagaccagaaattggatccctccgccgtccacggcgtcagcaggttctccgatcacaggccggcgga

SEQ ID NO: 927 - DNA, 268 bp, Glycine max
  Clone ID: LIB3028-053-Q1-B1-C12
ctcgagccgagaagaacaagtcgttgagaaggaagaaggagacgcaaatggcttcctcaatgatcgcttccccagctgtgaccagtgtcaagcgtgccggtgccggcatggttgctccattcagtggcctcaagtccatggctggcttccccaccagaaagaccacgactgacattagctccagtgccagcaacggtggaagagtgcaatgcatgcaagtgtggccgccagttggcaagacgaactttgagacgccgtcctacgctgc

SEQ ID NO: 928 - DNA, 345 bp, Glycine max
  Clone ID: LIB3028-053-Q1-B1-C2
aaaaacttgtcgtttaagttttaactctaaaccatggctcttcccctgttcctcctctgcttcatgctctgcatttcactcacacaccaaacgattatgttacccctaacacactcaatttcgaaaacccatttcaacagtacccatcagcttctcaaatctacctccactcgctcagcctcacgcttccaccgccaaactcatcataactccgtagtcgctctcccactttcttcaggaagcgactacaccctttccttcaacttaggctcacacccttctcagtccataaccctttacatggacacaggcaccgagcctcgtgtggttcccatgcgcttcctt

SEQ ID NO: 929 - DNA, 389 bp, Glycine max
  Clone ID: LIB3028-053-Q1-B1-C3
tcttcttctgctgcacccacaaatcaaaaccccccttttccaacccaatttttctccataaaccctagattcaacgaacccgccgaccaagctcgaacctcacgtcgcaaaaaaacacttcttttcccctctccgaggttgtcgtgtcggagcatagccatgttgttccctcgaggaaattgatgatttttcataacattggggtctcgttttgcttgtggggtcaccttgaaggagggaaaagtaacgagctttggggctgaatcgtggtgggtctgttgagtatgcatagatctggagctacgatggcgtggaacgtgttcaagttctgcactgctctgcgtggattgggctcgatcatgattctgttgggtcctggcgttggtggg

SEQ ID NO: 930 - DNA, 178 bp, Glycine max
  Clone ID: LIB3028-053-Q1-B1-C4
tgcgagcgtaaggttgaggagaagagatggtgggagcacggccacgggacatacatgacttgcccaagaacgccgccaactacacagcgcttacgccgttgtggtttctagagagagctgctacggtccatcccaccagtagagctccctcatgccacgatgtcgtcgctgctcgtgg

SEQ ID NO: 931 - DNA, 370 bp, Glycine max
  Clone ID: LIB3028-053-Q1-B1-C5
gaagcattgtgtcagaccccacgtactacccagttagattcgacaacaaagcttacttggcacgtccatggaagaatttctcaaggaccatcttcatggactcctacattggtgatttgatcacacctgatggttacatgccatggcaaacattggagggttttagtggaatggatacttgtttctacgctgagttcagtaaccgtggccctggttcagacaaatgcaagcgtgtgaagtgggaaggagttaagacccttgattcacatggaatcacatacttctggccacccatgtttctccatggagacgactggattagggtcaccaggattcattactagcctggccaggtcttgcactcgctctg

SEQ ID NO: 932 - DNA, 238 bp, Glycine max
  Clone ID: LIB3028-053-Q1-B1-C6
acctttcttcctactactcccattcccacatttcgacaacatggacgaggacttcgacatgccgacggcggaggcaatgggcgaggacttcgacttcgccggcgccaccggcggcgacctcgacggcagcagcagcaaccccatcttgaaggtcggcgaggagaaggagattggaaaagagggtttgaagaagatactacttcaagaaggtgaaggatgggacactcctgacgttggt

SEQ ID NO: 933 - DNA, 369 bp, Glycine max
  Clone ID: LIB3028-053-Q1-B1-C7
atcaaatcaaagtcattcacctaaaccctatggccgacgaagccaaagccaaaggcaacgcagccttctcctccggcgactaccccgccgcaattcaccacttctccgacgccatcgccttggcccccaccaaccacgtcctctattccaatcgatccgccgcatacgcttctctccaaaactacaccgatgccttagccgatgctaagaagaccgttgaactcaagcccgactggtccaagggctacagccgtctcggcgctgcgcatcttggcctttcccaatacggcgacgccgtttccgcttacgaaaagggactcaaaatcgaccctaataacgagcccctcaggctggtctggccgatgcgca

SEQ ID NO: 934 - DNA, 317 bp, Glycine max
  Clone ID: LIB3028-053-Q1-B1-C8
ggcaaagcaatggcatcgtcactacaagcagcagctactttcatgcaacccaccaagtttttgcagctaaagtctactcaggccatatctaaggcttttggtttggaacctgctggagttaataaggtcacatgctcccttcaggctgatcttaaggacttggctcacaagtgtgttgatgctaccaaaattgcaggctttgcccttgccacctctgctctcgttgtttctggggcaagtgctgaatgagtaccaaagcggctaacctttgacgaaatccagagcaagacctacgtggaagttaaagggacaggaac

SEQ ID NO: 935 - DNA, 212 bp, Glycine max
  Clone ID: LIB3028-053-Q1-B1-D1
gtcggggatggtcatggaggaacacgactcggagaaggtggagatcgtcctcaaaaccattggtcctgcacgaccctctcgcctcctcgttccttcttctatcaaggtgtgtgatttgaggagattaattgctaggaatgacaatttgccaatttacacgttgagtcttatcttacgcggaagtccactgtgcgacaccaactatggagatg

SEQ ID NO: 936 - DNA, 183 bp, Glycine max
  Clone ID: LIB3028-053-Q1-B1-D11
ggctgttcaatacaaaatccctgattatgttcacatatctcaagattgtagacacctcctctctcgtatatttgttgcaaatccgttgaggagaattactattaaggaaattaagaatcacccatggtttttgaggaatcttccaagggagctaactgaatcagctcaagctgtctctctggt

SEQ ID NO: 937 - DNA, 232 bp, Glycine max
  Clone ID: LIB3028-053-Q1-B1-D12
gtttcttacaaggctctactctactgcttcaccttctgctctagaaaattcagtggtgatatatggcttcggcgactctctctgtagccagagcagcccttcaggcaaatgggaaaggcttctctgaattctctggcctccgcagctcaacaggcttccttcccttttccagaacatcttcagaggatttccattccgtcattgccttccagatgtatgcagttggaagcag

SEQ ID NO: 938 - DNA, 202 bp, Glycine max
  Clone ID: LIB3028-053-Q1-B1-D4
tcgagaacttattctctttctcactccaaccacagcattttcagcaccaccaataacaagaaaatcaatataataaattttcttctctgtttcttttttttttttcgcttccgacgacgttaagaacgaatccgtcgtgactaattctttcgatcttgaagatgaagcagctgatccgccggctgtcgcgcgtggccgaatc

SEQ ID NO: 939 - DNA, 280 bp, Glycine max
  Clone ID: LIB3028-053-Q1-B1-D5
ggaccagctgtgatcttcaacaccgacaaagcctgggacgaccaatggacttactgggttggaccgtgtgttggagctgcggtggctgcatgccatcatcattacattcttaaagctgctgcactcacagctctccaatcattcatgaccacggcttcattaagtgtctcgactaccgagactagtatctgatctcctgcgtatgacatgcgatgcgcacagtgtcagcacacgactcggaattcctgccgtgccagctgctctcaccactcgtccattc

SEQ ID NO: 940 - DNA, 383 bp, Glycine max
  Clone ID: LIB3028-053-Q1-B1-D7
gaagtctgaacccatcgccagagaagaaagtgtttagctttctcttacttacatcatcacttgctcgctgtgatattatctaacaaattattcatttcattgttcatactcactcgcacctaactccgccatggcttctcttcccaccactttcgctataaccatatctgcatcctccatacacaaggtggaccactctctggtcaagatcaaaccatacaacttctctctcaatctaaatcgtcaatgggaccatgcgtgcatctttaaccagaaggcctctaacaattcaggctacgtacagtgatggtggaaggcccatcagtgctagtgtatttgttggtgggtttcccttgggaggattaataactggtactcttggt

SEQ ID NO: 941 - DNA, 247 bp, Glycine max
  Clone ID: LIB3028-053-Q1-B1-D8
gttgaggaaatgggaacccttgggagagcgatctacagcgttggtaactggattcgagaaactggacaggccattgatcgtctcggttcccgtcttcagggcggttactacttccaagagcagctctctaggcatctaactctgatgaacatatttgataaggctcctgttgttgataaggatgtatttgttgcgccaagcgcctccgtcattggagacctgcaacttggaagaggatcagccagtt

SEQ ID NO: 942 - DNA, 298 bp, Glycine max
  Clone ID: LIB3028-053-Q1-B1-D9
aatcacagccaagcctcccatgggacttgctcacatagttaagaaggcaattgaaaagggtaggtttgaagagattcttgaccctgtggtcactgattggccagtggaagaggctctatcatttgccaaattaccattgaagtgctcagaactcagcacgaaggataggccaaaccttgcaacagttgtgttgccagagcttaataggttcagcgaacttgaattgacctttacacaatgatgaagttttttacagtagtgaaggtatgatcaatacctatgccgcttgccctcccac

SEQ ID NO: 943 - DNA, 105 bp, Glycine max
  Clone ID: LIB3028-053-Q1-B1-E1
tggatccagacgcgttggcaaaggcattcctggagcactactacagcaccttcgacaccaaccggaacggtttagcgaatccgtatcaggagggttccacgctca

SEQ ID NO: 944 - DNA, 214 bp, Glycine max
  Clone ID: LIB3028-053-Q1-B1-E12
gaagttgttctgcatagagtggaagaaccagcggaagctagctatattcagtccagaggacaattcatggaaaatggtaccagttccgttgacaggaagctcaagcattgattttcgaattgggatactagatgacaagttgttgctattccctctggaagctgaaactgcatttcaaacattgctgtacgatccaaatgcaactctggggtca

SEQ ID NO: 945 - DNA, 280 bp, Glycine max
  Clone ID: LIB3028-053-Q1-B1-E2
cagatatggaaaatatggatgctgatacaaaagaatcaggggatcggcaccttgacacagttgagaggttgaagaagcgaagtgagcggttcaagctcccaatgcctagtgaaaaagaggccctcgtcatcaagaagttagaaagtgaacctctgccttctgccaaaagtgaaaatccagtagtagattcagaagtcagacaagaacgacctgcccggaaaagaagatgggttactaactgaataagaaatctgggggcatcactaggttgccggagagt

SEQ ID NO: 946 - DNA, 221 bp, Glycine max
  Clone ID: LIB3028-053-Q1-B1-E3
atttggaaaaatgagttctggcaatgtgaagccagaagaagaagccctagaaaaggagaatgtaggtgttcctgtccctgaaatttcagaaccaaaagagcagaaggctggaagtaactgcaagggaattgagcagattcctttgtctggggaaaatgaagacgatgtgctagttaatacaaatgggagtgggtccactatttctggtggcaaggcagtcg

SEQ ID NO: 947 - DNA, 240 bp, Glycine max
  Clone ID: LIB3028-053-Q1-B1-E5
ttcagctccttatggagctctcactctctccaacttcacatcgtgttccttccacaattcccactttgaatttcgctaaactatcatccactaaggccacaacgtcccaacctttgttcttacgattttccaaacacttcatctcaactgggttgacccatcacagttacagatcctgctctcatgctgttcctaacacaccccggacacgcatttccatcccggcctgcccttgacttg

SEQ ID NO: 948 - DNA, 81 bp, Glycine max
  Clone ID: LIB3028-053-Q1-B1-E6
atcaaagtttcttcctttctctgccctttgccttctctaaaacatttggtgcctggtaaaccttgttttggcagaaaggtg

SEQ ID NO: 949 - DNA, 276 bp, Glycine max
  Clone ID: LIB3028-053-Q1-B1-E7
ggagtgggtgaggagaatcgagatgatgcagctgcggccgaagattttggcggcggtggagagtgcgtggcggcgggttccgccgtggagggaggcgttttacggcgccggaatgaggccggtgcagttaagccagtttgcggattttcaagcagagtgcctgttagcgaactcgcaaagcacagggagttcacgtggcacaacgccagaccgaactggtgcttttctggcatgatagggccattggttgccacgtcagcatggcgctgtgacaac

SEQ ID NO: 950 - DNA, 139 bp, Glycine max
  Clone ID: LIB3028-053-Q1-B1-E8
ctccccaaaaaaaacaagcagatatataaattaatcaaatactacttcgtgtgggggtgggaaaatgggccactctgaggaaaacagtgatgttgctgccacgcacaatgcaatcgatgattggcttcctgtcactggt

SEQ ID NO: 951 - DNA, 330 bp, Glycine max
  Clone ID: LIB3028-053-Q1-B1-E9
ttttcaacaccctctatgaacctttccgagaaggtgcagattttgttcgcggttaccccttcagtctccgggaaggtgtaccaactgcagtttctcatggtctttggctcaacatcccagattacgatgctcctactcagcttgtgaagccacttgagaggaacactaggtatgtggatgctattttgaccataccaaagggcactttgtttcccatgtgtggaatgaacttggcctttgatcgcgatctcataggagcagcactgtactttggtcccatgggtgatggtcagcctattggacgctacgacgacatgtgggcacgctggt

SEQ ID NO: 952 - DNA, 303 bp, Glycine max
  Clone ID: LIB3028-053-Q1-B1-F1
gtgagttcaaagcaaacaaatactaagaccatataaggaaggaggaaggaacgaagctgaatctgaatctgaatcggaatcgctttgtctttgaaattcgcactctctctctctctctctctctctctctctctctcgtgtctctatattgagccacttcgaatccgtcgcctcagctgcagatcacatcgagtttcacccgaatgctctttctggactcgagttagatcgagttcttcatacgctgatagtgtgggaggatatacatgaagaacgggatactggaatgcggtgtttggcatt

SEQ ID NO: 953 - DNA, 320 bp, Glycine max
  Clone ID: LIB3028-053-Q1-B1-F11
cttcgtctcaaatctcttcgttccttcgattcgttccatttcttccaaaatggccaaagacccagttcgcgttctcgtcactggagctgcagggcaaattgggtatgctcttgtccctatgattgctaggggagtgatgttgggtcctgaccagcccgtgatcctccacatgcttgacattcctccggcagcagagtcattgaatggggttaaaatggaattggtggatgctgcattccctcttcttaaaggtgttgttgccacaactgatgtggttgaggcatgcactggggtcaatagtgccgtgatggttggtggat

SEQ ID NO: 954 - DNA, 265 bp, Glycine max
  Clone ID: LIB3028-053-Q1-B1-F12
ctcttgtggaatgttctagttacatgccactttctggatttcatggagttgtatctggtttcttggttggcattaagcaaagtagaggagctgaagagcttcctttcaataagaggaccccaaagtggttcccatatacaaatgtctagcttgggactgccaggcacgtccggaaagtacaggtgatagcataacctctaaccacatattcaggcacgtaccatcaaccggaatgaggataacaacaggcacaggaaccaagacc

SEQ ID NO: 955 - DNA, 376 bp, Glycine max
  Clone ID: LIB3028-051-Q1-B1-E7
gcctcgaatcattgtcaaggtaacttgtccaaatggtattgttatttactgtagtctttgtgatttgatatttggtttttgttatgggggtggacagagtatagtgttggagaacttgtatgttcagtcaggaaacgatggaactggggtaccaactgatatgttgtcgttgaactcaacggtcagaatattgtacagaaatcctgccactttcttcggcgttcatgtcacttctacccctcttctcattagctattaccagcttgcaattgcctctggccagatgcagaagttctatcaatcgaggaagagtcggcggagtttggctgtagtggtttcaggacaccagattcctctctatggtggcgtgtcagtt

SEQ ID NO: 956 - DNA, 614 bp, Glycine max
  unsure (1)..(614): unsure at all n locations
  Clone ID: LIB3028-049-Q1-B1-E3
cttcaacttgtaatcaagggagagagaaaatttcaagcacaaaaaatggcggagaagaaagtggtgatcctaggaggtggtgttgccggtgccaaccttgcaaaaactatacaacgtcaagccaacgtcacccttattgatccgaaggaatattttgagattccatgggcaagtttgaggggattggttgagccaacttttgctgaaaggatagtgatcaaccatagagagtacttcaaaaagggtaaccttgttgtatccagtgctgtcaacataactgaaactgcagtggtgactgaagatggccagcagattgcctatgactatcttgttattgccactggacacacagaaccaatccccaaaaccaggagtgaaagacttgaccaatacaaaggagaaaatgcaaagatcaaatctgcaagttcagttttgattgttgggggaggtccaactggtgttgagcttgcagcagagattgctgttgattttcctgataagaaggtcaccatagtgcataaaggaacgaagttgcttgaatacattgggacaaaagcttcaagcaagactttaaagtggctcaaatcaaagaanattgatgtgaaactagaaca

SEQ ID NO: 957 - DNA, 570 bp, Glycine max
  Clone ID: LIB3028-049-Q1-B1-E4
tcctcaacttgtactcaagggacagagaccattacaagcacaacaaatggcgaagaagaaagtggagatcctaagaggtggtgttaccggtgccaaccttgcaataactatacaaagtcaagccaacgtcacccttagtgatccgaaggaatattttgagattccatgggcaagtttgaggggattggttgagccaacttttgctgaaaggatagtgatcaaccatagagagtacttcaaaaagggtaaccttgttgtatccagtgctgtcaacataactgaaactgcagtggtgactgaagatggccagcagattgcctatgactatcttgttattgccactggacacacagaaccaatccccaaaaccaggagtgaaagacttgaccaatacaaaggagaaaatgcaaagatcaaatctgcaagttcagttttgattgttgggggaggtccaactggtgttgagcttgcagcagagattgctgttgattttcctgataagaaggtcaccatagtgcataaaagaacgaagttgcttgaatacaatgggacaaaaacttcaagcaagac

SEQ ID NO: 958 - DNA, 567 bp, Glycine max
  unsure (1)..(567): unsure at all n locations
  Clone ID: LIB3028-049-Q1-B1-E5
aaacatcttctctctttaccttccttgtctcaagtgaaccttttttctcaaaagcttcccttttgagttatatgttcaccaccaccattttgaattgaaactcgagaatgggagacaaagaggtaaaggaagaagaacaaaaaggtggattcagggcttccatgtttatttttgtgttatcagcattggacaacatgggttttgtggcaaacatggtgagcttggttctatacttttatggggtgatgcactttgatctgtccaactctgccaacaccctgacaaactttatgggctcaactttcttgctctcactcgttggtggcttcatctcggacacttacttcaacagactaaccacatgtttgctttttggatcactcgaagttctggctttggtaatgctgacggttcaagctggtctggaccatttacacccagattattgtggcaagtcaagctgtgtcaaaggtggcatagctgtcatgtnttactcatcattgtaattgttggctttgggcatgggaagagtgagaggctccttgactgcatttggtgctgaccaat

SEQ ID NO: 959 - DNA, 292 bp, Glycine max
  Clone ID: LIB3028-049-Q1-B1-E7
tgaaggtgaatgaacccaccatattgcaaatcaacttattgctagagcgtcaaaacggattgcacatgtcacttccgaaacactttcaatagtttcacgttcaacttggtctacgaaacggttttgtccatgttattgatgatgatgagcagttaatcatcagacttggattgattgtcataacaggcatgctacatttggcataggaggacatgtttaggcaacgacactactacgctgtggacgtacatgaactagcaagtgaaagcttttcgaccgagtgtgaacattt

SEQ ID NO: 960 - DNA, 592 bp, Glycine max
  unsure (1)..(592): unsure at all n locations
  Clone ID: LIB3028-049-Q1-B1-E8
gaaaaacaaaaaatcaacgaatggcacttacggggggtaagcaacgaacgccaagagacttgggtggaggagtaatctcgaccactttgtagggaaggatgctacctcgttctctgtctctgtctctcttcctactgcacgaaacctcaaacgacatcgtctgctaaaagagagcgaaaacgagattaactaatgaagaatcatggaaaagatagaaaagtgggtgagtgcggtaccttctggcatgaagcgagacccatgttccacgacgccattacaattagcttctcttctcttcaattctcgtcacgcaaaatggcaacagcaaagccagaaaaaactccggattttttttgtggtgggacacgagtcacagggcgaggcctaagccaaaaaaggagactacacagataatcctgggagtagcanactcccaaactatgagcaagaagcagtagcctaagagaggctggcctctgctaagatcctccaccattctgcaggcttgatgagcaagcacatccacacaatgattagcttctctataaatgtgagagatgcttatattgtcatgttgaataattaaattcct

SEQ ID NO: 961 - DNA, 350 bp, Glycine max
  Clone ID: LIB3028-049-Q1-B1-E9
attttaaacctctgggcgtggctagcttcaacctttaacattaacatggccattccctacccccatttcatcgccaccgagaaagccgccatggacgccggcctcctccacccctcctccccctccgtcatcctcacccaagacgatttgaagaaaatcgccgcctacaaggccgtcgagtacgtggagtccggcatggtcctcggcctaggcaccggctccaccgccaagcatgccgtcgaccgcatcggcgagctcctccgccagggcaagctcaaggacatcgtcggaatccccacctccacaaaaacccacgaacaagccctctccctcgggatccccctctccga

SEQ ID NO: 962 - DNA, 476 bp, Glycine max
  unsure (1)..(476): unsure at all n locations
  Clone ID: LIB3028-049-Q1-B1-F1
tttgatttaatttcatcacgcgaccctcaatggacgaagaagcagagaccgagagagttccccatccacactctccaaaactagggtttcccctcccctccgccgccggtgacgcaaacctcctcacagccctcagcaccatcctcgtcgcgtcgattcaggacgccaaagaccgcatctcgcagatcgagtacgtcttctgctcccagctctaccctcacttaaaatccgacgacgcatcaaaacgctgctgcatcgaacagctcaaacgtgacgccgacgagaacgccaagcttctactacacgccgaggagaggcgaaacgccgcgtttttgaaatcggagagctgcgagggcgacaaggcgacgctgctggcgagaatcgccgagttggacgagacattgagattgaagacgcgggagattgaggaggcggagacgaagcggatcgangangaagggaagctactcgagcgc

SEQ ID NO: 963 - DNA, 412 bp, Glycine max
  Clone ID: LIB3028-049-Q1-B1-F10
attctcttctgcgttcttcccaccaacatcgaaaccatgtccaccgacttgcacctccacaacgacctgccccagctccgaatcgcctccgccgccgccgccgatgccgtcgtcaaaaccgacgacctcccctccgacgatgacgaccgcaacgccgtctcttccgtcatcactcaaaccgagaccgaaactgacggagccaccatcgtcgacgtcgccgtcgccgtcaacgtcaacgtcaacgtcaacgacgagaattaccgtactccgacttcgaaggagagcaaaattccagcgacgatgacgtgtccgccggcgccgaggaagccgaagctcgcctcctgcaaaagaaaacttcctgatgagtttcagtttctcgatgtcacgaataaggaggacatggacgccttct

SEQ ID NO: 964 - DNA, 356 bp, Glycine max
  Clone ID: LIB3028-049-Q1-B1-F11
gctaaataaaaggagaaaggaaaatgccataaattaaagagaatcctaaattctgtaggcgtgttgtgattatcagaagaccaaatcgaggaatccggaaagggaagaagaagaagaagaagagagtgggttgggttgcgtgccccgttccgttcgttcttcccctttcctttcaattctttcttttcaattctttttcttctgaacacagaaaaaacagaagatgggaatgaaacaagtcattaaaaacctcgacgcctttcctcgcgccgaggatcacttgttgcagaaaacccaatctggggctctcgtatccgtaattggtctcattataatggccacattgttcgttcacg

SEQ ID NO: 965 - DNA, 387 bp, Glycine max
  Clone ID: LIB3028-049-Q1-B1-F12
ggctcgaggatggcttctcctcttcttactccttacaagatgggcaaattcaatctgtcccatagagttgttttggcaccgctgaccagacagaggtcttacgacaacgtcccacaaccccatgccatcctctactactcccagagaacttccaacggaggccttctcattactgaagccactggcgtctctgacacggctcaaggctatccgcaaacccctggcatatggactaaagaccatgttcaagcttggaaacccattgtcgatgccgtccacgccaaaggcggtgttttcttctgtcagatttggcacgttggaagagtttcagattcagtttatcagccaaatggacaagcacccatatcttctacggacaagcaactc

SEQ ID NO: 966 - DNA, 601 bp, Glycine max
  Clone ID: LIB3028-049-Q1-B1-F2
cgctacgaagatatccctctttctttctcatagttttctgcgaaatcgccgatgctagaatcggagctccacgatttatccgacgacgccgattacgccgcgtctcaacaacaaggatctgctagcgtgatgctgcgtagtgacagtgccaaacagagctcccctcgggaaggtgctgaaattgtatttttgaaggacaatgtcgcaattcatccgactcagtttgcgtctgaaagaatcagtggaagactgaaattgattaagcaaagctcgtccttgtctatgacttggataccttacaaagtgcatagttcagaggccaggctgtctgataaagacagaaacctttatatcataagggcggtgcccttcacagacatcaggtccatccggaggcataatcctgcttttgggtggcaatatgtcattgttgttctatcatcaggacttgctcatcctccattatatttttatagtggaggagtcaaagaattccttgctacaataaagcaacatgttcttcttgtgagatctgaagaagatgccaacgtattccttgtgaatgattttcagaatacactgcagaggactttgtcttcct

SEQ ID NO: 967 - DNA, 562 bp, Glycine max
  Clone ID: LIB3028-049-Q1-B1-F3
ctcaatcgttttctacataatacaaacctctctaatttttgaagcttattatacccaatctcgatatgcagatcttcgtgaaaaccctaactggcaagacgatcaccttggaggtggagtcctctgacaccatcgacaacgtgaaggccaaaatccaagacaaggagggcattcctccggatcaacagcgtttaatcttcgccggaaaacagctcgaagacggcagaaccctcgccgactacaacatccaaaaggagtccacgctccacctcgtcctccgcctccgcggcggcatgcaaatcttcgtcaaaacccttactggcaaaacaatcacgctagaggtggagtcctccgacacaatcgataacgtgaaagccaagattcaagataaggaagggattcctccggattaacaacgtttgatcttcgccggaaaacaactcgaagacggcagaaccctcgccgattacaatatccagaaagaatcgactctgcatttggtgcttcgtctccgcggagggatgcagatcttcgtgaaaaacctaaccgggaaaacgattac

SEQ ID NO: 968 - DNA, 602 bp, Glycine max
  Clone ID: LIB3028-049-Q1-B1-F4
gcagcaatggggctctccatgtggaagccaatgcaccaataaatacgctgccctcggcaaaatcccatggcgaatattctgcaaaaagggttgcgactcagatggagagacatgggaagaatgtttggaggactgcaatcaaatatgctacaaggatcccgtactaaaggaccagcagtggagtgcttatattgatcgttcccctggagctgccagttattcggaggaatgctttcatgcgtgtgtatctggctgcggttacaagtttgaggttaaatcagaggaagctgataaagtctgtcctaacaggcaaccaaagcctgaaaccaagcctactaagaagccaaagccacaacctgtacgccccatcgatctgcctggtgatatacctgacacttctgcatagtgaaaaacatcagcatatttgacaaaaatccagcatgtatgtatacttgatactttgttggttatattctctcaagaatttttttttctttcgttttctttttttttttctttttaccttgagacatgctaattgttatcagcatgagttacttacattttgtggacaacaccatgagtggttgtgcctatttttg

SEQ ID NO: 969 - DNA, 558 bp, Glycine max
  Clone ID: LIB3028-049-Q1-B1-F5
agtagaagtgcttttcaaagatcagcactacaccaagactcctgaagaagctgcagccgaaaccattctggcagggttggatttgaactgtggaaattatcttggccaatacacagaaggggcagtgaagcaagggctattggatgaagcatccattaacaatgctgtctcaaacaattttgccacattgatgcgtcttggtttctttgatggcgatccaagcaagcaaacttatggtaaccttggtccaaatgatgtatgcacttcagagaaccgggagctcgcccgtgaagcagcaagacaagggattgtgttgcttaaaaatagtctgggatcattgcctctcaatgccaaagccattaaatcattggcagttatagggcccaatgctaatgctaccagggtcatgattggaaactacgaaggcattccttgcaactatatatcacccttgcaagcactaacagccttagttcctacgagctatgctgccggctgccccaatgtgcaatgtgcgaatgcagagttagatgatgccacacagatagcagcatctgc

SEQ ID NO: 970 - DNA, 616 bp, Glycine max
  Clone ID: LIB3028-049-Q1-B1-F6
gggtttggccaaggcgcaacccgcgtggctcagagccatggaacaggcaccacctggaacgtttcctcggtctgccgggaaaattccgaccattactcttcccgaggatgtttatgtgaagaagttttataagaaatatccggaatcgaaatcacatgacgcgataaagtttcatgcgtttgatccccctccgtctcgtgtatttgccttgagggttcttgaattgaaggagcagggcattagtgaggagcaagctatggctatagctgatatggaatatctgacagagaagaggacaaagaagaaagcatatacccgtttgaaggaaattgcacgtcttcaacggaagagacttccgcaaaatccatatcctatctgccatcaaggagatacatgctgatgagaggaaatatgttcgtgatcgtttcttcagtcccaagatgcttgaaattgtggagaaacagaaagccgatgcagcagcggagagattgagtcgacgtggtgattggtgacttttacggcggctaagttacaatacattgagtgtttagctcttgaaaacatggctctgacaataacatttaccattcaggcactgacaagtgcgttcttcttc

SEQ ID NO: 971 - DNA, 620 bp, Glycine max
  Clone ID: LIB3028-049-Q1-B1-F8
ttgaattcgctggcagcttacagctatgatcatcaacaacgccccttttcctctatgattgattcgattcgattgaagtcgattccgtagagagtgagaaatcagatcacaataatcatcgatgggtaatttgttcgtgaagaagcccaaggtaacagacgttgataaagcaatcctcgcactcaagacccagagacgcaaactcgcccaatatcaacaaaagctagatgctgttattgaagcagaaaagcaagctgcacgagacttgattcgtgaaaagaagaaggacagggccttgttagcactaaagaaaaaaaagacacaagaagaattgttgaagcaagttgatgcttggcttataaatgttgagcagcaattagcagatattgaactggctagcaagcagaaggctgtgtttgaaagtttgaaggctggtaatgatgcaatgaaagccatacaaagtgagataaacattgaagatgttcagaaacttatggatgacactgctgaagctaaagcttatcaagatgaaattaatgaaataatgggggagaagttatcagcagaagacgaagaggagattttagcagaatttgaggactttggaaatcagcttacag

SEQ ID NO: 972 - DNA, 350 bp, Glycine max
  Clone ID: LIB3028-049-Q1-B1-F9
gtgggcctggcccatggctaccttctggtgggcccattcgtgaaggccgggcctctgaggaacaccgagatcgccgggcaagcaggctctctcgccgctggtgggcttgtggtgatcctcagcctttgcctcacaatctatgggatttcatcttttaacgaaggagacccatccactgccccgtcactgaccttgacgggccgcaagaaggagcccgatcagctccaaactgctgatgggtgggccaagttcaccggaggcttcttcttcggaggcatttcgggtgttacttgggcctacttcctcctctacgtcttggaccttccttactacatcaagtgaagaaagtg

SEQ ID NO: 973 - DNA, 388 bp, Glycine max
  Clone ID: LIB3028-049-Q1-B1-G1
ccaatccagagccgaggaagagaaggaagcgacaaggaccgtcttgagttaatttgattcagtgtagcagccagcagcgataagcatcgcaccaattccacttccagtttctgattcgtcacgtcagacaacggaatgggttagggtgtgacatgagatccacatgttgcggaggcttctctcttctcacctcaaaaccctaggctcctccgccgccgccgccgccacgcgcatctccccgatctgcttccgcctccgccagattcgccgctctctctcgctcctgcctctacttctcaacacattccgaggatgcaactgcgatcaataagaacgttgaggacataatgccgatcgctactggccatgagcgcaacgagcttcaggc

SEQ ID NO: 974 - DNA, 351 bp, Glycine max
  Clone ID: LIB3028-049-Q1-B1-G10
ggaggttttacctgcagaggcataggtttgccggttaccagtcagagattgcacgttcggtgttttgtttatgtcctctggggtgggccccatggagtccgaggctggtcgagtccgtcgccttgggttgcgtgccagttgtcatagcggacggtattcggttgccgtttgtctccgcggtgaagtggtcggagatatcggtgacggtggcggagaaagacgtggggaggctggctgagatactggagcgcgtggcggcgagaaacctgagcacaattcaaaggaacctgtgggacccagcaacgaggagggccctacttttcaacagccaggttcaggtaggggatgcca

SEQ ID NO: 975 - DNA, 365 bp, Glycine max
  Clone ID: LIB3028-049-Q1-B1-G11
aaacaaagaaaaaaaaaaacccttagccaacacaaccatcatgggcacctctgctattcagcaatcagcattcactggtcaaactgctctgaagcagctcaatgagttcgtccgcaagaccggtggcgccggcaaaggtcgcactaacatgcgccgcaccgtcaagagtgctcctcagagcatttggtatggccctgaccgtcccaagtacttgggtccattctcggagcagattccatcatacctgaccggagaattccctggtgactacggatgggacactgctggattatcagctgacccggaaaccttcgccaggaaccgggagctggaggtgattcacagcagatgggcaatgcttggtg

SEQ ID NO: 976 - DNA, 608 bp, Glycine max
  unsure (1)..(608): unsure at all n locations
  Clone ID: LIB3028-049-Q1-B1-G2
cgatgntttcctcctctaagggtccaattttttcttaaaccctagaacacacactctctctcacagaagaagaagctgctgcagaagagaatttccaaaatgtcgatgtcgaagagttccaagatgcttcagtacatcaactaccgtatgcgtgtcaccattcaggacggtcgccagctcgtcggaaaattcatggccttcgaccgccacatgaacctcgtcctcggcgactgtgaggagttccgcaagcttcctccggccaagggcaagaagccagccgaaggcgccgaccgcgaggaccgccgcacgctcggcctcgtcctcctccgcggcgaggaggtcatctccatgaccgtcgagggccctcctccgccggaagagtcncgctccaaggccgtcggtgccgccgctctggcaggccccggcatcggacgtgctgccggtagaggtatcccgcccgcccccgtcgtccaggcccagcccggactcgccggccctgtccgcggagtcggggggccccgccccggcatgattcaacggcagatctcggccggcctcagctcaacgcaccaccggtgtcttaacccggcggtggaccgcctgttgat

SEQ ID NO: 977 - DNA, 598 bp, Glycine max
  Clone ID: LIB3028-049-Q1-B1-G3
ctcgagccgattatcataccctttaagatgaaaccgtacctacgtccaatattcctattattccttatccttctcgaccaatccacttcggcgagtgcttctaatagtaggtttatagaattcttttcaaaattaaagaattcttttaatcctaagtctgaagaactaaaatcaaaagatataaagaagctcccgagcgtcgaatttttgaagaagaaacatgacggagttaaggacttctctcaagaagctatcctgaaactaccaattatacactggccgttcccgataccaaaaataccaaaaaacttctggaaaccaaagtcccagaaaccaaagcaccctcccccaccgccagactaccgtgtacaactaaagtccgatcccccagcgccaaacgcaccaccgaagcaaatcaatattaagggcctgtccgtcgtcaaaaattacttatctgactacggctacattgaatcctctgggccatttaacgattctttcgaccaggaaataatatcagccattaagacctaccagaatttttccaatcttaatgttaccggcgacctgaacaaacagcttaatcagcaaatgttgt

SEQ ID NO: 978 - DNA, 419 bp, Glycine max
  Clone ID: LIB3028-049-Q1-B1-G5
accaagtgaaaaagcaactaagcatagtgtgtaagaaagggagaaaaacaagtgctgtgtagagagaaaaatggctaggtggtgcatgatcttggtggttcttgctcttgccgtggttgcaagtgccagaaacatgcccaatgacgctggtttggaggaccagaagaacttccttgggtatgggttttcgggagttggcaacaatggccttccctttggtggagtgggttctgggtttgatggtaatatgggtgggccttctgggctcggaagacttggaggattcggtgggcctggtgggcttggcggactcggaggtcctggtaacggtgaaggacccagtcttcatctcccttgagacttgagaccacacaccttcgtgtctctttcggtcgctactttgctattatagcctatat

SEQ ID NO: 979 - DNA, 150 bp, Glycine max
  Clone ID: LIB3028-049-Q1-B1-G6
gtcttgttgctatctgaagctcttgctagcacacacccatttaaagtacaggttcataatgaaatgcaactctgattcttttgaagggagctcaaattgtaaaatagtctacagatctggtttaagaattaatatatgaattgtagattt

SEQ ID NO: 980 - DNA, 592 bp, Glycine max
  Clone ID: LIB3028-049-Q1-B1-G8
ctctctaaatatttttctctctcttcagcgaattcgtttttctcttcaagcttcggctatggcgtctggatcctcgggtcgcggaaactctgcctccaaaggcttcgatttcgcttccgatgacatcctctgctcctacgacgactacgccaaccgcgattccacttccaacggcaatcacaccgatccggattttcacaaatcaaggatggcaagaacatcaatgtttcctactactgcttataatccacctgaagattctttaagtcaagatgtgattgcgactgtagagaagagtatgaaaaaatatgctgacaacctaatgcggtttctagagggaattagttcaaggctatcacaattggaattatactgttacaatcttgacaaatctattggagaaatgaaatctgatataaatcgtgaccatgtggagcaagattcaaggctgaaatctcttgaaaaacatgttcaagaagttcacaggtctgtacaaattttaagagacaagcaagagctagctgagacacagaaagaattagccaagcttcaacttgctcagaaagaatcatcttcctccagccattcacag

SEQ ID NO: 981 - DNA, 366 bp, Glycine max
  Clone ID: LIB3028-049-Q1-B1-G9
ggcaacagcagatgtgttcaatgccattggattgctagaattcttctatgatcaatcccctgaagacatgcaaagtcttggaactacattcttcactagtgggatcggtgttgggaacttcttgaacagctttttggtgacaatggttgataaaataacaggaaggggtgacaaaaagagctggataggggacaacttgaatgattgtcacttggactactattatgggtttttgttggtcatgtcaagtgtcaatatggtggtttttctttgggtttcaagtagatacatttataagagggaatcaataagggtcaaggacggtctttgtgttcaaatggagggaggaaacccaactttggacgc

SEQ ID NO: 982 - DNA, 177 bp, Glycine max
  Clone ID: LIB3028-049-Q1-B1-H1
gagtcccatccgggctctatcatacgataccgacactggttttgcggcacttccaatgtcagtcacctgctcttcagagactctcttccacactcgtcaacttgcgcaggctgcattacagactctccgaagccaccttcacaggcagtctgctcactatgcgctcttaagagtctc

SEQ ID NO: 983 - DNA, 324 bp, Glycine max
  Clone ID: LIB3028-049-Q1-B1-H11
cccaaatgctacttgcagctctgaaaagaacattcctttcatcacgctgctatatcgtcctggtcactatgatatcctctatacaaaatgatgacctttttggggggaaaagacctttgtttgttacctttttggtggtagtgggagccgcaacagctctgcactcagagctgttgctgtacgacatatgtggtctgtatcttgttaatgttgaatggtcacttttcttgaacgttacctgtttagaagagattgatcaacaaagtacgtcaacattaacgcactaataatttaaaactcagtttgattttgctgcgttacatg

SEQ ID NO: 984 - DNA, 376 bp, Glycine max
  Clone ID: LIB3028-049-Q1-B1-H12
acaagtttttgaaatgttgtcaccccttcttctatttctatgcctaactcttcctttgtttttgttgtccttcttcaaataccgtcaaaccttcacgaatcgagcacttccaccaggtcctagaggccttcccagaatagggaatcttcatcaactagatagtccttcacttcaggagcagctatggcatctcgcaaagacatatggtcctttattttcccgtcaatttggattaaggccagccatagttgtttcctctccaaaattggccaaagaggtaatgaaagacaatgaccttgagtgctgtggacgacctaaattactaggccaacagatactaacctatcatgggttagacatgggattttctcatacg

SEQ ID NO: 985 - DNA, 614 bp, Glycine max
  Clone ID: LIB3028-049-Q1-B1-H2
aagaatctagatcagggtcactgtggttcttgttgggcatttggtgctgttgaatcattgtcagatcgcttttgcattcattttgatgttaatatctctctctctgttaatgaccttcttgcatgctgtggctttctgtgtggatctggctgtgatggaggatatcccttatatgcatggcgatacttagcccaccatggtgttgtcactgaagagtgtgacccatattttgatcaaattggctgttctcatcctggttgtgagccagcttatcggactcccaagtgtgttaaaaagtgtgtaagtggaaaccaagtttggaagaagtcaaagcactatagtgttagtgcatacagagtcaactctgatccccatgatatcatggcggaagtttacaagaatgggccagttgaagttgcatttaccgtttatgaggattttgcttactacaaatcaggagtttacaaacacatcactggttatgaactaagtggtcatgcagtaaagctaattgggtggggaacaactgatgatggggaagactattggcttctcgcaaatcagtggaacagagaatggggagatgatggttacttcaagattcgaagagggac

SEQ ID NO: 986 - DNA, 611 bp, Glycine max
  Clone ID: LIB3028-049-Q1-B1-H3
agcagattttacctccataaacccttcgttcttcttcgtctccctttgcttctctcacttcccatgtctgagtggcttcgacgccttccctcgccagaatgctaacacatctccgccgcgcggctgccgcatgcggtggtgctacctccgaccacttcctcgctctcaggcagttcagctccgccgtcgtcgccgtttcctccgtgtctgattccgatccaacacttccctcttcttccgattcacagagaaaagcatctagatggttgctatttctacctggggcaatcacatttggccttgggacttggcagattggtagaagagaagaaaagattaaaatgttggaatatcgagagaagaggttgcaaatggaaccattaaaattcagtagtgcttattcatcagatgaggaattagattctctggaatttaggaaggtggtgtgcaaaggatattttgatgataaaaaatcagtctatgtgggaccacgttcaagaagtatttcaggagtcactgaaaatggctactatattataacacctcttatgccagttcccaattgtcctgacagtgtaagcattccaattttagtcaacagagggtgggtt

SEQ ID NO: 987 - DNA, 613 bp, Glycine max
  unsure (1)..(613): unsure at all n locations
  Clone ID: LIB3028-049-Q1-B1-H4
aagctccaagccgaatcggctcgagcanaacactcataacacaaagcacaaagcaaagctcatccttgagttaaaaaatggcagcagcttcttccatggctctctcatccccatccttggctggcaaggccgtgaagctgggcccatcagccccagaagtgggaacggtgagcatgaggaagaccgtcaccaagcaggtctcctcaggaagcccatggtacggtccagaccgagtcaagtacttgggcccattctctggcgagcccccgtcctacctaaccggtgagttcccaggcgactacggctgggacactgctgggctttccgcagacccagaaaccttcgccaagaaccgtgaactcgaagtgatccactccaggtgggccatgctcggagccttgggctgcgtcttcccggagttgctgtcncgcaacggggtgaagttcggagaagccgtgtggttcaaggccgggtcccagatcttcancganggtgggctcgactacttgggcaacccaagcctgatccacgcccagagcatcctcgccatctgggccacacaagttatcctaatgggtgccgttgaaggtttacgtattgctggtggccccct

SEQ ID NO: 988 - DNA, 591 bp, Glycine max
  Clone ID: LIB3028-049-Q1-B1-H6
gaggggtgtgaatgtgaatgctgttaggcccatcatgaataatcctcccagtgttgaagatgtggcagcagcagcaatggggaagaagaaagtgaagaaagagggtgagcagaaggtggggaagcgtgtggtggaggaagaggagagaaaggaaagtactagagacatggtgggtgtgggtgggtatttgcagcaacagcaacaaggtggtggcatgatgggttggaattgggaggagaatatgccattggtgggaggtgtggtggatgaacaaatgtcatggggctccacttggttccctggttgggacatggacttgttggggggtgatgctttcactgccttgtacaatgatgttctttgggatgatgatatctggaacctcaacaaccaaattccaattcccttagatactaagaggtttcatttcggctagagtagaggttgttctcaagcctccattcatgtctttatgtttcctttagcttaggaatggaattccagtgttttctcttcaatttatatagtatgttgaattcactattttttttttttaatgctaatttggctcgtcaagaatcccgtacatct

SEQ ID NO: 989 - DNA, 576 bp, Glycine max
  Clone ID: LIB3028-049-Q1-B1-H7
ggcatattgtgccctccctctttctagctatttccctctcttaacacaattaacaaagatatatcatatcatattaactccaaatgatgaaaaatattgggttgtttcttcttgtggtggtggctacttttgtggtggcagccacagctggtagcttttaccaagactttgatttaacatggggtggtgagcgtgccaaaatctatgaaaatggaaatcttctcaccctctccctagacagagcctctggctctggctttcgttccaaaaaagaatacttgttcggaaaaattgacatgcagctcaagctcgtgcctggtaactctgctggaacagtcactgcctattatttatcttctctggggcctactcatgacgaaatagacttcgagtttttgggtaacttgagtggtgatccttatactctccagatgaacgtattcagccaagggaaagggaacagagaacaacagttccatctatggttcgaccccaccaatgacttccacacatactccgtccaatggaatcctgcaagcatcatattctctgtggatgggacaccaataacggagt

SEQ ID NO: 990 - DNA, 360 bp, Glycine max
  Clone ID: LIB3028-049-Q1-B1-H9
gtttggatggcggcaacggtggcggtagcgcaaggccacaccgatcccggccacaagtgcaagacggcgctcaactccatccaccacaaccggagccgcctcttctccggcggagccctgtctgatctccggccgctgtccggcgtcgttggacctgacgtctctggcgcggcagcggggagctccgacgcgaagaatagggtgagccaagccgatgactctctgaggaaagtgatgtactttagttgctggggtcagggctgaaccacacgtgatgaacggtggagattaaagtagtcgccggagaaagtgaaccgggtctgttttcgggtcgggttcggatctgagttgacctggccg

SEQ ID NO: 991 - DNA, 232 bp, Glycine max
  Clone ID: LIB3028-050-Q1-B1-A1
gtcaattaattgataaaacatgggagagcttccatgatgtccaggtgaaggaccgcagtttaatctggaactccgacttgattgagactattgaattggaaaatcttttgataaatgcatgcatcacagtgtacgctgctgaagctaggagggagagtagaggagctcatgcccgtgaagacttcaggggtagagatgatgggaactggatgaaacacactgtgggattctg

SEQ ID NO: 992 - DNA, 394 bp, Glycine max
  Clone ID: LIB3028-050-Q1-B1-A10
ttcacttttcttcatagcactcaaaaaacaacaactcatctcatcattattccctttctcactcagcacattctaaacagtagcaccatcaccaataataatggcatcatcctcatcaaccgttgctttgagaaccatctcctctttctctctgaaacctgccaccacaacaagatcattactcaacactagtacttcatccaccataaccctcttaccctttacatcagcaaactcatttctctccaaaaccctcaaactcaacacctcttccccacactctcacctttcactacccctcaacaagtctttcacttgtagaagccaggctgaaccatcttctgactcagccaaagtccaagaactgagtgtgtatgagatcaatgagagagat

SEQ ID NO: 993 - DNA, 363 bp, Glycine max
  Clone ID: LIB3028-050-Q1-B1-A11
ctgaaagtcactaacaagagccatgttcaatcagaggagaaaattggaagaaaagagtaccaattggtcacttttgatcttccctacttggccttttactacaaccagaagctcttgttttacaagggtgaagatttcgagggcatggtccaaaaactcaaagttggacttggagtggtgctgaaggagttccaccaacttgctggcaagttagggaaagatgaagagggggtgttcagagtggagtatgatgatgacatgcttggtgtggaggttgttgaagctgttgtagctgatgatgaaattggtgtggatgatctaactgtggctgaaattagtaacactaatttgaaggagctgata

SEQ ID NO: 994 - DNA, 390 bp, Glycine max
  Clone ID: LIB3028-050-Q1-B1-A12
ccttcatatgcatttgatatgtaaattgtttcattgtttatgattttgatgaggtatgtcaatttgcagaaacaatatcaaagtttggctcgggcatgtttcttcttgttcaagtcatgctcttgttggattttgttcatggatggaatgacaaatgggttggatatgatgaacaattctggtacattgctctatttgttgtttcccttgtttgttatgtggcaacatttgcattctcaggagttctctttcacttcttcacgccatctggacaagactgtggactcaatgtctttttcattactatgaccatgattcttgcatttgtttttgccatagtggcattgcatcctgcagtaagtttgttatttgattttcattgtagctaac

SEQ ID NO: 995 - DNA, 306 bp, Glycine max
  Clone ID: LIB3028-050-Q1-B1-A2
caaatgtgatggaagacttgcaggctttgaaagctgcaagggagatttggctgttatccaactttgactctcaagaggacattgcctacccaaacgatcctaaagtgcccattaaggtggatgatgaccgaaagcagctttttcgggggattgaattgcctcgtgatatgattgacatagagagggatctacaggaagatggaatgaagcctgctaccaacactgcagagaggaggagtgcagcgcagatgggaggcatttcatccaggcctagacctaaggagaagagaaatgaaatcactaaga

SEQ ID NO: 996 - DNA, 254 bp, Glycine max
  Clone ID: LIB3028-050-Q1-B1-A3
ctctgaattcctcttattcaggaatttggagagtattgatatatcaaggtaggataaaccagtagccaaggaagatatggagttttcgatgattttcattgttagcaacattatgctgcgtttcagttcagcatttgccagaactgctagtcctccctctctgagcccaactccagcaccagccccgggagcagacttcgtgaacctcactgagttacgcagtgttgctggtccgtttcacaccttccttggga

SEQ ID NO: 997 - DNA, 324 bp, Glycine max
  Clone ID: LIB3028-050-Q1-B1-A4
ctttagtcttgttcttagagatggcttgtgaaaccaagtcatggttggttatgtttcttgttttcttggttgctaattgcatgcaacattgtgtccacggggtgtctcaagtgccttgcctttttatctttggggactctatgtctgagagtggaaacaacaatgaacttccaaccacttcaaaatctaatttcagaccagatgggatcgactttccattaggacgaactgggagatataccagtgggcgaacaggaattgagataatcacgcaatttcgtgggatttgggaaatttatcccaccctttgcaaacacgagtggt

SEQ ID NO: 998 - DNA, 212 bp, Glycine max
  Clone ID: LIB3028-050-Q1-B1-A5
acaatgcaactcttggggctgttagacaggaacttaaagaattacacccacatgatccccaaattgttgtcctcaagcactgggtgtggtgagtaaaaggcattattcaggtttcaagatctataggtgacgtagatttgaaacatgcacagtttaaccggtaaccacttaatgcatgagtcaggacttcctgaggcaatggacatgcccat

SEQ ID NO: 999 - DNA, 242 bp, Glycine max
  Clone ID: LIB3028-050-Q1-B1-A6
ctgaatttgcgggttttggatttggacttggtcgtcaacacagtctaattaatatctttttgctccttcgcttaggaatcttcttcttcttcttcttgttcctgcaacgcactgaattcgatcaatcaatcgagcttcaattgcgtggtttcgatcagaggaaaatggccggtcagttatcgaagggagaggaattcgagaaagaggctgagaagaagctcagcggttggggcttgtttggg

SEQ ID NO: 1000 - DNA, 129 bp, Glycine max
  Clone ID: LIB3028-050-Q1-B1-A7
atttcccaccttctactgcactccgagtaacaactcgcactatatatgttgcattgacaatgttaattggcatatgtatcccgttctttggctctcttcttggatttcttggaggctttgcgtgtggcc

SEQ ID NO: 1001 - DNA, 222 bp, Glycine max
  Clone ID: LIB3028-050-Q1-B1-A8
ctcaactaaactcatatttccaaaacgcagaaccaacaatgtcgttccccttcaaccactctcaccgcagggacgacgacgacgacgacaaacgacccgccgtttaccctcctccgggtaacaccttcaacagccctccaccacccttcgacggcgtccatcagccagaaacccacgtgtcccatgtcttcaacagcagcagctactccgctcccccgcctc

SEQ ID NO: 1002 - DNA, 340 bp, Glycine max
  Clone ID: LIB3028-050-Q1-B1-A9
gatcgagataactagaaacagtgtgatgaaaatgaaggtccttgttttcttcgttgctacaattttggtagcatggcaatgccatgcgtacgatatgttccctctccgaatgaacactggctatggtgcccgtactccggaggtgaaatgcgcaagttggaggcttgctgtggaagcacacaacatctttggctttgagaccattcctgaagagtgcgttgaagcagcaaaggaatacatccatggcgaacaatatagatcagactccaatacagttaaccaacaagcttacttttatgccaaagacctcgaaatccatcccaaggacacatttgtgttc

SEQ ID NO: 1003 - DNA, 308 bp, Glycine max
  Clone ID: LIB3028-050-Q1-B1-B1
ctcagagccagcgagtgatgatcgcttcgccgcagtaatcgccggaaacgaattcgccgtttccctgccgagatctctcaatctccgacgactcagatacctctattaattttcctccggttaggttgttagggtataaatagtacgtagtttttccttagttatggcttcggagaatgtgaagaccggggattccgccgtcaccaccatcgtcaatctcgccgaggaggccaagctcgccagagaaggcgtcgtcaaagctgcgaggtacgcgctcgccagcagctgcaagtcgctcgtcgccggtg

SEQ ID NO: 1004 - DNA, 390 bp, Glycine max
  Clone ID: LIB3028-050-Q1-B1-B10
catacttagaaacagcaactatgtctctcatgcagcttactagctcccctgttggctcactggtccgtttcattgtaatatttgctttatggtacagaaccatggctttggccaagttgccaccaaacgcttcatcagttccagcagttttagcgtttggagattccatcgtggacccaggcaacaacaacaacataaaaacattgatcaagtgcaacttcccaccttatggaaaggattttcagggaggaaacccaacgggtcgattttgcaatggaaaaattccttctgacttaatagttgaacaattgggtattaaggagtatttgcctgcatatttggatccgaatctcaaatctagtgatcttgttaccggcgtctgctttgcct

SEQ ID NO: 1005 - DNA, 386 bp, Glycine max
  Clone ID: LIB3028-050-Q1-B1-B11
attttcccttttcagctttcattggtgtggcctagctgttttctcaatgagaaagccttcatctctgcaaagcgcacttttgcgctttggggttcccttgttgcttgttatcaccttctgttatgctacttctactgctgcagcaacaactcaagtttcagggaatgaagagctgccaaagacaaacctaaatgggcatgatgaagaagcaaaattcggattttttcatcataaaccaatattcaagaaacatattccaattccagtatataaacctgtaccaaagccatttccagtgtataaacctataccaaagccagttccagttccagtgtacaagcctattccaaagccagtgtataagcctattccaaagccagttccag

SEQ ID NO: 1006 - DNA, 392 bp, Glycine max
  Clone ID: LIB3028-050-Q1-B1-B12
cggcgacaatggaggtagctgcgaacgcgcggaaccccgccgctaagcgaaaattcgacgacgccgtttctaacggcgtcgccgcccccgccgacgtcgatctctccctcctcgaagccatcgagaagtcgcagaacgcggtcgaagccctcgatctccgagccctaaagaagcacgtgctctccttcgagcgtcgcctgaaggataacatcgaagcgcgccttaaataccctaaccaaccggaccgcttcgccgattccgaagtagaactccacgaagagcttcagaagctgaaggtcctcgccggcgcgccggagctctacccggacctcgtcaacctcaacgtggttccctccatcgtcgacctcctcaaccacgacaacaccgacatc

SEQ ID NO: 1007 - DNA, 230 bp, Glycine max
  Clone ID: LIB3028-050-Q1-B1-B2
ttacatgcccatttttttttgtgtctaacttgttttcatgttttatatatggtttgcagggtgattatgagtgctttggatcgttgttgagaggggaaatgagatgttttggctttgaaatttggatagcattcggcagagacagaaggattacgtttaatttctgtacacacgggaacacagattccagattccaaaagggaatcatcaatcagatcataatatgtgtg

SEQ ID NO: 1008 - DNA, 150 bp, Glycine max
  Clone ID: LIB3028-050-Q1-B1-B4
agttttgaattgcaacattgatgccagtttgaatattcttgagttttttcaagatcttttttgtatttcagattccatgttaaactggaagttgaggctgtcaaattttctaaatttttcttgtcaaaaaaaaaagaaagaagagaagag

SEQ ID NO: 1009 - DNA, 231 bp, Glycine max
  Clone ID: LIB3028-050-Q1-B1-B5
aacaaatcaaagccatggccacctccaacttctctattgttctctccgtctccctagccttctttttggtgctacttaccaaggcacactcgaccgataccgtttctttcaccttcaagaagttcagcccagtcgaaccaaacattatgctccaaagagatgctagtatttcagcctctagggtgttacacgtcagcagaagttggcagcaacggggtgcccacctcggga

SEQ ID NO: 1010 - DNA, 254 bp, Glycine max
  Clone ID: LIB3028-050-Q1-B1-B7
gtgaagtgaaagcaaatttgaagaaaggtgttggagcaaatgaattgctgtcgcaacttgcagcacatcctgtacctgctcaagaaaagatgagtgctctggttgaagctttgttcgagggaactgagaaaggttttgctaaagaaggctgataaagagaagaactacttttctgttgctgttgcggatgagggatcgcagccgttgttgcttcatgcgattgaagagttttcttgcaagtcgaggtcaaaggc

SEQ ID NO: 1011 - DNA, 240 bp, Glycine max
  Clone ID: LIB3028-050-Q1-B1-B8
gtcgatgataatcagctcagcaatacagcaaatgagtggcctgacaacagtttggcaaacgaggatggagaaaactctcgtctgcaagaatctcatgaagtgtggcaagaagatggtggcttccaagaggctgtgcaaaattgggtgggaggaccttctgatcatgaaagtgctccagttggtagaattcgtggatgttagtttcctgaagatgacaacgtgtacagtggtgaaggcagg

SEQ ID NO: 1012 - DNA, 392 bp, Glycine max
  Clone ID: LIB3028-050-Q1-B1-C10
gaaaaatatcttcatgagcataaagaggcatgaaggattggattttgaatatccacctagggaccctggaatgcctcattaccaaatgcatgattgggacaacactggaggaagattttctgatgcatctacaaataactcacatggggaagccagattgcataacttgattcctgaggatggcaaaagagatcctcatgatactgtgcacaatgatcatcctgacatggaagcaaatgaaaagaaccaaagccctataagatggaaacagaagcctcttgtagaccagcaacaaaacaagagcatttctgaccttgcaatgaactatgaaaataggaaaacattagatgaacatattatagaatttttggagccagaaatccctatcaact

SEQ ID NO: 1013 - DNA, 389 bp, Glycine max
  unsure (1)..(389): unsure at all n locations
  Clone ID: LIB3028-050-Q1-B1-C11
gagttctcagtgttagttgatcgtgccactggtggagccagcatcaaagatggtgaggtggaattgatgcttcacaggcgtattctccatgatgatagtcgaggagttggggaaccacttgatgaacaagtttgcgtgaacaataataatacttgcgaaggactaacagtcagaggaaattattatatcagcatccacaagcttggagttggttcacgctggcgtcgtacaactggtcaggaaatttattctccattcttagtggcttttacacatgagatctcggaaaattggaagtcctctcatttgacgaaaggaactatcatggatccaaattacagcttgcctcncaatattgctttgataactcttgaggagttggatggtgg

SEQ ID NO: 1014 - DNA, 390 bp, Glycine max
  Clone ID: LIB3028-050-Q1-B1-C12
agcgtctccattttctttcgcgatggccgcgcgagccctgttgaccagaaaaaccctagccaccgttctccgcaacgacgcgaagcccataatcggagctggcatagctgcagctactcattctcgtgggttgcacgtgtacacgctccccgatctggattacgactatggcgctctggagccagccatcagcggcgaaatcatgcagctgcaccaccagaagcaccaccagacttacatcaccaacttcaacaaggccctcgagcagctccaagacgccgtcgccaagaaagattcctccgccgtcgttaagctccagggcgccatcaagttcaacggcggaggtcacgtcaaccattctattttctggaaaaatctagctcctgttcg

SEQ ID NO: 1015 - DNA, 303 bp, Glycine max
  Clone ID: LIB3028-050-Q1-B1-C2
ctcttgtctcacgatctcaacggagcacctctcttcaggtcgccatctagactgcaatcatggctgatggaccacagcatccatcagttgttcagaagctagctggacagtcttacctgggtgtccaggctaagccccaactttaactctgggaattagtcctcgactggttcttacttcaatggaggactgcactcttctgggttggctgttgtgtcgcctggatctccagttactgtgcatgctccagcagacaggggagtgagtgggtgtcgagtggattttctgatgggtggagtgtct

SEQ ID NO: 1016 - DNA, 310 bp, Glycine max
  Clone ID: LIB3028-050-Q1-B1-C3
attctctttgcctgcctagtttcaattctgtccaatttccaaaaccaaaacaagccacacaagttcatggcaactcccaataacaaactctctcttgccatggagagaactgggcaatgggttttctctcaagacataccaactgatgttatagtggaagttggagaaacaactttctctctgcacaagttcatgctagtggcaaaaagcaactacataagaaaactggtattgggatcagatgacagcgaactcaacagaatcgagctctctggacataccaggaggcccttcaatcttcgagaaaacc

SEQ ID NO: 1017 - DNA, 217 bp, Glycine max
  Clone ID: LIB3028-050-Q1-B1-C4
attttgataagacgaccctttggtaattggatcttcaagaaagagagacccttgggatttcgtcaccatgagtctcttcggtcttgggaacagaaaccaaaaaacatttcgtccaaaaaagagcgctccatctggaagtaagggtgctcaacttcaaaaacacatagatgccacgttgggtagtgggaacttgagggaggctgttaaactgccccct

SEQ ID NO: 1018 - DNA, 234 bp, Glycine max
  Clone ID: LIB3028-050-Q1-B1-C5
caattaatgatcaattggtcataataaaaataatgtatggcttctagctaagttattttttgagtggaaggcttctgcacttcattatatctattgttattgtgtaattcaactcggtaatgtgcacttcatatgtgcaaagtcccagacctctcgcttgtttggtttgggcaaaatgtcgtcaattctcattagatgttcggttttgagtctgttagagcatgttccatggaa

SEQ ID NO: 1019 - DNA, 227 bp, Glycine max
  Clone ID: LIB3028-050-Q1-B1-C6
cttcaacttccaaagggagaacgtggcaaagcaagtgcctgagcagaacggcctcacacactttgaggctggtgatacacgtgccaaggagtatgtcagcctcctcaaatccaatgaccctgttggattcaacattgttgatgtcttggcttggggctccattggccatgttgttgcttactacatcttgggcagcactggcagtggctatgaccctgcattcgttg

SEQ ID NO: 1020 - DNA, 224 bp, Glycine max
  Clone ID: LIB3028-050-Q1-B1-C7
gcaaaaagaaagaatcccaggcgaggagaaagatggaggggaaggagcaggatgtgtcgttgggagcgaacaagttccccgagagacagccgattgggacggcggcgcagagccaagacgacggcgaggactaccaggagccggcgccggcgccgctggttgacccgacggagtgtaggtcatggtcgtttgacagaggagggatagcagagtttgtggccacg

SEQ ID NO: 1021 - DNA, 235 bp, Glycine max
  Clone ID: LIB3028-050-Q1-B1-C8
ttctctctctctctctctccatgagcacagtaccgtaacgtaacgtaaccacgagatgcctctattctagcacttgggaccccaaatccgtgccaattcctccgctccttttcgcagacgaaggcacattctgacgttcagaggagtggaacgcaagactaaagattccaccacctgatacaagctaggaaaacagaggtttgaaatggctgtgtcactgtggagaagtcgcact

SEQ ID NO: 1022 - DNA, 174 bp, Glycine max
  Clone ID: LIB3028-050-Q1-B1-D1
atctagcctgtggtgtggccataacaagaagggagagaaaacaaaataatttaaggttgagatgaggaagtgtgagctctgtaacagtcccgcgaagttgttctgcgaatcagatcaagccagcctctgttggaaatgcgatgctaaggttcagaatgcgaacgtccacgtcac

SEQ ID NO: 1023 - DNA, 389 bp, Glycine max
  Clone ID: LIB3028-050-Q1-B1-D10
gttaacaagggcgacgcaccggcattgccagagactcttaaaaattacaacaagctgttgtctcttggcttcaagattgtattcttgtcaggaagatatcttgacaaaatggccgtaacagaagcaaacctaaagaaggctggcttccacacatgggagcagttaattctcaaggatccacatcttatcactccaaatgcactttcatacaaatcagcaatgagagagaatctgttgaggcagggatacagaattgttggaatcattggagaccaatggagcgatctgcttggagaccacagaggcgaaagcaggacctttaagcttcctaatcccatgtactacattgagtagtaccttcacctctctcaacaatctagctagagttt

SEQ ID NO: 1024 - DNA, 390 bp, Glycine max
  unsure (1)..(390): unsure at all n locations
  Clone ID: LIB3028-050-Q1-B1-D11
gctacttaccaaggcacactcgaccgataccgtttctttcaccttcaacaagttcaacccagtccaaccaaacattatgctccaaaaagatgctagtatttcatcctctggggtgttacaactcaccaaagttggcagcaacggcgtgcccacctcgggatctctcggtcgtgccctttacgctgccccaatccagatttgggacagcgaaaccggcaaggtagccagctgggctacatcctttaaattcaacattttcgcacccaacaaatcaaactcagctgacgggcttgccttcttcttggcacccgtcgggtctcagccccaatccgacgatggatttcttcgtcttttcaacagtcncttaaaggacaagtctctccaaaccgt

SEQ ID NO: 1025 - DNA, 389 bp, Glycine max
  Clone ID: LIB3028-050-Q1-B1-D12
aaggattccaagtggctcctgctgagcttgaagcattgttgattgcccacccaaacatttctgatgctgccgttgtaggcatgaaagatgaagctgcaggggaaattccagttgcatttgttgtaaggtcaaatggttctgagatcgccgaggatgaaatcaagaaatacatttcacaacaggtggttttttacaagagaataggtagagttttcttcacggactctattcctaaagcaccctcaggcaaaattctgcgaaaggtattaactgcaagacttaacgaaggtttggtggtggccaattaggtccataattgtgacagaggaaaatcgtggctgttttacttaccgtaccacaggcccttcctgttgtggtttttgttccaa

SEQ ID NO: 1026 - DNA, 232 bp, Glycine max
  unsure (1)..(232): unsure at all n locations
  Clone ID: LIB3028-050-Q1-B1-D2
gtggcggtggtgccgggcttgaacaactgttgcagcctcatcacttcccatctccaatggaacaacaacaacaacgttccaggtggaaacccagcgtcgaggtggcacccaattgccctcgctgcgccgccaccaacaccaaattctgttactacaacaactacagcttgtcccagccgaagtacttctgcagaggctgcangcgatactggaccaaaggcggctctctccg

SEQ ID NO: 1027 - DNA, 253 bp, Glycine max
  Clone ID: LIB3028-050-Q1-B1-D3
aaaaaaacccttagccaacacaaccatcatggccacctctgctattcagcaatcagcattcactggtcaaactgctctgaagcagctcaatgagttcgtccgcaagaccggtggcgccggcaaaggtcgcactaacatgcgccgcaccgtcaggaatgctcctcagagcatttggtatggccctgagcgtcccaagtacgtgggtccattctcggagcagattccatcatggctggccggggaagtccctggt

SEQ ID NO: 1028 - DNA, 223 bp, Glycine max
  Clone ID: LIB3028-050-Q1-B1-D4
gtaaggcttgcatgcggggccatgtaaatacctttaatgataactatgagaagaatgtgactggtagtagagtttatcatggggttcattagctaggattttctctgtttctcttgtagagttgcgcgttctaatgtgggagaagagatgcgtttgggttgagattctcgaatattgagtctatgcagggtgtgtttgtatgaaggaggaagggagaaaaagg

SEQ ID NO: 1029 - DNA, 195 bp, Glycine max
  Clone ID: LIB3028-050-Q1-B1-D5
cattaatggcttcatgggagggacagcagtaattctcatcctccaacaactaaagggtgtatttggcatgagacatttttcaaccagggcgaacttggtggcagtggtgaagagcagagtcaacaatagacacgagattaggtgggagcctaccattcttggcgtgatctttggtgggttcttgcgattgaccag

SEQ ID NO: 1030 - DNA, 113 bp, Glycine max
  Clone ID: LIB3028-050-Q1-B1-D6
ggcatttttaatacagggaaacacacgtgaagagctccctgaatttcttcttggaacttgccgccttaaagatcgggatgcctctaaagcagtttgtctgacgctgtgacttt

SEQ ID NO: 1031 - DNA, 380 bp, Glycine max
  Clone ID: LIB3028-050-Q1-B1-D9
cataacttccttaacaacctagtatttcagaccattcttcttgatcagaatccttattaatcatcaatcatgcagacttcacttcttcaaattgttggaactccagtaatctcagcaacatatgatcagcttcaaaagtcagttaacagatacttacctggtcctgccactcaatgtcaatattcaaccacaacatcaaagcaaatgaggctgaggacaaatatatctgaaactgttaagagaaagataagtttaggggctcgcattcttcgagttggtggagtggaaaaagtgttcaagcagttttttagcatggaagaaggggagaggctgttgaaagtttcccaatgttatctttccaccacatctggtcctctagc

SEQ ID NO: 1032 - DNA, 230 bp, Glycine max
  Clone ID: LIB3028-050-Q1-B1-E1
ctctggatctcgtctcgatcgatcgatctcgaacatgagcactggggagcttctcaacatcgaacctctcgaactcaagttcccctttgagctgaagaagcagatctcatgttctcttcaattgtcgaagaagaccgagagctatgtgggcgtcaaggtgaaaacaaccaatccggagaagtattgtgttcgtccgaagactgggagtgtcacgccacgatctacgtgtg

SEQ ID NO: 1033 - DNA, 393 bp, Glycine max
  Clone ID: LIB3028-050-Q1-B1-E10
tgcagggcctgctgatgcccttccatattgctacatgccgcctcagcatgcgtcccaagttggagctgctggtgttataatgggtaagcctgtgatggacccaaacatgtatgctcagcagtctcacccctacatggcaccacaaatgtggccacagccaccagaccaacgacagtcgtccccagaacattagctgatgtgtcgtggaaattaagataaccaggcaccggaatcagttgtgaatgtcaaactgaatggttgggaagatccatactacattgcgagcagaagctgtagctgatagtttacatgcaatgcagactataaacatatgtagataatgtgctagggaaaacttaaccttatctttgatttagctggataaaatggtat

SEQ ID NO: 1034 - DNA, 393 bp, Glycine max
  unsure (1)..(393): unsure at all n locations
  Clone ID: LIB3028-050-Q1-B1-E12
cttgtcttgaagaatacactgaagagaatccgaagatagtgacaaaatgctctcatcattttcatcttggttgcatttatgagtggatggaaagaagtgacagctgtcctgtttgtgggaaggtgatggtatttgatgaaacgactgattgaaaaggtttatgtcgtggatgataccaacaacagaggaaaggaaatatacagtatagacattgtgaatacttcagattaagcgcttatcatgtatagtaagtatataacatttttattaaccatcactgtaagttcaatctcatccaagttgtttctatatttatacttttctcccttgccaaaacatccaagattaanaaaaaaaaatgccattttagatggcgactttgtcatggtttca

SEQ ID NO: 1035 - DNA, 240 bp, Glycine max
  Clone ID: LIB3028-050-Q1-B1-E2
gcactagctaagttcacaatttcaaaatggctaggggactaaagaagcatttgaaaaggctcaatgctcctaagcattggatgcttgacaaactgggtggtgcatttgcgcctaaaccctcatctggagcacacagatcgagggagtgccgccccctcattcttattctgcgaaaccggctgaagtatgctctgacatagcgtgaagtcattgcgattctgatgcagcgccatgttcgtg

SEQ ID NO: 1036 - DNA, 238 bp, Glycine max
  Clone ID: LIB3028-050-Q1-B1-E3
gaatcatttggggattgctaggctggtggggaaccttaggccatgcatttggtgtctctagtatgccaggatttggtgccagtcgcagcttgccacaagcactttccaacactagaactgatgggctaggagcactctacagagaacggacagcttcctttcttaactccttggtgaacaacaggttcccttatacaacccagcaagtcagagacagatttatagcatctcttgcctc

SEQ ID NO: 1037 - DNA, 303 bp, Glycine max
  Clone ID: LIB3028-050-Q1-B1-E4
gtatttgtaggggtatgatgacatcccaaaagagctcccagaccccgaagccaagaagcctgaagattgggatgatgaggaagatggtgagtggacaccccctaccattgccaaccctgagtacaagggcccatggaaggcagacaagatcaagaaccccaactataaaggaaaatggaaggcaccattgattgataacccaggtttcaaggatgaccccgacctctaggttttccccaacttgaagtacgtggggattgaattgtgggaggtggaatcgggtactttgtttggcaatgtctt

SEQ ID NO: 1038 - DNA, 246 bp, Glycine max
  Clone ID: LIB3028-050-Q1-B1-E5
agaatttgctaggcaacagggtgtggaggttgtggacaacgagtactttatcacacctgacaacgttggcatgctcaagctggcaaaggaagcaaacacaatcctgtttgattaccgaatcccagcatcggggtacgagacgtgcggatccggtgtggagagtccactgcaaaggagtggactcccaggaagcatgtacgcgcccgaaaccgttgggtgcgtggtggttggacgggagggccggtg

SEQ ID NO: 1039 - DNA, 105 bp, Glycine max
  Clone ID: LIB3028-050-Q1-B1-E6
gcagccacgggagaagatatatattattatcattacatagacacactttattcttcaaagttcagcaagggagtggcggggccagtggttgtcttctcattctca

SEQ ID NO: 1040 - DNA, 106 bp, Glycine max
  Clone ID: LIB3028-050-Q1-B1-E7
cagatttaatttcagatagattagcccttggactgggtgcttctggccctctgaaacttgaagatgtgaaagagatatcggagatgtgccttaaagtggcatccag

SEQ ID NO: 1041 - DNA, 216 bp, Glycine max
  Clone ID: LIB3028-050-Q1-B1-E8
caaactcacacactttgtactctccgtccttccttcttcgatccagatctctctccttctccctcaaatggcttcccttctgcagtgttccatgcccctcgtctctctttccaagcgagctctggtacccggtagcaggatcgccgaccgaggttcagtttccctttcaggtgagggaagaagtttcgcagccgtgacggtggaggccagagggcg

SEQ ID NO: 1042 - DNA, 387 bp, Glycine max
  unsure (1)..(387): unsure at all n locations
  Clone ID: LIB3028-050-Q1-B1-E9
cgaattcttgaactccgacttcttcaagacctcgagaacaatgatgaatgtaggaaaaatgggagcctgaaaaggttaaatgaccagagtgatgtctgtggatttagaagttgcttcaaaaatcattatgattcgcttccgaatcagaggtgcttgaggaatcgagaagaagtgattcaggagacgatggaaatggagttggaaaatatgatggaactgggcaccctcaagggcaagaaaacatattcttttaagaatggtacaagaagtgcgttgaaccttgagaacaccacaagatcctttctagataacaataaatcaaatgataataactggaatggcgaaatgactttacccctgctagtanacaagtccaacgtctgtatg

SEQ ID NO: 1043 - DNA, 225 bp, Glycine max
  Clone ID: LIB3028-050-Q1-B1-F1
gacctctgtccttaaagctttgtggcaatcacattccaagtggccttaccctacagtggctacgaagactgagtcagataaagttgcagggaatgccattttatatgaatgtgttcagacagtaatgacgattgaggagaatgggggcttagatgtacttgccattaatatcctgggaaggttcttgtcaggccagtgagaacaatatcaggtttagttctgctc

SEQ ID NO: 1044 - DNA, 389 bp, Glycine max
  Clone ID: LIB3028-050-Q1-B1-F10
ctgacctggccagagaaagtcaaatttgcaattgggcttctaccagctatgcttggtggacagccatatgttgaggctcaagatggtctttcagttcaagaatggatgaaaaagcagggcgtacctgagcgagtaactgatgaggtgttcatagcaatgtcgaaggcactaaacttcatcaatcctgatgaactttcaatgcaatgtatattgattgctttaaaccgatttcttcaggagaaacatggttctaagatggcctttttggatggcaatccccctgaaagactttgtatgccgatagttgatcatattcagtccttgggtggtgaagttcatctaaattcgcgcattcaaaaaattgagctaaatgatgatggaacggtgaa

SEQ ID NO: 1045 - DNA, 391 bp, Glycine max
  unsure (1)..(391): unsure at all n locations
  Clone ID: LIB3028-050-Q1-B1-F11
catcaattataagcatgggtttgtggaacacaacgaatgcagtgtcttgccgctttcacaagtttggtgatgaccaaaagaatctggtcttccaaggtgatgccacgtcttcttccaggggcatagaactcacaaagttagacggtggaggaaaaccagtgggtggcagtgtggggagagtgttatactcttctccagtgcacctttgggaaagctctacagtggtcgcaagctttgaaaccgacttcaccttttccatctcatcagactctactactccaggtgatggccttgccttcttcattgcaccatttgacactaaaatccctccaaactctggtgggagcaaccttggactcttcncatcagacaatgttgttgctgtcgagtt

SEQ ID NO: 1046 - DNA, 116 bp, Glycine max
  Clone ID: LIB3028-050-Q1-B1-F2
agctgaaaaagctgctgcagatgcaaaggacagggaaacacgggaaagagctacagctgcaacggctgaagcagaagcatgagtgacaggaggacgtgcctccgtacaaagggctg

SEQ ID NO: 1047 - DNA, 234 bp, Glycine max
  Clone ID: LIB3028-050-Q1-B1-F3
ctcgagccgcttggctgctggagagggggtcaacaatgttggggcacttctggtaacatgcaggagagcaaagcttgccggtgaattgaggctcaaagaagttggaagtgatcacatggattgttgtgtggaagagaaagtcttacaagtcgagcaaaacctatgatggatacaacaatgggcaatctagggaagaggcccgtagcatataaaaatggagtgaacaaatttggc

SEQ ID NO: 1048 - DNA, 325 bp, Glycine max
  Clone ID: LIB3028-050-Q1-B1-F4
tgaaaaggctggcttgatgccactcccattggtagatgtcacatgaatactcagtactatcagtgccaacatttccatctttcttcttccagcctttgctttgtcttggttggtagagaagtgacaatccagccgcactcttaacgtggataatgatttcatttttgaatattgataacctagtcccctggagtagtgttaatattctttttggcagtgaacacacagtccactgtcaagttacctaggtaatgaagtgaagggttataagttgatccaaaggaatctgccagggtggagatgagtgtgagtttttaagtgcttc

SEQ ID NO: 1049 - DNA, 199 bp, Glycine max
  Clone ID: LIB3028-050-Q1-B1-F5
agattgtactcctgaccatttgaatcaaaggttagcagaactacgtattggagatagccatcaagtgaagtcaagccagaggcctgttgtttccagaacttctagcattgttaagactccagaagtcgcttccgcagaggtcgcagcgacgaggaggagatcaatgagatcgtcagggaattgtgagacgcttcggcgt

SEQ ID NO: 1050 - DNA, 265 bp, Glycine max
  Clone ID: LIB3028-050-Q1-B1-F6
gttgttccttcacctttcttatattcaggaaagtaagatcatctgcatcgccgacgcttccaacaataacaatggccgacaatgcaacaacgcaaggaagcaacaccctattttcgccttacaggatggccaagttcaacctcgctcagagggtggtgttggctccgatgagaggatgcagagcgttggactggatgcgacaggcagcgcttgcggaagacgacgcgcagggatgagcacgaggtggggttcgcagcaggggggg

SEQ ID NO: 1051 - DNA, 221 bp, Glycine max
  Clone ID: LIB3028-050-Q1-B1-F8
caaagaggaggcaccatgacaagcactcttctgtctttgctcttcttgctcttctctcttctcactccaactctaatttcctcttcaccagttctaaaccctcaagaggtcgtgagagaggtcaacaagaaaatcaatggctcgatggcaagacccagaaggaacttggggtagctctcatgtggtagtggcaacgccatcgatgattgttggaggtgtga

SEQ ID NO: 1052 - DNA, 384 bp, Glycine max
  Clone ID: LIB3028-050-Q1-B1-F9
acaatgcaaatcttgaggctgttagacaggaacttaaagaattacacccacatgatccccaaattgttgtcctcaaacacggagtgtggagagtaaaaggcattattcaggtttctagatctataggtgacgtatatttgaaacatgcacagtttaaccgggaaccacttaatgcaaaattcagacttcctgaaccaatgaacatgcccatcttgagtgctaatcccactattctttctcatcctctccaaccaaatgattccttccttatattcgcatctgatggtttatgggagcacttgagtaatgagaaagccgtggatattgtaaacagcaatccacatgcgggtagtgccaagagacttatcaaggctgctctacacg

SEQ ID NO: 1053 - DNA, 251 bp, Glycine max
  unsure (1)..(251): unsure at all n locations
  Clone ID: LIB3028-050-Q1-B1-G1
aaaataaaataaggattttttttgctgctaattttctcccatcagatcactgcataatcataatgctgttcctcttatatcatctttgttgatccatttttttttctctctctttctcaaangtcctgtgtcagggactctgaagagaggagtcacaaacatcaagtacttactagttagcacaaaattcacagaactcgtgccggggttcagagggactgaaactttctcctttagaagttgctggggta

SEQ ID NO: 1054 - DNA, 394 bp, Glycine max
  unsure (1)..(394): unsure at all n locations
  Clone ID: LIB3028-050-Q1-B1-G10
ttttgttactaataatcccgaaaggcaatgagaacatcacaaattctgttggttttgctttggttcttctgcatttatgccccttcttcgtttggagcaaatgtcacgtatgaccacagagcattggtcattgatggcaagcgccgagtcttggtatctggttctattcattaccctcgtagcactccagagatgtggccagacctcattcagaaatccaaagatggaggacttgatgtgattgagacttatgttttttggaacttacacgaaccagttagaggccagtataactttgaaggtangggcgatttggtcaaatttgtgaaggtagtagcagcagcaggtctatatgtgcatctccggattggtccatacgcatgtgctgaatgga

SEQ ID NO: 1055 - DNA, 391 bp, Glycine max
  Clone ID: LIB3028-050-Q1-B1-G11
gttcaattcccttttgtctgaggtgtgtgcattcttgtttaactcctctttgttcctcagacatcccagaagggaaccaaaaataaaaaataaaaaaataaacacaatcaataaaggggagaaaacaaacatgtcattcacaggaactcttgataaatgcacagcatgtgacaagactgtctatgtggttgacttgttaactcttgaaggaattccttaccataaaaactgcttcaagtgcagtcactgcaagggatgtcttacgatgtgcacatactcctcaatggatggaattctttattgcaagacacattttgaacagcttttcaaggaatctggcaatttcagcaagaacttcgcaaagtcttctgagaagcaaaatgagttgaat

SEQ ID NO: 1056 - DNA, 395 bp, Glycine max
  unsure (1)..(395): unsure at all n locations
  Clone ID: LIB3028-050-Q1-B1-G12
ggtagctagtactgctccctctgcgacttcgtttcgtagagggattttggccgccaaataaacagtctcaccataaactccaaagtcccaacgctaaacgaaaccaaaccccaaacacaaataccgttgttgtctgttgtctctgtcgtgtctatattcgcagatctctcactcattctctgttgtttctctgcccaacttcgaattcgaaagcaaaaacatgtttttggcgagacccattttccgagcaccctccctttgggcgttgcactcttcctacgcgtattcctctgcctcagcagctgcaattcaagctgagagagccatcanagaaggacccagaaacgattggagccgagaccaagtcaaatccatctacgactctcccattctcg

SEQ ID NO: 1057 - DNA, 139 bp, Glycine max
  Clone ID: LIB3028-050-Q1-B1-G2
ctcttacacacacaagcactacaacattttctttggtctctcattttctctatagctagatgggttctggtgctttacaacttcttctgatcttgggtcttctggctagctcatgcttagcacaagcgccaggtgctgc

SEQ ID NO: 1058 - DNA, 228 bp, Glycine max
  Clone ID: LIB3028-050-Q1-B1-G3
ggctgatgcttgtagattcgtttgtaatgatgcaaagtttctctcacgtggcataatgaggttggatgctcgtgcacgtcaagatgttgcttttcttgggactgaatttctcaaacttgatgctcgggcaagagaggagactgggagaggtgagcgtgatgtcaaggaaaaagctagccgacttagtcatattgctacgatgttgaacgataaagctcagtccagagt

SEQ ID NO: 1059 - DNA, 321 bp, Glycine max
  Clone ID: LIB3028-050-Q1-B1-G4
agtgtttttcatttcatcgtgcattcaatggccaccacagcagctctatccggaaccatggtgagcacctccttcatgaggaggcaacctatgaccaccacaagcctaaagacattccccaacgttggtgaagctctttttggtctgaaaagtggacgaggtgctcgtgtcacttgcatggcctcgtacaaggtgaagctcataaccccaggaggagaagtggagtttgaatgcccagatgatgttttcagtgttgacaagggagaggacgaaggcattggacttccctactcgtgcagggccggttcctgcgtttccggt

SEQ ID NO: 1060 - DNA, 343 bp, Glycine max
  Clone ID: LIB3028-050-Q1-B1-G5
cctaaacaactctttctcttcttccttcgctcgttgttctccctcgcgtagatcgacaatggcggagacagagacgtttgctttccaggctgagatcaaccagctcctcagtctcagcatcaacaccttctactccaacagggagagtttccttcgtgaactcatcagcaacgcctccgatgctttggacaagattcgagttgagagtttgacagataagagcaagctcgatgctcagccagagttgttcattcatagtagtccagacgagactaagaatacactgaccattgttgacagtggtattgggatgagcaaagctgagttggtgaacaacttgggt

SEQ ID NO: 1061 - DNA, 168 bp, Glycine max
  Clone ID: LIB3028-050-Q1-B1-G6
aagatctcgatgcttgttttctgacataccattctctttatatgcccatgggaggttcacaaagagtccaggctcccatgccacatcctactgagatggacaatgtccataggatgtctttacgtgtttttggtcgtgcgtcagatgggttcagaggatctctgtggg

SEQ ID NO: 1062 - DNA, 336 bp, Glycine max
  Clone ID: LIB3028-050-Q1-B1-G8
ctctctctttctctctctagaaattccattttaaagagatgctcatgctcctctctttaccttgctcccgttaaagctacgcttccaactcggatagagctgtgttaactggtcctggttggtgagggtgctattggtgttgttctgttgatgtaagcagctgaatattgtttctatatcagaatggggtgctgtttgttgtgttgctgccaaagatagaactatacagagtgcatcagccagtgaaatcttgcatcgggatattcgacattctccaacatggaacttccgctgggatcatcgagggggtggtactggtgaagatactgctgtaac

SEQ ID NO: 1063 - DNA, 390 bp, Glycine max
  Clone ID: LIB3028-050-Q1-B1-G9
tctaaaataaaaatgaagacattattcctatgctgtaaaactagattctaatcatattaaaatctagttttacagcataggaataatgtctctaaaataaaaatgaagacaaatattaaggagattgattgtgccttttttatatcatcaagaaatgtaatatattgtgggtggataaaaatctagcaaatgtagcacttctctttctagcgcccaaattgtgctgcctacaatgacaagaccaactcacctgcatagagtatagctgaactggtgaaggttcagtagaaaatagatacagatagctagtgagagtagaaccttagtgtcaatgtcattgatgcttaattggcaacgatgtaccatttatgacaatcataatgaaatcaa

SEQ ID NO: 1064 - DNA, 232 bp, Glycine max
  Clone ID: LIB3028-050-Q1-B1-H1
ctttagatgaggctggcgatatagatcagttagaactactgagactgaaagctgtacttcaaattactcagcagcagcccaagcaagcaattgagacctacagaatcttgctagctgtaattgaagcaagaaaagagcattgggttcaagcgaagacattcaggcacgaggcattagcagagcagaagttggaaatggaagcctggcaagatttgggtaccatttatgcaga

SEQ ID NO: 1065 - DNA, 396 bp, Glycine max
  Clone ID: LIB3028-050-Q1-B1-H10
cacatcttaatccccaaactgaacccacccctcttcgtccggttcactagcgttcgattcgtttctatctctctctctctctgtcatgggttcgctcgaggcaccaaccgccgcgggagcccgacgcgtcgaagcggcgcagatcgtcggtgctcccgttggaggtgggtacgcgcgtcatgtgccgttggagggacaacaagtaccaccccgtcaaagtcatcgaacgccgcaaggttcccaacgccatccccaacgattacgagtattacgtccattacaccgagttcaataggaggcttgatgagtgggtgaagcttgaccagttggatcttaattcagtggaggctgttgttgatgagaaagtggaggacaagggtgcgacagggttgaaga

SEQ ID NO: 1066 - DNA, 388 bp, Glycine max
  Clone ID: LIB3028-050-Q1-B1-H11
aaagaagacatcatctaactggatgtcttatttggccttggcaccgaaggcaactgaatcccttgggcaaggtgcttccaagaatggacctggcattctgcagagcagtacaagtgatgaagccaagaagcttgctgctgctgctcttgcagcagtgaaagatgatgctgccatggctgcctcaagcagggggaaacttgtgattactgaggttcgggactttgctggtcaagaaattgaagttaaaaagcttgtagattctgactcaaaggaggcaatggaaagagccaaagctcctccaccttctgcagtggatactgtccttgaacaaatcaagaagaaacagaagctcagtgtactggataagaccaaaaaggactggggtgaa

SEQ ID NO: 1067 - DNA, 182 bp, Glycine max
  Clone ID: LIB3028-050-Q1-B1-H3
gtgacattgtggggcatgtggtggttgtgactagaaaaacttttaagttagtaaagacttggcaagactgtgtaactaatccatgtagaaaatagggtttatgtaaatgaatggtgcggatgataatgcgcataaagggtgcttccgccgttgtatatgcatataatataataatagtgctc

SEQ ID NO: 1068 - DNA, 110 bp, Glycine max
  Clone ID: LIB3028-050-Q1-B1-H4
acttgggtgctggtggtgcagaaagggccattttctgaatgcgctctatctatctcttccgatctggctactaaccctagcccgcgtcgagccgtggcttcctcggcctc

SEQ ID NO: 1069 - DNA, 301 bp, Glycine max
  Clone ID: LIB3028-050-Q1-B1-H5
tttgaaaccaaaaatcaactcttttcacaaactctagttatatttacatttagttttcttaatttatggttttgttatgaattggaatgaacttgatttcaggcttcacagaagaaactttcgaacccaatgagggagatagaggtgcagaaactcgtcctcaatatctctggttggcgagagtggagatcgtctcacgagagccgccaaggtgttggaacaagtgagtggccggagcccagtgttttccaaagaggggagagtgttcgtgcctttgggattagaagaaatggagaagatt

SEQ ID NO: 1070 - DNA, 335 bp, Glycine max
  Clone ID: LIB3028-050-Q1-B1-H7
cctcgtgccagctggcctccgccggccccgttccggctccaccgccgaacgtgaccccggtgtctgagtacacccagaggaagatttttgtgagcaatgtgaatgctgagattgatcctcagaagctgcttgaagtcttcaagcagtgtggggaggttgaggatggtcctcttggtttggataagagcactgggaaagctaagggttttgcgctttttgtgtgcaagtctgtggagagtgccaggagggctttgggggagcctcagaggagctatgaggggcatactttgtattgtcagaaggctgttgatgggcctaaggggagcggggggtat

SEQ ID NO: 1071 - DNA, 392 bp, Glycine max
  Clone ID: LIB3028-050-Q1-B1-H9
ggagatccggctgcgatggacgagagaaagaggaagcggatggagtcgaaccgcgagtccgcacggcgatcgcggatgaagaagcagaagctgctcgaagacctatccgacgtagcgagtcgccttcaaggcgagaacgtgcgcttagcgcagagcataaaggcgaaggaggaagcgtacgttgagatcgaagccgcgaacgacatcctcagagcacagaccatggaactcgccgaccggttaaggtttctgaactccattctcgagatcgccgatgaggtcggcggcggtggtgaatccttcgagattccgcagattccagaccctctcttcatgccctggcagatcccccaccctatgatggcgtcacctgacatgctcctccatggaaa

SEQ ID NO: 1072 - DNA, 400 bp, Glycine max
  Clone ID: LIB3028-051-Q1-B1-A10
ctccaaaccacatttaactatatataaaaccatcattatgaacatggggtttactctcttctcattctgacccttcttcttcttcttcatctacattagtagttcttgttattcattattcttcatactcacacagcttcttctgggggcaaaaggggtcatttttcagatccgaggttgagctcctctacccatcatgatggagctcggatacctgaatcagggtcagccttctagaggaagaacaccacttgtcactcttccattgttgctttcaacacttgtgttcttctccactttcacacatgccttctcttcttctgtgtttccggaattgaatcctattaaagctaagcactcacgtcttctcaggagtgctgtgcaacgagaaactcctaca

SEQ ID NO: 1073 - DNA, 408 bp, Glycine max
  Clone ID: LIB3028-051-Q1-B1-A11
gaaagactcttctgagttctgagctagcgaggttgcaatggcgattatctccgatttcaacgaagaggagcagaaacccactcactcttcaccagcgcaaccccaatcctcttcctcttcctcttcctcttcgttcagtgctgcttttgaccggtcaaaccctatcgcttttctggagagagtcttccagttcgtctccgaacacagcgactttctggcgacggagagcgccgagaaggagatagcgttgctggtgcgcgccgccgggaagaagaagagggagtttctcaagtcggagagagaaaaggccgagaagaagaagagagaggacctcaaggcctcggaggagagggaaaaatccgacaagaggttgaaggaagagaaggaacccaaaagccgaagacacca

SEQ ID NO: 1074 - DNA, 387 bp, Glycine max
  Clone ID: LIB3028-051-Q1-B1-A12
agctgcccgaacgtgtgagcgggcacgtccaaactccaagaagagtccaatacttagcttctctatctatcaccctcagagtcgaaccagacacacttccacgtcactaccaccaccgtggccggtggcgcctgaggctgtttccggtaacctctcccggcggagctgagtggtgatcaaggaactgggtcagacgctgagttgcgtgcaacagtccgacgaccatggtgtgctcttccctgcacttgcaactggagcactcggcgttgttgacgccatggtggtggcagaccccactgtgttgggacacaccattggctgtgagaggctttctcctcggcatgtcgctgctgccaatggtcggatcgacgttctttccctgttgtt

SEQ ID NO: 1075 - DNA, 376 bp, Glycine max
  Clone ID: LIB3028-051-Q1-B1-A2
atcgttttctacataatacaaacctctctaatttttgaagcttattatacccaatctcgatatgcagatcttcgtgaaaaccctaactggcaagacgatcaccttggaggtggagtcctctgacaccatcgacaacgtgaaggccaaaatccaagacaaggagggcattcctccggatcaacagcgtttaatcttcgccggaaaacagctcgaagacggcagaaccctcgccgactacaacatccaaaaggagtccacgctccacctcgtcctccgcctccgcggcggcatgcaaatcttcgtcaaaacccttactggcaaaacaatcacgctagaggtggagtcctccgacacaatcgataacgtgaaagccaag

SEQ ID NO: 1076 - DNA, 385 bp, Glycine max
  Clone ID: LIB3028-051-Q1-B1-A3
cagcacagcgatgccaaccccagatggaagggtgttagacatgttctttatcactgatgggatggaattgcttcacaccaaaaagaggcaagattatgtatgtgaatatctgatggatgctttaggagagaggtgtatctccagtgaacttcagttggctgggcctgaatacggacatttgcaggggttttcttctcttccaccagcttttgctgaagagttatttagttctgagctgttagacaagttgtctttgcatcctctcagccaagatatgacaacactgaagacacctactgttactgtggataactcactgagcccagttcataccctgcttcagatacaatgcgttgatcagaagggcttgtgttatgacattatg

SEQ ID NO: 1077 - DNA, 384 bp, Glycine max
  Clone ID: LIB3028-051-Q1-B1-A4
gattgatggccttaaagctcatgctgagaaacatgtgactgatagaatgatgctcaatgctgctaacattttccccttcaacacaccaaccaccaaagaagcatactactatagaatgatatttgagaggttcttccctcagaactcagccaggctgagtgttcctggaggaccaagtgttgcatgtagcacagccaaagctgttgagtgggatgctgcttggtctaacaaccttgatccatctggtagagcagcacttggagtgcatgcatcagcttatggaaatcaggtcaaagctgtagaaccagagaagatcataccaaagatggaagtttctccactaggagttgccatatagagctagtatgagccatagcaaaaact

SEQ ID NO: 1078 - DNA, 383 bp, Glycine max
  Clone ID: LIB3028-051-Q1-B1-A5
ccacaatgctgcgcaagaacaagcttggcaccgttcccgttcacctcaacgtctatgatctcaccccaattaatggctacgcctattggtttggccttggactctaccattctggggttcaagttcatgggctggaatatggatttggtgcgaacgagcacgacacaacggggattttccaagttcaaccgaaacactgccctgggttcaccttcagaaagtcaattttcatcggaacaacagatctgggtgccaaggatgttcgagcattcatggagaagctagctcaagattattctggcaatacctaccatctcatttccaagaattgcaaccatttctgtaacgatgtttgtctcaaattgaccggaaagtcaatccct

SEQ ID NO: 1079 - DNA, 369 bp, Glycine max
  Clone ID: LIB3028-051-Q1-B1-A6
caaagtcttcggcatatttgccactgcaagaggcgtgcatccacagggttaagcatgttgaagaagcaggcttagttcctgggttcaaagaggagtttttgatcattggtgagaactcactagatgatagcttggtcttgagtttaaggtctcttcagtttgaccttgcatgggaacgttgtagacagcttcaagctgaagatgtcacagtcaagggtaagattgtgggggtgaacaaaggtggagtggtggctgagttggaacggcttagacggtttgttccattgtctcagagatcaacgaactcacatgtacaagagcttcgtgatacggagcttcctcctagatttgtggaagtggatgaggaac

SEQ ID NO: 1080 - DNA, 382 bp, Glycine max
  Clone ID: LIB3028-051-Q1-B1-A7
ccagattgctggggcggaagcacaaccgttgactagtctcaagcttaactctcatattcttcaggagtctactgctaaagagattaatgaaaatcccgaggcaggatgggaggctgctataaatcctcgtttctccaattatacagttgaacaatttaagcgccttcttggagtcaaaccaatgcctaagaaggaacttagaagtacacctgctatatctcacccaaagacgttgaaattgccaaagaattttgatgcgaggacagcttggtcgcagtgtagcactattggaagaattctagatcagggtcactgtggttcttgttgggcatttggtgctgttgaatcattgtcagatcgcttttgcattcattttgatgtt

SEQ ID NO: 1081 - DNA, 368 bp, Glycine max
  Clone ID: LIB3028-051-Q1-B1-A8
ctcatgttcttgagagagatctcaaaccccaagaaatctattattgaataattatattaagtttttgtttgttaatttatacatgtggtgtataaaagaaaataatagttgtagatattataattagatatagattggtttaggaggaaaagttagttctactagaacaaaaaagcaattaatttagaagaaagcaacgaataaagagggggtgttggggccttgagccgattaatcttaatttaggttatccagatatttgctggtgttgtttcttatcccatgcgtaattgagcagctgcagcccacagcgttcccctctgattgaaaactcagtctcctctgcctgcttcatccttccttccttt

SEQ ID NO: 1082 - DNA, 390 bp, Glycine max
  Clone ID: LIB3028-051-Q1-B1-A9
ctcgagccgcgcaaagcgcaaagcgcagttgttgccccttgaactcgaacgaagttctccgaagtcgaaacacgcgttcgattcgctgaactctgaagttaagttttgttgcgaaaatgtcggtggcgaagaagttgattagatgcgtcatccttgacttggacggcacgctgctcaacacagatggcatcgtaggcaacgttttgaaggttatgttaggtaaatacggaaaggaatgggacggaagagaagctcagaagataattggaacgacgccgtttgaggccgctgctgcggttgtgcaagattatcaacttccctgctccgccagtgaattcctctccgaaatttcgccactcttctctgaccagtggtgcaacattaaagcac

SEQ ID NO: 1083 - DNA, 380 bp, Glycine max
  Clone ID: LIB3028-051-Q1-B1-B1
gtcggagaacttgcttgcactatgccgcttattatggaaatatagactgccttaaggtcattctttctgctgctcattccacacctgttgcagattcttggggatttgcaagatttgtcaacataagagatggaaacggtgccacccctctgcatcttgcagctcgccatagatggccggaatgtcttcatgcccttctagacaatggtgctcttgtttgtgcttcaactggtggatatggttaccctggaagcacgccacttcatatggctgcccgtggtggttctttggactgtgtccggatgttgcttgcttggggagcagatagacttcaattagattcttctgggaaaataccattctcagttgccctgaagcac

SEQ ID NO: 1084 - DNA, 409 bp, Glycine max
  Clone ID: LIB3028-051-Q1-B1-B10
ctcgagccgcaacaaacatatctcttcctcttctgtccctcaatggaaggatcaggatccggtgtggttacagtctacggcaacggcgccatcaccgagaccaagaagtcccccttctccgtcaaagtcggcctagcccagatgctccgcggcggcgtcatcatggacgtcgtcgacgccgagcaggcccgcatcgcggaggaggccggtgcctgcgcggtgatggccctggagcgtgtccccgccgacatccgggcccagggcggcgtggcccgcatgagcgatccgcagctcatcaaggatatcaagcgggccgtcaccatccccgtgatggccaaggcccgcatcggccacttcgtcgaagcccagattctcgaaaccatcggcatcgactacgtcgacgagagcg

SEQ ID NO: 1085 - DNA, 381 bp, Glycine max
  Clone ID: LIB3028-051-Q1-B1-B2
agcagccactatagtaaacaatcttctctatctaaaatggagtttgttctaaattacctaaatgccactgccattggagttctttctataaccctcttctttttgtttttgtataatcccttcaaatttgcattaggtaaaaaagaggctcccaaagttgcaggtgcatggccaatacttggtcacctaccactattgagtggttcagagacacctgatagggttttgggtgctttggctgataagtatggacccatattcaccatcaactatggtgtcaaaaaggctttggtaatcagcaactgggaaattgctaaggaatgcttcaccaaaaacgacatcgtcgtttcgtctcgccccaagcttcttgccattgaactc

SEQ ID NO: 1086 - DNA, 370 bp, Glycine max
  Clone ID: LIB3028-051-Q1-B1-B3
gttccagcaccttcttcttcgttcacctcctccccgtcgcaacacaaagctacgctgcagcaatccaccactgcagggttttccaagtccaatctcagttcacttctcgccagggtttaatctgaatttcttttgtgttgccactgaggttattattatttttcttccaaaatggcgacggtgatgcaaaaaatcaaagacatcgaagatgagatggcaaggacccaaaaaaacaaggctactgctcatcatttgggcttgctgaaggctaaactagcaaagctgcggagggaactccttacaccttcatcaaaaggagctggaggtgctggtgaaggttttgatgttactaaaagtggggattcaagag

SEQ ID NO: 1087 - DNA, 382 bp, Glycine max
  Clone ID: LIB3028-051-Q1-B1-B4
gtctgaatgggcaaagccccaacaggctactgtaccagctgataaaaggtggccaagtgcagaatctaatccttccatttcttattcactggcatcaccgttgcaaatgtcaccccaacatgctaagtccgaagcacaatatatgcctgctggaggtgattttaagaaccttcaacctggagtagccagggaaccattaatcatgatgcagcagccccagactgtaaatgaagagcaagttccagccacaagcatgatctcatcacctcctcaaatagccgctggtcggtatccaactaacagttcagatgctgtcagatctaataatggctttatatctcatgctcctagcactagaagcctcagtccaaactatctcaat

SEQ ID NO: 1088 - DNA, 379 bp, Glycine max
  Clone ID: LIB3028-051-Q1-B1-B5
caaaagacaaaaaaataaccaccaaataaacatctttctccacaaacctagcgggtctccacttatccaaaaaaagaattcactatccatcatggacattaggaaggttacctgtgccgttctcattgccgctgcctccatgagtgcagcattggctaccacagaggtctctgcacccgcccctggccctagcagcggtgcctccgccgccactgttggctccttggttggtgcctcagtcttgtccttctttgccttgttccactaaaatgtgcagggttatggggaaagaatgttgaaggaacatgcagctcaaggaagaaggctgcatatatttacttagatacacttatgtatggaataaagtgtgaacacaaga

SEQ ID NO: 1089 - DNA, 381 bp, Glycine max
  Clone ID: LIB3028-051-Q1-B1-B6
caaagaaggcgtcttcataaacgcctttcttctccgtttccgtttcctcgttcgaattcgctttttgatctgcgaaaatgagagagtgcatctcgatccacattggtcaggctggtatccaggtcggaaatgcttgctgggagctctactgcctcgagcacggcatcgggcccgatgggcaaatgccaagtgacaagacagttggcggtggtgatgatgctttcaatactttcttcagcgagactggtgctggaaagcacgtgccacgtgcagtgtttgtagatcttgagcccactgttattgatgaggtgagaaccggaacttaccgccagcttttccacccagagcagctcatcagcggcaaagaagatgccgccaaca

SEQ ID NO: 1090 - DNA, 359 bp, Glycine max
  Clone ID: LIB3028-051-Q1-B1-B7
gcttttctgagtcgcagcatcagcagtagcatggaatccgaatccaagaacgacacccaagtcgctccggccttaatcgccgttcaccccgaccaatcctccgtcgccgtcgcagtgggcccgcacctccgggtcttcgacctccttagcggttctgcagcttctttaaccgacgactctgatggcgccgtcccgttccacaaggacaacatcagagccattcgcttcggcgcaaaaggaaaactcttcgtgtccgcaggtgacgataaaaccctcaaggtctggtcaacacagtcctggcgttgcatcaccaccgtgtcctccgagaagagagtaactgcagtagcaatcagcgacga

SEQ ID NO: 1091 - DNA, 376 bp, Glycine max
  Clone ID: LIB3028-051-Q1-B1-B8
aattcactttggttccctcgaagtttagcttgcgttacatcggtggatcacataggttttgtttaagtatgagtcaggagctgaaaaaagctgcctctaagggtcatgagaaaatggtaacatcacaagaagagcaggcaaagatcactgaggttagagggttgatagggccactatcagataaggaatctgtgtactgttctgatgcttccatctcaaggtatttaaggtcgcgaaattggaatgtcaagaaggcagctcaaatgttgaaacagagcctaaaatggagaaaagaatacaaacctgaagagattcgctgggaagaggttgctgaggaagcacagacagggatgatgtataaaccaaattatcatga

SEQ ID NO: 1092 - DNA, 392 bp, Glycine max
  Clone ID: LIB3028-051-Q1-B1-B9
ctctaggagtatgtttacttagtcactgttacagatacaaacctgctttctcagtaacagtgactaaataaacatactcctagagctggatgggagaagcacgtttgtatctgtaaattagaagggggatggcggggggatcttggttacaacagcaattgttccatgcaagtgtaaagaaacatcaagagtaatgtacaacaaataccacaacagggagggagaattcacgggatgttctgcctgttatttagccaaagatatagttcattttttaccattgaatatgtcgagtcacaaaatattactagaaaattgtatcatgtctttatatgatttttcaattggcaatgccaaaggaatgagaagtgtccctttgagttcatgtttgc

SEQ ID NO: 1093 - DNA, 381 bp, Glycine max
  Clone ID: LIB3028-051-Q1-B1-C1
agaagttctaaggaagagggaatatgcagaatacaaggtgctagttgtctatttgcaataacaacatcagcgatccaaccttagtattcttcaacccagagagatttgtaataataaattacaacaacttaaacgatggcaggaggagcttatgtagattcgggaaatgcaaagcaatttgatgggaaggtcacggcattcgtattggttacatgctttgtggcagccatgggaggcttactcttcggttatgatcttggaataaccggaggagtgacttctatggaaccatttctcatcaaattctttcccggtgtttataaacaaatgcaagatgatgttggccatagaagccaatattgcaaatttgacaacgagctc

SEQ ID NO: 1094 - DNA, 363 bp, Glycine max
  Clone ID: LIB3028-051-Q1-B1-C11
ctctccgcagcaaccttcttcgccgtttcagctcaagagccaccagcaggtaagatatggttaagcataacaacgttatccccaatgggcacttcaggaaacactggcaaaactatgtgaagacttggtttaatcaaccagcacggaagaccagaaggcgtttagctcggcagaagaaggctgtcaagattttcccaaggcctactgctggacctctcaggccaattgttcatggccagactctgaaatacaacatgaaagtcagatctgggagaggattttctctcgaagagttgaaagctgtgggaattcccaagaaacttggtccaactattgggatttctgttgatcaccggaggaaag

SEQ ID NO: 1095 - DNA, 284 bp, Glycine max
  Clone ID: LIB3028-051-Q1-B1-C12
aaccacttgtcgattttcttccacggaatagcggattaggttgaagatagaagatgttaatacggataaagttgcagcacctgtgagggacttcatggaacgggaacagggtaatgagatgaacgtaagagctttggcatggcagacattggcacacgatgctgcatcgagtccacatgggtcttcgtttgtcaacatggacaacgtggatcgtcacgttcttatgaacaaaattgcatacacagtagtgtttacattattacaattctcaatggcatgaattc

SEQ ID NO: 1096 - DNA, 374 bp, Glycine max
  Clone ID: LIB3028-051-Q1-B1-C2
cagctaccatattaagatagacttgtgcatccataaatttcttcttgttaattgatcacaaattcagagggcgagccctggtgcagcggtaaagttgtgccttggtgacttgttggtcatgggttcgaatccggaaacagcctctttgcatatgcaagggtaaggctgcgtaccacatccctcccccataccttcgcatagcgaagagcctttgggcaatggggtacgaagtttttttttaattgatcacaaattcagtagagccacatggcatcaataatatgtttcccacagttattctttagaatagcctatgatgtttaggtgcaggtttgcaactttctcagacacgatcactacaataagaaactcct

SEQ ID NO: 1097 - DNA, 126 bp, Glycine max
  Clone ID: LIB3028-051-Q1-B1-C3
cataaagtcttgcgtcttagatggcaagaatgctgcttattttaaccttcaacctttgaactttgtgatgtatttttcttgccataactgttgcccttttctcttgaactactatatgcgtaagtt

SEQ ID NO: 1098 - DNA, 370 bp, Glycine max
  Clone ID: LIB3028-051-Q1-B1-C4
cgacaacatatgcaaattctcgttcggtctcgacccgggctgtctcctaccgaatctcccagtctcaaagctcgccgacgcgtttgacttggcctcgaagctttccgcggaacgcgccatgaacgcgtcgccgtttatttggaaactaagaacgactcctcaacgtaagttccgaaagataactgagagaagcaatcaacgttgtaaacgacgtcgctaatgagatgatcaaacagagaatagaaatggggttcaacacgcggaacgaccttctctcgcggttcacgggatccataaacgacgacgtttatttaagagacattgtggtgagttttctcttagcgggccgtgacaccaacgcctccgggtt

SEQ ID NO: 1099 - DNA, 357 bp, Glycine max
  Clone ID: LIB3028-051-Q1-B1-C5
agacaacaaccatctggaatagtaatccaagggggatccattgtgtctgaccctgagttctactcagtgagatttgagaacaaggcttacctagctcgtccatggaagaattactctaggaccattatcatggacacgtacattgatgatttgattgacgctgatgggtatttgccatggcaaggactagagggtccttctggtatggatacttgcttctatgccgagtaccacaacattggccccggttcagacaaatccaagcgtgtgaaatgggctgggatttggaacctcaattcaaaagcagcacgttggttctcaccatctaagttttttcatggaactgattggattgag

SEQ ID NO: 1100 - DNA, 367 bp, Glycine max
  Clone ID: LIB3028-051-Q1-B1-C6
aactcagtgaaagagaatccgaggcgaagagaagagaaaaattaagatggaggggaaggagcaggatgtgtcgctgggagcgaacaagttcccggagagacagccgattgggacggcggcgcagagccaagacgacggcaaggactaccaggagccggcgccggcgccactggttgacccgacggagtttacgtcatggtccttttacagagcagggatagcagagtttgtggccacttttctgtttctatacatcactgtcttaaccgtcatgggagtcgccggggctaagtctaagtgcagtaccgttgggattcaaggaatcgcttgggccttcggtggcatgatcttcgccctcgtttactgc

SEQ ID NO: 1101 - DNA, 382 bp, Glycine max
  Clone ID: LIB3028-051-Q1-B1-C7
cacccatgcacaggctgttgatactgaagctgatgcaagtggtgtgaacttatctcctaaatctaacaatatacagtcgcctaattcctctaagaattcagagccaagctcacctttttcaccaaggaagtccttgcatcatgatgataagaagcaccatgatgatgaagataattggtctgttgcttcctctagcgttgcatctgcacgcactgccaaatctaaggtaactgtaggttcagcccctacttttagatgctcggatcgtgcagagaaacggagggagttttatctgaagttagaggagaaacatcgagctcttgaagaagaaaaaaaccagtatgaggcaaggaaaaaggaagaggaagatgcagccattaaa

SEQ ID NO: 1102 - DNA, 380 bp, Glycine max
  Clone ID: LIB3028-051-Q1-B1-C8
ggaagaaacgtcttctgatcttcgaaactcagcagaagagagcagcagagctgaagtgccagtaactgcaaatgcacaacaaaatgcaggagttgcattgaacgaacggatgttgcagaccactaataggaatacacaaacccaatacaatactacgatggacctgagaaatgtagctgatgattctgcagtagaatcttcaagtggtaccaggagagaaagggatggaggtttagttccagtatggtctccaccagcttccagttactcagaacaatttgtaggagatgaaaatggtataacaagcagttcatcttacttgcaaaggcatcctcaatctcaccaaatgctgaatttggagcagctacctcaaacggggt

SEQ ID NO: 1103 - DNA, 386 bp, Glycine max
  Clone ID: LIB3028-051-Q1-B1-C9
aggcggctctcagaaaagccgtgttctttgtaatcgctcaatgcttcaccttttccgcatatgctgcaaggtttgaaatcacaaaccgatgcacatacactgtctgggctgcgtctgtgcctgttggcggtggcgtgcaattaaacccgggccagtcatggtccgtggacgtgcctgcaggaacgaaaggggcccgcgtttgggcccgaaccggctgcaacttcgacggttcgggccgcggtggatgccagaccggtgactgccggggtgtcctcgactgcaaagcttacggtgcgcctcccaacaccctggctgaatacggcctgaacgggttcaacaatttggacttcttcgacatctccctcgtcgacggttttaacgtgccc

SEQ ID NO: 1104 - DNA, 365 bp, Glycine max
  unsure (1)..(365): unsure at all n locations
  Clone ID: LIB3028-051-Q1-B1-D1
aaattttcaaagtcgaagcgagaacttgccatttcgagggttttagggttagggttttctcaaattgcaagaacatgggtttcaacattcaaccctatgggattcagtccatgctcaaggaaggccataagcacctttctggcctcgatgaagcggttctcaagaacatcgacgcctgcaaacaactttccactatcactcgaacttccctcggtcccaatgggatgaataagatggttataaatcacttggacaagctttttgtcacgaacgatgctgggacgattgtgaatgaacttgaagttcagcatcctgctgccaaggttttggttttggctgggaaggctcaacaagangagattggg

SEQ ID NO: 1105 - DNA, 403 bp, Glycine max
  Clone ID: LIB3028-051-Q1-B1-D10
ctcgagccgctcgagccgattcggctcgagctcgcgtccctcatcacttcttcaattcgtaactctttttttggttcgatatgagtcaactcggtgtggcgttgcaggaatcgctgcggactcagagggaggccaggagtaccattcttgggttgttgagggagcaaatggacggtgtagatggtgggacccgcaggaggcgaagcttgaaggagcggttcggattcatcggcatgggatgttgtggggcctcctggggattccgttctgacgcgttaagtgtcaaccagggagagcaagaacaacaacaggaaacggattccggtcgagtagcggcgccagaatgtgtgggccccgcgggttcgggttcgggtatgaatcttgcggcagcgctggcggcgga

SEQ ID NO: 1106 - DNA, 401 bp, Glycine max
  Clone ID: LIB3028-051-Q1-B1-D11
cacaaccaggtccctgaatgctttttagagagagaaagagtaataataataaagtggaagaaaaagaattaggagagtgaaacaagaagaagaagaagaagaagaagaagaagaagaattgagaagatggtgtttgaggaaactgagctgaggctgggactgggactatgtctccctggaaatggaaccacggcaacaactgaagctgctgctgcggaattaggagtgaggaagagagggttctctgagactgaaactgatgaaacagccaccgttgatttgatgcttaacctctcacccaaggaagctgctgctgctgatggtgcagatccacgtgagaagccaaagacttcgccgaaagagaagaccttctgcttcccgattccgccaagcctcctgcc

SEQ ID NO: 1107 - DNA, 382 bp, Glycine max
  Clone ID: LIB3028-051-Q1-B1-D3
ataccgcacaccgtatttggtagacataattcgtgaaaatgtggggcgagtgcttacattggactccattgttgctggaaatgcgtggaaaggcatggacatgctgattttcaactcgtggcattggtggacccacactggaaaatctcaggggtgggattatattagagatggacccaatcttgtgaagaacatggaccgtttggaggcctacaataaaggattaaccacttgggctaattgggttgatcagaatgttgatccctccaaaactaaagtcttctttcaaggcatttctcctacacactatcagggcaaggattggaatcaaccaaaaagaagctgtagtggagagcttcaaccattgtctggatcaacatat

SEQ ID NO: 1108 - DNA, 366 bp, Glycine max
  Clone ID: LIB3028-051-Q1-B1-D5
tcatcattgaagtctgggagatcctcatatctactcgacgtgcttgtggggcttctatatcctgtgatttgcttgcaggaaacatcaaataaggatttgtcaacattagccaaggtagcatttgaattgctcaagtggatgattgtttgggaacctcaccttcagaaggctgtatctgtgattctttctgctgccaatgattccaactggcgaactagatctgctacattgacttatctgcgcacattcatgtacaggcacacttttactgtctcaagttcaaagaagcaagagatttggagaactgttgagaagttactagtagacaatcaaattgaggtaagagaacatgctgcagcagtttta

SEQ ID NO: 1109 - DNA, 376 bp, Glycine max
  Clone ID: LIB3028-051-Q1-B1-D7
ataacatcctcatcacactagaacgccccgcttggctcattgccgctgctaacctttttgtctttgtccacgttgttggaggctaccaggtgtttgccatgccagtgtttgatatgatcgaaacctgcatggttacaaaattaaattttccaccttctactgcactccgagtaacaactcgcactatttatgttgcggtgacaatgttaattggcatatgtgttccgttctttggctctcttcttggatttcttggaggctttgcgtttgccccgacatcatattttttgccctgtatcatatggcttaagcttaaaaagcccaagaaatttggcttgtcttggacaattaactggatctgcattattcttggggt

SEQ ID NO: 1110 - DNA, 372 bp, Glycine max
  Clone ID: LIB3028-051-Q1-B1-D8
gaaactctaacgaaagagcgagaaagcgaagacagccatggcgtcgtttcttcaatcgtttctggatccgaagaagaactggttcgccgctcagcacatgaaatccctctccaaacgcctccgcaaatatgggctccgatacgacgatttgtacgatccttactacgatctggatgtgaaggaggcgctgaatcggcttccgaaagaggtggtggacgctcgccacgcgcgtcttaaacgcgccatcgatctttccatgaagcacgagtacctccctgacaatctgcagtcaatgcaaacaccattcaggggctaccttcaggatatgctgactcttgtgaagagagagagagcagaacgtgaagcattggg

SEQ ID NO: 1111 - DNA, 376 bp, Glycine max
  Clone ID: LIB3028-051-Q1-B1-E1
aaaaaacaaaaagtttgaaaaaacgtcttatatctttctcttcttctccgtggagaatgcatctctgtggcctggtttcttgttaaccaggtcctcaccagcttttaaatacttaaatttcaatcaatcccaattttctcacattccctttttgccctttctatctctctcgtctttctcccacaatgaacgatcttctaacggaatcatttgaaattccacgtggccaaggtcacggaggtggtggtgacattgagttaggagaatatgcaaggaattcaggagacctgggcttggatagtttcttcaagaaggttcaagagcttgataaacaatatgctaagctggataagcttttgaaaaagctccaggatgc

SEQ ID NO: 1112 - DNA, 401 bp, Glycine max
  Clone ID: LIB3028-051-Q1-B1-E10
ctcttttttcagtttctgctaaaagagtacatcagcttcaggactcgttgaacaggatgatatcttccatgtcaagtcaagttgccgagctgaaggcgatcttgagtacttcatcaagattgagttcaacttttcgacctattgctagggttgacattgcttccagtaactctgatacttcatctacagactctgatttcacatttccggctcctgtttcaaatactgaacttttatcttccccagagtcaaattctttccaactagtagttcaggatgtcactgcaggggatggatcgggatctgaaagtggaaaggagggttcatttgatgatttcttctagtaaaatttgtacttcttagcgggcttaaatttacgtgtcctctgtctctggggaaac

SEQ ID NO: 1113 - DNA, 406 bp, Glycine max
  Clone ID: LIB3028-051-Q1-B1-E11
tgccaaaaggaatccatcgcttgtcaccacattttccctcctttcatgtggatatatccttagctcttatagagaggtaaaatctgtggttttgcacacacttaactgtggaagattcagtgtggcagtagagcattttctcatgacaggacaagttcctactttgcaggagggcaatatgaatgagaacatattcagttttccatggaaagataggcctgttgtccttggatcaagaatcaaggaagcattccaagaccctagtgcatatgttgccatagagcccttgtttgatagggagagatatattgtaacatataacccctcaaaacacaaggtttatgcggtgctcaaggatcaggcaaagtcagatgacattctgaaagcagcattccatgctcatgtg

SEQ ID NO: 1114 - DNA, 272 bp, Glycine max
  Clone ID: LIB3028-051-Q1-B1-E12
gtcaatcatgcatctatggcatgacagtacattttcctcgttgcagttgagatatctctatcacctatatatatctaacttctgtggttatgcacactcttgactctcgtagaattactgtagcagtcgcggatgttgtcagctcaggacaaatttgtactttaccggatggcacacctaccgaaaaccagcttcagtgatcgataccactttaggcttaattccctagtgctgagacgcgtggtcccactccaaaagacgactgcaaatgt

SEQ ID NO: 1115 - DNA, 370 bp, Glycine max
  unsure (1)..(370): unsure at all n locations
  Clone ID: LIB3028-051-Q1-B1-E2
aaagaaatcccatcttataaaagggttatgttattgaaggatanaatgggcgacgtaccaagacaaacagtggaagaaataaagaagcatgcggatgcagtgaatcttccaaaaacctcaattatcaaagtatctaattccatcttagtaggaatgacaaatgttgtcaaagagttgaaagatgcaaacctcacagtattcgtccataatctcaaaaacgaatacacaaccctggcattcgactattggtctgatcctaatgtcgagattgcaacttacgtccaaactgccaaggttgatggaatcgtgaccgattttccagccactgcaagtagattcatgaggagtccatgtagcgatccgacccatg

SEQ ID NO: 1116 - DNA, 383 bp, Glycine max
  Clone ID: LIB3028-051-Q1-B1-E3
cacattttggtaatctcttaacatatagaacactaccctgaacatagtaaagaagccagtgctaagatttgttagtgaagcaatggctcaaaccatgttgctcatgtctagtgtctctagcagttattccgtggatttgaagaaagaccttttcctccaattgcagagtcaaagtttaaggcctaagttctctcagctctcattcaacccacttccatcatcaacttcttccttttcttcaccccgtacattcacaactctggacctcttcaaatctaagaccaaagccgctcctgctaagactaaggttacaaagccaaagcaaaaggttgaagatggtatctttggcacttctggaggatttggttttactaagcagaacg

SEQ ID NO: 1117 - DNA, 353 bp, Glycine max
  Clone ID: LIB3028-051-Q1-B1-E4
cctcattctcattttccggtttctctctctctctctctctcatggcgaatctagcacacttctccaagagagccctaagaagcgcacacgcgctcgcaaggcaccacgtgcagccgcagctgctggcagcggaacgcgcttttgcgacggaggcggcgaaatcgatatccccgtcggcggatcgcgtgaagtgggactaccgagggcagaggaagataatcccgttagggcagtggctccccaaagtggccgtggatgcttacgtagcacccaacgtggtcctcgccggccaagtcaccgtctgggacggagcctccgtctggcccggttgcgtcctccgcggcgatctcaac

SEQ ID NO: 1118 - DNA, 355 bp, Glycine max
  Clone ID: LIB3028-051-Q1-B1-E5
gaaattgtgaagatgtactgttatcattgtatcaactatattgtgcccttctttttttatttgatttggcaaacacggctacttttctccaaataagatggatcatttgtattgccggctttgtgcacaattatctacttgtaagaagtccaatttcgggcaacaacgtttgtaatgcagaaataggtcattagcattgtaaatctccaggcgataaatggaatatcaaatggaagacgccgcatagcttctggtgtgacaatatcattgtgttgggcaaagcattttcgaagaaattacgtggatttaggaagattctgattattcttctacatctacaattattaaggtgaag

SEQ ID NO: 1119 - DNA, 378 bp, Glycine max
  Clone ID: LIB3028-051-Q1-B1-E6
aagaaaagaaaacagaggacagcgaggagtgagagagaacaaaagacgaatccagagagagaggagaagaaaagaaagaaaaaggaagtggctgctaacaaggatatactgtgatgccgactctaagaattcatggatatgccttgcttgtttcatcttgtttcatcatcctcatagcagcctcacaaacagatccttcagaagtaaatgcactgatagacatcaagaaaagtttgattgatcccatgggcaatatgaggaactggaattcgggagatccgtgtatggcaaactgggcaggggtttggtgctctgatagggaggaggctaatggttacttccatgtccaaaagctctacttaatgactatgaatctct

SEQ ID NO: 1120 - DNA, 365 bp, Glycine max
  Clone ID: LIB3028-049-Q1-B1-E12
ctcgagccggtcttcctcctcatctctacactactccacatagagcccagcctctcaagcccaagcccaagcccaagcccaagcccgttcataaaatcctcctgcagcagcacccagtacccagccctctgcgtctcatccctctccgtctacgcctccagcatccaacaggaccctcaccaactggttcagacagcactctccctctccctgaaccgcacccaagccaccaaaaccttcgtggctaactgcaacaaattcagaggcctgaaacccagagagcacgctgcactcaaggactgcgccgaggaaatcagcgacagcgttgaccgcctcagccggtcgctgaaggagctcaagctatg

SEQ ID NO: 1121 - DNA, 330 bp, Glycine max
  Clone ID: LIB3028-047-Q1-B1-E11
cacattttaaatgtagccactactaactttatcataccactcactcttacatcattgtccctaaatggcggaaaccctgatccaaatcggcgtggttgggtgcgccgacatagcccggaaggtctcccgcgccatcacgctcgcccccaacgccgccctctgcgccgtggcgagccgctctcacgacaaggcagccgcattcgccgccgccaacggcttccctctctcagccaaagtgtacggctcctacgagtctcttctggaggaccccgacgtggacgccgtctacatgccactccccaacaggctccatcttcactgggccgtgct

SEQ ID NO: 1122 - DNA, 378 bp, Glycine max
  Clone ID: LIB3028-047-Q1-B1-E2
gcgcaatctgcttctgcttcaaggaaggagagcttgttactctctatcagcacgtaaaatgtcatgtgaagagggtgtcattgcagttgggccagctgctgctgctgctgcgatcacaggcgagccaatggggatcatgactgccttacaacttgtgctcagagaatctctggcttagggtggtttgtcgcgtggccttcatgagtgtgcaaaagtgattgagaagcatgctgcacaactctgtgttcatgcagaagaatgtgaccaacctgactattgttaactggttaaggccctttgtgcagagcacaatgttagcctgctgacagttccgagtgcaaagacccttggagaataggctggtttgtgcaatattga

SEQ ID NO: 1123 - DNA, 365 bp, Glycine max
  Clone ID: LIB3028-047-Q1-B1-E4
caattggtggctctcaaattgtgaaccgcacatatacccaccctgcttcccacgccacatcgatctcacgttctctctctttcttttttcttgttgaaactgtgagtctatgttatttgtggcggagcatgaactcctccaccaacacctcgaattctcagtcaatggctgcagcagccagtgatgggtctgggaagaaggtaagaaaaccttagaccataaccaagtccagggagagttggactgaggaagagcacgacaagtttctcgaagctcttcaattatttgacagggactggaagaaaattgaagattttgtaggttcaaaaacagttattcagatttcaagccatgctcagaagtac

SEQ ID NO: 1124 - DNA, 381 bp, Glycine max
  Clone ID: LIB3028-047-Q1-B1-E5
cgaattgtgaaagtaagcaaagatggctttcacggaatcgtctctcctccttccttcggtttcaggaaccaacaagaacaagaacaaggttccagaagacaaatggtatttagcctacattgtgtattttaccctgggtctcggttaccttctcccatggaacgctttcatcaccgccgttgattacttctcctttctctaccctgacgccagcgttgaccgcatcgtcgccgtggtttacatgatagtcgggctggtggggatctccctcataatcctctacagccacaagtctgacgcctatgtgaggatcaacgttggattggccctattcgtcgtttcgcttctcgtcgttcccctccttgatgccttttacataaa

SEQ ID NO: 1125 - DNA, 330 bp, Glycine max
  Clone ID: LIB3028-047-Q1-B1-E6
caattataagcatgggtttgtggaacacaacgaatgcactgtcttgccgctttcacaagtttggtgatgaccaaaagaatctggtcttccaaagtgatgccacgtcttcttccaggggcatagaactcacaaagttagacggtggaggaaaaccattgggtggcattgtggggagagtgttatactcttctcaagtgcacctttgggaaagctctacagtggtcgcaggctttgaaaccgacttcaccttttccatctcatcagactctactactcaagttgatggccttgccttcttcattgccacatttgacacgataatccctccaa

SEQ ID NO: 1126 - DNA, 373 bp, Glycine max
  Clone ID: LIB3028-047-Q1-B1-E7
gtggattcgaggttattgacaacattaaatcagccgtggagaaagtgtgtccaggagttgtttcctgcgcagatatctttgccatcgctgccagagactctgttcagattcttggaggccctacatggaatgttaaacttggaagaagagacgctagaactgctagccaatctgctgctaacaatggcatccctgcacccacttcaaaccttaaccaattcatctcaagatttaccgcccttggactttcaacaaaggacttggcccccttgtccggtggccaaacatttggcaagccaaggtgacaaactttaaaacccggatccacaacgagaccaacattgaaaccggaattgccagggctaaggaacaa

SEQ ID NO: 1127 - DNA, 376 bp, Glycine max
  Clone ID: LIB3028-047-Q1-B1-E8
gtctacaactgagttattctttcatcttttcccgagaccatagtagctttatctttattttcccctgaaaattgaagggcatgcgattctttctatttaactcctgtttgaatgcatctttgtctgtagcaaacgtttccttcatgttacatccaaaattgagagcaaaaccttcttttagccttttgaagaatatacttgttatcaatggtagttgttcgttattggggaaaaactatcctcgtattgtcatttgcatggagaaattgattaggatggatataaggaaaattgatttaagttgttagatgaaaatggttattgtgaaaataagaacaatataaattactagatgttatttgaatataaaaagatg

SEQ ID NO: 1128 - DNA, 279 bp, Glycine max
  Clone ID: LIB3028-047-Q1-B1-E9
gtgcacaccacactatcgaagatgaagtttgttcgatgcaagctaaatgcctatggcattggttgtctttcgggaccacacatcataactgttattgtaagttcacatgtactgtggaattagtgtgaaagcagcgtctacatgtctaagtacacggttctgacttgcacagctactattattgaggtattcagtaacacctggcagtgtcatggatgcatttttggctaattaattacccaaatcctgcaccaggtatagtatcctaattgccatggt

SEQ ID NO: 1129 - DNA, 383 bp, Glycine max
  unsure (1)..(383): unsure at all n locations
  Clone ID: LIB3028-047-Q1-B1-F1
atggcactgatgtggatgaggatgaagatgatgatgatgatgaagatgatgatgatgaggaggatgaggatgaagatgcatttgatgtccatgctcatgctagtgctggagaacatgataatcccactattgaatttgacccagatgtattttcaagtgatgaagcatatgcaagagcattacaagaagctgaagagagggaaatggcagctagactattggcttttgctgggataaatgatcgggaagaagaggacatanaggagcatggtgctaattctcaagatgcttgggaggatgttgatccagatgaactttcatatgaggaattactggccttgggtgaagcagttggaactganagcagaggtctttcaactgat

SEQ ID NO: 1130 - DNA, 358 bp, Glycine max
  Clone ID: LIB3028-047-Q1-B1-F11
gttggtacgaaaaatgtcgaagctgatcttcgtgttcctttcgcttattcctcttctctgcacctccttctccccagagagaccctcagatcgacgcgtcctcgttttgctcgatgacttcgccatcaaatcctctcattctctcttcttcaactccctcaaatctcgcggcttcgatctccaattccacctcgcagacgacccccaaattgcgctccagagatacggccagtacctctacgacgccctaattctcttttcccccaccattgaacgttttggaggatccattgacgcggctgcaattttggattttgttgattcgggtcatgatttgatcgttgctgctgatagcaat

SEQ ID NO: 1131 - DNA, 377 bp, Glycine max
  unsure (1)..(377): unsure at all n locations
  Clone ID: LIB3028-047-Q1-B1-F12
ggacaaaggtggagtatgaactgcgagtcatatataattccaggcaccagcttctttaaggggaaacaattgctgttgccagactcaagtctcccaacaattgaggtctacattgcgggctccttcttgagtactccaattatcttgacaaaaaccttgcagctttctcagaaaaagcatgcaaagaagggggtgttggatgcaattccagagcatgaggccagtgaaaatgggaaagatacttcttcaaccctttctttgcangccccagattacctttacgacaaacatgaagatgaagattataacagcgtctacccaggaacagcatatgctgatggagaagatggagaactctcatggttcaatgctggtgt

SEQ ID NO: 1132 - DNA, 266 bp, Glycine max
  unsure (1)..(266): unsure at all n locations
  Clone ID: LIB3028-047-Q1-B1-F2
gaaaaaaaggataaattcatctggtcganaaaaatgaagttggaaatggcgagagggaaagtttgtctaagggtctcagcaatactggttttggtattaacagcatgtttggttgctttagatacccaaaccaaggttgtgttcgtatctattgagaagaaggctacatacaaagacttgaacgctctcaagatcttggtgtatgttacatgtgcggctgctggttataatctgcttctattgtgcaaacactccatttggtctag

SEQ ID NO: 1133 - DNA, 221 bp, Glycine max
  Clone ID: LIB3028-047-Q1-B1-F3
cttttctctctctagaattctcagatttgcggggcgagatgatgcagcagccaggacccggcatggcacctcccaccatgggccagcagccgcagcaacagtaccagcagcagcctccgccgcagcagcaacaaccctacgtcatgatgccgccgcagcatcaggcgccgcagcctatgtgggccccatccgcccagcctccgctgccgcaacagcctgct

SEQ ID NO: 1134 - DNA, 379 bp, Glycine max
  Clone ID: LIB3028-047-Q1-B1-F4
ggattctattaattcagcatcatcaattactcaaaccttgagtagagaagtgcttgagggccagagaaagctagtgacgctcgcagctacaagaacaaactctggcacattaaatactctgcctgtccagctaaacaatggtcctttacttcatgaaaaggtcgaggtgcctctagatcccacacaagagctagctaggttgatttctgaacggaaatatgaggaggctttcattggagctctacatagaagtgatgtatccattgtatcttggttatgtactcaggttgatttacacggacttttgtcaatggttcctcttcctttaagccaaggtgtactgctttcacttctgcagcaattggcctgtgatattaac

SEQ ID NO: 1135 - DNA, 366 bp, Glycine max
  Clone ID: LIB3028-047-Q1-B1-F5
ctcgctcacaacgccggtggcaaagagaggaccgaagagaactggaagtggctgttcaaggaaaccggtttcgcgcgttacaacatcatcaagatcaacgctctcccttccatcattgaggcgtttccaatctgaagaagatgccactaccacaactgcatgtggtttttatgttgcatgtgttgttgttattattaacagctatatgatcttcgttttaattttgtggttttccttcctgcccttgttatgtttgtgcattaaataaaagtaagaaatgccccaccactaagtaatgctatatggattatgtatgtgttccatatatgtcaagtgagtggtgtgtggttgtgaagaatctattgc

SEQ ID NO: 1136 - DNA, 376 bp, Glycine max
  Clone ID: LIB3028-047-Q1-B1-F6
aaggcagcagtgcgaagagaaagaaagagaagaagcgcttatcgaactcggacggaagcactgagttaactcagagcgagtgaaagtgttgctgcgtgatgtctggtggtatcgcccgtggacgcctcaccgaggagcgcaagtcgtggcggaagaaccatccccatggttttgttgcgaagccggagacgctgcccgatggaaccgtgaacttgatggtgtggcattgcactattcccgggaagactgggactgattgggagggtggctacttcccgcttacgctgcactttagtgaagactacccaagcaagcctccaaagtgtaaattcccacaaggtttcttctcacctaaaggtttatccctctgggactg

SEQ ID NO: 1137 - DNA, 289 bp, Glycine max
  Clone ID: LIB3028-047-Q1-B1-F7
attttgctagcgcaatcatcttgttccccaattaattaggttttttcagagtatcacattttgcatcgattcctctacgcacgccaccgtcaatcatctcagcacaacgttgcgattcggacaatcgcattacggtcggacctgtaccacagatagtttcacaattcaagtctttctgtgtggcatatcaaatttcattgggactacccagagtgcaaaacagggcatacttagtgactccatttggctaaagtgacagatctccttagctacaccgtttccagacagt

SEQ ID NO: 1138 - DNA, 377 bp, Glycine max
  Clone ID: LIB3028-047-Q1-B1-F8
gctgcaagagtcttccttgaaactactaccattgccccctccaactaccacacactgttcttctaaaaagcactctcatgaagaaacaaggattaggaaaaagaattcaatacaaagtgttttccaaagggatcctttctttgctgcacttgttgaatgctcaaaggatgataatgaagaaattacaagtagaaatttgtggaatggagctaaggtgccaataaggagtattagtgatcgttttgggtttattagcctttatgcctcttgcaagagaacttgtgctgtttctgaatctttagtctaccttccaagctcaagaagaagcacctgtgagcatgttagtcccaggtccctctaagcttgtgatgatgcat

SEQ ID NO: 1139 - DNA, 334 bp, Glycine max
  Clone ID: LIB3028-047-Q1-B1-F9
gtgatttcagtgagtgatcggtgttcacttgatctcatcataatcgtcagcgtcaattgaagaagatgccgatcagaaacatcgccgtcggaaggcctgaagaggcgactcaccccgacacgttgaaggcggctttggctgagttcatctcaaccttcatcttcgtgttcgccggctcaggctccggcatcgcctacaacaagctcaccgacaacggcgctgccacccctgccggcctcatctccgcctccatcgcccatgcattcgccctcttcgtcgccgtctccgtcggcgccaacatctccgggcgggcacgtcaaccccgccgtcacct

SEQ ID NO: 1140 - DNA, 371 bp, Glycine max
  Clone ID: LIB3028-047-Q1-B1-G1
ggctaattgccaaggcatatgttgttgtcaatgactcctgctatcatcaactcatgagccactggttaaatactcatgctgtgattgaaccatttgtcatatcaacaaacaggcatcttagtgtgctccaccctatttataaacttttgttgcctcactatcgtgacaccatgaacatcaatggactcgcaagacaatcactcatcaatgcaggtggcattattgagcaatcatttctgcctgggccatttgctgtggagatgtcttcggcagtttacaaggggtgggttttcactgatcaagcccttcctgcggatcttatcaagagaggaatggcagtggaggattcatcctctccctatggccttcgc

SEQ ID NO: 1141 - DNA, 406 bp, Glycine max
  unsure (1)..(406): unsure at all n locations
  Clone ID: LIB3028-047-Q1-B1-G10
caaggaaaaagaaaaaaaacatgggaataacactcaacaatgggttcaagaagcctaacattggattgggcctttggcgcatggaaaggaacgaaatcaggggaccaattctcaattccatcaaaattgggtatcgccattttgattgtgctgctgactacaaaaacgaagcagaagttggagatgcgcttaaggaagcttttgatagtggccttgtgaagagagaagatctcttcattaccaccaagctttggaattctgatcaaaggcacgttcttgaggcgtgtaaagacagtctcaagaagcttcagttaacgtatctagaattatatcttgttcactttcctgttgccgtaaggcatactngggttggtaatacttctagtcctttgggtgatgatggggt

SEQ ID NO: 1142 - DNA, 382 bp, Glycine max
  unsure (1)..(382): unsure at all n locations
  Clone ID: LIB3028-047-Q1-B1-G11
ggcgcaatcggcttctgcttcaaggaaggagcttgttattctctatcaacaagtaaaatgtcaggtgaagagggtgtcattgcagttgagccagctgctgctgctgctgccatcccaggcgagccaatggatatcatgactgccttacaacttgtgctcagaaaatctctggcttatggtggtttgtcgcgtggccttcatgaaggtgcaaaagtgattgagaagcatgctgcacaactctgtgttcttgcagaagactgtgaccagcctgactatgttaaactggttaaggccctttgtgcagagcacaatgttagcctgctgacagttccgagtgcanagacccttggagaatgggctggtttgtgcaagattgattccg

SEQ ID NO: 1143 - DNA, 371 bp, Glycine max
  Clone ID: LIB3028-047-Q1-B1-G12
gtccagtatttgaatgaaatcaaggattctgtggttgctggattccagtgggcatcaaaagaaggtgctttggctgaagaaaacatgagagccatctgctttgaagtatgtgatgttgtgctgcacgctgatgctatccacagaggaggtggtcaaatcattcctactgccaggagagtcttctatgcttcccagattactgccaaacccaggcttcttgagcctgtctacctggttgaaatacaggctcctgaacaagctcttggtggaatctacagtgttcttaaccagaagcgtggacacgtgttcgaggaaatgcagaggccaaggtacccactatacaacatcaaaggcaatactccctgtcatcg

SEQ ID NO: 1144 - DNA, 379 bp, Glycine max
  Clone ID: LIB3028-047-Q1-B1-G3
ggagcagctgatcagcggcaaggaagacgccgccaacaacttcgcgcgtggccactacaccatcgggaaggagatcgtcgatctctgcctcgacaggatccgaaagctcgccgacaactgcaccggtctccagggtttcctcgtcttcaacgccgtcggtggcggcaccggttctggcttgggctcgcttctcttggagcgtctctccgttgactatggaaaaaagtcaaagctcggtttcaccgtttatccatcccctcaagtttcgacctcggtcctggaaccctacaacagcgtcctttcaacgcattctctcctcgaacacaccgatgttgctgtgcttctcgacaacgaggcaatctacgacatttgcaggaga

SEQ ID NO: 1145 - DNA, 381 bp, Glycine max
  Clone ID: LIB3028-047-Q1-B1-G4
cagaaacaccagaggccgctaaaaggttctacttctacaagccatggacatcaaaatagaaagtgatgattctcagaatgaggagaatgaagaaaggctaccactcctgagaaatagtgaggtgccagaagcagagaggaatctgattcagaaagccattagccagacatttcagagcaccgcacatttgggcaaccttttaccaactggcacagtccttgctttccaacttctgtccccaatcttcacaaatgttggcaactgtgactctgtcagcaaggccatgactgctgcacttgtatctctctgtggtgcctcatgcttcatgtcatgtttaactgatagcttccgagacagaaaagggagcatctgttatgggtt

SEQ ID NO: 1146 - DNA, 379 bp, Glycine max
  Clone ID: LIB3028-047-Q1-B1-G5
gagaaacaaagttagaagtaaagaagatcatggcttctctagcaaccttggctgctgttcaaccagctacgatcaatggccttgctggaagttccctctctggaactaagctctctttcaagccctctcgccacagtgtcaaatccaagaactttaggagtggtgccgtggtagcaaagtatggtgacaagagtgtgtactttgatttggaggatctgggcaacactacagggcagtgggacttgtatggctcagatgcaccttcaccctacaaccctcttcagagcaagttcttcgagacatttgctgctccattcacaaagaggggattgttactcaagtttctgatattgggaggtggttccacccttgcatactt

SEQ ID NO: 1147 - DNA, 360 bp, Glycine max
  Clone ID: LIB3028-047-Q1-B1-G6
accaaacgaaccgtagataacgccgcgtttggttgttaagttgttccgtttcagccatggtggagaacaatctcttcgaggatatctttagggtcgaaaaattaaaccccgatgacaaaaaattattcgataaagtcactcgcattgaagcaagaagtgaaaagtttgacatgtttatgcacctggacattaattctgaggtatatccattaaaggtgggtcagaagtttgctcttgtgcttgtttcatcgcttaatcctgatggaacaccagacactggctattatacccagattagtcgacaatcactggccaacaattttgaatatgtcatgtatgggaagctctacaggataacag

SEQ ID NO: 1148 - DNA, 379 bp, Glycine max
  Clone ID: LIB3028-047-Q1-B1-G7
ttgagtttgggcatgtgtgagctgtggctttgcagggaagaagagtgtcagtagaaaataaatgtcctcttcccagggacactctctatttcacagatctatatctaagtgtcggtgatcccctttctccttccttctctgagagacaatgacaatgacgtgggcgcgattcgattcgtggaagcagcaatactacaccacaagcggcgtggtggtaggttacgcagtatgctccagcctcctggccatcatcaacaaatacgccatcaccaaattcaactacccaggcctcttaaccgcgctccagtacctcacctccgcactcggcgtctacgtctttgggaaattaaggtttctccaccacgaccccttcaccctc

SEQ ID NO: 1149 - DNA, 377 bp, Glycine max
  Clone ID: LIB3028-047-Q1-B1-G8
ctcatcaacgcagatggcgttatcgagcgatcatttttgcccggcaaatactctctggagatgtcttcggcagtttacaagagttgggttttcactgatcaagcccttcctgcagatcttatcaagagaggaatggcaattgaggatccctgtgccccccacggccttcgccttgtgatagaggactacccttatgctgttgatggactagaaatatgggatgctattcagacatgggttaagaactatgtctccttgtattacccaacagatgatgcaattaagaaagactctgagctccaagcttggtggaaggaagctgttgagacgggtcacggtgacttgaaagacaagccatggtggcctaagttgaacac

SEQ ID NO: 1150 - DNA, 386 bp, Glycine max
  Clone ID: LIB3028-047-Q1-B1-G9
cgcaaaataacatttccctcttttgtctctctcattttcaactctcaacaatgccgccggcgaagcgcaaagcggagggaactgctgcagctgccgcttcttctgcggcggctccgatgagagtcactcgtgctgcggcgaagcgcgccgccgcgagctccgaccctccgccggtgccggtggttaagaaggcggcgaagaaaggcaaagttgctgctgctgctaagaagcagaaaaggaacgaaaaggaaaatgaagatgttccggttgagagcgagaacaaagcgggagaaaaagaagaaggaggagacgcctccgagaagaacgttctagacgcttcccaacaagacatcgtcgtcgaacactgcaagcaatgtaactccttc

SEQ ID NO: 1151 - DNA, 341 bp, Glycine max
  Clone ID: LIB3028-047-Q1-B1-H1
ctcgagccgaatcggctcgagaaaacccaaataaaatctaaaaccctacccatcgttagggttctacctcatgtggcgcggagccagagtcgtttccggctacctccgccgtttctcgacggcggtgcggcggcgcatggaagacgaaggtgactggctctactcctccgagtggtggggctccgactccgacgatggtcactctgttctccgattaacttccggcaagggaaacggcgtcgttgccgtcgttgcatatccctcctccagacccagcaaaatgcattggtcacgaatggaaagatggctgcagcaaatgtgtgaggaggtgcatcctggat

SEQ ID NO: 1152 - DNA, 314 bp, Glycine max
  unsure (1)..(314): unsure at all n locations
  Clone ID: LIB3028-047-Q1-B1-H10
gcaatttanaacaggaatcccacgccacttgcaattccatctcggtgtttgattctctgcttcgtcctttcattcctcttccgaatcgttaatcgttcgatcgatccatctcccgcttccaatgacaacccctaccgacaacaataacaaccctgcacaggaaaaccctaacaaaaccctagaacccaccgaaccagattcaatccctgccaccgaagacgacgccgccgccgacactaaagactccgacgccaaaaattccccgccgcccgattctggaaacgacgctccgctctccgatattcagaagaaaa

SEQ ID NO: 1153 - DNA, 310 bp, Glycine max
  Clone ID: LIB3028-047-Q1-B1-H11
caatttcaacaacagcctcagcctcaagggcagagttttggagcttcggctccggctaacggtggcggttcgggtcagccgaagcacatggttagagccatgagaggacaagccacggacccacacagcatcgccgaaaggttacggagggagagaatcgcagagcgaatgaaggccctacaagaactagttcctaatgccaacaagactgacaaggcctccatgctggatgagatcatcgagtatgtgaagttcctacagctccaagtcaaggttttaagcatgagcatattgggcggtgcagcagctg

SEQ ID NO: 1154 - DNA, 295 bp, Glycine max
  Clone ID: LIB3028-047-Q1-B1-H12
gtgagtgtttgtgtttgttgggttgtgccggggagatggaagtgtctttgctggaggaagtagagaatattctaaggtacagatttcgaaacaagaagcttttagaagaagccttgactcactcctccttccttgacggtgtctcctacgagcgtctcgagttcgtgggagaccccgttctgagtctcgccatcagtaactacttgtttctcgcgtaccctgatctagattccgtgcagctctccggcctccgcgccggcaacgtcagcaccgagaagctcgcccgtgtcgctgt

SEQ ID NO: 1155 - DNA, 282 bp, Glycine max
  unsure (1)..(282): unsure at all n locations
  Clone ID: LIB3028-047-Q1-B1-H2
cccgtggcttcaagaagagaatctcaatggaggcccaggagctgaagcgcgtgttccagatgttcgaccgcaacggcgacgggagaataacgaagaaggagctgaacgactcgctggagaacctgtgcatcttcatctctgacaaggacctgagccaaatgatccagaggatcgacgtcaacggcgacggttgcgtggacatggacgagtttggggagctgtatcagaccataatggacgagcgcgacaatgaggaggacatganggaagccttcaacgtct

SEQ ID NO: 1156 - DNA, 348 bp, Glycine max
  Clone ID: LIB3028-047-Q1-B1-H3
agaaaacattcttgtggggtacgtactctttggaaatgtctgctgttatttacaaggactgggttttcactgatcaagcattgcctaatgatcttgtcaagagaggagttgcggttaaagatccatctgctccccatggagttcggcttttgattgaggactatccttatgcttctgatgggctagagatatgggatgccatcaagtcctgggtgcatgaatatgtctcattctactacaagtcagatgcagcaattcatcaagataccgagctccaagcttggtggaaagaacttgtccaactgggtcatggtgatttgaaagataatccatggtggcaacagatgc

SEQ ID NO: 1157 - DNA, 327 bp, Glycine max
  Clone ID: LIB3028-047-Q1-B1-H4
aaaatatgctcctatctaccagttttcacaagctttaacagaaccaaaggaggcttgattcaattaaaccatggtatgcctcagcctctccaatatgtggtcaatgcggcctttttggctgcgctatatagtgactatcttgatgctgctgatacacctggatggtattgtggacctaagttcgtttcaaccgacgtgctccgtacctttgctaagtcccagattgattacatccctggaaataatccaatgaaaatgagttatgtcgtacgttgtggtaatcattacccaaaacacgtctaccattgaggaacatctgtttcgaag

SEQ ID NO: 1158 - DNA, 381 bp, Glycine max
  Clone ID: LIB3028-047-Q1-B1-H5
gacgtgtcctaactctgaaactctactattctttctcctccgcagaaccttaacaaccaaaaccaagcattacagttcccaatttcacagaaacaccagaattgatcaaaacacataacaaaaaaaaagtgaaaatggcgagcgctgtagagaaagagggtggcgcgagagaggaaactttctctttggagcttcctgctccacctggttggaagaagcagttcatcccaaagaaagctggcacccccaagaaaaatgagattgtgttcactgcagcaacaggagatgagatccataacaggaagcagctggaaaaatatttgaaagcacaccctggtggtccagctgtatcagaatttgactggggcactggtgagaccc

SEQ ID NO: 1159 - DNA, 376 bp, Glycine max
  Clone ID: LIB3028-047-Q1-B1-H6
ctcgagccgcaaagagcatggtggtatcctgagatttattcaagtttcttgtttaggtgcatctccttcatctccatctaggatgctcagaactaaatcagctgctgaggaaatgattttaagggaactacctgaggccacaatcttgaaacctgctgtaatgattggtacagaggatcggattttgaatccatgggctcattttgctaaaaagtatggctttcttccgttgtttggagatgggagcacaaagatccaacctgtttatgttattgatgttgctgctgcactcacttcactcttgaaggatgatggcactagcatgggaaaaatttatgaactgggtggtccagagatctttactgtgcatgaattg

SEQ ID NO: 1160 - DNA, 373 bp, Glycine max
  Clone ID: LIB3028-047-Q1-B1-H7
atcctgtctaacttggaaccttgcctgtgagaacaacataacaagtaagacaggatataactggagacaggagacaccattacaaatgtacatgggatgctattattaagatgatccgctatgagggggttaatgggttttacaaaggcatgggcacaaaaatcgtacaaagtgtgctggctgctgctgttttgttcatgatgaaggaagaattagttaggggggttcgtttcttgcttgccaaggatgctgtaaagccaaagaatctgtgaatggaggccactagcttgatcaagatttcatgtaccatcttcagttagcaaattagttcaaatggtatgggaattatagtgaatcaaacaacatattgaaa

SEQ ID NO: 1161 - DNA, 379 bp, Glycine max
  Clone ID: LIB3028-047-Q1-B1-H8
caagaagggttcttcaattttgtagtttttttctttgtggtggccgggttaaacttcaattaataattatttggagtccaaaccttggcagctggcatcaataccggccaccaacaaagaaaaaaactaaacaatattatggcgaactgtcagcaatattattttcttttgctttctctggcaatttttattcctaccctgaatgccaattccttagagaaagatgagtattggcagagccatgtctatgagtttgatagttattggcaggaaagggcaaaagccgctaaagtggacagtcaggcagcttattttgaagacccatattcagtctccagcaacttcacttccagtgttagcgaactcacaattggcaaga

SEQ ID NO: 1162 - DNA, 199 bp, Glycine max
  Clone ID: LIB3028-048-Q1-B1-A1
aaaacaaggtgccatctttgtttgttatacatgaccatgggcatgcccctgtttctgatgttccttcttctgcacatagcttgggtggcatcgtcggatctccgacctgggttttactcaaaaacatgtcgagaagcgggggtcatgggccgagatgtgatgaagaaaggccgtaggagggaacccagaagtgttgcct

SEQ ID NO: 1163 - DNA, 343 bp, Glycine max
  Clone ID: LIB3028-048-Q1-B1-A10
gctaaagggagggccaagccattcaatccaaattcatgctttgttccaaatggatacccatctgcgtattattatggaggttatgatgggcaaggtgattggaatgcttattccagatatatgaaccttgatggagggatggctcaaggtgtttatggggatagctgctcttacatgtaccatcaaggttatggttatacaccatatggaacatatgcaccgcccaattcgtcttctccaatgattcaacaagatggccagcattatgggctgcaacagtaccacttgccagcttatgcttctttgtcaggctatcaggggtcaagaaggcaccatggtacac

SEQ ID NO: 1164 - DNA, 377 bp, Glycine max
  Clone ID: LIB3028-048-Q1-B1-A11
gcaaaaagaaagaatcccaggcgaggagaaagatggaggggaaggagcaggatgtgtcgttgggagcgaacaagttccccgagagacagccgattgggacggcggcgcagagccaagacgacggcaaggactaccaggagccggcgccggcgccgctggttgacccgacggagtttacgtcatggtcgttttacagagcacggatagcagagtttgtggccacttttctgtttctctacatcaccgtcttaaccgttatgggagtcgccggggctaagtcgaagtgtagtaccgttgggattcaaggaatcgcttgggccttcggtggcatgatcttcgccctcgtttactgcaccgctggcatctcagggggacac

SEQ ID NO: 1165 - DNA, 367 bp, Glycine max
  Clone ID: LIB3028-048-Q1-B1-A12
aaaaaatacaaaaacaactttgcaatttcgtaggagatgctcaggagcagcacgctaacacagagtgttacagtcacctgtgttcgtcacagtcacagacaatggttccaatcaattcccgtaaattatagattctttgacgctgctcggaactctctatcatcacccaactccgcgatcttcaaatggaaaagaaaggccaattataaccgtcatagttctggaatggggaccttcaccactcgcgcgttggcgcagccgcttcagaacgccgacgaactcatcgactccgtcgagacatttatcttcgattgtgacggagttatatggaaatgtgataaattaatagacggagtgcctgaaacgc

SEQ ID NO: 1166 - DNA, 287 bp, Glycine max
  Clone ID: LIB3028-048-Q1-B1-A3
ctctgtttctgggactactgatggaataagaagtctgggaaggttgggggactctagtaattcacaagaaaatgatataaaaatgttggaagtgaaacaaggtgagaagtatgcccctggaaatcaaatattggagaactcctctaacactgggcttgataaggaggagaatgtagaagatatattagaagaaagctccaatcattctacccgcaaagaacattttgatcatcatgaatttgaagatcgcactgattctcaagttagaacatctcatcaaaatacca

SEQ ID NO: 1167 - DNA, 282 bp, Glycine max
  Clone ID: LIB3028-048-Q1-B1-A4
gaaccatgcagagataattaaactataagctacctagcttcgaatcatcatcactcataattttaattaattttttcctaccatacagtactattagtattaattagttctttgtcttatgtatttttttttttttagatggaagaggatatcgagggatttatagtaggttagatacattgagctagatcgtttgacaccttattttgttaggtagttactttgaatttttttccttagttactttgatgattcctttgcagatggtcaagaattgctcgc

SEQ ID NO: 1168 - DNA, 353 bp, Glycine max
  Clone ID: LIB3028-048-Q1-B1-A5
gtacattgagaccatcaaagaagctttggaaagagaatgccctggagttgtttcatgtgctgatatcctcgttctctctgccagagatggcattgtttcgctaggaggtccccatatccctcttaagactggaagaagggatggtagaaggagcagagctgatgtggttgagcagttcctcccagaccacaatgagtccatttctgcagttcttgacaagtttggtgccatgggaattgacacccctggcgtcgttgcactgcttggagcacacagtgttggtcgaacccattgtgtgaagttggtgcaccgtttgtacccagagattgattcagctctgaaccctgaacacg

SEQ ID NO: 1169 - DNA, 326 bp, Glycine max
  Clone ID: LIB3028-048-Q1-B1-A7
ctcaaaacctaaggctgaatctgaattcagtgtgcagaagctggttgacatgttcacaaagttgaatcctttggcgaaggagtttttcccttcatcatattctcccaatcatgataatcgctttcagggctttaatcagctctcaccaacccactttctggtcagcactaagccctctgctgatgagaatttcccgaacaatcgaaggagaagaaatagttttaaccaaggaaggagaaaggtgagtggaagatcactaaaggctcagagagaagatagcattagaagaacagtatatgtttctgagattgatcagcatgttactg

SEQ ID NO: 1170 - DNA, 360 bp, Glycine max
  Clone ID: LIB3028-048-Q1-B1-A8
cttggttcacaaaattgtcaaaggcgtttctgtttctgcaattaatccttgactccggggaaagggaataaggataaaatggcgaagatatcatttgttttggtatttgcatttgtgttgttggctctgccattatgttcagttttgggccaagaagattggaaggatctcctggaccaaggagggttctctcaagattctttgaaaaaggcccagatggcttttggtgctgcttctgcccaagcagctgtcaatgattattttggaggtgacgactctcctcaggaagccgatgatggagaagcttcatccttggctgactttttagacgctgacgaaataacaaacaacaacccccat

SEQ ID NO: 1171 - DNA, 383 bp, Glycine max
  Clone ID: LIB3028-048-Q1-B1-A9
cacgaatcacactctccacagtgcgattcattcaccaatggatcgcaacggcgttctctctctcgcattcatctgcattgtagtcgccggcgtcggaggacagtctcccgccgcagcgccgtcaaacactccggcaactcccgccgccgccactcccgcccaagcaccttccacagtaccgaaatcaccagctcccgttgcttctcccaaatcatctccaccagctgcaacccctgcatctactccggcggcatctcccaccaccacccccgccgcgcctgctccggtgaccaagccacctgcagcctctcctcctccggcgactcctccaccggcaactcctcctccggcgccggttcccgtgagctctccccccgctcccg

SEQ ID NO: 1172 - DNA, 383 bp, Glycine max
  Clone ID: LIB3028-048-Q1-B1-B10
ctcgagccgattcggctcgaggaacgacaattcccacgggcatttatgctccccctaaccgtgatcacattgctctggcgttggcaatggcttaccaagaggtcaccaatcaccataaacagcgccctcctatcaacgatctcgggccaaatgataagcttcctagctgattcacttactgctacttaccctctcagggttttgggcttgggtccttaagcaacttgttagaacagcttcagcatgcatattgcatatatggatgtaatcattttcacatggagttaaaaagaggtagaggagatcgagttgtaggaaataaactacttttgcaaataataacataccacattaatcttcaaatctattcttatatcacaccc

SEQ ID NO: 1173 - DNA, 381 bp, Glycine max
  Clone ID: LIB3028-048-Q1-B1-B11
gacagcttgtggaagacttagtgattaatcgctctcacgagcttctcttcacttgctcacccactcttctcttgaacggtttagctaccggtgccaaaggcatggtaagtcttgatcgatctcgcacttctttttcgtctcaggtttttcactcacttggaactcacagaacaatcactctttgtcactcttcctcgtctgggattgttcaacttgggaatgtggcgcatgaatcccaaaccgggtctgaaattttcagatctcttacttttacaacccttgtcgcgaaccaagaccaagcacagacacatccttccatcaacgttaactccgtcaaaatcaacggcacataggtttctttcgacacccccttgggtgggg

SEQ ID NO: 1174 - DNA, 362 bp, Glycine max
  Clone ID: LIB3028-048-Q1-B1-B12
agatgaaagattcaacagaaacagatgctatcagcggttccctgaacctcctgagtactcttctcgactcggagctcccgagcgtgagaaacttcaaaggaaaatggtcactcgcccgagtcaaactcacccaactccaaacccacctcaccgatttctccgccgagttcccaaacgcctccacatcgaaccccctctccctccacctcctccactcaatctcccaaaccctcaacgacgccgtttcgctctccaaaacatgccaacccgaaaccctcccaaacggaaaactcaaaacccaaagcgacctggattccctcctcgccaccctcgaccgccacgtcagcgactgcgacatcctc

SEQ ID NO: 1175 - DNA, 363 bp, Glycine max
  Clone ID: LIB3028-048-Q1-B1-B2
cttcatgctggtttagatccagcaacttcatctagtgagttctgttgcacgacagctggtattatgcactgtattttacacctcaccaacaatttttaaattgattgatcagagaagctagttgaagaaggaagaacattcgatgcagttatggccttggacgtgattgagcacgtggcagatcctgctgagttctgcaaatctctgtcagcaggaagagttccagatggagccactgtgatatccacaatcaatccattcatgagagcctacacaactgccattgttgctgcagaatacattctccgctggcttccgagaagcacacatcaatgggccagttttctcactccagaggaactc

SEQ ID NO: 1176 - DNA, 378 bp, Glycine max
  Clone ID: LIB3028-048-Q1-B1-B3
tactctccccacaagtatcactgatgcttgccctgctccaaaggaaactaaatgctcttatgagcatgtcaaagattgtgtttcaagtcattcctctactgacttggatcaacgccggtttgacacatcatcgtaccagcaacgtgcggaggcattggaggggttgctggagttcagtgctaggctcctacaacaacagaggtttgatgagcttggggtgttgctaaagccattcgggcttgagaaggtttctccaagagaaacagctatttggttgaccaagagctttaaacaaactgcagtctaaggttttctttttcatgcatgcatatgattatttgcaaactgatagtgtacataacgttgtacatttgacga

SEQ ID NO: 1177 - DNA, 286 bp, Glycine max
  Clone ID: LIB3028-048-Q1-B1-B4
gataactagaaacagtgtgatgaaaatgaaggtccttgttttcttcgttgctacaattttggtagcatggcaatgccatgcgtacgatatgttccctctccgaatgaacactggctatggtgcccgtactccggaggtgaaatgcgcaagttggaggcttgctgtggaagcacacaacatctttggctttgagaccattcctgaagagtgcgttaaagcaacaaaggaatacatccatggcgaacaatatagatcagactccagaacagttaaccaacaggcttac

SEQ ID NO: 1178 - DNA, 398 bp, Glycine max
  unsure (1)..(398): unsure at all n locations
  Clone ID: LIB3028-048-Q1-B1-B5
gtctgatgaagcaagagcaatgtacaacggtggacaggctggtttgacgtattggagtcctaatgtgaacattttccgtgacccacggtggggccgtggccaagagactcccggcgaggacccgacattggccgcagaatacgccgccagctatgtcaaaggactccaaggcgatggtgccggaaatcgcctcaaggttgctgcttgttggtaacactacactgcctatgatcttgataattggaatggtgtggacaggtttcatttcaacgccaaggtgagtaaacaggatttggaggacacttatgatggtacatttanagcgtgcgtgttggaagggcaagtggcaagtgtgatgtgctcctacaatcaggtgaatggcaggcccacgtttgctg

SEQ ID NO: 1179 - DNA, 339 bp, Glycine max
  Clone ID: LIB3028-048-Q1-B1-B6
gggtcacataaacccagcagtgacatttgggctcttcttggctcgcaaggtgtctttgattagagcaataatgtacatggtggctcagtgcttgggagccatatgtggagttgggttggttaaggccttccaaaaggcttactacaacaggtatggtggtggggccaatgagctcagtgaggggtacagcacgggtgttggattgggtgctgagatcattggaacctttgttttggtctacactgtgttctctgcaactgaccccaagaggaatgctagagattctcatgtgccggttttggctccacttccaattggctttgctgtgttcatgggtca

SEQ ID NO: 1180 - DNA, 334 bp, Glycine max
  Clone ID: LIB3028-048-Q1-B1-B7
ccaaatcatattaagccatggccacctccaacttctcaattgttctctctctctccctagccttctttctagtgctactcaccaaggcaaactcaaccaacaccgtttctttcaccgtcagcaagttttccccacgccaacaaaaccttatcttccaaggagatgctgctatctcaccctccggggtgttacgactcaccaaggttgacagcaacgacgtgccaacgacgggatccctaggacgtgccctttatgctgccccaatccagatttgggacagtgaaacaggcaaggtagctagctgggctacatcgtttaaattcaaagttttctc

SEQ ID NO: 1181 - DNA, 359 bp, Glycine max
  Clone ID: LIB3028-048-Q1-B1-B8
gtttgggtggcttttttcattgttcagattgttaaggaatacaccaagccctgttccatccagttctggcttcttaattttttgcaggttcctgtcgcagtctctgttacactttttgaagccataggcttatacaaaggaactagagtgattgcatcaaagggaaaggaagtcaccaattggaagattcatcagatttgtctctactgttccactggaataatggctggtatggttggtggactgcttggtctaggaggtggtttcattttggggccattgtttctagaattgggaattcctcctcaggtagcaagtgccacatcaacttttgccatggttttttcatcctcaatgtc

SEQ ID NO: 1182 - DNA, 297 bp, Glycine max
  Clone ID: LIB3028-048-Q1-B1-C1
aaaacactcataacacaaagcacagagcaaggctcatccttgagttaaaaaatggcagcagcttcttccatggctctctcatccccatccttggctggcaaggccgtgaagctgggcccatcagccccagaagtgggaagggtgagcatgaggaagagcgtcagcaagcaagtctcctcaggaagcccatggtacggcccagaccgagtcaagtacgtgggcccattctctggcgagcccccgtcctacctaaccggtgagttcccaggggactacggctgggacactgcggggctt

SEQ ID NO: 1183 - DNA, 356 bp, Glycine max
  Clone ID: LIB3028-048-Q1-B1-C10
agagataccacttctcttgccaattcacagctgatctatttgccatgaaccacacagatttcattatcaccagtaccttccaggagattgctggaagcaaggacactgttggacagtatgagtctcaaacagcctttaaccctcctggaacccaacgtggtgtgcaaggcattgatgtctttgatccaaaattcaacattgtctcccctggagctgatcaaaccatttacttcccccccaacgaaactagccgtagggtggactccttccaacccgaaatcgaagaacttctttacagctctgtggagaatgaagaacacatatgcgtgctgaaggaccgcagcaagccgattatc

SEQ ID NO: 1184 - DNA, 370 bp, Glycine max
  unsure (1)..(370): unsure at all n locations
  Clone ID: LIB3028-048-Q1-B1-C11
cttggtatctggggaggcaagaatgagaggaaccttgatgttgggcagggtcatgaagttcttggtatctggggaggcaagggacaaggaaaatctttccaatgtgagcttgtctttgccaagatgggaatcaaccccatcatgatgagtgctggagagttggaaagtggaaatgcaggagagccagcaaaactgatcaggcagagataccgtgaagctgcagacatgatcaagaagggaaagatgtgcgctctcttcatcaacgatcttgatgcangagctggtcgtcttggtggaaccacacaatacactgtgaacaaccagatggtgaatgccactctcatgaacattgctgataaccccaccaatg

SEQ ID NO: 1185 - DNA, 303 bp, Glycine max
  Clone ID: LIB3028-048-Q1-B1-C2
gaagagaatggctcccaagggtttaacctttctggctgtgttaatatgcgtttcagcactgtcactgagtccttctgttgcgggggaagggcaaaataatggccttgttatgaacttctacaaggaatcatgccctcaggctgaagacatcatcacagaacaagtcaagcttctctacaagcgccacaagaacactgctttctcctggctcatgaacatcttccatgactgtgctgttcagagttgtgatgcttcactgttgctggactccacaagaaagagcttgtctgagaaggaaacaga

SEQ ID NO: 1186 - DNA, 331 bp, Glycine max
  Clone ID: LIB3028-048-Q1-B1-C3
cttaactcaacttctgctagccactctctgcttcgaagtccaaccacgcttttctctacagtcatgggcaaggtcaagatcggaatcaacggatttggaagaattggccgtttggttgccagagtcgctctgcaaacagacgatgtggagctcgttgccgttagcgaccctttcagtaccaccgattacatgacatacatgtttaaatacgacagtgttcacggacactggaagcatcacgatgtcaccgttaaggacgagaagacccttctcttcggtgacaagccagtcactgtttttggacacaggaaccctgaagagatcccatggg

SEQ ID NO: 1187 - DNA, 329 bp, Glycine max
  Clone ID: LIB3028-048-Q1-B1-C4
cggctttctgagctcattggtatccaggttgtcaaggctgaagacagtattggtccagaagtagaaaagttggtggcttctcttccagatggaggtgttcttcttctagaaaatgtgaggttttacaaggaggaagaaaagaatgatcccgagcatgcaaaaaggcttgcctctctggcagatctgtttgtggatgatgcatttggtactgctcaaaggggacatgcatcaacagagggtgttactaaatacctgaagccatctgttgctgggttttcttttgcaaaaggagactgattaccttgttggggcggtaacaaggcccaaaa

SEQ ID NO: 1188 - DNA, 323 bp, Glycine max
  Clone ID: LIB3028-048-Q1-B1-C5
ctgacctatcttggtagagatttgaagtttaaaccttcaaattaatcaaaccattttaatttgcctatagattctgagtcactgctgctatggcgctacgcgtacttcttgtgttggggatgttgctgatgttgtgccttgttaaggtttcatctgatccaaagatagaggaagaaatactggaagcagaagaagaactgcagtttcccgataacgagccacttatcgtgagagacgcgaacagaaggctaatgcaagatatggattgtggtgggttgtgcaagacgaggtgcagtgcacattcgaggcccaacttgtgcact

SEQ ID NO: 1189 - DNA, 350 bp, Glycine max
  Clone ID: LIB3028-048-Q1-B1-C6
tgagaagatggtgtttgaggaaactgagctgaggctgggactgggactatgtctccctggaaatggaaccacggcaacaactgaagctgctgctgcggaattaggagtgaggaagagagggttctctgagactgaaactgatgaaacagccaccgttgatttgatgcttaacctctcacccaaggaagctgctgctgctgatggtgcagatccacgtgagaagccaaagacttcgccgaaggagaagacccttctgcttcccgattccgccaagcctcctgccaaggcgcaagtggtgggatggccacccgtgaggtctttccggaagaacatgttcgcagcccaaaaga

SEQ ID NO: 1190 - DNA, 338 bp, Glycine max
  Clone ID: LIB3028-048-Q1-B1-C7
aaagaacattgttcaaaggagtaagaacaatgagggcgaaaaagccgccacaagtagtagcaacaatgtgaacacgggagcagctttcgtgaaggtgagcatggatggtgctccttatttacgcaaggtggatttggagttgtacaagagctaccaagagttgttggatgcgctggctaaaatgttcagttcattcaccattgacaagtgtggatcgcaaggcatgaaagacttcatgaacgagagcaaattgattgatcttctcaacggctctgattacgtagcaacctatgaagacaaagatgctgactggatgctcgttggtgacgtaacgtggg

SEQ ID NO: 1191 - DNA, 327 bp, Glycine max
  Clone ID: LIB3028-048-Q1-B1-C8
gtctgggtgtgacaaccttaggaagctggagatcagggactgcccctttggtgacaaagcccttttggccaatgctgcaaagctggagacaatgcgatccctttggatgtcctcttgcttggtgagttatggagcatgtaaattgctgggtcagaaaatgccaagacttaatgttgaagtcattgatgaaagaggacctccagattcaaggccggagagtagtcctgttgagaagttatacatatacaggactgtttctgggccaagattggacatgccaggctatgtatggagaatgcaagatgattctgcattaaggatttcttg

SEQ ID NO: 1192 - DNA, 385 bp, Glycine max
  unsure (1)..(385): unsure at all n locations
  Clone ID: LIB3028-048-Q1-B1-C9
attctccctttcctctccgaaccctcgatcactctcacgcgctcctatattcgctcctccaccgtcgctctctcgaacaaccacaacaccatcttcatcacatggcaaacgcagcatctggtatggcagtccatgatgactgcaagttgaggtttttggagctgaaggcaaaaaggacacaccgtttcatagtttttaagattgaggagcagcagaagcaggtcattgtggagaagcttggtgagcctgcccagggctatgaagatttcactgccagccttcctgctgacgagtgccgttatgctgtttatgattttgagtatctgactgaagggaatgtcnctaaaagcagaatttttttcattgcgtggtcccctgacacatc

SEQ ID NO: 1193 - DNA, 338 bp, Glycine max
  Clone ID: LIB3028-048-Q1-B1-D1
aactactccaagactttcagttagtaaggaggtgttagactcaccaagcagttatcaagtgactgtggaatcaaaaccattgactgagattacaactaaagataaaaacattcatgtttctgatgaagtaaagaacgagcccatagatttaccagagcctatttgtaaagatgaagattctcacttaacaaatggagatttgagtcacaaggaagatcaagtaggcagtgaaaaccagaaaccaaacggaaaagcctcaattgtagcaaagcaggaacgtgcagagaatggtatacagaatagtccagcactaccaagttacatggcagcaactgaat

SEQ ID NO: 1194 - DNA, 356 bp, Glycine max
  Clone ID: LIB3028-048-Q1-B1-D10
ctttgggagatcaaatcatatctatctatcagcggcaaggcaattcaagttgtgaaatggagaccctctgctctgcattggtgttcccatctttcagaatcagaacttcagctttctccaaatgtggcatcagggcttccattgccgttgagcaacaaacttcccagactaaggttgctctcctcagaattggtaccagaggaagtccactagctctggctcaggcatatgagaccagagacaagctcatggcatcacatgcagagctagcacaagaaagggctattcagattgtaataataaaaacaactggtgacaaaatactatcacagccacatgtacacattggtgggaaa

SEQ ID NO: 1195 - DNA, 378 bp, Glycine max
  Clone ID: LIB3028-048-Q1-B1-D11
ttttgctacattctgaatggagctttctgcaccttcttcaccctctcttctaagatgtccttcatccctgcttctgaattctagggttagggttttccatacaatactcaaccccacacgcccacctttccaagcttcaatcttttcactcaaccaacgcattctcactccaatggatcttcccagaaacgtctcctccgctgccttggtgggagacaacgcttcggccacgaccactttgccaattgactcagatgctagaatcggagaggttaaaagggtcaccaaggagaccaatgtatcagtcaaaataaacttggatggttctggggtggctgatagtagtactggaattcccttcctcgatcatatgcttga

SEQ ID NO: 1196 - DNA, 366 bp, Glycine max
  Clone ID: LIB3028-048-Q1-B1-D12
ggaggagatatagaaagggaaatggaagcggaaaccttcatttgagttgccattgccaccaccgtttcccatggcgtctgtttggacactgcacttccgctctctttctcttcgcccatgcctctacattagtagcaattgcagtagcgctgccactagaaatcgcattagcatcagaaatcgaatctccaattggcgctcttgcgcccaacaactcaaacacgattccatcaattccattaccaaatttcaccatcaacttgttcattccgttaccattcctccattcctgttcgaggcctctcaagtatgaagaccccttcaataatccctttgtcaaggttggcaaaagccactcaactgttg

SEQ ID NO: 1197 - DNA, 332 bp, Glycine max
  Clone ID: LIB3028-048-Q1-B1-D2
ggctcttcaaccactacattcactttattggcctagacccaaccaccaaagcaccaagagaccttaggtgaaccttttctctctagctctgtttgcagaaattcaagcgcaagaatggaggttgcaacaaacacaaccgcgaccacgtcaaattcattcgatgctctaactgtggaaaatgctgccctaaggtttttttattttactttcttatacctttaaagttttgtgcaaggcatttcagttaaagtttttgcgctttgtggattttttttttcttcaaattaataacaggacaaagctattaagaggtttctggtgaggaacattgt

SEQ ID NO: 1198 - DNA, 333 bp, Glycine max
  Clone ID: LIB3028-048-Q1-B1-D3
agacgacgacgcggggaatctccggtctcgaccgagatctcttgtattctcttcacaatcccgtgatgccatttcgttccgttcacttcaatctcaatggccgataataagcaacccaatcacgagggaggcaagtcctcttctcgagcagtcccaacgcaaatccgaaccaccaaggccacctgagactcccgagtttcatctcggatggaccgctgatgggctcccgctgggccacggcagcgtcgtgggccagcccatgggccgcgccccttggaactcctccatctgcgcctgtctcggccaaaccgatgacttctgcagcagcgatct

SEQ ID NO: 1199 - DNA, 140 bp, Glycine max
  Clone ID: LIB3028-048-Q1-B1-D4
gtatttcacccaaatataaatagcaatgggagcatttgccttgacatattgaaggagcagtggagccctgcgctaactatttcaaaggtgttgctctcgatttgttccctgttgacggaccctaatcctgatgatccttt

SEQ ID NO: 1200 - DNA, 305 bp, Glycine max
  Clone ID: LIB3028-048-Q1-B1-D6
gccgcaccgacaacgccatcaagagccattggaattccaccctcaagaggaagtgctccgagcctctctccgagcctcggcctctgaagagatccgccaccgtttcgggtagtcaatccggatcggatttgagcgatgcgggtttacccattattcgtgcaagaagcgtgagcgtgacggtagctcgctctaaccaccttgcggaaaccgcgtcggcgtcagtaagtgatcctgccacgttattgagtttgtctctaccggggagtcgattcgtgcgatggggctgataatggggctgggccgaa

SEQ ID NO: 1201 - DNA, 359 bp, Glycine max
  Clone ID: LIB3028-048-Q1-B1-D7
catttctccatttccattttctctctcacttttcaagaatcgtaagctatgggaaagtcttacccaactgtgagtgctgattaccagaaggccgttgagaaggcgaagaagaagctcagaggcttcatcgctgagaagagatgcgctcctctaatgctccgtttggcatggcactctgctggaacctttgacaagggcacgaagaccggtggacccttcggaaccatcaagcaccctgccgaactggctcacagcgctaacaacggtcttgacatcgctgttaggcttttggagccactcaaggcggagttccctattttgagctacgccgatttctaccagttggctggcgttgttgc

SEQ ID NO: 1202 - DNA, 332 bp, Glycine max
  Clone ID: LIB3028-048-Q1-B1-D8
gattgctcttttctccttcgctcttccctttcccattcccattcctattcctcctttccctctcctctccgctcctccaattccccccaaactttctccctccgccgcttcgccgccgcctcgctcgcttgccctcgaccggcgccgccgcccctcgacgccataggccagaaaatcggaaagtcgaggcgccgccccgggtgcccttcaagggccgggttaaggcgaagtgtaagtctttcggcccaagggatattgggacaatgaatctctcaacgtccagttgggggagcaagatgattatgaggtggtgagaaaggtgggtacgggga

SEQ ID NO: 1203 - DNA, 311 bp, Glycine max
  Clone ID: LIB3028-048-Q1-B1-D9
gtgggatcggtttcatccaacttatgcagtgaatgccattctgacagacaatatatggaatggctggcacacttaaatgtgctatcctatgagcttggaggacatggtaaataggatgccaaaatgatattgtgatgttagattactccactttttgcacataagtgtttgatactcaatggctctacttataagtaggttttttttttttttttttgcacatgttgctgaagagagttagtgtatatacatataacgttgtaaatttacaatgtaatcaaatattaatactaccaaaaacttctccgtgc

SEQ ID NO: 1204 - DNA, 236 bp, Glycine max
  Clone ID: LIB3028-048-Q1-B1-E10
cgagagtggtttttgttagtgcagaaacagagaaagatggatgaggagaatggttacagtgggagtatcagctctaacttggagactacaaaagcagagagatctgtgtggctgatgaagtgccctttggtggtggctaagtcatggcagacccatcctccttctcaacctctcgccaaggttgtgccctcccttgatcctctcaaccctgaggaagacattcctccggcggccaa

SEQ ID NO: 1205 - DNA, 370 bp, Glycine max
  Clone ID: LIB3028-048-Q1-B1-E11
ccaagatttgttcattgttgggtcaattgaagtctaagaaagaaaacagagagcgaagaaggagaagagatcagaaaaatggcgtccaaagctccaaagaaggccaatctcctcgatcaccactccatcaagcacatcctcgacgagtcagtctccgaggtggtaacgagtcgtgggtttgtggaagacgtgagattgagcaatgtgaggcttctcattggggcaatcatcatcgtcattgctctcttcgcccaattctacaagaagaagttccctgaaaatagggattttctcatcgcctgcatcgccttgtatgtgatcttcaatgggttgttgcagctgatcatatacactagggagaaaaatgcca

SEQ ID NO: 1206 - DNA, 329 bp, Glycine max
  Clone ID: LIB3028-048-Q1-B1-E2
gtgaaccgacagtctgtgttgggagccattacttctgctcagcagaggttgaaactatataacaaggtccctccaaatggtttggttctttacactggaaccattgtcactgaagatggcaaggaaaagaaggtgacaattgattttgagcctttcaagcctatcaatgcatcactgtacctctgtgataacaagtttcacacagaagctctaaatgaacttttagaatctgatgacaagtttggtttcattgtgatggatggaaatggcaccctttttgggactttaagtggaaacactcgtgaggtacttcacaaatttactgttga

SEQ ID NO: 1207 - DNA, 383 bp, Glycine max
  Clone ID: LIB3028-048-Q1-B1-E3
cagacacaagcacagtcacaggcacaaactcaaagacttgctcctcaatttcaacagaagtcaactggtggtggcgccgttgttgatttgccttctcctgattcagtttcaagtgatagtagtcttgcgaatgcaatctcgcgttcgaaacctgctgtttatcaagaacaagttcagattcaatccgggactacaagggttcccagtaaccctgtggatcgaaagcttaatgtgtctgatccgcacggtcggatccagatgcagcaacatgtacaggaccctggatatttgttgcaacaacaatttggacagcaccagcagttgcagtcacaacaaacggaagagcaattttgacagcaacatcaccagcaacagcagacact

SEQ ID NO: 1208 - DNA, 363 bp, Glycine max
  Clone ID: LIB3028-048-Q1-B1-E6
caaattaaccaccaacaacagcagaagaaaataaaggagcaaactaaaatggcagcaaataaatacgttgcattgttgttggtggtgttccttatcgctggaagtgctaatgccagaccaaaagaagtcagctgcgcaagtatttgcatcgacagagaatgcaaaagtgactttaacagttggtgtgcaatattcaattgtggtatcaaatgtgcactcataggaccacaaaagaaaactgaaacagttcaacgacaaatggtaaaagagcaaggactaacatcatcaaggaagattcaacaataaatgatgaaagaagacgcgaagcacaattggaaaaatacacctactcaagttttttaa

SEQ ID NO: 1209 - DNA, 362 bp, Glycine max
  Clone ID: LIB3028-048-Q1-B1-E7
ggatattggaaatcagaggttctctgacatcaacagccaaacaagttcagggcaaacaaaatctaaggataagggtgttgatcccttttcattcaatagtcaaggggtttatccccaacccacgactgcaacatatcctattgggaaagaagatgtcacagtcatttttacaagaagaggaggagatgatttggaacataaccacagtaaatggttatcaactatcaagtcctccccagatatcattgagatgactttctgtcctataactgatctccttgatgagatacctgccaaggagcatttgactcgtgccattggtctttatcttgaatataaacctcctattgaagaacttagat

SEQ ID NO: 1210 - DNA, 261 bp, Glycine max
  Clone ID: LIB3028-048-Q1-B1-E8
accggatgataaacagtgtcccgccaagaatctggtggtgctcatgtgcaggctctacttggtggaattcttcctgcgttacgacacgtttacgttcgattttaaaccagttgttctgggtcccgatgttaccatcaagtcactcgccaaggcttcttccttctgatcctcctcatcacctactctacctcaaacttaaaatcaatcttctttttagggtgtattagttaattaataattaattaaaacaaattaattata

SEQ ID NO: 1211 - DNA, 384 bp, Glycine max
  Clone ID: LIB3028-048-Q1-B1-E9
ccttagccgaggtcacgaggagcactagctagtttcacaatttccaaatggctaggggattgaagaagcatctcaagaggctcaatgctcctaagcattggatgcttgacaaactgggtggtgcatttgcgcccaaaccctcatctggaccacacaaatctagggagtgccttcccctcatactcatcctacgaaaccggctaaagtatgctctgacttaccgtgaagtcatcgctattctgatgcagagacatgttcttgttgatggaaaagtcaggaatgacaagacttaccctgctggtttcatggatgttgtttcaatcccaaaaaccaatgagaacttccgcctgctctatgacactaaaggccgattccgtctccatt

SEQ ID NO: 1212 - DNA, 370 bp, Glycine max
  Clone ID: LIB3028-048-Q1-B1-F1
gggtggcactaacgtctgccaaagaagtctcaccgctgaagggatatttcacaatatttttaggcacaaggttactcacatggggggtgcaccgacagttttaaacatgataatcaattcaccacccaaagtccggaagccgcttccgggaaaggtctaagtgatgacaggtggtgcaccaccgcctccggatgtgattatcaggatggaagaactaggatttaatgtgactcattcatatggtttgacagaaacctatggtccaggatcaatttgcacatggaaaccagaatgggacaatctgtctcgagatgcacaagcaaaactcaaggcacgtcgagggggtggcccatgttgggaatgaagacct

SEQ ID NO: 1213 - DNA, 289 bp, Glycine max
  unsure (1)..(289): unsure at all n locations
  Clone ID: LIB3028-048-Q1-B1-F2
ctgaattggagcagcagagaaacaatgaagaatcaagtgtgtacaggacttcacatttgatagacaaatgccgtagttcactagagcttttctttgccatatggttcgtgatgggcaatgtatgggcctttgactcacgttttggatccttcccacaagccccaaaactccaagtgctctgcatcatcttgctttcttggaatgcaatatgctactcgttccctttccaantgtttttgcttttgtgttgttgtgtgccactaatgaacaccctccttggatacaacat

SEQ ID NO: 1214 - DNA, 330 bp, Glycine max
  Clone ID: LIB3028-048-Q1-B1-F3
atttctaaggaagaggaagcagaaatcatagatcggacagagcaattaaaagtaggaaaaggtcctgcaaagaataagaatgcaaagccaccaagccccagaggcagtcatgcaagttcagttaaaaagaacaaagatggaaaagatgaagaggtagcatcttctgtttcaaatgggacttttgcttcagactctcacccaagacagcctattaaaaacagatcattgagtgacaagcaggctcgattgtccaagcaccctggaaagtctaacgcagcacattctgaagaatcaatggagaagactagaccacaattatcgaagaaagat

SEQ ID NO: 1215 - DNA, 313 bp, Glycine max
  Clone ID: LIB3028-048-Q1-B1-F4
cccttctctaacatgccatacgacagcgttctgagtcttttcttcttcgttaccctcttcacatgccttctctctgctaattcccacgatgaccatattttcctaccgagtcaactccatgacgatgactcagtgagttgcactgctaccgacccaaaccttaactacaagccggtgatcggaatcctgacccaccccggcgacggtgcctctggccggctcagcaacgccaccggggtttcttacatcgccgcctcctacgttaaattcgtggagtccggtggtgctagagttattccccttatccacaatg

SEQ ID NO: 1216 - DNA, 387 bp, Glycine max
  Clone ID: LIB3028-048-Q1-B1-F6
tgtacttggaagtaagggagaagcaatacgacaagaaggaataccttgatttttatactgaccttaccgctacatctccagccgtttctggagtgatggtatatatagcaactcccgacaagaaatctaatgtaaattatttgggccctgcatcgattgaagacattgcaaggcaaataattcaagctaaaggtcccgcaggacctaacagagattatcttttcaaccttgaaaaggctcttcatgaaataggatgcaaagacaaacatgtcattgatcttgcaaatgaagtcaggcgtattcttgcagaggaacactgaatgcatctgtgtgttatgtagttatttatgctgatcagtatgttagtaagcacaacattctgagaca

SEQ ID NO: 1217 - DNA, 318 bp, Glycine max
  Clone ID: LIB3028-048-Q1-B1-F7
taatgttctaaaaacgaacctcaaaaagaaatttcctttcttcttcttctgtcaactcggtctcatggctcaccctcgactcactaactcgctctcttcttcatcccttcgcaatctcaatcccaaacccaaactcattcctctctgcacttgctcatgccgtcccttctcttcgcaatccctaattctccattctcaccctcttttcctcgccagacccaaaccactcctccggttcgcccgccgaaccggaccgcctctcgtcctcgccgctgtcggccaagccgaaccggaactttctcaaaacagcaaccccac

SEQ ID NO: 1218 - DNA, 379 bp, Glycine max
  Clone ID: LIB3028-048-Q1-B1-F9
ccgaaatcgccgaatacgactaaaatcaaaatcacaacactgatcctttcatttgcaaattgcaaatgcagaaaggaaaagcggattctatctccatcatcagctcccttcctgaagatgttgccctcaaaattgcttcgctacttcaggtgcgggatttgtgtgccttaggttgttgttcgatgttctggaaggaactctgcttctcagattgcatttgggagtctcttgtcagaaacagatggccctcactctcttccttccatttcccttcttcttcttccactcattctcccagtttcgaggtatccactgattctcctcttttggaggaacgccctatttgtttttcaaccttgtttaaacaaagtttggtact

SEQ ID NO: 1219 - DNA, 341 bp, Glycine max
  Clone ID: LIB3028-048-Q1-B1-G1
tgaacaccttcatatccctttttatgtaaataaagctacaagaattgtgatcgtgatgttggtgatggaatccacagcaagaaaaccaacctgcttaaagcatatgtggagtttatttatcttgtagctaatgcagtataggactatatataggtttttatagggtatcctttgtgtgaaactcaagagacctcgttttcaggggattttctgtttgatgtccataaggattatcaattatgttatatatggtctgggatacagtcttgacttacagtttttaacttggttgttttcattgttatggcaatttgattatgatttgagaccagccagttttc

SEQ ID NO: 1220 - DNA, 383 bp, Glycine max
  Clone ID: LIB3028-048-Q1-B1-G10
ggagtctcccttttggttgcactggctggtttagttgtagcagttatattgaccaaactgtctttaccggacatatttgcttctatgttggctttcattcctactggttggggaattctgtcaattgctgctgcctggaagccggtgatgaagaggctcggactatggaaatccgttcgatcaattgctcgcctctatgatgctggtatgggaatgctcatctttgtacccattgccttcttttcgtggttcccatttgtatcaacattccaaactcgcctaatgtttaaccaggcttttagccgagggttagaaatttctcttattctagctgggaacagtcccaatactgggatatagttgtatttggctcaggccttgtt

SEQ ID NO: 1221 - DNA, 378 bp, Glycine max
  Clone ID: LIB3028-048-Q1-B1-G11
ggctgaaaaagatgactcctgtaaacagtgcatttgcttggaagtcatacaatgaaaaacttgcttcatcaattcaacctgattcaattgcagcatatgcactttgggagcaggtcaacgtgacccgcgattcttcagattatttgtggtatatgacagatgtcaacgttaatgctaatgaaggatttctaaagaatggacaatctcctcttctaactgtaatgtcagctggccatgttctccatgtgttcattaacggtcaacttgcaggaactgtgtgggggggattgggaaatcctaaattgacatttagtgacaatgtgaacctgagggctggcaataacaagctttctttacttagcgttgcagttggtctcc

SEQ ID NO: 1222 - DNA, 378 bp, Glycine max
  Clone ID: LIB3028-048-Q1-B1-G12
ctcgagccgaatcggctcgagcacccttctttgactgttctcccacaccacacccatgacactccttctgctccttattctcctctttcacgcggcggaagccaagggacagtggcagctcctccacaaaaacatcggcattgtcgccatgcacatgcagcttctccacaacgaccgcgtcatcatcttcgaccgcaccgacttcggactctccaacctaaccctccccgacggaagatgccgcaacaacccaaacgagttggtcgtcaaacgcgactgcaccgcgcactccatcgaatacgacgtcgcagccaacacattccgcgctctctttgtccaaaccaatgtctggtgctcctccggttcggtctctcccga

SEQ ID NO: 1223 - DNA, 114 bp, Glycine max
  Clone ID: LIB3028-048-Q1-B1-G2
cggttcaagatgaaattacacgtgcctgtttggcttgctgctacagttttggttgcaaacgaatgcaatggctcaaacaacgatatcttcactctcaagggataaactgggttt

SEQ ID NO: 1224 - DNA, 359 bp, Glycine max
  unsure (1)..(359): unsure at all n locations
  Clone ID: LIB3028-048-Q1-B1-G3
aagctgcaaaagttgcgcgttcagttgcatcatcttcacttgtaaaggctgctatatatggtagagaccccaattggggacgcattgctgctgcagctggttactcgggggtttcattccatcaagatttacttagggtagagctgggggatattttactaatggatggacgggaaccacaattatttgaccggcacgcggctagtagttatcttagaaaggctggggagactcacgacacggttaaaattcagatatcagttggcaatggaccaggacgtggacaagcatggggatgtgatttaagctacgattatgttaanataaatgctgagtacacaacataggcaaaaggaaac

SEQ ID NO: 1225 - DNA, 317 bp, Glycine max
  Clone ID: LIB3028-048-Q1-B1-G4
cttaacatattcaggtatggaaggcagataggactgctgcaaggcaatacacaagtcattgacagtgtctagtagagtttctgctaatccagcttttgcaggaatagctgcaaaggttagataccagacctttctgccatatcatagttttgaaaaccagaccggtgaataatccggtcaaggcattgacgaattgacccacatgatcccgtccctgttaagaaaattgaaaattttagtatatatatatatatatacaaaattataaataaaatttagtgtaaacaagggttttaatcgtcgaaattttcaacatt

SEQ ID NO: 1226 - DNA, 357 bp, Glycine max
  Clone ID: LIB3028-048-Q1-B1-G5
gaagaagaagatgtcgtacctgttgcctcacttgcactctggatgggccgtcgatcaagcaatcctcgccgaagaggagcgtctcgtcgtcatccgtttcggccacgactgggacgaaacctgcatgcagatggacgaggtgttggcgtcagtggcggagacgatgaagaactttgcggtgatatacctggtggacataacggaggtgccggatttcaacaccatgtacgagctctacgacccttccacggtgatgttcttcttcaggaacaagcacatcatgattgatctcggaaccggtaacaacaacaagatcaactgggctctcaaggacaagcaggagttcatcgacattgt

SEQ ID NO: 1227 - DNA, 310 bp, Glycine max
  Clone ID: LIB3028-048-Q1-B1-G6
ctaacccttccatcgtagtttccacatttctcctaccgaaaagtcaaaactacccactcacccaggtaggcacaggcagcgatggacgtaggagccggcgacgatcattccccggaagccgtcatatcgcggtggaaattcgcggtgtcgcagcagtaccagcacatgctggacaaaacgacgccgcacgttctccggcggtggatcgggtggctggtggttgccgccgtgtacgtgctccgcgtgtacttggtccaaggcttctacatcgtctcctacgccctcggcatttacatcctcaacctcctca

SEQ ID NO: 1228 - DNA, 352 bp, Glycine max
  Clone ID: LIB3028-048-Q1-B1-G7
aaagagaatcgatcgacgctgctagagaagtagaagaagatggcgggtggtgctcccaaacaattgttcggattcggagttgtggcgttgcttgccactctcattcttcctctctttatgctcgccgctgttcaggctcaatccgcagcccctgcatctgcccctgctagcgacgggtcctcccttgatcaagggatagcttatgtgttgatgttgctggctctggtactcacatacatcatccactcggcctaaattgcctccaccttctgaacttatagagcagaatatggttatgggtgtttgaaggcggtgttgtgtctgttatgatgaatcactttcgtacattgtg

SEQ ID NO: 1229 - DNA, 322 bp, Glycine max
  Clone ID: LIB3028-048-Q1-B1-G8
cataaatattccgttttgcgtttctctgcctaaaaggattgaaagatgggtcaagcactaggttgctatcaagttgatcagtcaaatgtggctatcaaggagcattttggaaaatttgatgatgtcctagaacctggatgtcattgcctgccttggtgtcttgggtaccagattgctggtagtttgtcactgcgtgtgcagcaacttgatgttcgatgtgagacgaaaaccaaggacaatgtctttgtcactgtggttgcatctgtgcaataccgagctgtgtctgagaaagcatctgatgcattctataggcttaccaaca

SEQ ID NO: 1230 - DNA, 376 bp, Glycine max
  Clone ID: LIB3028-048-Q1-B1-G9
gcattctgctatttaattccactacgtacacgcacattctcctcaaagacaacaatggcaccaacagccaagactctgacttacctggcccaggagaaaaccctagaatcgagcttcgttcgggacgaggaggagcgtcccaaggttgcctacaacgaattcagcgacgagatcccagtgatttctcttgccggaatcgacgaggtggatggacgcagaagagagatttgtgagaagatcgtggaggcttgcgagaattggggtaaattccaggttgttgatcacggtgtggatcaacaactcgtggccgagatgacccgtctcgccaaagagttctttgctttgccaccggacgagaagcttcgttttgatatgt

SEQ ID NO: 1231 - DNA, 322 bp, Glycine max
  Clone ID: LIB3028-048-Q1-B1-H1
aaatgaatcaagtgtggaccgtcttatgaagcaggttacaaatttcatgtctgatattgctgatgagttcaaaattgttgttgttgaagcaataagatcactatgcttgaaattccctttaagagagagatctctgaggaatttccgaagtaacagtcttagggaagaacgtggctttgattacaagagaacaattgtagattcaattgtgagtcgtagtagagatatccctgatgctaaggaaagtgggttgcttcatctttgtgagtttattgaagattgtgggttcacttatttgtccacacagatactgcacgtcctg

SEQ ID NO: 1232 - DNA, 338 bp, Glycine max
  Clone ID: LIB3028-048-Q1-B1-H10
gttcgtcgaagtactgatggccatataattcatgccaatattgacacagatgtcattatcgctgaagaacctccttatggttccacacaaaagcctgaagatatgtacaggattattgagcactttgcccttggaaggaggagactataactatttggtgaagaccacaatatccgagccggttggctgactgttggtaaagaattatcatcttcaaattttaataaagaggcatatgtgaaaagttttgccgacaaagatgggaaagtttggcaacgacgtgggggaagaaatccaccgccagaggcacctcatctggtggtgactactcctgatat

SEQ ID NO: 1233 - DNA, 353 bp, Glycine max
  Clone ID: LIB3028-048-Q1-B1-H11
accgcctcacgcgacaaatccatcatcctctggcatcttaccaaggaggacatgacttacggtgtcccccgccgccgcctcatcggccattctcattttgtccaggacgtcgtcctctcttctgacggccagtttgccctatccggctcctgagacggcgagctccgcctctgggaccttgctgctggcacctccgctcgccgctttgtgggccacaccattgacgtgctctccgtggccttttccattgacaaccgtcagatcgtgtctgcctctcgtgaccgcacgatcaagctgtggaacaccctgggacagtgtaagtacacaatccaagacggcgatgcgcattctga

SEQ ID NO: 1234 - DNA, 246 bp, Glycine max
  Clone ID: LIB3028-048-Q1-B1-H2
gtgtatttccctacctctcccttcaagatgcagatcttcgtcaagaccctcaccggcaagaccatcacccttgaggtggaaagctctgacaccatcgacaacgtcaaggccaagatccaggacatcgaaggaatccccccggaccagcaacgtctcattttcgccggaaagcaacttgaggacggccgtacccttgctgactacaacattcagaacgagagtagtcttcacctcgtcctccgtctc

SEQ ID NO: 1235 - DNA, 360 bp, Glycine max
  Clone ID: LIB3028-048-Q1-B1-H3
aaaatgctctagataccaaggataaagagatacaggttttacatcagaagctggacaatccagatgcaaatccttatgaaagtccctgcaccatcaccacagaatacagatatacaccacatgaagcacttctccgaaaagcaggtcaaggtgctgatgtgtcggactcagaaatttggccttcaaatttagatgcaaatgcagccacaacgcctttcacagaacaagttgaaactgaaagaacaggaaaaaatgccttctcatctgtgagaatgacactagagaagctcatggcacatcaagataagcgccaagacctttctaacttggaacagaagttccgttcagacatcaacgact

SEQ ID NO: 1236 - DNA, 358 bp, Glycine max
  Clone ID: LIB3028-048-Q1-B1-H4
agtacgggttcggtttgaattgcttgagtaccacctcctcaccttggtttgccacttcctgatccttggtcttgcggtgttgttcttgtggtccaatgcatccactttcatcaacaagagtccaccaaagatcccacaagtgcacattccagagaaacctgttttagaatttgcctctgcccttagagttgagatcaaccgggcttttgcgttgttaacggatattgcatctggaagggatctcaagaagttcttatcactgactgctggattatgggttttccctattttgggtagctgggccaacttcttgaccctgttctacatagcttttgttttgctgcacactgtgcctgtg

SEQ ID NO: 1237 - DNA, 368 bp, Glycine max
  Clone ID: LIB3028-048-Q1-B1-H6
gcctgctgggccatctccaacgtctcggtttgagtatgtagaaaatgtccaatcatctgagttgaacactggaggttcacatttgcttagtcatgtgtctccaccaaagtcatcaagcttctttgcagactttggaatggatagtggctttccaaagaaatctgggccaagctcctcgaaagtgcaaattcaggaaactgatgaagcaagaaggaagttctcaaatgctaaatctatttcttcatcccaatattttggagatcagaacaaggctgcagatgtggattctcaagctacattgtctaagttttcgggttcaagtgccatctccagtgctgatggttttggtgactcaagagacaacaaca

SEQ ID NO: 1238 - DNA, 301 bp, Glycine max
  unsure (1)..(301): unsure at all n locations
  Clone ID: LIB3028-048-Q1-B1-H7
gttgaaataaatggagtggatcaatccaggttgagtgagtgtagtggggagtccaatgctctagttaagggtattcaaattgatactaaagaaaactgctgtcaatatgatgtagaagttgaagatagcattaacaaaaaggactgtggaaatgttggtgaanacattcagcaacatcaagacataggtttagatgcttatactgaatcagtatatggaaaattggatctgaattctgtacaaaagatgtttcttaagggaatgtgtaattttggcagtactgattctgacatagttgaga

SEQ ID NO: 1239 - DNA, 376 bp, Glycine max
  Clone ID: LIB3028-048-Q1-B1-H8
aatttcctaagcccaatgagtcaaacgctgctccctgcacctgcaacctgttcctcctgcacgcgctgcacctgcactcccgtagcctgcaacctgttcctcctgcacgcgcctgcaactgcaaagtcgccagtcaaaccagcggtttgtgaaaccactgcttgaatcgccagtacacgtggcgagatccaccttacgcgaagtgcatgccatagcaatgcctaaagcacaaaggaagaagaaagcctcggtttgtggaattgagacatggagagcagcagtgggagagagagcacggggcgtgtgccactgtcacgggtggtcagatgtactgtcatggctatggtgttcccagagatgggaagaatttggctga

SEQ ID NO: 1240 - DNA, 385 bp, Glycine max
  Clone ID: LIB3028-049-Q1-B1-A1
cacaaatctcggcagtataccgacactgaaaaccagagaaaagaaaagcaccttttttccgccattaatggcccttcttgaaacttggtcatcaattgcgatgaaggactcaacatcttgacaccaccccatttcctaattgatttggattagtcgtgttggacctggatgctgctgctaatacagttgatccacaaatgagattccgcattgcattgtttctctttttggcttctcttcaagccactttaagtcaagatattgaacatggttcacttctagtagatggagctcagactaaggctgaaacaggtgataactttatttgtgccactattgattggtggcctcatgataagtgtgactataaccattgcccttgggg

SEQ ID NO: 1241 - DNA, 365 bp, Glycine max
  Clone ID: LIB3028-049-Q1-B1-A10
aaacttttctcaattgggttgaggagagtttgactcaaatttttatttttctaacgaagcagtagcgattagaagtgcaaaaattaaatgtccaacatcttcttgttgatgtttgagattcatgtatccgattctcagtgaaatcgtcttttccgggtgtatgatcaattccactgttaggcgcaggacccatttagttcaatccttctcagttgctttcctcgattggttgtactacgtttcatgatttctaaagcttccttagtcgaataatcatctactactagctattattattagtagtattattatcatcatcatcatatataataaaatctatctgcaatattatttttctgactttg

SEQ ID NO: 1242 - DNA, 358 bp, Glycine max
  Clone ID: LIB3028-049-Q1-B1-A12
ctgctgccatggtacagttacatgcagacccaagtgcagcagcgcattatgagactaccgtgtctcccatggatacattctctgagatgccctctagctctcaaactggtgcagaatatcctgctcatactgctttctctaatggaatgggaattggcctcagtaatctcacaatggatggtatggagactgatgaaaccagacctgctgaaggaagccaacatgggaacttgactaatacctattctcttaatggcatgctacacggactgtcgaggcaaactgcaaaccgtggggttctctcggagtttggtcaatttcatcagttttttccttcaagagacccaagtggatggga

SEQ ID NO: 1243 - DNA, 450 bp, Glycine max
  Clone ID: LIB3028-049-Q1-B1-A4
ttttacttcccctatggctcgtcactccttgctcttagccctcctcctcttcgccgccgtggccaccgccgcgatggcggtggccgcgtccgacgccgacgacatcctgatccgtcaggtggtgccagatgttggcgaagccgaagaggaggacaagctgctgaacgccgagcatcacatcgcgagcttcaaggcgaagttcgccaagacctacgccaccaaggaggagcacgatcatcgcttcggcgtcgtcaagtccaatctccgcagagccaggctgcatgccaagcacagatacaccggagtgtaagatgtcggttgttcctacgatccaaggccggccgagttccgccgccagttcctcggcctcaaacagtacagcatcccggtgcacgctaagaaagcgcccatcctccccaccaaggatctccccaaggatttcgattggag

SEQ ID NO: 1244 - DNA, 366 bp, Glycine max
  Clone ID: LIB3028-049-Q1-B1-A5
tgatatcgtctccagccatgtcttggtggggattccaaaaccttgatgtttgtgagcatctcacctgatgtatcttcaactggagagtcactttgctctcttcggtttgctgctggagtgaatgcctgcgagattggtatcccgcggcgtcatacatccacacggtcccttgattctcgtttgagcagcggctataatagaggccacactcattatccataataaccaaagttactggcaattgtaatgccttggatgggataaaaattgtctttgacccacagttctgtgttaacttttatagaaatgagcttgtataaaattgaatgtataggctaagctttatcctcacgggtgtaacaactg

SEQ ID NO: 1245 - DNA, 559 bp, Glycine max
  unsure (1)..(559): unsure at all n locations
  Clone ID: LIB3028-049-Q1-B1-A6
ggcgagcaccgtctcaacccaacactcctcgattccatccaatcctccctccgccgcgtccgccaagaagccaccgcctcctccgccctcgtcaccaccgcgcacggcaaattcttctccaacggctacgacatcgcctgggcccgatcctccgatgaggtcaaagagcgcatgatcctcatggactccctcctccgctccgtcgtctccgatctcctcaccctcccgatgccgaccatcgccgccgtcaccggccacgcctccgccgccggctacaccctcgccctcgcccacgaccacgttctcatgcgcagcgacaggggattcctctacatgagcgagcttgacatcaacctcgttattcccgcgtggttcgtggctctcctcgaagccaaaatcggctcgcccgcggctcggcgccacgttgtcctgaacgcggctaagctcactgccaaggangcgctgcggctcggcgccatcgactcggctcacgacagcgccgctgagaccgttgaagctgcgctcgctttaccgcggatttggtgaagagaggatgggt

SEQ ID NO: 1246 - DNA, 536 bp, Glycine max
  unsure (1)..(536): unsure at all n locations
  Clone ID: LIB3028-049-Q1-B1-A7
gagagaacttcaactgagggtgagagtgacacaaatctagggagcactactctaaaagttctattagattcttcaaaacatgaccatgcatcgcgagtcttgggcttttgtcttcggcgttatgggcaacatcatctcctttggagtgttccttgctccattgccaaccttttatcaaatctacaagaagaaatccactgaagggttccagtcacttccttatgttgttgcactgttcagtgcaatgctttggatttactatgctttcgtcaaaagggaagctgccctccttctcattaccattaacacatttggaattgttgtggagtcaatttaccttgcaatcttcctactttatgctccaaggaagcctatgcttacaatcatcaagcttcttctcttactgaatgtgtttgggtttggagccatgcttctatcaactctctagctgtcaaagggagcanagcgtcttgctatcatacgatggatttgccttgttttcaacatcagtgtctttgctgcgcctctcttcatta

SEQ ID NO: 1247 - DNA, 562 bp, Glycine max
  Clone ID: LIB3028-049-Q1-B1-A8
gcaaggaggagagtactctgccaaagactaccatgaccctcctccagcacctttgttcgacccagaggagctcacacagtggtccttctatagagccctcatcgctgagttcatagcaacccttctcttcctttatgtcactgtgctcaccattattggctacaaaaggcagactgatacaacggtaggtggcaccgactgtgatggggttggcattttgggcatcgcttgggcctttggtggcatgatcttcatccttgtttactgcaccgccggtatttcaggaggacacataaacccggcggtgacattcgggttgttcctaggacgcaaggtgtcgttgataagggcgttgttgtacatggtggcacagtgtgccggtgctatctgtggtactggattggccaaggggttccaaaaagcatactacaacaggtatggacgtggtgccaactctgttgctgatggctacaacaatggtactgctttgggtgctgagaatattggtaccttcgttcttgtctacactgtcttccctgccactgaccctaagaggaacgct

SEQ ID NO: 1248 - DNA, 367 bp, Glycine max
  Clone ID: LIB3028-049-Q1-B1-A9
caatcggacaactgagccgattcattttacaccgccaatgccacatcggtcgaatactatgcctttgctgccaatgatgacgtcggtttcagcgacggtgatggcgccgtttaattttagcgcagagtttcggtcggtgatgcaggaaatgataaggaaggaggtgaggagttatatagagttgcacaatcagaatgggatgtgttttcaggctgcggtgaatgatgggtttaggaacgcttccgtcaagcgtattggaattagcagggttgattcgtaaatagtatcatcggagaaaagaatgttcatttgctcctcctaatgggaaaaaaataagaagaatctgtttttttccctgttccttttt

SEQ ID NO: 1249 - DNA, 180 bp, Glycine max
  Clone ID: LIB3028-049-Q1-B1-B1
aaacaggcaactatgatccttttgtttaatatctagtctttaacctttaagctgttgtatgttgcacttcctcaatgtagtcttaagaacctctgaaaagaggtaaaatgacgagctaaaatttaacttttgtagcacaagatattctgatcctctaatgtatgaactctgttctcgttt

SEQ ID NO: 1250 - DNA, 322 bp, Glycine max
  Clone ID: LIB3028-049-Q1-B1-B10
aggaacatgatttaggcaactgcgaagcccaccgatattgattctctcaaaacttccaaccatgaactgaagcatcacacatgatgacttcctcgaaagacatcatgtttattaccaatcgtccaatttcagagaaaattccttgtgggcatcccctaattaaaaaaatgtcaagcgtccccaacacggtggcggaaggtcgcaagtccagcaaggcaccggacaaatccactttttctcagacatgcagcctcttgagccagttcttgaaggagaaacgtgcttctgctgattccacctttcgaattggtgggaaaatgga

SEQ ID NO: 1251 - DNA, 300 bp, Glycine max
  Clone ID: LIB3028-049-Q1-B1-B11
gtgacagacagacagtcagatcatccggctcacagaatcgtgtgatctgcaatatctccgaaggaggggaaatggtaaaggacatgcgctccatccagatcacgacaggcgcgctaatgatttgagtctgcttgagaaccatacagaccaatactgcaccagcagcatgaactcatcgcagtggacaggctagtatagtatcaggaaacagaatgtgtgacacagttactggctgtaataaagagataggttcattattgaagaatcactatgaagatggtattttataccgcgacgaat

SEQ ID NO: 1252 - DNA, 493 bp, Glycine max
  unsure (1)..(493): unsure at all n locations
  Clone ID: LIB3028-049-Q1-B1-B3
cacgttccagttaccttatcttccacctcagatacctctcttcactcttccatcatcttcctctccctccagacaaaacatcaccaccaccttcaacttaatttcccagttacactgccaccactttgattccaaataaccaccatcaccatgttcacggctagtaagctagccttcacattaacaccacctcgtccatgcactgcacctttgacaccaatctcttccttgtcctcttcttcttcttcttcttctgcttcagcttctggtatcaacttcattcagttcaatggacgccacttatgcctccgacgcaggctgtttctactctctcctaaggccactgcagatcaacaagggaaggttgaagaatttgaagatgattcaaatgttgttgatagtaaaatcctcccatattgtagcatagataaaanagagaagaaatcaattggtgaacttgaacaggaatttcttcaagcactgcaagcattct

SEQ ID NO: 1253 - DNA, 607 bp, Glycine max
  unsure (1)..(607): unsure at all n locations
  Clone ID: LIB3028-049-Q1-B1-B4
ctcgagccgcagtcttcctttcctctctctcttgtttgcattcatgtgagggtgattttgcagagagttaacagcacaaaccactcactctcttaacttgagattattttttttctttccccaaacccaaagaggcatgagttgcaacgggtgccgcgtccttcgaaagggttgcagcgagtcttgtatcctgcggccgtgtctacagtggatcgatacgcccgaagcacaaggccatgccactgtcttcgttgccaaattctttggccgtgccgacctcatgtccttcatttccaacgtccctgaaccccaaaggcccgctctgtttcaatctctgttgttcgaagcgtgtggaagaacggtgaaccctgtcaacggtgctgttgggcttttatggaccggaaactggcacgtgtgccaggcggcggttgagacggtgctccgcggcggcaccgtcaggcccatgccggagcttctcggcctagacgctcncactcccactgccgatgacgcttccgaaggggaagttacctgtaccgacaagtggagagtccgagatccgaacccgaatttcccgggaaaccggttcccgggtttgaggtccgat

SEQ ID NO: 1254 - DNA, 589 bp, Glycine max
  Clone ID: LIB3028-049-Q1-B1-B5
ggaagaggtggatgcacttccggctatatatgctactgaaagtattagattcaaatatcatgttgtttgagatttgaatctaatactttcaatcgcatgttgggaaaagataaaactgccacgtccttggaagaggtggatgcacttccggctatatatgctactgtgttaaaattctcgtcatctgcgccatatgggtcaattccatcctatcgtataccttttcttcttggtgaaccttacaataaagattctgcatctcaagatgcctccctaagtattgttcctgttgatgttggaaatgattcccaggaagaggaaaaatatagagctattgttgagattgatttggagcccagggaacccacaccaggtatagttgatgttcacattgaaacaaatgcagaaaatagtcaaatcatccaaggtcaacttcaaggaatcacagtaggcatagaagacatgtttctcaaggctattgtcccaacagacatcccagaagatgaaatacctcgatacaactttgacttgttcaatactttatgggaagcatgtggctcatcctccagcactggccgggagacatttc

SEQ ID NO: 1255 - DNA, 587 bp, Glycine max
  Clone ID: LIB3028-049-Q1-B1-B6
gatagagggatcttttggggaggagcggtgcaacaacacgactgatttaattggttgagcaagatgtcgacctcgacgaacgtggtagtcctggacaacggcggcgggctgatcaaggcgggcatcggcggcgagcgcgacccctccgccatagtcccgaactgcctctaccgccccccgtcgtcgaagaagtggctccacctccactccggcgacgaggacctcacctccgccgccgtgcgccgccccatggaccgcggctacctcataaaccccgacctccagcgcgaaatctggtcccacctcttctcttccgtcctccacataaacccttcccagtcctcgctcctcctcacggagcctctcttcactcacccctccatccagcgctcggtggacgagctcgtcttcgaggacttcaacttccgggccctgtacgtggcccactccccctccctcgtccacctccacgaggccagccgcaacaacgccaacgggctcctctcaaggcccagtgcagcctcgtcctcgacgccgggttctccttcaaccaggcctcccccgtcttccacaacttcgccctcaac

SEQ ID NO: 1256 - DNA, 611 bp, Glycine max
  Clone ID: LIB3028-049-Q1-B1-B8
ctacaatctatccctgaagaacgtccttctatgaaagatgtagttgaggcattggaagccattgaagctatccaaaattagggatggaaatgagtcaagtcgcttgtcaagggcctatggctcggcctatttaaggctcggctcggcttggcttgtttactataaatgtcaagctcaagctttttaaaaagtttttttagataaaaaggccaaagccaaactataaaaaaagcttgttaagtttctttttttagttagtattttactaggttttaaaataattaattggttaaagaggtttttaagcagacttttaaataggcttgtaggccaagccagacttttatgtaagccaagccgagcctttaaaaaaagcttatgacaggtaatgagccaagctcaagctttgcgtattcaactcaagccaagctcaagcctagtaaaacttggcatggcttgactcatttctacccctatccaaacccacaattcgcagtgtacatctcatccaccccctcgacagggtcgtaagagtatacacaaatttatatggacaaaattactagaaatcgagattgattatccatagtaatgtgctcaatttaatgggt

SEQ ID NO: 1257 - DNA, 555 bp, Glycine max
  Clone ID: LIB3028-049-Q1-B1-C1
ctccgcactccgtcttcatcaatcagcatcaccaccgctccaacacaggggaaaatgagggagatccttcacgttcagggagggcaatgcgggaaccagatcggttcgaagttctgggaagtggtgtgcgacgagcacggcatagatccgacggggaagtacgtcggaaactcagatctacaactcgagcgcgtgaacgtgtactacaacgaagcttcctgcgggcggtttgtcccacgcgcagtgctgatggacctggagcccggaaccatggacagcgtgcggactgggccgtacgggcagatattccggcccgacaacttcgtgttcgggcagtccggcgcgggcaacaactgggccaaggggcactacacggagggcgccgagctcatcgactccgtccttgacgtcgtgcgcaaggaggccgagaactgcgactgcctccaggggttccaggtctgccactcgctcggcggaggaaccggctccgggatggggacgcttttgatttcaaagatcagagaggagtaccctgacagaatgatgctcaccttc

SEQ ID NO: 1258 - DNA, 366 bp, Glycine max
  Clone ID: LIB3028-049-Q1-B1-C10
tgaggtcagtgtttgatctccttgaccgcagaactgaaattgagcctgatgatcaagatgctactcctgttcctgatcgtcttcgtggtgaagttgaacttaagcatgtagacttctcttatccaactcgcccggatatgccagtttttcgtgacctcagtcttcgtgcgaaggctggtaaaactcttgcccttgtacgacctactggctgtggtaagagctcagttattgcacttatacaaagattctatgattcaacatctggtcgggtcatgattgatggcaaggacattaggaaatacaagctcaagtccttaagaaggcacatttctgtggtaccacaggagccttgtttgtttgccacta

SEQ ID NO: 1259 - DNA, 364 bp, Glycine max
  Clone ID: LIB3028-049-Q1-B1-C11
gttgcacacggtgcaagtcggctggctttaaattgcaatgggtggcttcctcttgatattgctacgatgtgggggcgtcattggcttgaacaattgctggcacccagttctgatgccacaatgcctacattctctcattcaaattacttgtccttgccccttatgagtgtgctcaacatagctagagagtatggattgcaatcatctacagcctcctctgatgagattgacttttgtgctgtatgcctggagaggccatgttcagtggctgcagaaggatgtgggcatgagctttgtgtaagatgtgcactctatctttgctcaacaaacaatgtttcttctgaaatggttggccctcctggct

SEQ ID NO: 1260 - DNA, 418 bp, Glycine max
  Clone ID: LIB3028-049-Q1-B1-C12
cagcgcaagggttgttttcttgaatgagaggcctcagccaaggcctggtaaaggtgtcaccaacacttgtgaagtctgcgagcgcagccttcttgattccttccgattctgttctcttggttgcaagattgttgggacttcaaggaacttccagaagaagaaaaagtcagcggcaatgggatcagacacagaggattcttcgtacagcagcaacagcagccatgggaagaagaacagcttcacaccgtccacaccgcctccaacttctgttaattacagaacggccaagagaagaaagggaattccacaccgtgccccaatgggtgggctagtcatagaatactagaaattaagttagtagtaactttacggtacttggcaataaggccccctgataaattttacctcaaaacgcaac

SEQ ID NO: 1261 - DNA, 347 bp, Glycine max
  Clone ID: LIB3028-049-Q1-B1-C2
agcgaatccctctctctatctctcacacacactttctctctctctctctctcacccagatcttgtagcaatggcgagcgctcccactccacgcgaagagttcgtgtacatggcgaagctggcggagcaggccgagcgctacgaggagatggtggagttcatggagaaggtctccgcctccgccgagagcgaggagctgaccgtggaggagcgtaacctcctcgccgtcgcctacaagaacgtgatcggcgctcgccgcgcctcctggtgcatcatctcctcaatcgagcagaaggaggagagtcgcggcaacgaggaccacgtcgccgtcatccgcgactaccgccc

SEQ ID NO: 1262 - DNA, 98 bp, Glycine max
  Clone ID: LIB3028-049-Q1-B1-C5
gtggtatttaaaatgtatatatggcatcttacaagaaccattaggttctatcatttgtaaacattgatagaatagcattatcaccgttttttatgtgc

SEQ ID NO: 1263 - DNA, 581 bp, Glycine max
  Clone ID: LIB3028-049-Q1-B1-C7
gagctattggacaactagtaatgaagttgttaagactgaatctgatgcaaagacaaaactagggttcagtccagctgagatagtaattgtgaaccctaataagaagacttccactggaaatgaagtagggtaccgtttggtttcaaatgcagcggttcatcctcttctcacagatgatgattaccctcaaacacgtggtgctttcaccagttacaatgtttgggttacaccttacaacaagactgagaaatgggctggtggactttatgttgatcagagccgtggagatgatactttggctgtttggactaagcagaatagggggattgagaacaaggatattgtgatgtggtacgtggtgggaatccaccatgttccgtgccaggaagattttccaataatgcccttgttgagcaccggatttgaattgaggccaactaatttctttgagagaaatccagtccttaagaccctttctcctggcattgttaaatttccaggttgtgagaaaccctagatttgcttttgagctttgtcactttaagtacaatattgttgatcgatagattcggagaaacatt

SEQ ID NO: 1264 - DNA, 518 bp, Glycine max
  Clone ID: LIB3028-049-Q1-B1-C8
caatgctgatgcagtggatcacacatttaccatgccacaaagttccttcgagcattatccggcagaggaggtagttgacaaggtggtgaaagaggcaataagcaaaccatggctacccttgcccttgggtttgaaacctccttccccagatagtgtgttggctgagctatccaggcaaggcatttccaacatccctccaaagggttcaaattcatgctgacctggatgcatgcaccaaagagagtggttctgatggtgaccaactacaaaagggttccacctgatcaaacaccctgttgcaattatttttgttttctctaagtgtatgaggttccaacttgtagtttgagtgggaataggagttgttggagttgggaccattttgttttgtttatttggtcccaccaaaccaattttaaggtctctcctatgctgttgtcagctcgtacgtacaatactcacttaccatgatgcaacaaccaaagtattagtagacattgttcctatccgaagccaca

SEQ ID NO: 1265 - DNA, 366 bp, Glycine max
  Clone ID: LIB3028-049-Q1-B1-C9
gatagataggcctcagaagcagaacaacaatggccactgccactgtttcaatttcaacactatgcgctaccttcggaacccattgcgccatttcccacgaccctaaacctcttttttctcaacctttcagtctcaatcgctttccttctacctcttacaagctcactttatcgcctcgctcacctatttcaacccttcctaaggtctctgaatccgcggttgccgaaaccgaaaccggttcgtccgagcccgaaccggaccaaattgtcccggctcagcctccctcctgggaacccggtctcttcgctgtcgtaatgattggtggacgccaatatattgttcacccggggcgacatcttactgttc

SEQ ID NO: 1266 - DNA, 540 bp, Glycine max
  unsure (1)..(540): unsure at all n locations
  Clone ID: LIB3028-049-Q1-B1-D1
gagctattggtcaactactaatcccttgttgattcattcggttggtcatggcttcttcatcgattagcggattgacgttcaagctgcaccctctggtgatcgtaaacatctcggaccactacaccagggtcaagtcgcatatgaatccaaccgatcagccaccgcacaaggacgatgattcaactcgaggcgatggcgtcgtttcgccgctctccccgcgggtctatggctgcgtcataggggtccagaagggccgcaccgtggagatcttcaacagcttcgaactcctctacgatccttcctcccactccctcgatcgcaccttcctcgagaagaagcaagaactctataagaaggtgttcccgcacttctatatactggggtggtattcgactgggagtgatgcagaggaatcagacatgcatattcacaaagctttgatggatatcaatgaaagtccagtttatgttcttctcaatccttctatcaatcattctcagaaggatcntactgtcagtatttttgaaagtgaactgcatg

SEQ ID NO: 1267 - DNA, 375 bp, Glycine max
  Clone ID: LIB3028-049-Q1-B1-D10
gtgagtattcatccaggtgcttccttagatcatcagattcaaggtctgaaaacttgtgagcctgagtttcttgtttctactcctgagaggctattggagcttgtttctacgaaggcaattgatatttctggggtatccatgctggttattgatgggcttaatactatctgtagtgctggccacgctgatacagtaaaatccatcaagaattgtatttctggcaatccccgtgttgtgattttcaatgattgtgtcagccacatgtcgatcccaatggttcgatatcttctgacaggattaatttgtagagtctctctcaataattcaattaacagcctaagttcgtacattatccaatctgttgacgtgtgtacg

SEQ ID NO: 1268 - DNA, 340 bp, Glycine max
  Clone ID: LIB3028-049-Q1-B1-D11
ctccttcacattctccattccacaacatcaaggttctgctcatgtcggggaagaggccccggccaatgatcggaaagttgtcggagttgttggtctcgagaggccgcacggtggcacttttggacaccactggaagcccaagaggcccattagacatgaagatgatgcaatcaccaagaggcttaaaaaattatgatcttggtggcgttggtcttggaattgtggtggctcatgatcaatccaataacgaggttgctgcacgtgaagttttgcccaaacacaccgtttgcacctccaatttgaaccggtccggcccaattccggttcacgacaccaaaaa

SEQ ID NO: 1269 - DNA, 349 bp, Glycine max
  Clone ID: LIB3028-049-Q1-B1-D12
ctagaggaaagatccagatcaagaggatagagaataacagcaatcgccaggtcacttactctaaacgacggaatggccttttcaagaaggccaacgagcttaccgttctctgcgatgccaaggtttctattactaagttctccagcactggaaaactccaccagtacatcagcccctctacctcaacagagcagttcttcgatcactaccagatgactctgggagttgatctctggaactctcattatgagaatatgcaggagaacttgaagaaactgaacgaggtgaataggaatcttcgtaaggagattacgcagacaatgggagattgtctgaacgagctgggcat

SEQ ID NO: 1270 - DNA, 116 bp, Glycine max
  Clone ID: LIB3028-049-Q1-B1-D2
tggggaatttgctatacctatggtacattgttttctgtaaaagggttaacagactgtggaaaaaactaccgtaatagtcctgccttgcgtaaagcttgcaatttttgttgtcaaag

SEQ ID NO: 1271 - DNA, 475 bp, Glycine max
  Clone ID: LIB3028-049-Q1-B1-D3
caattcccaagaagctgagaggctgaggaggtttgatcccgtcacgttcggtggtggccgccgtcaccatggaaaacgacaccgtcgcagcagaggaagccagacagaaacttctgcttcatcattttaagagggttccataacttccattcatccttgatttagtttcactacctggggtttatattttctaattttaactttggtgtatagagaggaggagcatacaattctattcttgaatatgatgatagttttgatatggtggttattgctggtggtggggtatgtgtatagttcatacctgtaggttctcccaggtaatttgtttttgttattcatgtcttatggtttacaaattgaatccgttgatttttgtagttagaccacacctcagtgtttcaataaattatttagcatcagttatctatggaaaataaaaatcccatacttaactccaactaagtccaatcca

SEQ ID NO: 1272 - DNA, 452 bp, Glycine max
  Clone ID: LIB3028-049-Q1-B1-D4
catggctcaccctcgactcactaactcgctctgttcttctccccttcgcaatctcaatcccaatcccaaactcattcctctctgcacttgctcatgccgtcccttctcttcgcaatccctaattctccattctcaccctcttttcctcgccaaacccaaacctctcctccggttcgcccgccgaaccggaccgcccctcgtcctcgccgccgtcggccaggccgaacccgaacttcctcaaaccagtgcccccacggtcattcccgaagacgaggaggatttgccctcaaaatctcaacagcagcttaggaaccgggtggtttttggacttggcattgggattagtgtaggtggcattgttttggctggtggatgggtcttcgcggttgccctagctgctgctgtctttactggtgctcgagaatattttgaattggttcggattcatggaa

SEQ ID NO: 1273 - DNA, 600 bp, Glycine max
  Clone ID: LIB3028-049-Q1-B1-D5
attctcctctctgaattcctcttattcaggaatttggagagtattgatatatcaaggtaggataaaccagtagccaaggaagatatggagttttctatgattttcattgttagcaacattatgctgcttttcagttcagcatttgccaaaactgctagtcctccctctctgagcccaactccagcagcagccccggcaccagacttcgtgaacctcactgagttactcagtgttgctggtccgtttcacaccttccttggataccttgagtccactaaagtgattgacactttccataaccaagccaacatagactgaggaaggaattaccatctttgttcctaaggacagtgccttcaatgctataaataaaactaccctatccaacctcacctctaaccagctaaagcaagtgatcctcttccatgccttgccacatccctattctcgggctgaggttaggagccttagccaaaccagctctactcgcacattcgccggaggagattacactttgaatttcactgatgattctgggacagtgcacattaattcaggatggtcaaagaccagggtgagcagtgctgttcattccacaga

SEQ ID NO: 1274 - DNA, 333 bp, Glycine max
  Clone ID: LIB3028-049-Q1-B1-D6
gcagattttcgtcaagactttgacgggaaagaccatcaccttggaggtggagagttcagagaccatagacaatgtgaaagccaagattcaagatcaggagggtatccccccagaccagcagaggcttatctttgctggtaaacagcttgaagatggacgaacccctggatattacaacatccagaaggaatctaccctgcacttggttttgaggcttcgtggtggcatgcaaatcgttgttaagactttgaccggaaaaacaataactttagaagttgaaagttctgataccatcgataacctgaaggcaaagattcaggactaagaagggat

SEQ ID NO: 1275 - DNA, 554 bp, Glycine max
  Clone ID: LIB3028-049-Q1-B1-D7
gaaggtttcgggggctgttttttgtattttgccccgattctcttctctctccctctggtgttgtgttttctcctttccctttctctcttctctgtcctttgagtttttctatactctagttcgcgtcgcccaaggctcaacagcatgacaaacgattgacaactcggcaaggtacatagtgctgaacgcacgctttaatttattttaatttcgttgtttatacttaccgtattcaattttacaatatataaattaacatgatgactcgcatgtaataagtttatagtctggtaattaaagcaaaaggcaatcgatacaatttacttcatatttaggtatttgttcatagtatatttttattttatggttttagtaaacaaatggtttatttgctcgtatgtatattgtcatgttgtttaatatttttgtgattagaattgaattgaaagtcttacaattaattgactatacaatcaatttccttcagaagagattaatgtagattactactagctgtataatatatataaactatgacgtgtttattttcatga

SEQ ID NO: 1276 - DNA, 506 bp, Glycine max
  unsure (1)..(506): unsure at all n locations
  Clone ID: LIB3028-049-Q1-B1-D8
aagatactgtaattcttactcttattcaccgatttcccccaaatcttccatccaagaattttagggttttctcttccagatttcccccaatcttctccgcctctcttccttttcctttacatttctctctgattgaaacgccacacccatttgagaggatcttttttctagaggttcgttttttcgcgctaattttttccacttcttgtctaattattattgtttgtaattagtaagccccgctttatcattgagggaatgttgttagttctcgcgcggaaccaaaaagtttctggtttttctcttcctgattctggtggcgggggaacgagggttttccctttttcccccttccatttctgcgttgccctataatgatggcggtgtacttttgaaattggatgtggataatatttatatattggatgggttttcgatgattattgatgttctccatattgattgtanaagccaacccaaagtgtgttttcatggggttgttgtga

SEQ ID NO: 1277 - DNA, 407 bp, Glycine max
  Clone ID: LIB3028-049-Q1-B1-D9
tccaagggaaaaccatcgacgtgtaccagatgcaggaggggaagcaggtggcccgtgacttcacctacatcgacgacatcgttaaaggctgcctgggagccctggacaccgcccagaagagcaccgggagcggcggcaagaagaagggccccgcccagctcagagtatacaatctggggaacacttcaccggtgccggttgggaccttggtgtccattctggaaggtctgctaagcaccaaggccaagaagcacgtcattaagatgccatcaaacggcgacgttcccttcacacacgccaatgtcagcttggcctacagggatttctcttacaatcccaccaccgatctcgccaccggtctcaggaacgttcgtcaagtgctaaccccggtaataacggcctccagc

SEQ ID NO: 1278 - DNA, 104 bp, Glycine max
  Clone ID: LIB3028-049-Q1-B1-E10
gcataattattaggctctactgaagttttgttgcctatgttcaaagactgggtagctgaaacaccgttaatctttttattttgtaatattaattttctaatatt

SEQ ID NO: 1279 - DNA, 346 bp, Glycine max
  Clone ID: LIB3028-049-Q1-B1-E11
ctacactatacttgtcaaccctttgagagttagaatggctgctgctattgaaatccccacaatagtgtttccaaactcctctgcccaacagaggatgccagtggttggaatgggatctgcccctgacttcacatgcaagaaagacacaaaggaggctatcattgaggccgtgaaacagggttacagacacttcgacactgctgctgcttatggctctgaacaggctctcggtgaagctctcaaggaagctatccatcttggcctcgtctcccgccaagacctctttgtcacttccaagctttgggtcaccgaaaatcatcctcatcttgtccttcctgctttgcgc

SEQ ID NO: 1280 - DNA, 245 bp, Glycine max
  unsure (1)..(245): unsure at all n locations
  Clone ID: LIB3028-047-Q1-B1-E10
nggcattgattgggaccagaaagatggccttctcctgattgaagccgatagactcttaaaaccgggtggatactttgtttggacatcaccactcacaaatgctcgtaacaaagagaatcagaaaaggtggaagtttatacaggattttacattaacactttgctgggagcttctgtcacagcaagatgaaactgtcgtatggaagaaaactagtaaaaaaagttgctatgcatcaagaaagtctg

SEQ ID NO: 1281 - DNA, 239 bp, Glycine max
  Clone ID: LIB3028-045-Q1-B1-E1
ctccagagagaagaagaaacttaatcgatcatcacttcacttcactaatacatcatggcagacgagacccagaacaagtatgagagctctgaggttgaggtccaggatcgtggtgtttttgactttctcggtaagaaaaaggatgaagaagacaagcctcatcctcaagaggagggcatcgccaccgagtttcaaagagtcactgtctcagaccaatgagagaattagcacaacctctt

SEQ ID NO: 1282 - DNA, 357 bp, Glycine max
  Clone ID: LIB3028-045-Q1-B1-E11
ctgagaacatcaatgcatacaaagtgcgaatcagcatttgcagatgctgctcttacagcaattgaaattcagtaccggatcagtcaacatctacatctcgcgaatgaaactccatcaggtcatcaacatcgaacgcctcggcctccgcacaaagaagttatagatcgtgccaatgcactcctagctgttccacatgtgccagattttgaatcagttgagccatcagctccatctgcagtagcatcagtcaggccgatttgcctaacagatccaaaggacatggcttttggatgtggacatataactctgcaacgagtgtggcgtggtattagcgccatgccctatgtgccggaagga

SEQ ID NO: 1283 - DNA, 375 bp, Glycine max
  unsure (1)..(375): unsure at all n locations
  Clone ID: LIB3028-045-Q1-B1-E12
cgacgacctcgttggttttcctttgtaagttgtaagcatttggcaccagcaagccctgtcttcttcttcgatcagattanggcatttcatttctgcgatggccgcagcacccgctagagctcgtgccgattacgattacctcatcaagcttcttcttatcggcgacagcggtgtcgggaagagttgtctgcttttgagattttctgatggctcattcacaaccagttttatcaccaccattggtatcgattttaagataagaaccattgaactagacggcaaacggattaagttacaaatctgggatactgctggtcaggaacggtttcngaactattacacagctttattacgtggagccatgggtatcttgct

SEQ ID NO: 1284 - DNA, 404 bp, Glycine max
  Clone ID: LIB3028-045-Q1-B1-E2
ctcgagccgttcagttagaatcgacacaaaatatgaaccgctgattcctaaagaagagaagtcaactatagtatgaaaatttctcttatacatttgacaattttttcattttgctcatttgaaatgagtgtgtaaattttgctgacttaaacctgtttctcacctcaaaacttttcagcaaattttatgtctcaaccttaggtggaagaggattctggtactgattgtggtgtgggttgctttccttctagttcaagtcatcaagaatgatgtagaggcatgcagtccatggtattgggtgctttttggcttgcagtttccaattgcacttttggtgtttgggtatgaagcagtgaagttgtacaaggagcacaaaaggagaatgagcacaaggaacctagaat

SEQ ID NO: 1285 - DNA, 381 bp, Glycine max
  Clone ID: LIB3028-045-Q1-B1-E3
tgggaaggcacacgcttgtttacgcaacgcaagcgattgttagttgtattcgatggactacgatttcagaagcaggtcgggcccacaacctccgatgtaccgtccgccaccgccaccgtcaccgatgtaccgtccatcaccgtatcaacagaatcctactccttcttcaggacttggcgttagggttggtataaagccggaatataggatcacaccgccgcctcatttatcatcacttgctggagataatccacggagcaacttccaatttgattttggattggagagaaaaattttagctgaagcagagaaggataacccaaattggagcaaatttggatcagaaaatattccaactaaagtttctgattcatcaacagc

SEQ ID NO: 1286 - DNA, 383 bp, Glycine max
  Clone ID: LIB3028-045-Q1-B1-E5
aaacgctggagaggtaccagaaatgcaactatggagcgcctgaggacaatgtggcaacaaaggaagccttggagttaagcagtcaacaagaatacttgaggctgaaagcacgttatgaagctctacaacgttctcaaaggaaccttatgggagaagatcttggccctctaagcagcaaagagcttgaatcacttgaaaggcagctagattcgtctttgaagcaaatcagatcaataaggacccaattcatgctggatcagctttctgatctacaacgtaaggtatgaggtcaattatcctttttctttaattaatttgtcaatgtttaactgctattcttcttcttccgcatatttcccttgctcaccggttcaattatgcat

SEQ ID NO: 1287 - DNA, 364 bp, Glycine max
  Clone ID: LIB3028-045-Q1-B1-E6
ttacactttcagccccacacacttgcaaataataattcttttttttttcttcgtccttccatgatccatcatcgtattttctcactatccgttacggtgttaccttacactgctgtatacattttcccggacagttcataattttcctggaaaaaatattctgatttaattcgggcccagttttccttccccttatacgagaatactcatttcatattttctgcgaaatctataaataaacaaacaatgcagaaatacctaatttgcttctgaattccgatggggcaagggcaatccaaagacgagttgctctaccagcaagtcagttatgggaacgccgaaggaatcaaaacccttcacagag

SEQ ID NO: 1288 - DNA, 367 bp, Glycine max
  Clone ID: LIB3028-045-Q1-B1-E7
cttcaggagagttcctagaattcttaccagaggaagaatcctcagaacctgaaaatccatcaaaggacaacatggatgattacacacttctgctttcttcaattgaatctgaggagaatgtgaagttaccagtctcagctaaaatcaaacaccaaattggaaagcttttagtcaactccaatttcagagccatattttcaccagcaactcttggagcgattgttggctttattgttggagtagttccccagatacgtaaattgatgattggcggcgatgcttcacttcatgtgattcaagactcagttaccatggttggtgaagcagccgtcccagttataacccttataatgggagcaaacctcct

SEQ ID NO: 1289 - DNA, 382 bp, Glycine max
  Clone ID: LIB3028-045-Q1-B1-E8
cttttgcgaacagctgttagacttgagttgagtcacagtcatcgtctgttcaggatcatattcacgccccctctctctctctctctctctctctctctcttactttgtgtctttctatctctctcttcaattccaaaaccctacccccatccaattccaattcaccctcaatcatgggttctgaaggttccactgtcgtcgttcctatgaacttcagattattggaagagcttgagagatgtgagaagggaattggagatggaactgttagctatggaatggatgatgctgatgatatctacatgcagtcctggactgggactattattggcccccctggtactgttcatgaagggcgtatataccagctgaaattattttg

SEQ ID NO: 1290 - DNA, 365 bp, Glycine max
  Clone ID: LIB3028-045-Q1-B1-F1
caacaactatctctcatccttcttctttctgtatccgtaacacttgcaacacacatggctacaatcaccaacactttcatattcaaaccccccatctctcatcacccaaagcagcttctttattcccaccgctcttctctacgctttctcaccaaatttaaaaccccctccggagcgaattctcggcggctggttccgaaagccacggcggctcccggggccaagaagacagaaaagccgcacgagagagtccagcgagtccacagcgtggaggagttcgagtcggcgctcgaatccgccaaagacaggcttgtggtggtggaatacgctgccagcgacagcgaggagagcagccagatataccc

SEQ ID NO: 1291 - DNA, 303 bp, Glycine max
  Clone ID: LIB3028-045-Q1-B1-F10
taattttttttctccattagattaccaagctctgcaactttgcttctcaacatggagtatcgtctcctacccatttttactttactcaatattgcactggtggcaacccatgctgctttaccccctgaagtttactggaagtcggtgcttcctactacgccaatgccaaaagccatcactgatatcctttactctgattgggtggaagagaaaagcagctcagtgcatgttggaggtggaggcgtgaacgtgcatacaggaaaaggaggtggcagtggcaccactgtcaacgttggtggaaaa

SEQ ID NO: 1292 - DNA, 368 bp, Glycine max
  Clone ID: LIB3028-045-Q1-B1-F11
gagactgaagattgaagaacagtcgtcggctcctcgctcgcccttcgctgctgcgccatcaccgtgcccttctcaaagcgattttaacctaaccgcgttctttttttcttcagaaatcgagcataaggatttgaggattgaagtattgaacaccaaatcctttatacttgttgggcaagaagggagggaaaaaggagaaacacaaaaatgtttttccacatagtgctggagcgaaatatgcagctgcatccacgctactttggtcgcaaccttcgtgataatctcgtttccaagctaatgaaagatgtggaaggcacttgcagcggccgacatggatttgtggtggcagttacagggatagaaaacat

SEQ ID NO: 1293 - DNA, 385 bp, Glycine max
  unsure (1)..(385): unsure at all n locations
  Clone ID: LIB3028-045-Q1-B1-F12
aaaagaagatgacaatttatgtgttagcattatggctgcaattgtagctatatttactgagacaaatgcaggcgcttggaaaataggagtggatacagcattggcttccatagtttgctctggaatttttggttcattcgtgaacaatgtagttcacacatgggtactgcgtataaaggggcctgtctatgtagcaatgttcaagccactctcaattgccatagctgttgccttgggagtcatgttcctgggtgatacactccaccttgggagtatagttggagccacaattaaaaccaatgggttttatactgtaatgtggggaaaaacaaccganagagaatgtgggggaagatgtcnctggccagcaatcaccaaccacaga

SEQ ID NO: 1294 - DNA, 344 bp, Glycine max
  Clone ID: LIB3028-045-Q1-B1-F2
ctcctattgctgctgttatagtttttcatgataagatgaatggggtgaagataatttctatgcttttggctctatggggttttgcctcttatatttatcagaattatcttgatgattcaaagacaagacatgcacaagctgctactaagtcccaaaatgattcttcatgttgagaatattcaatttggtcatacctttgtcgaagtttccttttttctttttagatttaaatccttcagtacaccatttggcagctttagattttaattttccttcagtctcactgaacttgtgaggtagtatagttatgaagttattggtcattctagattattgttctctca

SEQ ID NO: 1295 - DNA, 380 bp, Glycine max
  Clone ID: LIB3028-045-Q1-B1-F3
gcgttggttgcgattgaaacggtacgatgggaagaggaaaattcaagagcaagcccaccggtcgccgccagttctccaccccggaagatatgcttgctggaacctctaaccgtcctcgaacttttagacagaaagaagctgagcatgaagaggagcctgaggaagtatctggggatgaatctggagaagaatcagaagaggaaacttctaagaaaaaaggaacacaaggagttattgagattgaaaatcctaacttggtaaagccaaagagcttgaaagctagagatgttgatgttggaaaaacaacagaactttcaaggcgtgaaagagaggagatagagaaacagagagcccatgagcgctatatgaggctgcaagag

SEQ ID NO: 1296 - DNA, 395 bp, Glycine max
  Clone ID: LIB3028-045-Q1-B1-F7
caaaaccctgaagaaagacacagccattgtttacttttcattgattgagccaaagctttgtattttctgcgataattttccattgggtggaagaaagtctcaacctttattcgaaagagcaaggatctgagttgagttgagtgatcatgtgtggtggtgcgattatctccgacttcataccggcaggtcccgccagcggggcgcggcgcgtgaccgccgacatcctgtggccgagtttgaggaagcgcttctcgaagccgctgctggacgatgatttcgaggctgggttcagagaattcaaggatgattcggaaatcgaggatgttgatgacgaggacgatgaagacgaagaggagttgaagaagaagccctttgggttctctcgctccagcaac

SEQ ID NO: 1297 - DNA, 257 bp, Glycine max
  Clone ID: LIB3028-045-Q1-B1-F8
aaggactaaagataacaatttgttgggcaaatttggactttcctgcattccccctggccccaaggggggtccccaaaataacgggtgccttgacaatgatgccaatgggaatttggacgtccccggcgaagattagaccaatgggcaaaaaaattagattaccaaccacaattgcaagggttaaccggccaagggaaaattccgaaaaaagggttaaaagggctgaaatttaaaactcaggggttaaagcacacaaa

SEQ ID NO: 1298 - DNA, 372 bp, Glycine max
  Clone ID: LIB3028-045-Q1-B1-F9
cgttcctcgtggttccttcctttgtgtctctctctcttcggacacaaagcaacgctttccatttccatgtctctgtctcttcttcgtatctactcttccccccaccttctttcctcctctctcttctttccaaccccacctctctcttctttccttcccaaattaccaaatgccccccgcactccccacattgttttatgccaccgtagggacgcctcctcagcttcgaagcagcgagtcccagaagatacagaatacgaacaacccatgaggaccagttacgacgacgacgaagaagaagaagaggaatttcttggctccttagttttgcctgaaagatgggatgtactgggtctcggtcaagccatggta

SEQ ID NO: 1299 - DNA, 358 bp, Glycine max
  unsure (1)..(358): unsure at all n locations
  Clone ID: LIB3028-045-Q1-B1-G1
ctagatcgcgagcggccgggggattgggagctggaaggcttggttcaacanatcnctcaacctcaagatttctacccactgattcgattaatcgaataaaaaaactcttggggaattgaacatgatgccttttgtggtgaatgaatgccactattatcagtaatatgtatttctttgcttgtttctcttctcgctagcccgagaaccctctttaggaatttgttcaactttgagttttaggttttgatttttatggaataataaaattctagttttgattcctcatttccttccttgccttctctattcaattaaacttgaagagaagagaatatacttgcaatattagctcacattc

SEQ ID NO: 1300 - DNA, 381 bp, Glycine max
  Clone ID: LIB3028-045-Q1-B1-G10
cgtaacagcaatggagctgtcttcaagtgcatttgtggtaatattgttggcagtcgcagctacagcagtactctcaaatgggttggatctatctttcttgcccagcgatttcctctttggcattgcttcttcctcttaccagtatgaaggagcttacaagagtgacggcaaaggactgagcaactgggataactacactcacggaccaggtagaagtgtaataatggatggaagcaatggggatatcgcgattgatcattatcatcgctacctggaggatatagatttaatggaaactttgggagtaaacagctaccggctatccctgtcatgggcaagaattctaccaaagggtagattcggagaagccaacatgctggt

SEQ ID NO: 1301 - DNA, 307 bp, Glycine max
  Clone ID: LIB3028-045-Q1-B1-G11
ctgaatctgagtcgaaactcactcaccggtatcattccctgggaaatctcagctctcccttccatcaccgacgttgatctctctcacaattcactcaccggaaccattccttcgaacttcaacaactgctcaacgctcgagaatttcaacgtcagcttcaactccctcaccggtccaattccgtcgaccggcattttcccgaacctacatccttcctcctactccggcaaccagggcctatgcggcggcgtgttggccaaaccctgcgcagccgaaggccctctccgccgccgacaaccaggtcgac

SEQ ID NO: 1302 - DNA, 381 bp, Glycine max
  Clone ID: LIB3028-045-Q1-B1-G12
tctctctctgtctctgcgatggagtttcgcgtttccgtcatttggagccttctcctcattgtctctttattctctcctgaaatcaatggtgaggcttctggttccgtcttcttcgtcgatagctccagtaatcaattccttcgcgctagatcatccaacgatgagcaaccttcaatgttgcttcaagaagttggtgctgctgtgtcagtcttgcttggttttgcacctccttccaccttttctgctgccagctcatccaagttgaatgaggttctaattcctaacccattcaagaggccccgtgctgtgtttttgctggaagtaaatggaatcaatgctcttggaaaaattgtccaggataatccaatgttcagcaattca

SEQ ID NO: 1303 - DNA, 378 bp, Glycine max
  unsure (1)..(378): unsure at all n locations
  Clone ID: LIB3028-045-Q1-B1-G2
tgttctcagaacccccaccttccggccaccgcctccgccgcgcgccgcaaagtcgccgaaaccatcgcgcttcgccgtcgtgtccttcagacagagcaccacctgcgggagaaaaccctcctcgcttctctcctccctgccgttccctaatgttccctctctacggttcgtcaggttcgttcccttcgctttcgacggcgacaccgaggccccgcaagttcaggagccggaggttcaggttcntggaccttcagatggtgctgttggtgtaaacgacagtgcaagtgataatgaggttagtgatgctgatgaaacatttgcttcanctttcttactggtacttcaatcctacaaagaagcattagctaataacgacga

SEQ ID NO: 1304 - DNA, 294 bp, Glycine max
  Clone ID: LIB3028-045-Q1-B1-G3
gaaggccccccgcacggggcccaactttggtccaaacggaaggccaagttcggttgcgggcaattcaagaagacaaagggtggtccgggtggcctgtccgaatcaggggtcctggggcgccggaatccgcccagttccagtggatgaatgggtatgaagttgaactccattccgatgacgaagacatacacattttgctacatagattggttctcaataccaactcagtgcatgcatcctttgtccctctggaaatgacatcaagtttcataagatcgcatccccaataacaat

SEQ ID NO: 1305 - DNA, 399 bp, Glycine max
  unsure (1)..(399): unsure at all n locations
  Clone ID: LIB3028-045-Q1-B1-G4
cggcggcggccccgacctcatcgtcgacgacggaggcgacgccaccctcctcatccacgagggcgtcaaggccgaggagctctatgagaagaccggggaactccccgaccctaactccactgacaacgccgagttccagatcgtgcttaccatcatcagagatgggttgaagaccgatcccaccaggtaccgcaagatgaaggagcgtctcgttggggtttctgaggaaaccaccactggtgttaagaggctatatcagatgcaggcgaatgggactctactcttccctgctattaatgtcaatgactctgttaccaagagcaagtttgacaacttgtacgggtgccgtcactctctcnctgatggtctgatganggctactgatgtgatgattgctgg

SEQ ID NO: 1306 - DNA, 397 bp, Glycine max
  Clone ID: LIB3028-045-Q1-B1-G5
gccacgctgaggcctaagatctccgaattccaagcgcctcttgatagggtctcccaccctaaccaagccagatcccgttttcaattccttctcagtttccttttctctgaaaaaacatgttgagggttgcagctagaaggctctcttcttctctctcatcttcttctccgttgcggcccaatcacgccgcttccgcttttctctctcgaaacgacgtcgtcgtcgatgaccgcagatctgctccttcctcccatccccttcttcccttcagaggttatgctactgaatccctgatccacacaaaagaaaacagcattactcctgagattccgccaactgttactgctgttaagaaccctacttctaagattgtctatgatgatcacaaccatgaaag

SEQ ID NO: 1307 - DNA, 398 bp, Glycine max
  Clone ID: LIB3028-045-Q1-B1-G6
gttttcacatgagcagcagcaagttgaatatactcaacagccagggaattctctatcacagcagcaacaagatgcagcaatgtcgttacatgagtatttcaagtctccagaggcaattcagtctttattgagtgatcgggacaaactttgccaacttttggagcagcatccgaaattaatgcagatgcttcaggaaaaattgggccaactgtagccgcatgatgatgaccaagtagaactgtttcatgtctgtaaatgtccattcattatccaaatgatgagttgcgctgatgcttatgcctcagggcattgaaattttgttaatatgtactttctgggttcatttttttatttttatttttaaatttcaatgagcacaatattgatgcccaatatat

SEQ ID NO: 1308 - DNA, 328 bp, Glycine max
  Clone ID: LIB3028-045-Q1-B1-G7
gagaacgagaggaggggttcgggtgtgagagcgagaatcagaagatgaagaaggaagacacattgaacctgataattgccaaaggttttgaatttgtggccaacaaagaacctgcaatggttccacagcccatacataacaggctaatttctccagagatttcctcagagaggcaacacggcgaatttacctttcctgatatcagcaccaccattctcgagaagatttgccagtacttttagtggcatctccaattcgccagtgaaaaggacacggaatttcccattgaacctgaattaactctggagctaatgatggctgccaatta

SEQ ID NO: 1309 - DNA, 404 bp, Glycine max
  Clone ID: LIB3028-045-Q1-B1-G8
cgaagaagacagtgaggatgaaagtgaggaggaaccctccaaaactcctcagaaaagagacagggatgtggagatggttgatgctgcctcgtctggaaagaaagcgcctaagaccccagttacacccaaagaagaaactggcgcttcaaagacactatttgttgggaacttgccatttagtgttgaacgagctgacgtggaagatttcttcaaggatgctggagaagttgttgatgttcgatttgctacagatgatactgggaagtttaaaggatttggacatgttgagtttgcaacagcagcggctgctcaaaaggcccttggattgaatggacaacaattgtttaatcgtgaactccgacttgatttagctcgggaaaggggtgcatatacccccaacagca

SEQ ID NO: 1310 - DNA, 274 bp, Glycine max
  unsure (1)..(274): unsure at all n locations
  Clone ID: LIB3028-045-Q1-B1-H1
gtgctttaactaaccagctgtgaaggcttgtcggttgtgtagtagtagtttacaactttacatacataagtgataagtccttcactgaaagaaagcactgcattaaggccaagtcaccactctcctcttccattggtggatcnttttttttctctcttttaatagggaaaccattggtgtgtgtttcagctttgctgatccttctgttgtttctgccaatctctgttagtantttagaccttttgatatacgaagccttcaattacaatgcttt

SEQ ID NO: 1311 - DNA, 368 bp, Glycine max
  unsure (1)..(368): unsure at all n locations
  Clone ID: LIB3028-045-Q1-B1-H10
ctccgccctagacatgtcgataatctcgtacgacagcgcccacgcggacaaggccgccacgttgcgcaccgangangagctgatgtccatgtacgagcagtggctcgtgaagcacgggaaggtgtacaacgcgctcggcgagaaggagaagcgcttccagatcttcaaggacaacctgcgattcatcgacgaccacaactccgcggaggaccgaacctacaagctcggactgaaccggttcgctgatctcaccaacgaggaatacagggccaagtacttgggaaccaagatcgattccaaccggaggctcggaaagaccccgagcaaccgctacgcgccacgtgtcggcgacaaattgcctgattccg

SEQ ID NO: 1312 - DNA, 418 bp, Glycine max
  unsure (1)..(418): unsure at all n locations
  Clone ID: LIB3028-045-Q1-B1-H12
tacgcattaactcaactctgaattcggctctagaaaatggcggtgcctctactctcgaagaagatcgtgaagaaaagggtgaagaagttcaagaggcctcagagtgacaggaaaatttctgtcaagacaaactggcgcagaccaaagggtatcgattcccgtgttaggagaaagttcaagggatgcactttgatgccaaacattggttatggttcagacaagaagacccgccactatctccctaatggttttaagaaatttgttgttcacaatgtgaaggacttggaactgctcatgatgcacaacaggacttactgtgctgagattgcccacaatatatccacaagaaagaggaaagatatagttgagagagccgcgcagcttgatgttgttgtgacanacaaaacagccagattac

SEQ ID NO: 1313 - DNA, 406 bp, Glycine max
  unsure (1)..(406): unsure at all n locations
  Clone ID: LIB3028-045-Q1-B1-H2
gggatgtgtcttcacatatgatgctgttggttcctatgagagggttggatatagctctcagggttctggatccacacttattatgccatttcttgataaccagctgaagtctcctagcccactcctgttacctgcgcaggatgctgttactccattgtctgaagcagaagcagttgatctggtcaaaactgtttttgcatctgcaactgagagagatatatacactggagataaggttgaaatcgtcgtcctaaatgccagtggtattcgtcgtgaatacatggacctaaggaaagattaatgctttacagaaatttactgttggagatnacagacttggattgagaatgtttgaaatgcttctagaattttaaatgacatagtgggtttttcacatgaggtgaaa

SEQ ID NO: 1314 - DNA, 298 bp, Glycine max
  Clone ID: LIB3028-045-Q1-B1-H3
caaccgaaaccgggtccaacttgttccaaaatttaaaaagcaattggtttaatggttcaacccctgcgcaatcaataaccatgattgggaattgccctccctttaacaataaccttggggctggttcaagtcccaagtttaacctgcaagcgtccttttaacaatttcctccttttctgaataaagcctggtgtgctttggtaagtggtcaagtttcacataaattcggttgaccgcgtggataaaatagacgctgaacacactagtattcgtcgtgaatacatggacctaaagaaaa

SEQ ID NO: 1315 - DNA, 305 bp, Glycine max
  Clone ID: LIB3028-045-Q1-B1-H4
agagtcttcagtttctcctcgttgttcttcgctttcctgttttcaatttcgattctttcgttaatttaataagatgtttgggagggcaccgaagaagagcgataatacgaggtactacgaaatcctcggcgtctccaagaacgcttcgcaggatgatctgaagaaggcttacaagaaagccgccattaagaatcaccccgacaagggcggtgatcccgagaagtttaaagagctggcgcaagcttataaggttctgagtgaccctgagaagcgtgagatatatgatcagtatggtgaagatgcgc

SEQ ID NO: 1316 - DNA, 390 bp, Glycine max
  Clone ID: LIB3028-045-Q1-B1-H5
attgaaatctagttatatggatgataaggacaaccttgcaatatactatgtggtaataccttgtgctgtgctgtccttgttaattcatccaacaacccggcatcatccacttaataggattctctgggcattttgtgtttatcttgaagctgtttctgttctccctcagctgcgggtcatgcagaacactaagattgttgaaccattcacagcacactatgtttttgctcttggagttgcaaggttcttgagttgtgcacattgggtcctccaggtattagatactcgtggacgtctactgactgcattgggttatggattgtggccttctatggttcttctatcagaaattgtccaaactttcattctggcagatttttgctactacta

SEQ ID NO: 1317 - DNA, 403 bp, Glycine max
  Clone ID: LIB3028-045-Q1-B1-H6
ggaaacgttatcacaaattggattgttcctccgaacagtgaaccctcacctaacaatcagaacccaggatttggtgaaacgatgaacagtgataggaaaattggggttgccttggacttttccaaaggaagcaaaatcgctctgaaatgggctattgacaatcttatcagcaacggtgacactctctacatcgtccacaccaagccttccggaggaagtgaatcaggaaatcttctctggtccaccactggttcacctctgattccattgtcggagtttcgtgaaaaggaggtgatgcgtcactatgaggtggatactgatgctgaggtgttggacttgcttgacaccgcttctaggcagaaacaggtgaatgtggtggcaaagctatactggggggatgcaa

SEQ ID NO: 1318 - DNA, 357 bp, Glycine max
  Clone ID: LIB3028-045-Q1-B1-H7
cgaccttattttggagccgcggtggcggtagcggtggccggcgattgtagcggcgtaggagcaagaaatggttttatgttgtgaggaagattgttaagctgtgggaatatgtcattgagaagcatagtccgtgaactcaaggagatgagagatggaataggaagcacatcaaagcggggtgcagaaagcaagcatcggctcagtcggacaaagtcacatgtagctccagatgttcttgcaactccatttgaacctattcaacagggacaatgggcaaatctaccatcagaattgcttttggacataatccagagggtcgaagagagtgagacatcttggcctgcccgtgctgttgtt

SEQ ID NO: 1319 - DNA, 396 bp, Glycine max
  Clone ID: LIB3028-045-Q1-B1-H8
gccttgtgtcaaggcaactaaagcttctctcgctttgcaagagagggaggagtgagtgagatggaaggagtgatacacagaacagtggaagtgaatggcataaaaatgcacatagcagagaaaggagagggtccagtggtgttgttcctccacggcttccctgagctctggtactcatggcgccaccagattctctctctcagctccctcggctaccgcgccgtcgctcccgatctccgtggctacggtgacaccgaggcaccaccttcaatagacagctacacttgctttcacatagtgggtgatctcgttgcgcttatagactctctgggtgtccaacaagtgttccttgtggctcatgactggggagccctcatgggttggtatctgtgcatg

SEQ ID NO: 1320 - DNA, 384 bp, Glycine max
  unsure (1)..(384): unsure at all n locations
  Clone ID: LIB3028-045-Q1-B1-H9
ctcgagccgaatcggctcgagcaggtgatgcgaggaacatacaagggtcgcgaggggaaggtgactcaggtctaccgtcgaaagtgggtgattcacattgagcgcataacccgcgagaaggtgaatggttccaccgtcaacgttgggattcacccctccaaggttgtgctgaccaagctcaaattggacaaggaccgtaaggccattctcgatcgcaaggccaagggtcgcgccgccgccgataaggagaagggtaccaagttcgctcccgaagatatcatgcaaaccgttgattagtctcttttgcccccttatcatacaaacaaattttctctatgggttttgctaccctttttctattgcangattttggtttttcttgtg

SEQ ID NO: 1321 - DNA, 251 bp, Glycine max
  Clone ID: LIB3028-046-Q1-B1-A10
gcatgaaacatgaagctttttttgttgacttttgtgaagtttgtgttttgaacctatgtagtctgctgttgtcctcacacaagaaggcataacatattttagcttggcatgcagatttatcaatcttgtgtgaattttttgccgtagcttttaaagttctaaccatccttgatgatgtagcatattgcttaagtgtgtattatgtgtcttaaggtagttgcgtaatgaagtagtgatttatttcgctccgc

SEQ ID NO: 1322 - DNA, 375 bp, Glycine max
  Clone ID: LIB3028-046-Q1-B1-A11
ctcgagccgctcgaactgcagggaaattccatcaacggtacgattccttgggacgttggacactgccagaagttgattttactgaatctgagtcgaaactcactcaccggtatcattccctgggaaatctcagctctcccttccatcaccgacgttgatctctctcacaattcactcaccggaaccattccttcgaacttcaacaactgctcaacgctcgagaatttcaacgtcagcttcaactccctcaccggtccaattccgtcgaccggcattttcccgaacctacatccttcctcctactccggcaaccagggcctatgcggcggcgtgttggccaaaccctgcgcagccgacgccctctccgccgccgac

SEQ ID NO: 1323 - DNA, 380 bp, Glycine max
  Clone ID: LIB3028-046-Q1-B1-A12
ggacgagatccctctctctcccattccagatctcgccatcagattcaccctttcattttaagcaaagtcataacttgaagaaggttcatggctgctccaccggcaagggctcgtgccgattacgattatctcataaagcttctcttgatcggtgacagcggtgttggaaaaagttgcctcctcctgcgtttctccgatgggtctttcaccactagtttcatcacaactataggcattgattttaagataagaaccattgagcttgatggaaaacggatcaagctccaaatttgggatactgcggggcaagagcggtttcggacaattacaactgcttactatcgcggtgctatgggcatattgctagtctatgatgttac

SEQ ID NO: 1324 - DNA, 393 bp, Glycine max
  unsure (1)..(393): unsure at all n locations
  Clone ID: LIB3028-046-Q1-B1-A2
ctcgttcgctatggccactgttctcagaacccccaccttccggccaccgcctccgccgcgcgccgcatagtcgccgaaaccatcgcgcttcgccgtcgtgtccttcagacagagcaccacctgcgggagaaaaccctcctcgcttctctcctccctgccgttccctaatgttccctctctacggttcgtcaggttcgttcccttcgctttcgacggcgacaccgaggccccgcaagttcaggagccggaggttcaggttctggacccttcagatggtgctgttggtgtaaacgacagtgcaagtgataatgaggttagtgatgctgatgaaacatttgcttcanctttcttactgttacttcaatcctacaaagaagcattagctaataacga

SEQ ID NO: 1325 - DNA, 357 bp, Glycine max
  Clone ID: LIB3028-046-Q1-B1-A3
gaaaaatgtcgaagctgatcttcgtgttcctttcgctcattcctcttctctgcacctccttctccccagagagaccctcagatcgacgcgtcctcgttttgctcgatgacttcgccatcaaatcctctcattctctcttcttcaactccctcaaatctcgcggcttcgatctccaattccacctcgcagacgaccccaaaattgcgctccagagatacggccagtacctctacgacgccctaattctcttttcccccaccattgaacgttttggaggatccattgacgcggctgcaattttggattttgttgattcgggtcatgatttgatcgttgctgctgatagcaatgcatctg

SEQ ID NO: 1326 - DNA, 395 bp, Glycine max
  unsure (1)..(395): unsure at all n locations
  Clone ID: LIB3028-046-Q1-B1-A4
agttcattctctttgcgcagttccctacctctcctttcaagatgcagatcttcgtcaagaccctcaccggaaagaccatcacccttgaggtggaaagctctgacaccatcgacaacgtcaaggccaagatccaggacaacgaaggaattcccccggatcagcaacgtctcatcttcgccggaaagcagctcgaggacggccgtaccctcgccgactacaacatccagaaggagtcaacccttcaacttgtccttcgtctccgtggtggcatgcagatcttcgtcaagactctcactggcanaaccataaccctagaggtcgaaagctctgacaccattgacaacgtcaagggccaagattcangacaacgacggaatccccccagaacagcaacg

SEQ ID NO: 1327 - DNA, 377 bp, Glycine max
  Clone ID: LIB3028-046-Q1-B1-A5
catcaacttgttcggtggcagcagctgatcatgcaggaaactacagcacttggcaaagtactactgatttcgttgatttgaagggaacaaggtcttgtgctgagctggagactgataataacttgagttttcttgatgctgagaagccacagcagagtgaaagtggtagcatcttgatcaattccaccttacaaatgatgggttttggcaagtcatcttcaacttcatcgaattggaatcaatctttattagggagcggttttgattctgtgcttcaagaagaaacaggcataggtggtggcagccaagtttccaccgttgatgctttgaagccaatgaaccaagaattttccttggatcagcagagtctgaattct

SEQ ID NO: 1328 - DNA, 389 bp, Glycine max
  Clone ID: LIB3028-046-Q1-B1-A6
gtcgagggactcagcttcttcttcttcttcttcttcttcttcttcttcttcttcttcctcttctcgttcttctctcatccattccatggagcttcagaggcgtccagatcagtgcctcccggtgaggaaagggctgaagaggaagctagaggaggagttcgatgacgacccacagatctccgctcctcccaccggtgacgctcgcgacgccctcctctctgacgttaaggaacaggtttccctcctcgattccaatttctcctggaacgaacacgatcgtgccgccgccaagcgcgccacgcacgccctcgccgatctcgccaaaaacgaggaagtcgtgaacgtgattgttgaaggaggcgccattccggcgttggttaagcatctcc

SEQ ID NO: 1329 - DNA, 391 bp, Glycine max
  Clone ID: LIB3028-046-Q1-B1-A7
cgtgacttgcagcaattcccaatggcttccgtttccaagctctcaacgccaaatccacttgcttccttatcagaagcgcttcgcccccgagattctcgcttcctcaccttcaaaccttcttccatcgcttttaatcacaaaactaacctatccgcttccctccgatccattcactcgctccctcttaaaacctccttacggatcaaatgctcccaaacagatgggaatggaagtcctgcaaagaggacagtgcttcatgatctttatgagaaagaagggcagagtccatggtatgataatctctgcagacctgttacagacctgcttcctcttatagcaagtggtgtcagaggcgtcactagcaaccctgcgatctttcagaaagctatct

SEQ ID NO: 1330 - DNA, 391 bp, Glycine max
  Clone ID: LIB3028-046-Q1-B1-A8
cttgttccttctccttgtgatcttcttcaaccttcagagtgagaaaacacattcagaaaccacgtttctctcttcttcttcttcttcttctttttcttctctcgaggtcattattaagtattcaccatggaggcaccatctcccaccaaacccaacgacccaacaaaaccttccaacacttccaccacccttagtctggaggccggcccggcccaagcgagcccactccgaaaaatgtttgccgtggcgtccatcgccgccggcatacagttcgggtgggctctccagctctctcttctaaccccctacgttcagcttttaggagtcccccacgcggcggcctccttcatctggctctgcgggcccatctccgggctcgtggtacaggcca

SEQ ID NO: 1331 - DNA, 292 bp, Glycine max
  Clone ID: LIB3028-046-Q1-B1-A9
ttaagaatggcactttctcctattcgttcttctactttctcttcatcatcagctattggtacattacctgtgtaattcctcctaacagggactccttaactatcctcccaaaggacttctaatccaagacatgtccaaacgttttcaacacggtgaaatctgtattaaaatctgctgtggccaaagaacctcgcattggagcttctattgttcgcctcttcttccatgactgcgttgttcaaagttgtgatgggtcaatactacatgatgacactccaaacttccacggggg

SEQ ID NO: 1332 - DNA, 370 bp, Glycine max
  Clone ID: LIB3028-046-Q1-B1-B1
tggagacttgcagatagacttcatgtattatgtgaattccgaactcctggtggcatttcagtgtgatcatcaagcttctttcaagtacaaatataagttcctcagagcaacaacttctaatatgcctagcagtgttattaaagaaaatagaggaagtaagttaagcattgggagaggtggaatgttaaaagtccagcatctggtttcaattgccaaaccatctgtgtcacacccatatgctgattcggttggctatcagcaaccaagtagaatagctcatattgaattctttgtgaaaccagatgaaagtgaggactgagtgaatgattattagttactataaagactccgtcaagttttgctatgcaaa

SEQ ID NO: 1333 - DNA, 380 bp, Glycine max
  Clone ID: LIB3028-046-Q1-B1-B10
ctccaaacccaccacaccaccattattcatatctcattctctaacctttcactctgccttactcactctctactttgctcatcatcgtagatgaaccaacacttctagtctctcttactttataaccatgtaaaaatgagtcacctaatgaaaaattagtagcttcttgttgtgctttttattttgtttgtgttgagataaatttgtttgtttgtttggtattgttttgtgttttatgaattatttgatgggtgaagaaggagaagtggtgagaaagcaaggacaaaggggtgttggtggagataagtggtacttgtatagctgcttacaagactgtaaatattggtgctgtttaatacacgagactagttctctttcga

SEQ ID NO: 1334 - DNA, 384 bp, Glycine max
  Clone ID: LIB3028-046-Q1-B1-B11
agaagagggggtggaaggtgctggatttgatgatgagaaatcactacttatgtcacaaatgagcctcgagaaaaggtttggtcagtctgctgtctttgttgcctctacactcatggagaatggtggcgttcctcagtctgcaactccagaaactcttcttaaggaagctattcatgttatcagttgtggttacgaggataaatcagaatggggaagtgagataggatggatctatggttctgtcacagaagatattcttactggattcaagatgcatgcccgaagttggaggtctaattactgcatgcccaagctcccagcgtttaaaggttctgctcctatcaatctttcagatcgtctgaaccaagtgcttcgatgggcttt

SEQ ID NO: 1335 - DNA, 383 bp, Glycine max
  Clone ID: LIB3028-046-Q1-B1-B12
ggcggggctacccgctgagtttaagcatatcaataagcggaggaaaagaaaaaaaaaaaaaaaagaagggaacttattgcaagcgagggaaagaaaagaaaaagaagcaaagtcaacttttgctatgtttggtttggctgggacctttgtggaccaaaagaatcgtctactagatggatagggaccttttctgtaaatttgacacaaaaaaaaaaaactatgaaatagtagtactatacttactttttttttattcttgtttttccaacttaatttactagacattcatttactctcagcaatcaaaaaataatttaaatttttataaaattggataaatggcatgaaattggttggactttaggccacccacctatttattg

SEQ ID NO: 1336 - DNA, 374 bp, Glycine max
  Clone ID: LIB3028-046-Q1-B1-B2
tgaggagatgatgataacgtgacgaattatgtgaagtccgaactcgtggtggtatttcaatgtgaatatcatgcttcgttcaagtataggtatgagttcctcagagcatcaacttctcatatgcctagcagtgttattaaacatgatagaggaagtaagttaagcattgggacaggtggaatgtgaacagtccagcatctggtttcagttgccaaaccatctgtgtcacagccatatgctgattcggttggctatcagcaaccaagtagaatagctcatattgaagtctttgtgaaaccagaggaaagtgaggactgagtgaatgattagtaattactataaagagtccgtcaagttttgcgatgcaaaccatt

SEQ ID NO: 1337 - DNA, 278 bp, Glycine max
  Clone ID: LIB3028-046-Q1-B1-B4
aaaggaaggggctttttggttaagtcatgggctccgcagccacaggttctggcccatcaatcaacgggaggattcttgagccattgcggctggaactctatactggagagcgtggtgaacggcgtgcctttaatagcctggcctctgttcgcggagcagaggaccaacgcgtttatgctcatgcatgaagtcaaggtggcgctgaggcccaaagttgccgaggacactggacttgtccagagccaggaaatagccagcgttgtcaagtgcctcatgga

SEQ ID NO: 1338 - DNA, 379 bp, Glycine max
  Clone ID: LIB3028-046-Q1-B1-B5
atcttgtcaactgaattgacaaatttggccttttcaaaaactgataaaaaaaaaacttatatttatatattcaacttctcttttattcgatttttcttcctgtctctttctttattttccattgatcataactattaatttcacctatataccctaaaaaggatgtgtatggttaatattttcatatgttataacttttttaaacacaattaataatcagtcacttaaaacttcttcatttgatattatatgcattcatcccaacagaatgtgcatttcttaattctaggatgctaatttattgaaaaggtcattcttaaataaataaatgtattaaaagttttacataaccagtaatcaaaaataaactaaagacatg

SEQ ID NO: 1339 - DNA, 388 bp, Glycine max
  Clone ID: LIB3028-046-Q1-B1-B7
aacgcagagataataagctccatactgcaaaaggcgactctgaaggaaacaaccttgtagaagatatgtcaactgaattgcacatttatactgacttcttgaggcttgtactagaaataataaatgcaatcctgacttatgcactacctcggaatcccgaggtagtgtatgcaataatgcacaggcaggaagtctttcagccattcaagaatcatccacgcttcaatgaactgattgataacatttatactgtattagattttttcaatagtcgtatggatgctcaaagagaggatggtgactggtcagtccacgaagtgctacaagtcataattgtcaattgtcgttcttggaggggtgatggaatgaagatgtttactcaactgcg

SEQ ID NO: 1340 - DNA, 383 bp, Glycine max
  Clone ID: LIB3028-046-Q1-B1-B8
tgaaaatttacacacatgcacacacacacacagaaattgagcgtgaaaaccactagcattttacagggctatatacttaaatagtgttgaattttacacttgtgttgttccctttagtactcgagacatttttcgttctgtcgtatccctttctacggctctatagtttcctctgaaccttttcttacttgccttcctaaagcttccttccaagcccttggcacatgatggaatgttcactattgaatcgagattctctgcatcgcaaaatatttagtttctattttagatcaccaaatttaattttagcttaccctacactttatattggatctgttggtgtcctatcatttgcagtatatctggattgtatcgataaacag

SEQ ID NO: 1341 - DNA, 381 bp, Glycine max
  Clone ID: LIB3028-046-Q1-B1-B9
gtgttgtgtccctcttttaagctatttccttctcttaacacaattggttgtgccaattgccatagtcaccaaccaattaacaaaggtatatatatcatcatatcatcaccaaatgaaaaatattgggttgttttttcttgtggtggtggctacttttgtggtggcagccacagctggtagcttttaccaagactttgaaataacgtggggtggtgagcgtgccaaaatctatgagaatggaaaccttctcacactctcccttgacagagcctctggctctggctttcgttccaaaaaagagtacttgttcggaaaaattgacatgcagctcaagcttgtgcctggtaactctgctggaacagtaactgcctattatttatc

SEQ ID NO: 1342 - DNA, 289 bp, Glycine max
  Clone ID: LIB3028-046-Q1-B1-C1
ctctgctgagacaacaatggcgatggctttcaaaatggccactactgggatgtgggtgacggatgagtgcaagaactctttcatggaaatgaagtggaagaaggttcatagatacatagtcttcaagatcgatgagaagtcaaggcttgtcaccgttgataaggtgggtggtcccggcgagagctatggtgatctcgccgcctccttgcccgacgatgattgtagatatgccgtattcgactttgatttcgtcaccgtcgataactgccgcaagagcaagattttcttc

SEQ ID NO: 1343 - DNA, 309 bp, Glycine max
  unsure (1)..(309): unsure at all n locations
  Clone ID: LIB3028-046-Q1-B1-C10
gcctctctgttccaaaaccctaatccttcgtcttccaaggagatggctgattctcccctcgcaaggaactcaaggtcaccttccccatggaaagctcagtcgagatcgagatctaggtcaaggtcgagatctaggtcgaggtctaggcctagacaaaggccaagatcgcgttctagaagtcgtggcaagtcaaggtcaccaattcgtggnaggtcaaggtcaccaattcatggaatgtctgaacctacaaatcctggtgacacactttatgtaactggtctatcctcgagggtcaccgaaagagaccta

SEQ ID NO: 1344 - DNA, 385 bp, Glycine max
  unsure (1)..(385): unsure at all n locations
  Clone ID: LIB3028-046-Q1-B1-C11
ctttggtacatgaaaagcctgatgctgctcctacaatggacaggatccaaccaggtttggatgattctgaacgggatttgcaggccactagacatgcaagactgagtaaacatggtcatgaaaaagcactctctgttcaggaagatgctacagaagccgttgtattaaaacaaaagtctacaagacggaagcactcaaaatcaagatctactcaagatgatgccagtaatgaagatgctgaagttgtgagaaaaccaaggagtaggagacgagatgaacaaaaacgtggcctgcaaattttgtttgatgatgagcggcacaaaaacgatgaagaggaaagggtaatagatagattactgatccattatagcanaaaaccatccat

SEQ ID NO: 1345 - DNA, 168 bp, Glycine max
  Clone ID: LIB3028-046-Q1-B1-C12
cacgattatgtttatcatggtgcttttgagagggagtggaatacggtgaaacatatcaggatttcctcttttctaacatgttgccaacaaagaaaaaaaggaatgggcaaacattacaaactattttctagaaagcacatgaatgccatgcgacaataatactgactc

SEQ ID NO: 1346 - DNA, 396 bp, Glycine max
  Clone ID: LIB3028-046-Q1-B1-C2
tggggatcgaagccggggagcggaggtgcggcgtcggcgcagaacgaagccatagaccggcgagagcgtctccggcgactggctctggagaccatagacttggcgaaggatccctatttcatgcgcaaccacctcggaagctacgaatgcaaactctgtctcactctccacaacaacgagggtaactacttggcccacactcagggcaagcgccaccaaaccaacttggccaaacgtgccgctcgcgaggccaaggacgcccccgcccagccccaaccccacaagcgcaaagtcactcttcgaaaaacagtgaagattggacgccctgggtatcgtgtgaccaagcagtatgacccggagacaaaacaaagatctctcctattccagattgaatat

SEQ ID NO: 1347 - DNA, 372 bp, Glycine max
  unsure (1)..(372): unsure at all n locations
  Clone ID: LIB3028-046-Q1-B1-C3
aaatacgggtaccgtacttcaagtaggcgacggtattgctcgtatttatggtcttgatgaagtaatggcgggtgaattagtggaatttgaagagggtactataggcattgctttgaatttggaatccaaaaatgttggtgttgtattaatgggtgatggtttgatgatacaagagggaagttcagtaaaagcaacaggaagaattgctcagatacctgtaagtgaggcttatttgggtcgtgttattaaatgccctggctaaacaattgatggtcgaggagaaatttcagcttcggaatctcgattaatcgaatctcctgctcncggtattatttcgagacgttccgtatatgagcctctccaaacaagact

SEQ ID NO: 1348 - DNA, 124 bp, Glycine max
  Clone ID: LIB3028-046-Q1-B1-C4
gtactgttagagagtgtgatgatgagggtcatagtccgtagacaatttgttattctttgtatttatctttggaggtctaccggaaatatttttaatgaaaatttttaaaattgctttgattaac

SEQ ID NO: 1349 - DNA, 304 bp, Glycine max
  unsure (1)..(304): unsure at all n locations
  Clone ID: LIB3028-046-Q1-B1-C6
tctcaaccggcccaatttagcataagcccagcatggccaccgcaacagcagcagccacctcgtccttcatggggacgcgcctcctggaggcccactccggggcggggcgggtgcaggcccggttcgggtttggcaagaagaaagccgccgccccgaagaaagttttccagggggtcgggctctagctccgataggcccctgtggtatccgggcgccaaggcgcccgagtacctggatgggagccttgtcggagactacggattcgacccatttgggctanggaaagcccgccgagtacctgcag

SEQ ID NO: 1350 - DNA, 111 bp, Glycine max
  Clone ID: LIB3028-046-Q1-B1-C7
gagagaataaggaataattttctattgatgatttagtgggttggttttgtaatgtatgtaatgaggaaaatgtagtggtattccatttatgtgttgttgtagttgttttgt

SEQ ID NO: 1351 - DNA, 365 bp, Glycine max
  Clone ID: LIB3028-046-Q1-B1-C8
gtttctctctcttagttcaaatttcgaattcggaagcagcaaaactaaagcccaaaaacccataccaagatgctcctccgaagccactgttgctacctcggcataatcgccgggctagcagtgttcctcgcaacgacgtcgttcgccgacgcgcaatcctgcaacggcatcctcgtctcatacgcctacaccggcggcctgcggttgccgcccaacgtctccgactcggctaagcagccgtaccggttcgagtcgacggtgacggttctcaacaacggcctcgacgagctcaagtcgtggaaggtcttcgttgggttcgaccacgacgagttgttggtctccgcctccaatgctgtgctcgccga

SEQ ID NO: 1352 - DNA, 352 bp, Glycine max
  Clone ID: LIB3028-046-Q1-B1-C9
gtaactgaaaagtttgagactgtcaagaatgaagatagggaaaacacacaaacattcaatggtcgttaagcaaataacgtaccacttgttcatggatgccttcacccatatatccggcaatatacatcaaatttacaaacaacgtacaaagagcaacacacatccactgggtggaacagcatacctaaacttgataaatgatgatgatccctttctacatggcatcaactacactgctatgcgcccatcatagcgcttccgtgatatggatcatctatctggtggggaaaagacagttgctgcacttgcattgctattctccatccatacttcatagccttcaccattcttt

SEQ ID NO: 1353 - DNA, 287 bp, Glycine max
  Clone ID: LIB3028-046-Q1-B1-D1
cttcagcttccattctacgctctcccaaccgccagtctctgaccagaagagcgaaccacaacggaagagtaaattaccgtcaaccgaatagccgtttctccgtcaaagcctccgccaaagagattgcctttgaccagcattcccgctctgctatgcaggccggcattgacaagctcgccgacgccgtcgggctcactcttgggcccacggggaggaatgttgtgttggatgagtttggaagtcctaaagtggttaacgaaggggtcacaattgctcgcgccatcgag

SEQ ID NO: 1354 - DNA, 382 bp, Glycine max
  Clone ID: LIB3028-046-Q1-B1-D10
cgaagcaggaaccacaatctgggttgatctatgagtaccggcaccactagaatgctagtgaaggagatgttgcaactctcttcttccacacttcacttctcttctgcgtttcgcgccctttctcctcctttgccattctcgattcaattgcgacgctcgcgccgccctgcaattcgatgcgcttcctcagactccgacaaagtatcgtctcggctgtcgcaggttcagcaccttcttcaacaggccgaacaccgtgctctctccgccgaccagggcccacctcctaaaatcaccttagatcatgttacggtgagctttgccagaagtggaggacctgggggtcagaatgtcaataaagtgaacactaaggtggacatgcgct

SEQ ID NO: 1355 - DNA, 384 bp, Glycine max
  unsure (1)..(384): unsure at all n locations
  Clone ID: LIB3028-046-Q1-B1-D11
gtcccaaagagctaacaagagattcaagaccggcatggctaatgaagaggaacagaaaaaccacctcttcggcatcaaagatctcggtcacaagactctccttcagagtgatgcactctatcagtatatacttgaaaccagtgtctatccaagagagcacgagtgcttgaaagagatacgcaagatgactgcaaaacacccactgaacatcatggcaacaccagcagacgaaggacaacttctgagcatgcttgttaagctcacgaattcaaagaacgccttggaaattggtgtattcactggttactctctgctctccactgccctggctcttcnccctgatggaaagatcttggctttggatgtgaatcgcgaatactatga

SEQ ID NO: 1356 - DNA, 378 bp, Glycine max
  Clone ID: LIB3028-046-Q1-B1-D3
cgctcgagcgccgcccgataaaccacctctccgttctcctctcccccaaaattcaaattccaaatacctaagattcgctaaaatcccttccccgtcgccacatcgcatgaacccttgaattccgattcggataggcatgtccggagcggccttgtcgccgccgacgaattcgaagtcgctgacgcagacggtgagcgggtcgcacaagttcgtgatcgagggctattcgctggcgaaggggatgggagtggggaagcacattgcaagcgacgtgttcaccgtcggaggttaccactgggcgatctacttctaccccgacggcaagaatcccgaggacaattccgcctacgtctccgtcttcatcgccttggccagcga

SEQ ID NO: 1357 - DNA, 381 bp, Glycine max
  Clone ID: LIB3028-046-Q1-B1-D4
caaggtttctgattttggcctggccaaattattgggtgctgggaagagttatgtcacaacaagagttatgggaacttttggatatgtggctcctgaatatgcaaatactggccttctaaatgagaagagtgatgtttatagctttggtgttttgctattggaaggaattactggtagagatccagttgactatggtcgaccagcaaatgaagtgaaccttgttgattggctgaaaatgatggttggaaacaggagatcagaagaagtggtggaccccaacattgaggtgaagccatccaccagagctttaaaacgggctctcttaactgctttaagatgtgtagatccagattctgagaaaaggcccaagatgggccaagt

SEQ ID NO: 1358 - DNA, 295 bp, Glycine max
  Clone ID: LIB3028-046-Q1-B1-D6
atggaattgggaagttggtcaatctggaatcacaaaggcttagttcatgtactagattagtggagttaacatatgcaatcacaagtcttattatactgaacttccttgtcatctctgagagcgtaagccttagtaagttaccagagatcatgggagagttgcgtactttagaaaatctcaattgcagaagttgcataagatgtgagtgatttgccatactcactcaaggagcttgagagcttatccactgtggtgtatgacgaagagagtgctgcattatggtaaccttgcaaaa

SEQ ID NO: 1359 - DNA, 378 bp, Glycine max
  Clone ID: LIB3028-046-Q1-B1-D7
ttcagttccaaacaaaacccatcaaagtctttctccctcagtgatcatatattcattcagttctatacaaaatcctcaaaaactcttcctctctgccatgaccatggaatacagaaccttagaactcaacatcatatccgcaaaggacatcaagaatgttaatctcttctccaagatggacgtatacgccgccgtttcgctctccggtgaccctctccaccctcagggcgccaccacccacgtccacaaagacgccggcagcaaccccacgtggaactaccccgtgaaattctctgtcaacgaatcgctggcgaaggaaaatcgtttatctcttgagatcaagctcatctccgaccgcaccctcggcgacaccgtcat

SEQ ID NO: 1360 - DNA, 391 bp, Glycine max
  Clone ID: LIB3028-046-Q1-B1-D8
ctctctctatctctcacacacactttctctctctctctctctcacccagatcttgtagcaatggcgagcgctcccactccacgcgaagagttcgtgtacatggcgaagctggcggagcaggccgagcgctacgaggagatggtggagttcatggagaaggtctccgcctccgccgagagcgaggagctgaccgtggaggagcgtaacctcctctccgtcgcctacaagaacgtgatcggcgctcgccgcgcctcctggcgcatcatctcctcaatcgagcagaaggaggagagccgcggcaacgaggaccacgtcgccgtcatccgcgactaccgctccaagatcgaggccgagctctccaacatctgcgacggaatcctcaaactcctcg

SEQ ID NO: 1361 - DNA, 305 bp, Glycine max
  Clone ID: LIB3028-046-Q1-B1-D9
ggaaacccacgcggaccccagcaacaacaacaacatataaacactggtcaaatgcaacatctcacccctatgggaagaggttcacggaggagaaccaccaggggcgactttgtgccagggaaaaacttcctgacgcactagttgttcaccagtgtggtaatagtaattgcctgcatatttggatccgaatctcaactctagtgatcttgttaccggcgtctgctttgcctccggtgcttcaagatacgatcctttgacacccaaaataacgtcagttctatcgttatctactcaactagacatgt

SEQ ID NO: 1362 - DNA, 300 bp, Glycine max
  Clone ID: LIB3028-046-Q1-B1-E10
aaaaaagggaagtcctcagcacttcaactctgctgatctctctgctcgaaactacatcgttttacacatctcgtcaagtcaaggttacactcattgagggtcgtgcttcaatagaactgcatttcacgtttgcgcctctatgtgtcacaaacactgaatgcctctcattagctcatatgtgaaggtctgcacaggacagtcgtgatgccgatcttcaatctcctaatggtcaattttaagttagagattaggatgtccccagatgacataggggctctgatattgagtcgtgtcatttga

SEQ ID NO: 1363 - DNA, 378 bp, Glycine max
  Clone ID: LIB3028-046-Q1-B1-E11
gaattctccaaacactctagaatttgcatgcactgttcttcatacaatggcattacgcgagcttcttatgatggggatattgctgctggtatgtcttgctaaggtttcatctgatgttaacatgcaaaaggaagaagatgaagaacttcgctttcctaatcaccctcttatcgtgagagacgggaacagaaggctaatgcaagacataggtaagcaaaacaaagtattttggatgctttattaggttaactttgatcctgtgcttccggttttaacttttagattcttactaactagtctccttagtgacattttttaaaaaaaaatttaaaaattatcataaaaatcacatgaaagcctaaaaaaacacaagcaatg

SEQ ID NO: 1364 - DNA, 381 bp, Glycine max
  Clone ID: LIB3028-046-Q1-B1-E12
aaacaataccaactggaaaaagaagggatttcaaaaaccgtgattggttggaaaccacctttttcttctacgatgagaacaagaaccttgtgagtgtgaaagtgaaagattcccttgactcgaaaaagatggggtatgtttaccaagatgttgacattccatggctccagaaaaggactaaacccaaaagaactagaaaagctaagcaggtggcgttcacacaacagtttggcggcattggtgcagcaatcgctgctgagactgggccaagttccaagtttcctctcactttattggactcaaaggtaactctacttgttaaaaggccaaagcagttgaggagcaagaaggacaaggaggaagacgaagaagtgttggtga

SEQ ID NO: 1365 - DNA, 396 bp, Glycine max
  Clone ID: LIB3028-046-Q1-B1-E3
aggagctggtgcaaggctcaaacattgtatcatccttgatgacgttgaaatcaaggaaaatgctcttgttggtcatgcaattgttggatggaaatcatctattggtcgatgggcctgtgttgaggctagtggagattacaatgcaaagctcggggtcacaatacttggtgaatctgtgactgttgaggatgaggtagtggtttttaatagcattattttgccacataagaccctaaatgtgggtgttcaggatgagattcttttatagaacctccacagctcccattgttggctttctaatttccttttgattgtatttgcagtgacttatgttttaatatctagtttggaggccccaaaacagtggatataatcgatttttgtctcaaaattgaa

SEQ ID NO: 1366 - DNA, 381 bp, Glycine max
  Clone ID: LIB3028-046-Q1-B1-E4
ctcaagtgcctaaccgcttcggcggcgccacctcagctccgccgtcaactccggcggcgcagcacgagaacatcatgtcctcatccgacgccgccgatgcactctcgcacctcctcgatcgcctcgcgcctacacactccctcgccacgcgcctcgtctcgccttcttccgcagccgccacgtgtcctcgactgcctctcccttaacgacgtcctctcctgcgtttccaaactcggttactctcagttcaccggtcactcagtctcctccgaactcgccaactcggccgagtcagaagcgctggcactattcgacctttcgcaagactacaatcagtccttgttccccaaaaactggcctcttggctactgaaacgatcaa

SEQ ID NO: 1367 - DNA, 305 bp, Glycine max
  unsure (1)..(305): unsure at all n locations
  Clone ID: LIB3028-046-Q1-B1-E5
agaagcatcagtagaagcccagtaagaggcaggaatgggagaagtgtcaatagaagtccagtgagaggcaggaatgggagaagtgtcagtagaagcccagtgagaggcaggaatgggagaagtgtccgtagaagcccagtgagaggcaggaatgggagaagtgtccgtagaagcccagtgagaggcaggaatgggagaagtgtcagtagaagcccagtgagaggcaggaatgggagaaatgtcaatagaacccctgtgagaggcgggaatggganaagtgtcagtagaagccctgtgagaactcg

SEQ ID NO: 1368 - DNA, 385 bp, Glycine max
  Clone ID: LIB3028-046-Q1-B1-E6
agtggcttcgtcgccttccctcgcaagaatgctaactcatctccgccgcacccccgtcgcatgcggtggtgccacctccaaacatttcctcgtcctcaagcaattcagctccgccgccgccgtcgccgtttcctctgtgtctgattccgacccaacacttccctcttcttccgaatcacagaattaagatgttggaatatcgagagaacaggttgcaaatggaaccattaaaattcagtagtgcttattcatcaaatgaggaattagattctctggaatttaggaaagtggtgtgcaaaggatattttgatgatatatcatcaatctatgtgggaccacgttcaagaagtatttcaggaatcactgaaaatggttactacatcat

SEQ ID NO: 1369 - DNA, 365 bp, Glycine max
  Clone ID: LIB3028-046-Q1-B1-E7
gaagaatcagaagatgagtcaaccaataagaaagataagcttctcatgggaaaagaagcctggtgtctccaaagtaacaactactactcatggtgaaaatccgattccaaaagaaggagaatttttgggcaagttgccaacaacaacttggacaacaaaagaatcaagtggtactcaacaacaaaaaaaaccaccaccctcttcttgattttcaaattcaacttcctccttgtgcttttcagcctcccttttatagaacttcctccaaaaggggcctttgggttcaagacaaagacccttcccataacagcttctaagagagtgcaccagggactcatcagaaacctagtgctaaggtgaacaaa

SEQ ID NO: 1370 - DNA, 330 bp, Glycine max
  Clone ID: LIB3028-046-Q1-B1-E8
cccacgggcatttatgctccccctaaccgtgatcacattgctctggcgttggcaatggcttaccaagaggtcaccaatcaccataaacagcgccctcctatcaacgatctcgggccaaatgataagcttcctagctgattcacttactgctacttaccctctcagggttttgggcttgggtccttaagcaacttgttagaacagcttcagcatgcatattgcatatatggatgtaatcattttcacatggagttaaaaagaggtagaggagatcgagttgtaggaaataaactacttttgcaaataataacataccacattaatcttcac

SEQ ID NO: 1371 - DNA, 381 bp, Glycine max
  Clone ID: LIB3028-046-Q1-B1-E9
acacggtatcttatcccataggtcaccatgatccttccattacaagttgcaataacgtgatagaaatggctttgagatacactttcttttatggttagctatatattctgaacccgatcccccctcaccagacttttaaatcacataattcttttttttatttcttggtggaaaacagattgtgcatctaattccaaattcacccataaaaatacttccttttgctcaccagccatatattatgatggagggagatgagaatattcaggcatcatcaaagggaaaatatgttgaaagcttcaactgctcggaggcaccaaggaagaaaagcaagaagatagaagacaagaggaggtttagtgatgaacagataagatcact

SEQ ID NO: 1372 - DNA, 373 bp, Glycine max
  unsure (1)..(373): unsure at all n locations
  Clone ID: LIB3028-046-Q1-B1-F1
agaaagcacttccgacatacactccagagagcccagcggatgccaccagaaacctgtctcaaacaaaccttaatgcccttgcaaaggttcttcccggtctgcttggtggcagtgcagatcttgcttcttccaacatgaccttgctcaaaatgttcggggacttccaaaaggatactccagcagagcgtaatgttagattcggtgttagagaacacggaatgggagctatctgcaatggcattgctcttcacagccctggactgattccatattgtgcaaccttctttgtattcactgactacatgagaagtgccataaggctttctgcgctgtctgaagctggggttatttatgtcatgacncatgattcaat

SEQ ID NO: 1373 - DNA, 380 bp, Glycine max
  Clone ID: LIB3028-046-Q1-B1-F10
aaacggtacaagggcttcaaagaagggaagcaaaggattctcgtggcaacagatttagttggaagggggattgacatagaacgtgttaatatagttattaactatgacatgcctgattctgctgatacttacttgcacagggtgggaagagctggcagatttggcacgaagggacttgcaattactttcgtgtcctctactgctgactctgaggttcttaatcaggtgcaatctaggtttgaggttgacataaaggagcttcctgaacaaattgacacttcaacatatatgccaaactgatgacgctttggaactattaggaggcagatctcgaaggatctttgcggattggggaatggtgtggttggcaactcatcaat

SEQ ID NO: 1374 - DNA, 88 bp, Glycine max
  Clone ID: LIB3028-046-Q1-B1-F3
aaggggctccaattatggaattggccccttttgtgggtgcttatggggggtataagggtgatactggtaactggtcacggtctttgta

SEQ ID NO: 1375 - DNA, 368 bp, Glycine max
  Clone ID: LIB3028-046-Q1-B1-F4
cagcaacaaacaaacatcttttaccttaaacaacaatggccgatgccgaggatattcaacccctcgtttgcgataatggaaccggaatggtcaaggctggttttgctggagatgatgcaccgagggctgtgttccctagcattgtggggcgtccacgtcacactggggtgatggttgggatggggcagaaggatgcgtatgttggggacgaggctcaatccaagatgggtattttgactctcaaatacccaattgagcatggaattgtgagcaattgggacgacatggagaagatctggcatcacactttctacaacgagcttcgtgtggctcctgaggaacaccctgtgcttctcaccgaggcacct

SEQ ID NO: 1376 - DNA, 386 bp, Glycine max
  Clone ID: LIB3028-046-Q1-B1-F5
ctcgagccgcacagctaagcttttggaacttagagttaagcagttaccttcctccaactataatatctcatccaatcaaaacccttttctcaattgtctctctctctgactcactccacaataagtgtcgattttttcctaaataagtgaaagtgtagttacacctttttttgtgtgtttaccacttttgagtgccacagagttctgagtttcataggagaaaaaaaatgacagaagaacaaaccaaaacggttgagtcagaatcagtaacaccaccacctgctgctgctgctccttcacaggttcctcctgctgctgaggctgaacatgttcctgaggctccaaaggatgtgactgaggagaaatctgtaattccagtgccttct

SEQ ID NO: 1377 - DNA, 388 bp, Glycine max
  Clone ID: LIB3028-046-Q1-B1-F6
ggtttctcaattaagaggtgaaaattctaccttgttaaagcgccttactgatgttagtcagaaatacagcgactctgctgttgacaacagagttttaaaagctgatgttgaaacattaagaacaaaggtgaagatggccgaagagaccgtcaaaagaattactggattgaacccattgcttcatgccatgtctgatatatcatcactgggcctgccatcatttgatggaagaagcccttcagacacttcagctgatgcagctgttcctgtgcaagatgatccacatcatcacttctatcaacccacatctactaatcctattcgcagtcatgattcgatagtcaacaatggattggggggcatttcttcaattgaaaatgtgcagcag

SEQ ID NO: 1378 - DNA, 388 bp, Glycine max
  Clone ID: LIB3028-046-Q1-B1-F7
cagacctaaacagagggtaacaaaacaagcaaacaccatggtgattaagtctgtgttgttcagcttcattttccccccgccaccttctctggtggtttgggggttgactgtgacaagcttcctgatactggctaatgctttcttgtcagaaattagagggaagcatttgaactattcaaagttttggaatgctaatccctctgcagaaaagcaggtcaagttgtctagcaaagctggcatgcttttgctgtacactcctgcttttcttgctggccttgcatccttctgggtctttcctcatcaagggctcagattcaccatccttcaatctgctgttactctgcactacttcaagagggtctttgaggttctgtttattcacaaatat

SEQ ID NO: 1379 - DNA, 372 bp, Glycine max
  Clone ID: LIB3028-046-Q1-B1-F8
atttcacccaaatataaatagcaatggaagcatttgccttgacatattgaaggagcagtggagccctgcgctaactatttcaaaggtgttgctctcaatttgttccctgttgacggaccctaatcctgacgatcctttggtccctgaaattgcccacatgtacaagacagacaggaacaagtacgagtcaactgccagaagctggacccagaaatatgccatgggttaagtgaccttgtggtatgtttgagggagagcctttctactctcagtgtttaggtctctcagcccttgtaggaatatttgtcgttttaaatcatgattaaggcccctccagttgaagatgaatgggggaaaacgtttctcctgctg

SEQ ID NO: 1380 - DNA, 338 bp, Glycine max
  Clone ID: LIB3028-046-Q1-B1-F9
ggacactatcaaatttattttaaaatatagatttctggtgaactgtttttgaataacctttttcccccagattttgggtaatatattttagggtttctaatggaaggttcgttttctttttttatttatttgcaatgttaagactcaggcctgatggtagggttgtaattgtagtttgagttctgtattatttgttaactgcaataattaagtgtgaacctgttcttgtgattaaaatcacaatatggcgggcttaatgaaagcattaaaatgtcaaattttcttcagaaacttgattcagaggttcaaaagatggaaagtgtatggcttttttctgc

SEQ ID NO: 1381 - DNA, 389 bp, Glycine max
  unsure (1)..(389): unsure at all n locations
  Clone ID: LIB3028-046-Q1-B1-G1
aaacaaccgcgctaaggttggaacttggaggaacttgtgtctgtgtgtccttttttccagagtcatggctatggctttgagtctctcccaattccctgttcgtgggtctgtttctttgcccaaaagaagactacccagaagaagcttttgcattangggcatgtcagaaacctcttccacttcttctgtgagcacccaacaagaacaaccaacttctgataatgcttcttcagtgacaattgctcctccccctaacttcaagccccctgagcctaaacgctttgcaattaggcctgataagaccagtgaagtgtttggagctttgcttcctttgatctttcgttttgccactggagttttcgtttctgggtattcnttttcaattgttt

SEQ ID NO: 1382 - DNA, 382 bp, Glycine max
  Clone ID: LIB3028-046-Q1-B1-G10
cgaatcagaacacgggcatttcgatccacaattgtaggatcatggccacgccggatcttgaagcatccaagggtagctaccccacttatctgggacgtccttggaaactttacgctagaaccgtcttcatgctgtcctacataggggaccacgtgcatccacgtggctggctcgagtggaacacttcctcctttgctttagacacgtgttattatggtgaatacatgaattatgggccgggttcagctctgggccaacgggttaattgggccggctatcgggccatcaattcgacggtggaagcgtctagattcacggtgggccagtttatatcgggctcgtcctggttgccctctaccggagtggcgttcattgctgggtt

SEQ ID NO: 1383 - DNA, 384 bp, Glycine max
  Clone ID: LIB3028-046-Q1-B1-G11
agacacaccaataatttgccaagaaaccgaacccaacccaaccgcaacaacaatggcgttccaggatttcgacatgatcaccgagaggcggagaaacgagcagaggctcaagatgaagaagaagatcctcatcagcgtcgtctccgccgtcctcctcgcgtgcgtcgtaggcgccgcggcattcgtcgttgtccaaagaacaggcactaatgcaaagcacgctaccccaatgccacagaacaccgccacgccgcacgtggatcagaactccaggatggtgaaaatgatctgtggatccgcagaatacaaagaaaaatgcgaaagcacgctcgaagaagccctaaagaaggaccccaaattggctcaacccaaggatcttatcat

SEQ ID NO: 1384 - DNA, 384 bp, Glycine max
  Clone ID: LIB3028-046-Q1-B1-G12
ggacatacagatggtcatatggcactgcttcatgcaaatactcattccttgatagtaggtgatcactgtgtgggtcagggaagtgccaccttggacataaaagctggtggaaatatgtctgaatacttccaaaccacgtacaaatttttggagctttcaccacatgctttaataccaatgcatgggagagttaatgtctggccaaagcagatgctgtgtggatacctaaagaatcgtaggagtagagaagctaatattgtgaaggcaattgaaggtggagcaaaatctttgtttgacattatagtatatgtatattctgatgttgaccgccgtgcctggattgctgcatcatcaaatgtgaggctccatgtggatcatctagcc

SEQ ID NO: 1385 - DNA, 334 bp, Glycine max
  Clone ID: LIB3028-046-Q1-B1-G2
gcaaaacaatgatggctggtgttagtggcagtagcactactcccttattgtgctctttgttctttatttcttccttactttttgcttcctgcacccatgcctcctcccaggcacctcctccaattgtggatggactttcatgggatttctataggacgagctgtcccatgcttgaagggatagtgagcaagcatctccagaaggtgttcaagaaggacaatggtcaagctcctgccttactcaggatcttcttccatgactgctttgttcagggttgcgatgggtcgatattgttggatggaagtccaaatgaaaaggatcaaccggcaaacat

SEQ ID NO: 1386 - DNA, 403 bp, Glycine max
  Clone ID: LIB3028-046-Q1-B1-G3
aatcattgtacccggatcgggcctgctctcacgtcagaggaacttgtgttgatcccgcgagttctcggttcgtgagaacatgctaactgagtcgacaatcacgattgattccatcatgtcaaatgacatgagtagtctgccgaccctctttctatgatagcgttcacggaatcctaatctgatgaaatcgcgacagcgccttgacacgtatggaggagttgtgacaacctgtggagaatcatggtgaggttcacgttgtagaaggtgttgatcattggatcaagatactagacgaatcaaggtaatatgttgattacaagtcatccatatcaacactacatatcacttctcttaagtcccacaatacgatggaggctaccttgggcaaaaaactctccacaaa

SEQ ID NO: 1387 - DNA, 337 bp, Glycine max
  Clone ID: LIB3028-046-Q1-B1-G4
gtgcaccttaaccacaacaaacacaattcgtgtcttattacttattttcctctaaatctaacccaactcaacccgtgctcatccctaattatgggaaactgcgtgttcaaaggtttacaccacggcgtttctgaaaacatgatggtgaaagtggttacctcacactgaggcatcatggaactcctctctctcataaccgtggagtgcataaacagcgaattccccggccacggcatcgtccgaagccgccgcgacatgttttccgaaccgctccccaaaaaccgagcaactcccccgcggagaagtctactacttcctccctctaaacccttcttct

SEQ ID NO: 1388 - DNA, 388 bp, Glycine max
  Clone ID: LIB3028-046-Q1-B1-G5
tgatagttgtgtgcaattatttgaattcaagaatgtctcaacccgactcgttggtggctgagattgaggtgaaaacctctgctgatcacttttacgacaccttgaagggtaagaaacagcatcgtattcatgatgttgcccctcatcatatccataaggtggaagttcatgaaggtgagtgggataaatctggcaatatcaaggtgcttacattcgctgatggggacactgttgagaccttaaaggagagagttgattttgatgatgaaaacaagaagataacctacaccatattggagggtgtcatgttgaagtactataagagctacaaggttatcgttcatgttttaccaaaaggtgatgagcacagccttgtgaagtggacttt

SEQ ID NO: 1389 - DNA, 388 bp, Glycine max
  Clone ID: LIB3028-046-Q1-B1-G6
acacattcaagtcatttaacttccagcggagcagttgggcatatgttttcatcttctcctggatattcaactgatcttcatcactcatccttttcatctcatgaaaaacaacctagaaatactcattttatttcacagtcattaagtaacatggcttcattgccattatcttattcttcaaatagtgaaccgataccttctacaacatcaaccccttattccaatggaaacagtgtttcctggcatacagattccttgcctagctttctcgatttccctgccaatacctccattggtaatagtcaagtagaaagcagtgactgcaatatcatggcaactgaagagtattctaagcgaaatgattggcaagagtgggctgaccaattaa

SEQ ID NO: 1390 - DNA, 392 bp, Glycine max
  Clone ID: LIB3028-046-Q1-B1-G7
gtgatacagaagtggaatctagccctatgaagccaaggagatcacggaaatcaaatttcagtgaagggagcagcagcttcaagagcttgtcggccatgggctcatttggaaggattgccggccgcaattcagggaaaattacagatgaaaagcaatgataaagtggtggtgattattttgattccaagccggcaggaaattatataaatggtggttttaatttctgtttgataactgcctatattggtatcttatttgtattcattttctcacaattgtccaaagatcactacggtcatgagagacagctgcttgtagtcggtttgagttttttacttctgtaatctgattctcagttggaattggagaatcagaacagttatgtattcccc

SEQ ID NO: 1391 - DNA, 384 bp, Glycine max
  Clone ID: LIB3028-046-Q1-B1-G8
tttgcaacaaaaactaggcttctcatatctactaatcctttgcttagccactcttgtttcttcacacaggccttatacaactccaagtgtcacacgcttgactgattcttttcctcgtgtccaagttgatagtgctttttctaagacctttggggccaaaaatatccagtttcttagtaatgggtccacggtcacactggctcttgacaaaatctcaggctcaggcttggtatcacaaagcagatactcctatggattcttcagtgctgcaatcaaactaccttctggtttgtcacctggagttgttgttgcattttatttgtctaattcagataaatttcctcacaaccatgatgagatagacattgaactgcttggtcatga

SEQ ID NO: 1392 - DNA, 381 bp, Glycine max
  unsure (1)..(381): unsure at all n locations
  Clone ID: LIB3028-046-Q1-B1-G9
gttatccattcacatttcacagttagcacttagcagactctgctgcagtgaggtgaggggaggtttgtttgttgtttcgtttttcctttcctttccgccagaatccgttgagaatggcgttgccggtagtcgtcgatgcagagtacctcaaggaggtcgacaaggctcgccgcgatctccgcgcactcatcgctaacaggaactgcgctcctctcatgctccgattagcctggcacgatgccggaacttacgatgctaagaccaagaccggtggacctaacggttcgatccggaacgaggaagagtattctcacggagccaataatggcttgaagaaagctattgatttctgcaaggaagtgaaggcanaatatcctaaaa

SEQ ID NO: 1393 - DNA, 353 bp, Glycine max
  Clone ID: LIB3028-046-Q1-B1-H1
gtttcagcgccacatagtcggcattttctcatcggcgctcttcgacctgactatgcatcacatttcgacttcttctccattgtcattaagtaggatgtttgggaaggcaccgaatgatatcaatcgtttcacgtagtaagatctcttctgcgtctccaagaacgcatcgcacgatgttctggataacgcttagactatagccgctattgaaactcagcgctatatggcggtgatgccgataagtttatagatctggtgcaagcttatcacgttctgagtgactctgagaagcatgagatatatgatcactatggttaagatgcacttagtgaatgaatgcgtgatgtcagtgg

SEQ ID NO: 1394 - DNA, 385 bp, Glycine max
  Clone ID: LIB3028-046-Q1-B1-H10
tttgagtcttcttgatccttctttttctccttgaactcaaacatggcagatgaggtggttctgctagatttctggccaagtccatttgggatgagggtcaggattgcacttgctgaaaagggtatcaaatatgagtacaaagaagaggacttgaggaacaagagtcctcttctcctccaaatgaacccggttcacaagaagattccggttctcatccacaatggcaaacccatttgtgaatccctcattgctgttcagtacattgaggacgtttggaatgacagaaatcccttgttgccttctgacccttaccagagagctcaagctagattctgggctgattatgttgataagaagatatatgatcttggaaggaagatttggg

SEQ ID NO: 1395 - DNA, 384 bp, Glycine max
  unsure (1)..(384): unsure at all n locations
  Clone ID: LIB3028-046-Q1-B1-H11
agaagattaagatagtgcatctcccgaaacagttgaccttgtgagatacagacacagcaccttcaattcttcatttctcaaatcgcaattcgtaaaaccataacaacacaaagtgtctcaaattcacattaaattctccctccccgaaaaggatgtcgttcgaggtggaggaggaggaggaggcgttcgagcacacgctcttggtggtgcgcgaggtgtcggtgtacaagatcccgccgcgcagcacctccggcggctacaagtgcggcgagtggctccagtccgacaagatctggtcgggccggatccgcgtcgtgtcncgccgcgaccgctgcgagatccgcctcgaggatccgagctccggcgagctcttcgccgcgtgct

SEQ ID NO: 1396 - DNA, 382 bp, Glycine max
  Clone ID: LIB3028-046-Q1-B1-H12
tgttcccagagagagacattattttccaccatttgggtcgctacctgtttcacccttccaacgatgcatgggaactaatcagcagttactatcaggcacacttggccagtgcaagtgaacggataggcttacagataagagtatttaatgctgctactactccaaagcaagcaatcatgaatctagttttaagctgcacattacagcaaaagatactgccagaagtggatttgaaaacttcagtgtcttctgctggaaaaaacatgactactgtaaaagcagttcttgtggcatctttacataaagagtacggggataatttacggagtatgtatctgaagaaaccaacagttagtggggaagtcatagaagtttatcagcc

SEQ ID NO: 1397 - DNA, 356 bp, Glycine max
  Clone ID: LIB3028-046-Q1-B1-H2
gaacaaatggctgaggcttcagcacaagcttgtgtcagtattccttccaatccctggagttctctgcaaaggggtttcagtgcataataactccctgtaatgtgcactagtaaagaccaaagtatgattattgttacattatgttacatggttgtacttgtatatacatatcttgtcccacctttgtaaatacaattgggacactactaggattgggaagaatggtctttacatttataatttggcaaatagatattgcaactacctttgtataattctatttctgaagaagcaattacaatttacaagggatggtgccatttacggcataccgattaacgacggataaagggacc

SEQ ID NO: 1398 - DNA, 382 bp, Glycine max
  Clone ID: LIB3028-046-Q1-B1-H3
gcggctatggttttagcgcagcttcttctagatttaatgaacatgggtaacgaaaaagttcacatcagtattgtggtcattggccatgtcgactctgggaaatccactaccactggtcacctgatttacaagcttggaggcattgacaagcgtgttattgagaggtttgagaatgaagctgctgagatgaacaagatgtcattcaagtatgcctgggtgctggacacacttaaggctgagcgtgaaagaagaatcaccattgatattgctttgtggaagtttgatacaacaaagtattactgcacagttattgatgcgcctggacatacggatttcattaggaatatgattactgggacatcccaagctgactgtgctgttc

SEQ ID NO: 1399 - DNA, 372 bp, Glycine max
  unsure (1)..(372): unsure at all n locations
  Clone ID: LIB3028-046-Q1-B1-H4
caaacatggcaatgaagaagctcttgtgggttgtcctgtctctatctttggttcttggagtggccaatagctttgattttcacgacaaggatttggcgtccgaggaaagcttttgggacttgtacgagagatggaggagtcaccacacggtttcgcgaagcctcggtgacaagcacaagcggtttaacgtgtttaaagcaaatgtgatgcatgtccataacactaacaagatggataagccttacaagctgaaactaaacaagtttgctgacatgaccaaccatgaatttaggagtacctatgctggctcanaggttaatcaccacagaatgttcccaggcacgccacgtgggaacgggaccttcatgtatg

SEQ ID NO: 1400 - DNA, 389 bp, Glycine max
  Clone ID: LIB3028-046-Q1-B1-H5
ccttctcacacttcccccaattcccacaccaaactctgtcttttcttctctgtacggcactctctcttccggcgttctgggggtcgcatcgccggcgattccccactctgcttctctcttcacccttcagttcaaccctctcgtcttcgcttcactgattccctcttcgaaaatgcttccgatagcttgctatggttctccttctcctaaatctccgtctcctaaagaaccctgtaccttttcttcctccgattaatcaacttcctaattatggctattcgtgtaactttttccttttcgggctacgtcgcccagagcctcgcctcctccgcctgagtacgcgtcgccaattcgcgatgtgtccaggaatgctggatccgcacgcgcct

SEQ ID NO: 1401 - DNA, 296 bp, Glycine max
  Clone ID: LIB3028-046-Q1-B1-H6
cgagtttccttatcactcaatctttgaacagccttcatactgtactctgatattaagtgtgctggcagcatggatgcaatatcacagtttggcagtgatatgcatcttcgatctacgcagaaaggattatctgtaaaacgtagacgacgagaggagttaccttgagtttgtgattattcagtttttttgatatgcttgacgcttcacacaaatacaggcctttgcagctttgtgaacgaatgcaagtttttattaaaattcaattttgaagatgcattgtgtactaataatatact

SEQ ID NO: 1402 - DNA, 387 bp, Glycine max
  Clone ID: LIB3028-046-Q1-B1-H7
ggaggtttatgcaatagaaattcaaatgtacacagagatgaagaacaacaaaaaactcaagcaactttaccagaaagcactcactattaagtcagcaattccccatccgcggataatgggaataatccatgaatgtggagggaaaatgcatatggcagagcgccagtgggctgaagcagctacagatttttttgaagcttttaagaattatgatgaagctgggaatcataggcgtatccaatgcttgaagtaagcaacaaagtgttataatttttaatttagctattagttttaaacaattttcctaacaatatatgtctgcatttcataattgttaattacaaaaagatacagttaactataaatcattaattttggcagtaactt

SEQ ID NO: 1403 - DNA, 388 bp, Glycine max
  Clone ID: LIB3028-046-Q1-B1-H8
tactgttgttgttgttgttggagaagaatgaattctgagaacaagagactcacaagaagaagcatttagaatcgaaattggaagagaagagggtatgaatgattacaaaggaagagaaggagaaagtagcgttgttgttgttcggaagcgattcaaggaaaagcaacaaccctgtccttccacaaggcccatcatcaaccaacaacaccgtcgctctgcttccctccctaacactcaatacgaggaatctgaaacagatgtcgaagtatctgatgttagtgtttcagaaggggatgacacatcttggatctcatggttttgcaatttgagaagaaatgaattcttttgcgaagttgatgatgatttcgtgcaagatgatttcaacctc

SEQ ID NO: 1404 - DNA, 288 bp, Glycine max
  Clone ID: LIB3028-047-Q1-B1-A10
aacccggaatccggtccaaggaaaggttaaacccggagcaaaaaaacttgtaacgatggtttcttccgacaaggatccacgaaaggaagtccttcaagcatggtaaatggatgatagtgatgaagatcaaagactcccccaccacagagaacccaaggagtttgtctcgttggaccaacttgctgaacttggagtccttagctggaaattagatgctgataaccatgaaaatgatccagagctgaaaaagattcgtgaagagcgtggctacacctacatggatgtttg

SEQ ID NO: 1405 - DNA, 275 bp, Glycine max
  Clone ID: LIB3028-047-Q1-B1-A12
tccaagctttttcctcgcttaagatcaccaaagagagaacctaggacacacagcacagactcacacaaagagttacacgagagatcatcatggcatcagcagcatctgggtttgtgttgtcacttaatgttgcagctgccaccacaaactcaacggtggtcatgttcaacaccaagaacaacacttctacgtttgttgtaaatgcctcagatgagcctgcagccgcggcacccgccatcggcacaaccccagctgaagctgaagcttaaccaaag

SEQ ID NO: 1406 - DNA, 367 bp, Glycine max
  unsure (1)..(367): unsure at all n locations
  Clone ID: LIB3028-047-Q1-B1-A2
gcanaactcattgttgtactgacacgtggcgggtctacagctaagttggttgctaagtatacgccagcggttccaatattatcggtggtggttccagtgttgagcacagactcatttgattggacatgcagtgatgagacgccagcaaggcacagcttgatatataggggcttgattccaatattgggggagggatccgccaaggctactgatgcagaatctacagaggtcattctcgaagctgctcttaagtccgcaacacanaggagcctttgtaagcctggtgatgcagttgttgccctgcatcgtattggcactgcctctgtcatanagatctgcatagtcaaataatatttcatgctcaact

SEQ ID NO: 1407 - DNA, 328 bp, Glycine max
  Clone ID: LIB3028-047-Q1-B1-A3
agaagaggcaatttagcttgcacatactcaagcattccaccattgtggcatagccaaggtcattttacactccaccaaatgatcatgatcatacgatcaatccccttaattttatcttttttcttatcccttttcgttactctgtaatggatcaatgcttgataatggggttgttctacaaatgtcatagatatatggcctgctgatgggtattgataatctctgaagttgaactgatgcacggttttgagatggctttctaatagagctacacttttgtcgctaatacagttgatgccctgcattcttcttggactagcgctgtcat

SEQ ID NO: 1408 - DNA, 156 bp, Glycine max
  Clone ID: LIB3028-047-Q1-B1-A4
taactttcaattcggctaatggacaaccattggtgttaaccttaaggaggcttaaaccaaagctgatagctccggcaagaccaacccctcgcgaagtgaagctactatccgacatagatgaccaagatgggttacggttccaaattccggtgatac

SEQ ID NO: 1409 - DNA, 297 bp, Glycine max
  Clone ID: LIB3028-047-Q1-B1-A5
acttgttctcgttcattactactaaaaaatgacttccaagatacaaatattaccaatcctaggcgtgttggccatgttacttctgatctcctcggaggtgttagccactggattacatggtgttggtgttggtattggtggtggattacctggtgttggtgttagcgctggattacctggtgttggtgctggattacatggtgttggtggcgctggattacctggtgttggtgctggattacatggtgttggtggcgctggattacctggtgttggcgctggattatctgccaacgc

SEQ ID NO: 1410 - DNA, 373 bp, Glycine max
  Clone ID: LIB3028-047-Q1-B1-A7
cacactttctctctctctctctctcacccagatcttgtagcaatggcgagcgctcccactccacgcgaagagttcgtgtacatggcgaagctggcggagcatgccgagcgctacgaggagatggtggagttcatggagaaggtctccgcctccgccgagagcgaggagctgaccgtggaggagcgtaacctcctctccgtcgcctacaagaacgtgatcggcgctcgccgcgcctcctggggcatcatctcctcaatcgaccagaaggaggagagccgcggcaacgaggaccacgtcgccgtcatccgcgactaccgctccaggatcgaggccgagctctccaacatctgcgacggaatcctcaaactcctcg

SEQ ID NO: 1411 - DNA, 336 bp, Glycine max
  Clone ID: LIB3028-047-Q1-B1-A8
aaaccctacgtagagagctcttcctcactctcattcgcaatggccgcagcagcacgtcctctcgtcaccgtgcaggccctcgacagtgacatggcaacggaggcctcggcaaccgtcccaatcccggacttcatgaattcttcaatcggcccggccatcgtcaacttcgtaaactcaaacatctccaagaccagccgacatccctatgcattcagccgccgcgctggccaccagacttcggccaattcctggggaaccggtcatgccgtctcccgtatcccccgtgttcccggcggcggaaccaatcgcgccggccagggagccttcggaaacatg

SEQ ID NO: 1412 - DNA, 303 bp, Glycine max
  Clone ID: LIB3028-047-Q1-B1-A9
cggtccagataacacaatcaatcggtaaccttccagaactcaaaaccccctttcaaattcatcaggtccggctatcccaaccagcctcccagctacagctacggcgcgccgccgccgccccaaccctacggtgcccatccgccatcgcaatcatacggggctcctccgccatcgcaatcatacggggctcctccgccaccgcaaccctacggcgcgccgccgcccgctcagccctactccgcctccccctacgcccaaccgtccgccccctaagccgccccctacaacaaacccccgaagaac

SEQ ID NO: 1413 - DNA, 190 bp, Glycine max
  Clone ID: LIB3028-047-Q1-B1-B1
tcacagcgtaactcaggtcccattgtttggattgcccacccactaaactgaggaatcacactcaggaacggaatcacatcgcatctccaactgcttcgaactcagtttataggagtggatttgggcacagtcatcaatcttaggatctcgcggtgactgacttgtcttctacattggataacttggagga

SEQ ID NO: 1414 - DNA, 296 bp, Glycine max
  Clone ID: LIB3028-047-Q1-B1-B10
ttcaagcagttctcttctcactttcatttctacatccctggctcggttccgtcgatgacgatggcgtttagggtgcgaaaccctgacctccgctttctcattcttctctctctcttgtccatcacttctgccaaggtcttcttcgaggagcgtttcgatgacggatggggaaatcgttgggttaaatcacattggaaaaaagatgggaacctggctggggattggaaccagacctctggccaatggaatggagacgctaacaacaaaggtattcaaaccaatgaggattacagatt

SEQ ID NO: 1415 - DNA, 252 bp, Glycine max
  Clone ID: LIB3028-047-Q1-B1-B12
caagaaaatggtgcaacctccctttcaaccctgacaaccccattattggaaaggaggatgcaccaaacaactttgcccgtggcaacaataccattggaaaggaaattgttgacctttgcttggaccgcatcagaaagcttgctgacaactgcacaggtctccaaggttttctggttttcaatgctgtgggtgggggaactggctctggacttggttcccttttgctggaacgcctttcattggactatggca

SEQ ID NO: 1416 - DNA, 370 bp, Glycine max
  Clone ID: LIB3028-047-Q1-B1-B2
cagaatagatttctactctatgattggctgctgcgactctatgaagattttttatgcatattacttgttttacatagtgggacagtttctagcctctaatctaaacgttggataactctgcaccaacgcgttctaccaagggggatatacgaaaactcaaaagagtcagttttcttttttcctatttctgataaatgttttttgagctgacattatgatttacatttttgtttcttgtataaaattcccacgcttggaaaaggattgtaatctgtttggtcagtatttttttgttatttgatccagtgtcatggagagatcatgttggtccgttggactagtggctgtgtttttcctcacttccacattt

SEQ ID NO: 1417 - DNA, 380 bp, Glycine max
  unsure (1)..(380): unsure at all n locations
  Clone ID: LIB3028-047-Q1-B1-B4
ctgaaagaaagataacaatgtggactttttgatggttgtggtggtgaggggtttttggttgtaagtgaccagcttcggggtccatgtaaaaatagcatgacagggactggaagtgtcttggttctgttggtgttgttggggatggggtctagttgaggtctaataatggaaaaaaacgatagttaggatagtgttgtgaataaaaaatgagtccaggctttggtttatgctaacttgttcttttcccaattcaatttgttcactcagctattttagcttaagttcagcattgagaacaacactttgtgcatgttcagttgtttttgctcactttatctttttaacgtnttgaaaataattctaagctatgatcattactt

SEQ ID NO: 1418 - DNA, 376 bp, Glycine max
  Clone ID: LIB3028-047-Q1-B1-B5
gggaggcgtaaattcagtgcaaattttcaacttgtcttccgactaatcaagggaatgatattcctcacttttgtctcgattcttgtcattttgattgctcttccgcatatgacagtgcaggacattgttgtttgcattcttgctttcatgccaactggttggggaatgctgcagattgctcaagcattaaaacctgtagtacgccgggctgggttttggggatcagtgaaaactcttgctcgaggttatgagattgtcatgggtttgctattgttcactcctgttgcttttctggcttggtttccatttgtttcagaatttcaaacccgtatgctgttcaaccaagcattcagcagaggtttgcaaatttctcgta

SEQ ID NO: 1419 - DNA, 350 bp, Glycine max
  Clone ID: LIB3028-047-Q1-B1-B6
catacattgtagtatcacttttgtctcggaatttgttcttttgagttatggcaagcttaaacgttgcatgtgtggttttgactgtgcatggctgtgatgagtgcaccaatgatggtgcaagccgtgtcatgcaatgatgtttctgtgaacctagcaccgtgcctatcttacctgatgcacggtggagatgttccataatcgtgctgtagcggagtgatgaacattctgggttctgccagcaccacctttgacaaacaaaccgtgtgcaaatgtcttcagcaagctgctaataactatggcatcaacgacgaatacgctcaggcactccccgcccgctgcaatgtcagcgt

SEQ ID NO: 1420 - DNA, 373 bp, Glycine max
  Clone ID: LIB3028-047-Q1-B1-B8
ctcactcacaaacacacactgaactaaaaaacatcaaaagagacatggctgagcaaaccttcatcatgatcaagcctgatggcgtccaaagaggccttattggcgagatcattagcagatttgagaagaaaggtttctacttgaaaggtttgaaacttgttactgtggaccgtccttttgctgagaagcactatgctgatttgtctgccaagcctttctttagtggtttggtggattacattatctctggccctgttgttgccatgatctgggagggcaagaatgttgttacaactggccgaaagattatcggagccacaaacccagctcaatctgagcctggaactatccgtggtgactttgccattgacat

SEQ ID NO: 1421 - DNA, 368 bp, Glycine max
  Clone ID: LIB3028-047-Q1-B1-C1
caataaacgaagtgtattattagtattgagtttgttcctccatcgcgaaattagggttcgctcacttgtcttcaatttcccaaattcaccctgcaccatccttgaatcctccaattgacacgccttttggatccatttttctccgtgaggccgtgacgcatcgcgattttgttttgggaacccgcgaaactgaatcagatagtgcggcacggaaactaggaattagagcaatggcagaagatctggtgctggatactgcaatcagagactgggtgctgattcctctctctgtgggtatgggtctcattggggtgctccgttattttgtttctaagcttatgcactcttctcaaacccctgacgccaaa

SEQ ID NO: 1422 - DNA, 391 bp, Glycine max
  unsure (1)..(391): unsure at all n locations
  Clone ID: LIB3028-047-Q1-B1-C10
ttccagctcaagccgaatcggctcgaggatcttttcataatgactgttttttatttaaggggcttatctttggcattcggtaacttttggatgcctggtatgtggagatgccactgaatcatataatgacaagtacttctttctgggttgttatcacgttattttctcttgggcagctatggccactaagactgagggaaaagtatgtggtggtagggtgcaccttaaagttgtgacctcattgatgtggtgaattgaacaacggaattgagtacagactatcatgttgtttataaaagttcaattcctatttctatcccatttttaaaatgcacaattcccttagtagtgctaatatgttnatgatcatggcttaaacttttagaatatg

SEQ ID NO: 1423 - DNA, 373 bp, Glycine max
  unsure (1)..(373): unsure at all n locations
  Clone ID: LIB3028-047-Q1-B1-C2
tatgatgctggtaatatacctctcgtctctcattagaagtgtaatagcactccacaacttgattaacaacaagatgcttaacaaggaacatgaacgggcagaagactcgaaaacagttacagtgccaagtgcagctgcataagttttgaggggtttgtgatggccggagctctaaatgtcatttgaatacatggatttgagattattacaccttttttctatttctgctangagtagagaacttacacctaacatggcataacgatccttttatgctgttccggtgcttaatgtattttactcttcaatactttgctcattttccttgtttggtagctttggtgacagccgttaaaagaattcaatattagat

SEQ ID NO: 1424 - DNA, 179 bp, Glycine max
  Clone ID: LIB3028-047-Q1-B1-C3
gtccgtgattttagttttgtgattaagctttcgataagaggagagaaagagaaggaaaaaaaaagttgctttttttttgttgttgcatgatttggatcttgattggaaaagcttcgaattggggtagttttacccatcaattcaattttaagccgtgccttcttcactttgccgtgtct

SEQ ID NO: 1425 - DNA, 374 bp, Glycine max
  unsure (1)..(374): unsure at all n locations
  Clone ID: LIB3028-047-Q1-B1-C5
ctcaaaacctgtcacagaatttctcaccagctctggcacatcagggggtgagagaaagttgatgccaacaattgaagaggagctaggaaggaggtgtatgttgtacagcctcttgatgccaataatgaatcaatttgtccccgacctagaaaagggcaaaggaatgtacctaatgttcataaaatgcgagtccaaaacacccggaggcatagtggctcgcccagtcctcacaagctattacaaaagcccttactttagggacagatcctacgacccatatacaaactacacaagcccaaatgagaccgtcctatgtcttgattcctaccanagcatgtactcccaacttctatgtgacctttgccaacacaaag

SEQ ID NO: 1426 - DNA, 382 bp, Glycine max
  Clone ID: LIB3028-047-Q1-B1-C6
gtgagggcaagaactttgcagcataccagcatgagcatgaagctcttccagctcttctccctactcccattcttcctctacttctacacaatagaagcagccgttggcccattgcaactgacacacccactggaccccttaactcagcaagaaatcaccctcgtcaaaaccatagtcctaaaaaagtaccccaagccagccaaccgcgtcttcttccactacgtcggcctcgacgatcctgacaaggccgccgtcctcaaatggctctcctccggcgcccggacgccgcgcaacgccttttccatcgccctcatcaatggccaaatccacgagctcaccgtcaaccttctctccccgcgaaacgttgtcttggacaaaatcc

SEQ ID NO: 1427 - DNA, 377 bp, Glycine max
  unsure (1)..(377): unsure at all n locations
  Clone ID: LIB3028-047-Q1-B1-C7
gatgtgttagagctgcatccgatactgcattacaggctattggacaatactgcaatcagctacaatctttgaaccttggatggtgtgataatgttggcgatgttggagtgactactttagcatatgggtgtcctgatcttaggatagttgacttgtgtggctgtgtccgtataacagatgacagtgtgattgctttggcgactagatgcccccatctgaggtccctaggactgtactactgcaagaacatcacagatagagcaatgtattccttggcacacagcaaggtgaacaacaggatgtggggaactgtgaaaggangaggaaatgatgaagatggtttaaggactttgaacattagccaatgcactgcactc

SEQ ID NO: 1428 - DNA, 371 bp, Glycine max
  Clone ID: LIB3028-047-Q1-B1-C8
gaaacattgggggaacagcagagaaaatggtattttctttctagcaagtatcccagatgatttgagtgcaccggtaaccttcgttgttttgtatcaactgaaagatcaaggtaattttgcagaaaaaaagctttgagaaatagaagaaatggagcttggcctactgaatatagctgcctggggccaatgatcgactcaagatttagcattaagaattgataaagtggtacttgagagtgtgtctctttaaatttttgtgatacacatatagtatatatgtatctaaatcaaatcttgtattctttaaacatgaaaaactgaacagcttgtaattgtttgacagtttcatctaatgccttcacagttttact

SEQ ID NO: 1429 - DNA, 365 bp, Glycine max
  unsure (1)..(365): unsure at all n locations
  Clone ID: LIB3028-047-Q1-B1-C9
gagccattcgtcatagcaacaaacaggcatctgagcgtggttcaccctatttacaaacttttgtttcctcactatcgtgacaccatgaacattaattcacttgcccgcaaatccttggtcaatgcagacggtattatagagaaaacattcttgtggggtaggtactctttggaaatgtctgctgttatttacaaggactgggttttcactgatcaagcattgcctaatgatcttgtcaagagaggagttgcggttaaggatccatctgctcnccatggagttcggcttttgattgaggactatccttatgcttctgatgggctanagatatgggatgccatcaagtcctgggtgcatgaatatgt

SEQ ID NO: 1430 - DNA, 400 bp, Glycine max
  Clone ID: LIB3028-047-Q1-B1-D10
ggcggacacggcagtatgattattaccagagggttttgaacgggatattgtgaaatagtttgtcgatggtgatcgtttgcttgttcccttttgactaagcttgcacggtgattgttcatcaattagtatttgcattttcaagtcattggaggatggttggttcactgtgttatggctttggagtactttgtgagacgtaggaataaaaaggtgggagtgttcaccgtctattctcctgtagtagtgagagattctgactcgcaaaagtacttcaacagtctgaggctaaattttgagccgagtccttttgattttcccatcccggtttcttgtgaatgaagctctgctacctggagaaattgcatcagcctcctaaatgctgattttgtacagtgatttt

SEQ ID NO: 1431 - DNA, 308 bp, Glycine max
  Clone ID: LIB3028-047-Q1-B1-D11
cccgattcaagaagaaccgcaagaagcgcggccacgtgagcgccggtcatggccgtatcggaaagcaccgtaagcaccccggcggccggggaaacgccggtggcatgcatcaccacaggatcctgttcgacaagtaccatccgggcttcttcggtaaggtgggaatgaggtacttccataagcttcgcaataaattctactcccccatcgtcaacgtcgaaaagctatggtctctcataccccaagacgcgaaggaaaaagccctaaaatcgaaggacactgcccctctaatcgacgtcacacagcac

SEQ ID NO: 1432 - DNA, 252 bp, Glycine max
  Clone ID: LIB3028-047-Q1-B1-D12
aaaactggcagaagggaattgcagagttctacgacgagtcgtctggcatatgggagaacatttggggcgatcacatgcaccacggcttttatgacccggattccaccgtttctgtttctgatcatcgcgctgctcagatccgaatgatccaagaatctcttcgttttgcctctttgctttctgagaacccttctaaatggcccaagagtatagttgatgttgggtgtggcataaggggcagctccagatacc

SEQ ID NO: 1433 - DNA, 377 bp, Glycine max
  unsure (1)..(377): unsure at all n locations
  Clone ID: LIB3028-047-Q1-B1-D2
ctctcctctatccttcgtgcccacagtcaataatgtctcttccaactccatcgctcccccttctccgttgcatccattttcacgattccaatccattaaaaatagaaagccaaaaccccatcatattcctagaatcacatgcagtggaaaccaaaacaatccaacaccaaaccctaattcccagggagaacctccacatattgtaggacataggaggaacgttctacttggcctaagagggctttgtggtgctgttactcttaacaacaacaacccttttgcctttgcagctccaatatctcctcctgacctaaacacgtgcggtccaacagacctacccgcaggtgtaaaacccaccaattgttgcnccccatctt

SEQ ID NO: 1434 - DNA, 375 bp, Glycine max
  unsure (1)..(375): unsure at all n locations
  Clone ID: LIB3028-047-Q1-B1-D3
ccccaaaaccctaggtagagagctcttcctcactctcattcgcaatggccgcagcagcacgtcctctcgtcaccgtgcaggccctcgacagtgacatggccaccgacgcctccgccaccgtccctatccctgacgtcatgaagtcctccatccgcccggacatcgtcaacttcgtacactccaacatctccaagaacagccgacaaccctatgcagtcagccgccgcgctggccaccagacttccgccgagtcctgnggaaccggtcgtgccgtctcccgtatcccccgtgttcccggcggcggaacccatcgcgccggccacggagccttcggaaacatgtgtcgtggaggacgcatgtttgccccgaccaaga

SEQ ID NO: 1435 - DNA, 341 bp, Glycine max
  Clone ID: LIB3028-047-Q1-B1-D4
attgaacgtttcatggaggaggcacctgaaagactgaaaaggaaagatttagatatgtttggaaggcgatggttcaaacctcaagaggcgtccaatttgagagtgaaaatccttaaattgcttttagaaaaattacagaattcaataacggataattgtaactcggaatcttctccttcgtcatctgctggccctgcaactgattgtgttgagactgccagggattctgttactggccctgtgactgattgtgtagagaccgcccaggattctgtgacgtaacatggcagcatgaattgcaattctcatttccttgaacaaacaatctgttgatattcata

SEQ ID NO: 1436 - DNA, 382 bp, Glycine max
  Clone ID: LIB3028-047-Q1-B1-D5
tgtcaaacgaaaagagaagtgtgaggtattaggcgcacagttgctttttgggtatgcagcgctataaggctacaagtgaagttgtgctgctaaaagacaggggaaggggagcccacaaattgtaacatctaaatggttcttctttctgcatttgaaaatagaaatgaaggagaaggacggactttcgggtatagaacccctgcaactggcaagtcatgtgatagaaggctcaaattgaatcagtaaaattggagtaacgcacgccactgaatgcatgggtgttattggttcctgtataaaaacattcgtttttaagttaaattattgtacagattacctattaacactgagcaggcttgatgaaaaagcatttagaataatt

SEQ ID NO: 1437 - DNA, 379 bp, Glycine max
  Clone ID: LIB3028-047-Q1-B1-D6
atcacacacacatactaagaagcaacaattcttctacaatggatctcctccttctggaaaagaccctcataggtctcttcctcgctgcggtggtcgccatcgccgtctccaccctccgcggccggaaattcaagctcccaccgggcccactccccgtcccaatcttcggcaactggctccaagtcggcgacgacctcaaccaccgcaacctcaccgatttggccaaaaaattcggtgacatcttcctcctccgcatggggcagcgcaacctcgtcgtggtttcttcacctgagctcgccaaagaggttctccacacgcagggcgtggagttcggctcccgcacccgcaacgtcgtcttcgacatcttcaccggaaaggg

SEQ ID NO: 1438 - DNA, 376 bp, Glycine max
  Clone ID: LIB3028-047-Q1-B1-D7
aaatgtatttggtggagagcaaaggaggtgccataacatgcatgttcttggctcttttcttcttggggacatggcctgctcttttgactatgttagaaaggcgtggtcgtcttcctcagcatacctaccttgattactcaatcaccaatttcttgtctgctttactcattgcttttacacttggtgggataggcaagggcactcatgatcagccaaatttcttagttcaacttgctcaggataattggccctccgttctttttgcaatggggggtggtctgttccttagccttgggaatctgtcaagccaatatgcatttgcttttgttgggctatctgttactgaagtgatcacggcaagcataactgttgttat

SEQ ID NO: 1439 - DNA, 379 bp, Glycine max
  Clone ID: LIB3028-047-Q1-B1-D8
cagaaacaaacccacccgggacaacctcctcctatcattacactaccgccatggtcgaaccaaagtcccgaaccgtgggcaacaccgagcgaagctggtgccaagccgtccgcggtggcaccggcatcgccgtcctcgccctcctaacctcaaaaccccccgatatccccaagctccaaacctccctccgcaccctccaaacctcccacccaatcctcagttcccgactccaaaccaacgcaaccacattctccttcctcacctccccaaccccctccatcaaaatcttaacactcacgctccctactaacctcaccgaccccctgacccagatcctcgaactcgagctcaaccgtaactcgtggcaagattctaccac

SEQ ID NO: 1440 - DNA, 399 bp, Glycine max
  Clone ID: LIB3028-047-Q1-B1-D9
caaacctaacgcagcatcgctattctcttcattccatggctttgcccaaccagcaaaccgtggattaccctagtttcaaactcgttatcgtcggcgatggtggcacaggaaagacaacctttgtgaaaaggcatctcaccggagaattcgagaagaaatatgagccaaccatcggtgtggaggttcacccattggattttttcacaaactgtggaaagattcgattttactgctgggatactgctggacaggagaaatttggtggcctcagagatggatactatatccatggacaatgtgctattatcatgtttgatgttactgcccggctaacatacaaaaatgttcccacctggcaccgtgatctttgcagggtctgtgagaacatcccaattgttc

SEQ ID NO: 1441 - DNA, 385 bp, Glycine max
  Clone ID: LIB3028-047-Q1-B1-E1
cgcgcagttgataaaaccataaccggaatggagcagaatctggtggactgggcaaaaccatatttgagcgataaacgaagactgttcaggattatggataccaagttggagggccagtacccacaaaagggggccttcacggctgccacacttgctctacaatgcctaaacagtgaggccaaggcaaggcctccaatgacagaggttttagcaactctggaacagatagaggcccccaagacagcaggcagaaactcgcattcagaacaccatagacttcagactcctgtgagaaagtctcctgcgcgaaaccggtcatcgttaaatctaactcctactgcgtttcctcctcccagctcaccggcaatcgcctcgtgtgcactaa

SEQ ID NO: 1442 - DNA, 381 bp, Glycine max
  unsure (1)..(381): unsure at all n locations
  Clone ID: LIB3028-045-Q1-B1-D9
gggtctgtctctttcatccttcaattgtggttagtttattcttaattgcagagttgaatcaagtttttattttttttatatgggtttgtgttattttattgggaaaggaagacttattctggtattgacttggcctttgggattcccactactgtggttgttangtgcttgttttgtgttgtgttgtgtgtgttgtttcctcctctgtaccatcttgatttcattggtaacagtaaaaggaaaaggttctttcttgtggaaattagaaaagggtcccttgctttangacagtgagagagaaaagtatttcttcctggtgatgtcttttgattcgtctctggaatcttatgcaaacccttccttcccttttgcttgcttgct

SEQ ID NO: 1443 - DNA, 383 bp, Glycine max
  Clone ID: LIB3028-043-Q1-B1-D7
ttttcacccccagcacctaaaacagtgatatgtacgacctaacagctagctagctgcatgaactgaagaaactgagaagttaccccagagtgccataactcaaactgatacagagaaaggctgaacaagaagggttagtttcagagtcatcatcaaagaaaaaagagggaaagaagagtttctgattaactttcagtaacatggaatggattattggactttggactctaatgggttttcttttatgttggtggtttctgtgtgtgagaaaggagaatcagaatagtaaggtgaagaagaagaagggtacagttccaaaaggaaacactggttggcctctactttgagagacccttgagttcattggctgtggctacacctcc

SEQ ID NO: 1444 - DNA, 409 bp, Glycine max
  Clone ID: LIB3028-043-Q1-B1-D8
ctcaaaccatgttgctcatgtctagtgtctctagcagttattccgtggatttgaagaaagaccttttcctccaattgcagagtcaaagtttaaggcctaagttctctcaactctcattcaacccacttccaccatcaacttcttccttttcttcaccccgtacattcacaaccctggctctcttcaaatctaagacaaaagccgctcctgctaagactaaggttacaaagccaaagcaaaaggttgaagatggtatctttggcacttctggaggatttggttttactaagcagaacgagctctttgtgggtcgtgttgctatgcttggttttgcagcatcattgttgggtgaaggaataactgggataggaatcctagcacaattaaaacctggaaactggaaatccca

SEQ ID NO: 1445 - DNA, 380 bp, Glycine max
  Clone ID: LIB3028-043-Q1-B1-D9
gtagccttggtgaagggcttgcaatttgtcttcggacagattcagattcttaagaaagagataagcaaagcacgaataagattaatggagtctttggtgaaggggtctgctggtctggactaccttaggaatgcctttgctaacaaatatggatctccatctgatgccaatacctctctgccttcaacattgagatggatttcatctgtttggaattgcaaagatcaggaatgggaagaacatgtgagttcctcatcagcattggcttctaattcatcccaagaatggcttccttcaactactctcagaactgggggaagtattctgctcaaaacaactggcagtccgatggccttttctcctgatagtgcaaatgctaa

SEQ ID NO: 1446 - DNA, 369 bp, Glycine max
  unsure (1)..(369): unsure at all n locations
  Clone ID: LIB3028-043-Q1-B1-E1
tggctatcaggtttatgttccaagactggatgatcctggttcaggtacattcgagcggtgctctacggatacatttgagatatacggtccatgtacgtaccagacatgttatctgtatctataccggagtggatacgacggttggatgccagagaaagtgaccgtatacagctattactaccaacctgttacattttactacaacacttacatacctaatgatatttggtatggctttgactattgtcgcggttatttaccctccggtactgccgcacagtanaggctagagtagtgtgtacccttctcagttctcatcacanattactacaataaaacaagtacaagtccaaatatgaaccctgctat

SEQ ID NO: 1447 - DNA, 385 bp, Glycine max
  Clone ID: LIB3028-043-Q1-B1-E10
caaagtcccttcatttattgatttcacaaaatcaaatctcgcagtaccaacaatactgccacccctaaagcactgacaactcttcttcttcacacttctctttcagatctacacaacacacaccaaaaaataaataaaatgcaactccaactcacactctccagtctcttcctctcccttttgttaacaataacattaacatctccaaccttggcagcacaaagcaagccgcaggatctggtccggtcctcgtgcgtgcacgcgcggtacccgcgtctgtgcctgcacaccctctccaactatccgggctccgccaacacgccattagacttggcccggacagcgctgaaggtgagcctagcgcacacacgccgggcctcaaagt

SEQ ID NO: 1448 - DNA, 381 bp, Glycine max
  Clone ID: LIB3028-043-Q1-B1-E11
gggaattcttgaacaggagtgtggcccttgtcatcaggatactcttggggtgtacagcaatcttgcagctacatatgatgctatgggaagagtgggagatgcgattgaaatcttagaatatgtgctcaagttgagggaggaaaagcttggaatagcaaatcctgattttgaagatgagaagcgtcgtctggccgagcttctgaaagaagcaggcaagacacgggacagaaaagcataatctctggaaaaccttattgatcctggctcaaagaggacaaagaaggagggggcaaagaggtggcctggtttggggtttagaatttaaccatatttttgttcattaatatatatattgaatgcacattctgtaacataggatat

SEQ ID NO: 1449 - DNA, 379 bp, Glycine max
  Clone ID: LIB3028-043-Q1-B1-E12
taaacacaatgaagaaaagagttttgctccatccatcttgagcttatcctgtgcctgacagtgctgctttgactcaataacctcatgaggaacttcaaggctgttggtcaagccatcactgctctcttcatcatctctctgagtgcatggtgttatggacaagtagaacttgacatggctccaatggagaaggcagagcgggatgctctatactccaccattcaaggctttgttggtgattggtggaatggctcagatctctatccagatccttgtggctggactcctattcagggggtctcttgtgatctgtttaatggattttggtatgttactgtcttgaacattggactaatccacgataattctctaagttgtg

SEQ ID NO: 1450 - DNA, 407 bp, Glycine max
  unsure (1)..(407): unsure at all n locations
  Clone ID: LIB3028-043-Q1-B1-E2
agcaaacactcttctgagttctgagctagcgaggttgcaatggcgattatctccgatttcaacgaagaggagcagaaacccactcactcttcaccaccgcaaccccaatcctcttcctcttcctcttcctcttcgttcagtgctgcttttgaccggtcaaaccctatcgcttttctggagagagtcttccagttcgtctccgaacacagcgactttctggcgacggagagcgccgagaaggagatagcgttgctggtgcgcgccgccgggaagaagaagagggagtttctcaagtcggagagagaaaaggccgagaagaagaagagagaggacctcaaggcctcngaagagagggaanaatccgacaagaggttgaanggaagagaaggaacccaaagccgaagaca

SEQ ID NO: 1451 - DNA, 322 bp, Glycine max
  Clone ID: LIB3028-043-Q1-B1-E3
acgcctacttaacatcggaatccggtccaattccgggtcccaaggaaaacaaaaccggacctccagaagccaaggaaaagggggccttgctaaccttccattctccggaatacaaccaaaattcgaacggtccacccaaaaccaatcaaagcaattaatccctcctccgtccaacacgacatcatgggacgcgtggctccattctacgaccggtggtctcgcgcgtatgggaaaactttcttgtactggttcggttcgacgccgcggttggcggtaaccgaaccggacatgattaaggaggtgctcatgaacacgcgcgggg

SEQ ID NO: 1452 - DNA, 353 bp, Glycine max
  Clone ID: LIB3028-043-Q1-B1-E4
ggctttcggaccacgaaagtgcaattttgaaaaacagctagtgcattaccgaacacaaagtagaaaagagatacaacaaccatctggaatagtaatccaagggggatccattgtgtctgatcctgaattctactcagtgagatttgagaacaaggcttacctagctcgtccatggaagaattactctaggaccattatcatggacacatacattgatgatttgattgacgcggatgggtatttgccatggcaaggactagagggtccttctggtatggatacatgcttctatgccgagtaccacaacattggccctggttcagacaaatccaagcgtgtgaaatgggctggga

SEQ ID NO: 1453 - DNA, 396 bp, Glycine max
  Clone ID: LIB3028-043-Q1-B1-E6
ctccaagatgcttgtttggctcagcaagccttggtgagattgcaatattagctggtgggtgtgattcagagggacacatccttgactctgctgagttatataattccgagactcaaacgtgggaaacactcccaagaatgaaaaaacccaggaagatgtcctctggggtatttatggatggaaagttttatgttataggggggattggggggagtgactctaagctcctcacatgtggagaggagtacaatttacagactaggacatggactgagattcctaacatgtcccccggacgtagtagtacgggtcctgagatgcctgcaacagctgaggcaccacctctggttgccgttgtaaatgatgaattgtaggctgctgaatatgctgacatgg

SEQ ID NO: 1454 - DNA, 406 bp, Glycine max
  Clone ID: LIB3028-043-Q1-B1-E7
acttaaaacccgctcttttgatgcaataagggctgagctgagggcattctttgatgtgcatgatcaagaaggaagctacccaggaggggttcatttagagatgacagggcagaacgtgacagaatgtgttggaggctcaaggactattacttatgatgacttgagctcacgctaccacacacattgtgatccaaggcttaatgcttctcaatctctcgagcttgcatttaatattgcggacaggttgcgcaagagaaggctcaattcaactcgatcacttggaatttagacaagacggggtctgtcttcctttgtacctggatcacaatactggtcaaacatgtgttgagttttcttgagcacagtgaacaaatactctactgtgagccactctaccgagtttcat

SEQ ID NO: 1455 - DNA, 404 bp, Glycine max
  unsure (1)..(404): unsure at all n locations
  Clone ID: LIB3028-043-Q1-B1-E8
gcaggttgtggggtcgcctgaggaaactagtagactcttgctatgtgaagcgacggtgactgtgatgagacactgcttttatctccttggaattgaacctgtatacaggctatgacatataagagcttcatatgcaaattatttatcagatttttttgggatatacaagtataggaaacttcacaatgaaaattgttcaggcaaattcgatcacctcttcccctcttccattttgttaattgtatttgagttgtaacttttacgaaggaaagtaaataatttatagcaatattgttgacaaggtcncatgaaatttatttagatgagttatattttgctttacttgtgttccaagagaaattactagaaaatggacgttatggagtccattgtacatttgtact

SEQ ID NO: 1456 - DNA, 392 bp, Glycine max
  Clone ID: LIB3028-043-Q1-B1-E9
gccagcgagtgagcgagcgagcgaggtagggttttcgttgttcccccgtctttgaattcagttcgcgacgatggggtccatccccgatccaggcgagttgagcgagttgactcagccgagcttcgacgagttccagcgccaaacttccctcatgaccagctgcaccctcctctggaaggagctctccgaccacttctcctccctcgagcaagacctcaaccacaaatccgaagccctcaaacgcaagattcgcaccctcgacaacactacttccgactccctccgcctcctcgatcgccgcgaaacctccctcgacgccacgctccagatcgccctccgcacgctcgacacgcgccgcaccgctgccctctccggcctcctcaacgacgccg

SEQ ID NO: 1457 - DNA, 403 bp, Glycine max
  Clone ID: LIB3028-043-Q1-B1-F1
attcactgctatgttcaggaggaaggccttcttgcattggtataccggggaaggcatggacgagatggagttcactgaggctgagagcaacatgaacgatcttgtgtcagagtatcaacagtaccaggatgccactgctgatgaggatgagtatgaggaggaagaggaggaggaggagtatggccaacatgatatgtgattttgaacttggtaatgtattgcggtggcttgaagatgtataacatgccgcaacttcctgttgccggttgattgtctcttttgaggggatggttctgttccggctagatctagtttccattactgttctataaaactggttctgtttgtttccgtttttatgtaacctgttgtttgtatggaagacaatatgaaactgctatta

SEQ ID NO: 1458 - DNA, 387 bp, Glycine max
  Clone ID: LIB3028-043-Q1-B1-F10
agaagattgagaaaggtaaaggtccttgttgttccggtgtgctgctagagaatctggtgaaggatgtcaattgttccaatcaaccaaggtcactcccaggactcttgggatcaattcatcgattttcctctccctccttccatctccagcttcttccccggcttcgaattcggattcggctcatcggtggttaacacacgtgtggactggagggagactcccagagcccacgtgtggaaggtcgtgcttcctggcttcacaaacgaggacgtgctggttgagctacaagaccagagggtgctccaggtcagcgtggagagtggtaacttcctgacgacgtttaagatccccgacaacggttacctcgaacaactcaaaaccaacatg

SEQ ID NO: 1459 - DNA, 95 bp, Glycine max
  Clone ID: LIB3028-043-Q1-B1-F11
gaatcactgaaaagaggtaaaatgtcaatctaaaatatatcttgtgctacaaaagttaaattctgatcctctaatgtatgaactctgttctcgtt

SEQ ID NO: 1460 - DNA, 401 bp, Glycine max
  Clone ID: LIB3028-043-Q1-B1-F12
caagaaaccaagcaaatcattgttctctctgtcctgtgttttgtgatttcccccttcaagccaccaccaatggccaacaacgagatgcaagttgagaggggtttggacttggaaaggtacatggggcgttggtatgagatagcctctttcccttcaaggaaccagcccaaggatggcgtgaacaccagagccacatacactcttaggaatgatggcactgtgcaagtgctcaacgagacttggagtaatggcaagagagggcacatagagggaactgcttttaagtctaaccgcacaagtgatgaggccaagttcaaggtcaagtttttatgtcctccctttttgcctatcattcctgtaacaggggactactgggttttgttcattgatggtgattacca

SEQ ID NO: 1461 - DNA, 392 bp, Glycine max
  unsure (1)..(392): unsure at all n locations
  Clone ID: LIB3028-043-Q1-B1-F2
gaaactaataacctcttcgaatcaattgatacgcattcaagccctaaatttcaatctagggtttctttgcacgctaattccatcttcaaattctgccttcattcgattcaggggggaattaaattgtttctattttttttcgaatttaccacaaattagaaatcgataaagaaaaatggtgagggtgttgagaagctgcattcaatcgattttgaagctggtgaactcggtgattgggatggcggggctagccatgattctgtactccgcatggatgattaaggtttggcagaggaagatgggcgaacttccctttggtcacgattctgattacccacctccgtggttcatttacatgtntcttggccttggaattgctttctgtgtaatca

SEQ ID NO: 1462 - DNA, 381 bp, Glycine max
  Clone ID: LIB3028-043-Q1-B1-F4
aaggaaatttggcttgcaaatcaataaaccctttccttttttcaaaaaaggtttcaaaggatttgttccccaagcagttggagaacatgatgtctctggtctctcctcgtactggcaggcatttgcagcgctatgacaaaggctgtcgccaagttgtgggatgcattccttacagatacaagaacaatggaacacaggataaggaattagaggttcttgtgattagtgctcagaagggtcatggaatgcagttcccaaagggtggttgggaaactgatgaatccatggaacaagctgctttaagggaaaccatagaagaagctggggttgttggcagtgttgaacgtaaattgggaaaatggtattacaagagcaaacgcc

SEQ ID NO: 1463 - DNA, 385 bp, Glycine max
  Clone ID: LIB3028-043-Q1-B1-F5
cacacgctgcttccgattgaaggcatctaaggagagaaaaatgcacgatttctgcttcacgatcccctacggattgatgttagtgggtggtggactgttcgcctacataagcaaagggagcatcgcttctctcgccggaggcgccggctccggtttgcttctcatcgtcgccggctatctcagtctcaatgctttcggcaaacgaaaaaactcttacctcgctctctttctcgagaccgtttgtgcagccatactaacttgggtcatggggcagcgatatttggaaacatccaagattatgcctgctggtcttgttgctggaatcagtgctctcatgactctgttttatctctacaaattagcaactggtggcaaccatctcccc

SEQ ID NO: 1464 - DNA, 411 bp, Glycine max
  Clone ID: LIB3028-043-Q1-B1-F7
ggcatacatgcaagggtatgacaaagaaggccaccctgtgtgctacaatgcctatggggtgttcaaggacaaggaaatgtatgaaagggtctttggtgatgaggagaagctgaagaagttcctaaggtggagggttcaggttcttgagagaggcatcaaggtgcttcatttcaagcctggtggggtcaattccctcattcaggtcacagacctcaaggacatgccaaagagagagcttagggtggcgtccaaccagatcctctccttgttccaagacaactacccggaaatggtggctcgcaagattttcatcaacgtgccatggtacttcagcatgttgtattcaatgttcagcccgtttctgactcagagaaccaagagcaagtttgtgatctctaaggaaggaaatgc

SEQ ID NO: 1465 - DNA, 409 bp, Glycine max
  Clone ID: LIB3028-043-Q1-B1-F8
caacaacgacaccgtatcataccgtaacatgttcacagcaccttttcctacatccactgttactctctccggtgaaagcgtaacctcaccgccgcgccacgtcagattccggtcagtagtatcgttcgccaccgccactttcacggaggagcaacaacataaggcagctccgtatctgagacctcatcacgggatggctttgagcgcgacgctgtacgacattctggggatccgcgccacggcgtccggcgaggaaatcagggcggcgtaccggcgactggcgagggtgtgccaccctgacgtggcgccggtggagcgaaaggaatcctctgcgggcgagttcatgaagatccatgctgcgtactgcacgctctcggattccgataagcgccacagctacgatagaagc

SEQ ID NO: 1466 - DNA, 395 bp, Glycine max
  Clone ID: LIB3028-043-Q1-B1-F9
ggatttggtgttgcgcagccgcaggcagatatggccatggctttggtgagcctcagcaccattctcacaccgccttcttcttcttcttcttcgttttcttctccaaaaccttcttcttcctccatcgttcggtttcgccctctcactccccttcctcgctttcggaggcacctcgttcgtatggctcccgatgaggagaagatgactcgtcgctcccctctcgatttccccatcgagtgggaaaggcctaaacctggacgaaggccggatatattccctcaatttagtcctatgaagacacctttgccgcctccgttgcccgcagatcctccagaagaggatgaagaggaggaagaaaagaaagaggaagaggaagaacctgaaaaggaggagcc

SEQ ID NO: 1467 - DNA, 388 bp, Glycine max
  unsure (1)..(388): unsure at all n locations
  Clone ID: LIB3028-043-Q1-B1-G1
gtggttcttcctggtctccatgacgcagtccttcgtcaacggcggaggacttcccggacaggccttcttcaactccgctccggtgtgggtcaccgggggcgaccgtctctctgcctcggcctgcgagagggcgaggcagggacacgtgttcgggctgcaaaccctggtttgcataccgtccgcgaacggcgtcgttgagctggggtccaccgagttaattttccagaacccggatctgatgaacaaggtgaaggttctgttcaatttcagcaacaacaacttcgacatgggttcttcttggcccgccaccagcgccgattagggcgaaaacgacccttcctcgctctggctcagcgattccgaagttangggattcattaacactgtt

SEQ ID NO: 1468 - DNA, 398 bp, Glycine max
  unsure (1)..(398): unsure at all n locations
  Clone ID: LIB3028-043-Q1-B1-G10
gccgtatttatcacttactgcccgaagaaagctaggatgtcgacattgaggatgattgttttgttaaattttgggggattttgcacaattgtcctcttaacccacctactagcaaaaggagaagaagcccgtgtcaagcttctaggatggatttgcgtagtctttgccactagtgtttttgcagcacctttaagcattattagggtggtaattcggacgaaaagcgtagagttccttcctttccctctttcacttctccttctgataagcgcaattatgtggctcttatacggtatttccctgaaggatatctatgttacactcccgaacgttgttgggttaacatttggagtcattcanatcggtctctatgcaatgtacagaaacaacaaacccat

SEQ ID NO: 1469 - DNA, 395 bp, Glycine max
  Clone ID: LIB3028-043-Q1-B1-G11
ctggcctttgttacggatatcaatgtccaggttcaagaggctataaactactactcaattgagtcatcagttgcacttttagtaacattggtgatcaatctgtttgtgataaccgttttcgctagggtgttctacggtacagaacaggcgaaaggcataggattggtaaatgcagggcagtatcttcaggagaggtatggaggagggttgtttccaattctctatatatggggtattggtttgttagcagctggacaaagtagtaccatcacaggcacatatgcagggcagtttataactgagggctttcttaagctcaatataaagaagtggttgagggcattgatcactagaagttgtgcaattgttccaactatgatttgtgcaattgtttt

SEQ ID NO: 1470 - DNA, 312 bp, Glycine max
  Clone ID: LIB3028-043-Q1-B1-G12
tgaatatgaatatgaatatggtgggtggtaatattgaccgatattaccctgctggtttccctttcattgctgagaatatggatggccagaatgctaaggctggttctgggactggccaggtttcagaatctgttgttttctctgccagcaatcctctcatggtgtcatcatctgtttcccctggtgtgttcacttctcagcagcagcatcaacagtttggactggtggatgagaaacctcacgttattaatccacagtttatgttgaaccagaaccaagttcagttctcagataatccctctttccttttgc

SEQ ID NO: 1471 - DNA, 328 bp, Glycine max
  unsure (1)..(328): unsure at all n locations
  Clone ID: LIB3028-043-Q1-B1-G3
ggtccaacaaaacctcaaataaaccaagaatccccccaaacctaaaagtggcttccctcctggcntcgcttctcctcctcaaccttgttaaggcggttcaaccggaacatgtacaaacgcaggggtcccttctgcaaaaaataaattgtaatggaccatgtgctgcaaggtgtcgtttatcacctcggccacgtctctgcaaaagagcctgtggaacttgttgtagacgctgcaactgcgtgccacctggcactgctggaaaccaagaagtgtgtccctgctatgctagtttgactactcatggtggcaaaggcaagtgcccttagac

SEQ ID NO: 1472 - DNA, 408 bp, Glycine max
  unsure (1)..(408): unsure at all n locations
  Clone ID: LIB3028-043-Q1-B1-G4
cgcgtgtatgttggtaacttggattcacgagtcactgagagagatctcgaagacgaattccgcgttttcggagttattcggagtgtttgggttgcacgtagaccacctggttatgcttttattgactttgatgaccgcagagacgcacaggatgctatccgtgaattggatggcaagaatggttggagggttgagctttctcacaactctagaggtggaggtggtggtcgtggtggtcgctctggtggttctgatttgaaatgttacgagtgtggtgaacctggtcattttgctcgtgaatgccgcatgcgtggtggttcaggaagacgccgtagccgtagtccgcccagattccgtanggagccaagttatgggcgaaagagttacagtcctcgtgggcggtcccct

SEQ ID NO: 1473 - DNA, 411 bp, Glycine max
  unsure (1)..(411): unsure at all n locations
  Clone ID: LIB3028-043-Q1-B1-G5
gaaaaacactgcaactgatagaacactaagcagttgctaccatggtcaccttcaggtttcaccagtaccaggttgttgggagggctcttcccactgaaactgatgtgcatcctaagatctacaggatgaagctgtgggccaccaatgaggtccgtgccaaatccaagttctggtatttcttgagaaagctaaagaaggtcaagaaaagcaatggccaaatgctagccatcaatgagatttttgagaaaaatcctaccaagatcaagaattatggaatttggctgcgatatcagagccgaactggttatcacaacatgtacaaggaatatcgcgatactactctaaacggcgctgttgaacacatgtacaacgaaatggcatctcgtcatanagtcaggtctccatgcatcc

SEQ ID NO: 1474 - DNA, 403 bp, Glycine max
  Clone ID: LIB3028-043-Q1-B1-G6
ctcacctaacaatcaaccctaccattccaaagctcgaaggtgaacagtgagtgagtgagttattcagaacccaggatttggcgaaagtgaagcgatgagcagtgataggaatattggggttgccttggacttttccaaaggaagcaaaatcgctctcaaatgggctattgacaatcttctccgcaacggtgacatactctacatcgtccacatcaagccttccggaggaagtgaattccgaaatcttctctggtccaccactggttcacctctgattccgttgtcggagtttcgtgagaaggaggtgatgcatcactatgaggtggatactgatgctgaggtgttggacttgcttgacaccgcttctagggagaaacaggtgactgtggtggcaaagctatac

SEQ ID NO: 1475 - DNA, 395 bp, Glycine max
  Clone ID: LIB3028-043-Q1-B1-G7
atttgatgaatctgaaaggtactagctagctagctagtagttctacactgttaggtagcatcatgaggaagcgccaagtagttgtgatgaagagaggagcctcaaatgagcgctatgacggtgaaatacagctagtgccagaagaatcacgccgcgaatgtgggacggtatgctgttgacggctgcagggagttcatggcgagtggcgccaccggagaacgaacaagtgctgctctcacttgtgccgcctgtggttgccacatgaacttccacaggagacatgaaaccgatgtggtgagtgagtgctcctcgcctacctccaatggaacttaatcagagctagcttcgtcataatgtgtatacctcaacaagtatgctgctacactcgatatcat

SEQ ID NO: 1476 - DNA, 412 bp, Glycine max
  Clone ID: LIB3028-043-Q1-B1-G8
ctcaaatcatggatttcttgcaagcacaagaaaatcagatacttgtgggtgtggccgtggccgttgtagccattgggcttggtgcagtatatctctattcatccaagaagaccaaaggttgcttggacccagagaactttaaggcattcaaacttgttaagcgtgcacagctgagccataatgttgcaaagttcacatttgcactcccaacacctacatctgttttgggtcttccaattgggcaacacataagttgcaggggtaaagatgctcaaggtgaagaggttatcaaaccatatactcctactactttggattccgatgttggacattttgaactagttattaagatgtacccacaaggaaggatgtcacaccatttccgtgagatgcgtgttggtgactaactttc

SEQ ID NO: 1477 - DNA, 395 bp, Glycine max
  Clone ID: LIB3028-043-Q1-B1-G9
ggcttcatcgctgagaagagatgcgctcctctaatgctccgtttggcatggcactctgctggaacttacgacgtgagctcgaagaccggtggtcccttcggaaccataaagcacccctccgaactcgctcacggcgctaacaacggtcttgacatcgctgttaggcttttggagccactcaaagcggagtttcctattttgagctacgccgatttctaccagttggctggcgttgttgccgttgaggtcaccggtggacctgaagttcccttccatcctggaagagaggacaaacctgagccaccaccagagggtcgcttgcccgatgccactaagggttctgaccatttgagagatgtgtttggcaaagctatggggcttagtgaccgagatat

SEQ ID NO: 1478 - DNA, 332 bp, Glycine max
  Clone ID: LIB3028-043-Q1-B1-H1
cacacatgccacgtcactagactcacaccagaaactctcaatggctgaaactcccacaatccgtttcggcgtcatcggctgcgccgacatcgcgcgcaaggtctcgcgcgccatctccctcgcccccaacgccgccctttacgccgtcggcagccgctccctcgacaaggcgcgtgccttcgccgccgccaacggcttccccgccgccgccaaggtgcacggctcctacgaggcggtcctcgacgattccgacgtcgacgccgtgtacgtaccgctccccaataacctccacgttcgctgggccgtgctcgccgcgcagaagaagaagcacg

SEQ ID NO: 1479 - DNA, 359 bp, Glycine max
  Clone ID: LIB3028-043-Q1-B1-H10
attaaaaaagaccatgaactccaagcatggtggaaagaagttgttgagaagggacatggtgacttgaaagacaagccttggtggcctaaaatgcagactcttcaagagcttattcaatcatgttctactatcatatggattgcttcagctctccatgcagctgttaattttggacaatacccttatggtggttttatcctaaaccgtccaactcttagcaggagatggattccagaagaaggaactccagaatatgacgagatgacaaagaatcctcaaaaggcttatttgagaacaatcaagccaaagtttcaggctcttgttgatccttcagtgatagagatattgtcaggacatgc

SEQ ID NO: 1480 - DNA, 399 bp, Glycine max
  unsure (1)..(399): unsure at all n locations
  Clone ID: LIB3028-043-Q1-B1-H11
gagcgagtgggagaggcagaaagaagagaaaaaaggggaatggcatggttgcagttgcagagaatcgtgaccaagggaggtgctaatttgatctcaccactcccactttcacgattcttctcgaaatcttcttccccctatgttgtgaaagttggaattccagagtttctaaacgggattgggaagggggttgagtcccacgttcctaagcttgaatccgaaatcggtgatttccagaagcttctcctcactcgcaccctcaaactcaagaagcttggcattccttgcaaacacaggaagttaatattganatacacacacaagtacaggctgggattatgganggcacgtgttgagtccatcaatgcctgattggtttctaattagtaagtagtcgct

SEQ ID NO: 1481 - DNA, 324 bp, Glycine max
  Clone ID: LIB3028-043-Q1-B1-H12
gtcctcctcagaaacgcagataaagagaagggatagggtgtgaggtcgtaccttccccgttaccacccaactcatacatgccttccttgtctatcactcctgagctgttccagtttaatttggcctaccaccatgcaccaatttaatgtattagtatgccacactatgttatcagatatatggtatggcttcaaataaactaactcaggaccttatcttaataccttgaccttagaacctctctcaatggggcttgttcaaatgtgcaagcactttggagaccatggcttccaagagagtacaacaattggggtatattatttt

SEQ ID NO: 1482 - DNA, 298 bp, Glycine max
  Clone ID: LIB3028-043-Q1-B1-H2
ggaatatctggatggacagctacgttactctttatgtggatgccagtttctcaaatgtggacaaattatctcaatcctgagaacatgaaaggcttgtcagctttttctatgctccttgccatgcttggaaatgggcttatgcttccacgtgctctcttgattcgcgatttcatgtggttcactggttcagtgtgggctactcttttttatggatatgggattattgcttgcctatactatttaaacattagcagcaaggaattcttcttatcagcaaccggttggtctgatttcgttt

SEQ ID NO: 1483 - DNA, 295 bp, Glycine max
  Clone ID: LIB3028-043-Q1-B1-H3
caagcaaataattctttgtttgagcatttaaaatttcaaggttacaaagagggctttgttcttatggaacaatgatcacattgagaacctaatcaagcagaactgcaaaattattcttcctattgtattgcctgctctagagaaaaatgctcgaaaccactggaatcaggcagtccaaagtttgacaataaatgtacgcaagatctttgctgataccgatcctgaactcttggaggagtgcctgcgcaagttcaaggaagatgaagcacaagagaaagctttgaagttgaagcga

SEQ ID NO: 1484 - DNA, 401 bp, Glycine max
  unsure (1)..(401): unsure at all n locations
  Clone ID: LIB3028-043-Q1-B1-H5
aaagaacataaatagtatatacgagtcctagtttcatataatagttccatataacaaacattatggaagaagattatccacccgggtttcgtttcttcccaacagaagaagagcttgttggcttctacctacacaacaagctagaaggccaaagaaatgccatagccatagccatagacagagttatcccagttattgacatcaatggagttgagccttggaaccttccaacacttgctggggagctttgtcgtggggacacggagcaatggtttttcttttcgcccggtcaagagagggaaaccaggggaggcagacccagcaaaaccacagcttgtgggtaatggaaagctacaggttccccttgctatgtttactcttctcacaacanagtcattggg

SEQ ID NO: 1485 - DNA, 379 bp, Glycine max
  Clone ID: LIB3028-043-Q1-B1-H6
ctcgtttgttaccttgtgggcttcatattattggtgagcctccctcagccttggaagcagttgctacactggtcaacattgctgcacttgatcgtcctgaagatggtatttcttctcttccatcaatattagctgacactgtaggaagagatatagaagatgtgtatagaggaagtaacaaaggaatattgaaggatgtagagcttcttagacaaataaccgaggcatcacgtggagcaatcactgcctttgtggagcgcactactaataataagggtcaagttgttgatgtagctgataagcttagttcaatccttggatttggcataaatgagccatggatacagtacttatcaaacaccaaatttttacgaactga

SEQ ID NO: 1486 - DNA, 253 bp, Glycine max
  Clone ID: LIB3028-043-Q1-B1-H7
gcagatggcaaagaataaagctgctactgcaagggatgttcggcagttgcagcagatggcatagaataagagtgaacaatgcatttccaagtgactggcaagcatttaagttgctagtttgtatcgatctatggttacagattagctgttgaagttaggtttgggacttgttcatgtatttgttacggatagtgttatgttcatgttatgtgtgacgtaataatatcaactgctgcctaaggagcattgtcgt

SEQ ID NO: 1487 - DNA, 387 bp, Glycine max
  Clone ID: LIB3028-043-Q1-B1-H8
gtgccaaagttcatattaagagagaaagagagagagagatagaagggaaaaaagcatcaaagatcatgaaacccaacttttcctttttatctaagcttttgatactgcaatatctatcagttttatgcatttctcaggaatttgatttcttctactttgttcagcagtggccaggagcatactgtgacacaaagcagagctgctgctatcctaagactgggaaacctgctgctgatttcagcattcatggactctggcctaacttcaaggatggctcatggccctcaaactgtgaccctgacagtgtctttgataaatctcagatctcagacctcattagcaacatggagaaggattggccatccctgagctgcccaagtagcaatg

SEQ ID NO: 1488 - DNA, 393 bp, Glycine max
  Clone ID: LIB3028-043-Q1-B1-H9
tctcttggttgatgacaccaagagacagcacaaagacccttcgtttcaatcccacaacacactcattcctcattcttccactcccgcacaagaatggcgtctttgcagcaccccacagcttccctccaatccaaacacgtcctaatcccccgaaacactcttacgcagaaactcatcctcaacctctcctccctcgcgggcagcaccttcaccgtcctcaagctcaaattcttcagcggcggcgccgtctgccgctccaccggcgcctcgggagccagaatgtcagccaacgcagcctccagttacgcggctgccctgaacgacgtggctgccgcgaacaacacgctcgacgcgacaaccgcgggcatccagaacatcgaccagatattctcg

SEQ ID NO: 1489 - DNA, 357 bp, Glycine max
  Clone ID: LIB3028-044-Q1-B1-A10
caccctccctcaagaggaggtgggtactatcactcaccaccaacttatggaggtggtaaccccccaaaatcaatcactgtgaacccaacttcaaccccaatttaccccggtacccccaatatcccctcaacacccccttaccatccttccctaactcccttcactggtacatgcaactactggaacacatacacactaatcatttcgggattgctatgctggtggggaaccttaggccatgcatttggtgtctctagtatgccaggatttggtaccagtctcagcttgccacaatcactttccaacactagaactgatggcctatgagcactctacagagaacggacagcttccttt

SEQ ID NO: 1490 - DNA, 383 bp, Glycine max
  Clone ID: LIB3028-044-Q1-B1-A12
atttctttctattcatttcttcattccaccatcaccatggtcaaggagaagaagaacgtggtggtcaagaacaagaagccaaacagcaatgccgacgagcttcactttcgcggcgtccggaagcgaccatggggccgctacgccgccgagatccgtgaccccggcaagaagacccgcgtctggctcggcaccttcgacaccgccgaggacgccgcccgcgcctatgacgccgccgcccgcaacttccgcggccccaaagccaaaaccaacttccccgtgccccccgacgacaacaacatcaacaacgttaacgtgaacaacaacaagagtgttaacgttaaatctcacagtcacagccagagcatcaccgtggagtccgccac

SEQ ID NO: 1491 - DNA, 385 bp, Glycine max
  Clone ID: LIB3028-044-Q1-B1-A2
cttcgacccgtcggattcaatcccgaagctgcacacggactcgagctgttcggagcaggtggtatcgccggaattcgcgagcgaggtgcaaagcgagcccaagtggaacgagtgggagaaaagcctcgaatttccatttaattacgtggatgccactctcaacaacagcttcatggcccaattccagggcaataatcagatgttgtcgccgctgcaggacatgttcatgtactggcccaacaagtccttttgagcacatcatgatggttttaaattagcatccgcaattgctcttaagattttctgactcaccatgcgaccacaatcgtaatttaaaaccatgtcacataaaatccacgcgcgccgcccattcgcatttgcacgg

SEQ ID NO: 1492 - DNA, 363 bp, Glycine max
  Clone ID: LIB3028-044-Q1-B1-A3
ctaggtcccaagcagcaagaaagaatcccaggcgaggagaaagatggaggggaaggagcaggatgtgtctttggaaccaaaaagttcccccaaaaaaaacccaattggacggcggcgcagagccaagacgacggcaaggactaccaggaaccggcgccggcgccgctggttgacccgacggagtttacgtcatggtcgttttacagagcagggatagcagagtttgtggccacttttctgtgtctctacatcaccgtcttaaccgttatgggagtcgccggggcgaagtctaagtgtagtaccgttgggattcaaggaatcgcttgggccttcggtggcatgatcttgcgcctcctttactgc

SEQ ID NO: 1493 - DNA, 332 bp, Glycine max
  Clone ID: LIB3028-044-Q1-B1-A5
caagctgcagctaccttcatgcaacccaccaaggttggcatagcctctcgcaacctcaaatctacacaatgcatttctaaggcttttggcttggaacctgctgcagctaaactcacttgctcccttcagcctgatctcaaagaatttgctcaaaaatgtgtcgacgctaccaaaattgcaggattcgcccttgccacctctgctctcgttgtttctggagcaagtgcagaatgtgttccaaaaaggctaaccttcgacgaaatccagagcaggacgtacttggaagtgaagggaactggaactgctaaccagtgcccaaccattgaaggtgg

SEQ ID NO: 1494 - DNA, 367 bp, Glycine max
  unsure (1)..(367): unsure at all n locations
  Clone ID: LIB3028-044-Q1-B1-A6
cagagaacatttagaacaaagaagagagtttgagaaatggggaggggtaagattgagatcaagaggatagagaactcaagcaacaggcaagttacatactcaaagagaaagaatgggatcctaaagaaggccaaggaaatcactgttctatgtgatgctcaagtttcgcttatcatctttgctgcatctggaaagatgcatgactacatcagcccttctaccacgttgattgacatattggagaggtaccacaagacctcacggaagaggctttnggacgccaagcatgagaacctaaacggcgaaattgagagactcaagaaagagaatgacagcatgcaaatttagctcaggcactttaagggtg

SEQ ID NO: 1495 - DNA, 102 bp, Glycine max
  Clone ID: LIB3028-044-Q1-B1-A7
gagaaatcatggaaaactggtgtcgctgaagctggactgggggcacgccgcaatcgtgttcaaatgcgggagaagacaagtttggactgagcccaatgaagt

SEQ ID NO: 1496 - DNA, 338 bp, Glycine max
  Clone ID: LIB3028-044-Q1-B1-A8
gagctcctcgctgatataccttatgggtataaatctgatatgtggtctcttggttgctgcatgtttgagattgctgcacatcaaccagcttttcgtgctccagacatggctggacttatcaataaaataaacagatcctccatttctccactgccaattgtttattcttccacactgaaacaacttatcaagagcatgcttaggaaaaacccagaacataggccaaccgcagctgaattgttaaggcatccgcttttacaaccttaggttctgcgctgtcataatgcatcatctaatgttcttcctgtatatcccctagttaatccagaggattaagc

SEQ ID NO: 1497 - DNA, 384 bp, Glycine max
  unsure (1)..(384): unsure at all n locations
  Clone ID: LIB3028-044-Q1-B1-A9
cttctaacacatacactactctctctctctctcttattgtatggccgccaattccagtagccgagggatcaccgccttagggaagcgagtcgccaaccggatctggacttccaacgcacctcctctcacttcaaggaggggagcatacagtagcggctcagtgtacgacaagaaccctgatgatgagatccagtctgggcaggtcccagacgatgtgatccaggcggcaacacaatccggcaaatactgggccccacatccacagactggggtatttgggccccccggaggaggtgaccaaactgcttctgccattcactctgatgcgctggaagagaanggctggtttccgcccaacagtctcgaggatttcgagaagcctca

SEQ ID NO: 1498 - DNA, 169 bp, Glycine max
  Clone ID: LIB3028-044-Q1-B1-B1
agcaaggcaactggacagctctggcatttatgtggaaggagagcccgattgcagttttcttcccccgggcattgggtccgtggacagattcatcaggagtcctaaccttcaagtgggatgtggacaacgcaactgcagtttttgtatcggcgctccttggttttctctt

SEQ ID NO: 1499 - DNA, 373 bp, Glycine max
  unsure (1)..(373): unsure at all n locations
  Clone ID: LIB3028-044-Q1-B1-B10
cttagctcaaacctcacctcaataatctttcgtgctagctagcttaatcatattccaattccaacagaaccaaattctgctagctagctagtacgtcaaaggaaataaaataatatggcattcagcgggacccaacagaaatgcaaggcttgcgacaaaactgttcacttggtcgaaggtttatctgtcgatggggctgcttatcacaagaattgcttcagatgcagccattgcaatggccttcttgcgataagcaactactcatccaccgaaggggttttgtactgcaaggtgcactttgagcagcttttcaaggaaactggcgcctaccccaagaaatcccagtcgtctggaaaagcctcnactcgagctg

SEQ ID NO: 1500 - DNA, 378 bp, Glycine max
  Clone ID: LIB3028-044-Q1-B1-B11
ggcatctatggattctgcttcattttttcgggacaaaagccttggtgcagactcccctatttctggtttaattgcattactagcagctgttgatgcactttctcatttggatggtcttggtgaccttagtaaacagcttgtttttgcagttttcactggagaggcatggggttaccttggaagtaggagatttttggtagaacttgacatgcactcagatgctgttcatggccttaatcagacattaattgaaacggtcattgaaattggttctgttggaaagggtctcagtcaaggtgttaaaaacttttttgctcatacaaaaggggattcttctgccacaaatcagacagtggctgccttgaaacgtgcacagga

SEQ ID NO: 1501 - DNA, 274 bp, Glycine max
  Clone ID: LIB3028-044-Q1-B1-B12
cgtatctcgggattctgcatcattatttccggacatctccattggatcaatcacccctattactggtgtaaatgcattactagcaattgtgtacgtggtttcacagtttgatggtcttggtgagcttagtataaaacgtgttgatgtaattgtcactgtagaggaatggggttactttctgatgtaggaaagatttggtataacatgatatctaatcagaatctgtacaaggccttactcagccatcaactgagtcggtcactgaactgggttc

SEQ ID NO: 1502 - DNA, 195 bp, Glycine max
  Clone ID: LIB3028-044-Q1-B1-B5
caaaggttaagctttttacatatatttcttcttttcactttgtagatataaaggaaagaatgattcatgtgtcaacttactggtttggtggtcgccatccaaatatacttgtcagataatgcttttcattgtttcaaaattgttacactggcatttgtctaccactgcaatgagaacatacggaaacttggcctc

SEQ ID NO: 1503 - DNA, 332 bp, Glycine max
  Clone ID: LIB3028-044-Q1-B1-B6
ttcagtttgtggcgaaaggagagaacgtgtgtgcctcgccgtgtaagagtttatgggtgctgcgaaaggagagaacgtgtgtgcctcgccgtcgccggaaatctcgaaggaagtggaccccagccatgcctccgagaccttgcgcatcgttaacgttatgggggctgccacccccattcccgctaactgcaacgcgcgtggcttctacgacgctttcctccgaagcttcatcaaggtcgatcacatccaacgtggaagaatttcatgcactgtgagtgccaaaccacccatctgtaatcgctatggaactctgcatggaggttctgttgggt

SEQ ID NO: 1504 - DNA, 317 bp, Glycine max
  Clone ID: LIB3028-044-Q1-B1-B7
cacatattctttgttgcaatatcacaaagaccgcgtccgtcacaatgcagctagctgtggcggccaacgctgtcgtttcagcgtcgccgttccgacctcatccccttctccggtcatccttctccggcgtctccgttaagctcactccgcaatccataacgttgtcacgcttgaagcccctcaccgtcgtcgccgccatcaagaaggccgtcgctgtcctcaaggggacctccgccgtcgaaggcgtcgccacgctcagccaacgagacgagcgggcgaccacagtttctgttaccatcactgggccttagccgggg

SEQ ID NO: 1505 - DNA, 379 bp, Glycine max
  unsure (1)..(379): unsure at all n locations
  Clone ID: LIB3028-044-Q1-B1-B9
cttgtctccgaattagttatcttgagaaacattattcccattgctatatattatggctagcatgaaggttacatgggtggttgtgatcatgtgcatggccgtggtgggtgcaccgatgatggcgcaagccatgacatgcaatgatgtgacggtgaacatggcacagtgcctatcctacctgatgcagggaggaacaccttcaacactttgctgcagcggagtcaagaacattcttggctctgctgtcaccaccgttgacaaacaaactgtgtgcaactgtctcaaggcggatgctgctangtacaacatcaatgaccagtatgctcaggcactccctggtttctgcaaggtcaatgtcccttacaagatcagccgctca

SEQ ID NO: 1506 - DNA, 218 bp, Glycine max
  Clone ID: LIB3028-044-Q1-B1-C1
gttgtcactcggtggtatagggcaccagagctcctaggctgctgtgacgactatgggacatctattgatgtttggtcagttggatgcagctttgcagagcttcttggccgaagaccgattttccctggttcagagtgtcgcatgcatctgaagttgagtatcaatatccgtgggagtcagagggaggaggaggttcaattcattgataagccataggc

SEQ ID NO: 1507 - DNA, 370 bp, Glycine max
  Clone ID: LIB3028-044-Q1-B1-C10
taaagatgaaattcgaacaatgattttttcatattctttttaatacttttttggtttagactccctaagaatctgtcgatatttccaattaaatcatcttgttcctgtgaaagtcctataaaaaaaagggctatgccctttctttactcagaagggccttaatccaagttccaccaaacaagtttttattcatttgaaacatcattttttccgaatacaagaaaaaattcatttcaatttcaattatttctataagataaaatcgatatagatagattttatcttatagaaataattgagaaatacattcagttatgtcttcgcgtatcaaatattttcttttcatatcgatgcgtacgatatttttcca

SEQ ID NO: 1508 - DNA, 377 bp, Glycine max
  Clone ID: LIB3028-044-Q1-B1-C11
ggtagggttcaggacaatgcttttgatgctgaggttgaaactttgggtaaaatcaggcacaagaatattgttaagctgtggtgttgctgcaccactatggattgcaagctcttggtttatgaatatatgcctaatggaagtcttggtgatttgcttcatagcagtaagggagggtcgttggattggccaacaaggtacaagatagctgtggatgctgcagaaggcctctcttatctgcatcatgactgtgttcccgcaattgttcatagagatgtgaaatctaacaatattttgttggatggggacttcggtgcgagggtggctgattttggagtagctaaggcggttgatacacaccgataggaactaaatccatg

SEQ ID NO: 1509 - DNA, 370 bp, Glycine max
  Clone ID: LIB3028-044-Q1-B1-C12
ctccctctcgattttaacaaccaactgccaaataattaataatacaataacctaaataaaccgaactctggttaatcattgtgacacgttattttaatttttggtagaaagtaaacaacaaaaaattaaatttgattgttgcttattaaagagagggggagggagacaagatacaccaaagtcgtcgctcatggaagacttactcggccttttaaggattcacatcaagcgcggtgtcaacctcgccgttcgtgatgtcaatactagcgatccatacgtcgtcgttaagatgggcaagcagaagctgaagactcgtgtgattaaaaaggatgttaatcctgagtggaaggaagatcttacgctttctgtt

SEQ ID NO: 1510 - DNA, 332 bp, Glycine max
  Clone ID: LIB3028-044-Q1-B1-C2
aagctttcttcaaggactttgctgatgccatggagaaactttctgtgtttagagtcaaaactggcgacaaaggagaggtgaggaacaggtgtgaccaattcaacagtattcctgcctaaatgaccgaagttactgaggttgaaattactagataattcgaaactatttcctatgcttgcatttatatatgacacgtgcatacttaaaagtattgacaattgatgatatatatatacatgtcatatatcaagattaattaagatcgtatagtctcggaggatctgataatttctagagattttgtgtacctagagagtcactatggatataca

SEQ ID NO: 1511 - DNA, 266 bp, Glycine max
  Clone ID: LIB3028-044-Q1-B1-C3
ggtggagtggcggacatgtgtttcgatgggaatgcggtggagatcggacggctgttaggggacgtggccttcgagttcgagaaaggcgtggagatcgtggttccgaaggagagggtgctcgctgacgtgggcggtggggtccactgcgtgggaatcgggaggtccgagagattgggtgcggccagcaacatcgtaggcaacttccaccagcagaatccatgggtggagtttgatctcgcgaatcgaagaatcggattccgtgtggc

SEQ ID NO: 1512 - DNA, 113 bp, Glycine max
  Clone ID: LIB3028-044-Q1-B1-C4
ggaaacttcacctctccacaccacaccttactatcaacttacctctcgccctgattttcccagactctctttctcggtgagtagcacccatgaatatctttgtacctacatat

SEQ ID NO: 1513 - DNA, 194 bp, Glycine max
  Clone ID: LIB3028-044-Q1-B1-C5
agcaattctctattctgaagatggatttgacagcaagtggcaggggaatttcatttatgaccttttgggtctttcgtcctcgcgattccgctatccctgttttgtcccatccttgctctattgcgtttcaaatgaacggatgggtgtatcccgatgggtaccagacggtgaacctctccagtggcaggctccct

SEQ ID NO: 1514 - DNA, 182 bp, Glycine max
  Clone ID: LIB3028-044-Q1-B1-C6
ggccagtagaacccccttgtttattctgcatacagatcgtcaggggctagccaccgagtgcagtgcagggatcggagaataatggtagagacagattcgtcgtcctcttcagatggagaaccctcgcaatcgctggcgtcgatggcggagaagctgcagcgttctggcattcactctgctcg

SEQ ID NO: 1515 - DNA, 197 bp, Glycine max
  Clone ID: LIB3028-044-Q1-B1-C7
gagattaaaaagcaatatgtcgtgtttgagtgctaaggtcgtgagtaatatgccattgggtccattgagcgccaagttatgcttagttgttaatctttgtaatagctaaaacaatcacctacagttgtttgctcatcgaagtggctagggacagtgtgttttagtgaatgtctatctttgctatgtctgggttggtt

SEQ ID NO: 1516 - DNA, 381 bp, Glycine max
  Clone ID: LIB3028-044-Q1-B1-C9
gagaggtccaccaaccttgactggtacaagggaccaactctccttgaggctcttgaccaaatcaatgagcccaagaggccctcagacaagccactcaggcttccattgcaggatgtctacaaaattggtggtattggtaccgtgccagtgggacgtgttgagactggtgtcgtgaagcccggtatggtggtgacttttggtcccactgggctgacaactgaggttaagtctgttgagatgcaccatgaggctctcacagaggctcttccaggtgacaatgttggctttaatgtgaagaatgttgcagtcaaggatctcaagcgtggttttgttgcatccaactccaaggatgaccctgccaaggaagctgccaacttcaca

SEQ ID NO: 1517 - DNA, 336 bp, Glycine max
  Clone ID: LIB3028-044-Q1-B1-D1
gagaaaaatgaagtctttccatctcacagtgacagctttgtgctgtgtagtggttgtgcttggagtgcttccactctccctagatgcacaactagatccctccttttacagagacacttgtcccagggttcactccattgttcgtgaagtcgtcaggaacgtttcaaagaaagatccccgtatgcttgctagtctcattagacttcactttcatgactgctttgttcaaggatgtgatgcatcagttttgttgaacaacactgccaccatagagagcgagcaacaagctctgccaaacaacaactcactaagaaggtttggatgttgtgaacgaca

SEQ ID NO: 1518 - DNA, 364 bp, Glycine max
  Clone ID: LIB3028-044-Q1-B1-D11
ggaacatcgggacaaggaagaacatttactacagaggtgattgaggcaatggcttctattaacgagagacctattattctttctctttccaaccctacgtcacagtcagaatgcactgctgaagaagcttacaagtggagccagggacgtgccatttttgcaagtgggagcccatttcctcccgttgagtatgaggggaaagtgtttgtgcctggccaggccaatagtgcatacatatttcctggatttggtcttggtttactaatgtctgggaccattcgagtgcatgatgacctgcttctggctgcctctgacgctttggctgcacaagtgagccaagagaactttgataaggggaccatat

SEQ ID NO: 1519 - DNA, 373 bp, Glycine max
  unsure (1)..(373): unsure at all n locations
  Clone ID: LIB3028-044-Q1-B1-D12
cttgctccctcagaagcgaagaagaagccacagagaactagtctcctactctcacccgcaagaaaaaatggcatctcacatcgttggatacccccgtatgggtcccaagagagagctcaagttcgctctcgagtctttctgggatggcaagagcagcgccgaggatttgcagaaggtgtcttctgatctcagggcatccatctggaagcagatggctgatgctgggatcaagtacatccccagcaacactttctctcactatgaccaggttctcgacgccaccgccaacctcggtgccgttccancaaggtacggctggaccggcggcgagattgggtttgatacctaagtctccatggccagaggtaatact

SEQ ID NO: 1520 - DNA, 323 bp, Glycine max
  Clone ID: LIB3028-044-Q1-B1-D3
gatctgtccatcgccgttgatttcgtccgagttgagtcctacggtttcggaaccgtttccaatggcgcacccagcatttccttcgatttgaaggtcgacgtcaacgcccgtcacgtcatcgtggttgaagacattgtagatactggacataccttatctaaagtcattgggcacttgaaatcaaagggagtagcctctgtttctgtatgcactttccttgataaacctgcaaggagaaaagttcattttcagttgctgggtgaagggaaatactacgcgggatttgagtgtccagaccagttcgttgtaggtaatggacggga

SEQ ID NO: 1521 - DNA, 80 bp, Glycine max
  Clone ID: LIB3028-044-Q1-B1-D4
ttttaagagcattaaattgtggagtttcttttacatttgtcagttatgctttatctctatataaaaagcatcttgtattt

SEQ ID NO: 1522 - DNA, 313 bp, Glycine max
  Clone ID: LIB3028-044-Q1-B1-D7
ccaggttgtgcctggatatggacatggggttttacgccagacagatccaagatacacatgtcagagggagtttgctttgaagcatttgcctaatgatccatatttccagctggtgtctaaaataaaagaggttgtgccgcccattcttaccaagttaggcaaggttagaaatccatggccgaatgttgatgcgcacagtggagtgctactgaactactatggtctaactgaggaaaactattatacggttctctttggtgtagcagcgagcgcgggagttggccctcagttgatatgggatagggctcttgga

SEQ ID NO: 1523 - DNA, 141 bp, Glycine max
  Clone ID: LIB3028-044-Q1-B1-D8
cactattgtgtttagttttgtttcctttgtagtttttatttttccgttttattgttttgccccccgtttgtaattgcatgcttggaaccggatagagattgtgttgaaattttatcgcttacaattcgtttgagtttcctc

SEQ ID NO: 1524 - DNA, 334 bp, Glycine max
  Clone ID: LIB3028-044-Q1-B1-D9
gaaaaactttctataattagagtctcactctcagactcgttgtatgtatggctacgctctcgctcactctcaactgttggagtaacgtggaacttgctcacagaagatttccgtcaaccttaacttccctcggccgaaggaattgtatagtcaaacgttcttttgccaggaggtcattgacaaatccaggaaaaatgttatacaaggaacttgacatttcttacctgataagtttgtgttcagaatgaaaacttggacacttctctaactcgagctgccgcgatttctaaccctttacctcccatgagtgctgtgcttcacgcttccagaaaac

SEQ ID NO: 1525 - DNA, 374 bp, Glycine max
  Clone ID: LIB3028-044-Q1-B1-E10
ctcgagccgaatcggctcgagtgacgttgaagccacagtcgctcttttaggagctcactcagtgggaagagttcactgcaagaatctggtgcacagattataccccaccatagattcaacactggaccctgcacatgctgagtacctaagacgtcggtgcccaacacccaatcccgatccaaaagctgttctgtattcaaggaatgaccttaaaacgccaatgatcattgacaacaactactacaagaacatcttgcaacacaagggtcttctcactgtggatgaagagcttgccactgacccaagaaccgcatcttatgtccaaaagatggccaatgacaatgaatatttcaaccaacagttctcaagggcca

SEQ ID NO: 1526 - DNA, 376 bp, Glycine max
  Clone ID: LIB3028-044-Q1-B1-E12
aggaaagaaatggtcatccttggcacacaatatgctggggaaatgaagaaaggtctctttggtttaatgcactacctcatgcccaagcgcaatattctctccctacattctgggtgcaatatgggcaaagatggcgatgttgcactcttttttggattatcaggtactggaaagacaactctgtctaccgatcataaccggtacttaattggagatgatgagcattgctggagtgaaaatggagtggcaaatattgaaggaggttgctatgcaaagtgtgtcgatctttcaaaggataaagaaccagacatctggaatgccatcaaatttgggacagtactcgaaaatgttgtttttgatgagcatactcgagagg

SEQ ID NO: 1527 - DNA, 304 bp, Glycine max
  Clone ID: LIB3028-044-Q1-B1-E3
atcagagcctcttagattatctcccacttcagagcgactcacacataaaatctctccaagtgctgcatttgcgagttgaacctcaaaatcagtctctaatatttttctcactgtcttgtctctccagagaactgtatagagagagatagcagctgcaacatctggtgctgtgttaaatgggttgggatcttccgtcttgagtggaggaaacaggagccaaacccttctgggcactgctattggacgcaaggttggtgcggctgccgttacggtgagcgctagaagactcattgtggtagctgct

SEQ ID NO: 1528 - DNA, 86 bp, Glycine max
  Clone ID: LIB3028-044-Q1-B1-E4
aaacccataaatcctctcaccacataaacctcagttgagttgcactgcacgagaccaggtccatgaaattgtaagggtccctcacc

SEQ ID NO: 1529 - DNA, 201 bp, Glycine max
  Clone ID: LIB3028-044-Q1-B1-E5
tcttaacatatagaacactaccctgaagatagtaaagaagccagtgctaggatttgttagtgaagcgggtggctcaaaccatgttgctcatgtctagtgtctctagcagttattccgtggatttgactaaagaccttttcctcgaagtgcagagtcaaagtgtaagggctaagttctctcaactctcaggcaacctatttc

SEQ ID NO: 1530 - DNA, 239 bp, Glycine max
  Clone ID: LIB3028-044-Q1-B1-E8
ctttccacttgtctccgaattagttatcttgagaaacattattcccattgctatatattatggctagcatgaaggttacatgggtggttgtgatcatgtgcatggccgtggtgggtgcaccgatgatggcgcaagccatgacatgcaatgatgtgacggtgaacatgggacagtgcctatcctacctgatgcagggaggaacaccttcaacactttgctgcagcggactcaagaacatt

SEQ ID NO: 1531 - DNA, 341 bp, Glycine max
  Clone ID: LIB3028-044-Q1-B1-E9
ccaaatctacgttgcactgctttggctgcatgtgctcatcccttctttgacgatctgcgggacccaaatgcatgcttgccgaacggccgaccactacctcctttgttcaacttcacatctcaagaactggcgaatgcacctgaagagttgcggcaacgcctcattcctgagtatgcaaggagttgaatcaattccaaagttgaaacatctctagggcattgtaaatgggttttgaattattggacaccctcttggtcatcgcccctgaccagcctgttctgttctgttcctcagcctcttctctgcacaagtcacatctgtgactatacaacgtgagaaac

SEQ ID NO: 1532 - DNA, 319 bp, Glycine max
  Clone ID: LIB3028-044-Q1-B1-F1
gccatttccatttttttctggttttctttcaccatggcctccgccgccgccgtcgccgccgaagacgacgctgtcaacggcttcactcggtcggagatgtactcggaaaatctcgccggcacagtcgacacctacgaccgacacgtgttcctctgctacaagagctacgtgtcatgaccggcactcatcgaggcatccgatgccgatttcttgcgtaagcgcgtcggtgccacctgtcaagcccgcaagaacgacttgcggcgcatgacgaatatcgggtgtgcgaggcgcgcgaggaagctggcttctccgacggtga

SEQ ID NO: 1533 - DNA, 364 bp, Glycine max
  Clone ID: LIB3028-044-Q1-B1-F10
ggagtctcttagtttcctttgtaatggaaagttagaaaccctcatcgtcaaagcacgcgttttttttaatcgctctctctcaacaaatatttgtgggtagattcaattcaccatgtcgagctcatcggagtactctgaattttccggccagaaaccggcgaggtcgccggagaaatcgagcttctctcagacttgcagtctgttgagtcaatacatcaaggagaagggtagcttcggagatcttaccctcggaatgatatcatgtgggtcacctgagacatcttgtcaatctggcagaagcatgaacttgtttccttccaaggaaaacaacgtggcagcaaagaacctgacagctaaggatttg

SEQ ID NO: 1534 - DNA, 372 bp, Glycine max
  Clone ID: LIB3028-044-Q1-B1-F11
gtacaactcaacatgcaaagatgtaatcttagcacaaaccaaggctaaggagattaaccaatggaaggaggaacgtatagctgaggaagctactaagttgcctaaagaggcagctctagaactggcagaaaaggagaaagttaaagctcaagctgccttggaagcatatgaggaagccattaagatggttgaaaaggaagcacaaagaagaattcaggcagaggtgaaggctaggagagaggcgcaagaaaaggatcgagcattaaatctgttgattatcaacgatactcggtacagaaaatacagtataaaggatattgaagaggccactcagaagttttccccatcattgacagtaagtgaaggtggata

SEQ ID NO: 1535 - DNA, 95 bp, Glycine max
  Clone ID: LIB3028-044-Q1-B1-F12
aacctgacagcctccaaatccaatggcttcagagaagaaactttcgaacccaatgagggagataaaagtgcagaagctcgtcctcaatatctctg

SEQ ID NO: 1536 - DNA, 360 bp, Glycine max
  Clone ID: LIB3028-044-Q1-B1-F2
gtttcgtgcacggaaggctaccttacgactccatcgacactgatcatcagttacggaacctcctcttgagcatcaaacaaagaaaaattgtatgttactactctataatggatattttctttattattattgtattctaatcatcctaatatttttgcttttatcaggtttttactaattctgacaggattcacgcgatgagggcgctggataggcttggggtcaaggactgtttcgagcaaatcatatgcttcgagactataaacccgaaccttccgtattcaacccgacccgacgaattccccatcctccttaaaccttcgctcgacgccttcaaaatcgcgcttgacgctgccaacg

SEQ ID NO: 1537 - DNA, 340 bp, Glycine max
  Clone ID: LIB3028-044-Q1-B1-F3
ttcaaattctcatcacacaatggcttgcaaaccttcgtcgttccttgcacttcttctcatcgccactatccttcgtgccactacatggcaagcggtcgctagacgccacattattccaaaacactcaagcaaaggggacaagaaagagcctcaatttttgttccctccggaaggtaaattccacttgcctggctttgggggagtatgactgcgatcattcctttgggtttacacctcaaagcccaaagactggtggtagtggactagggtcaggacagcgaggtcgtggttatgttccaggtggtgatgacaccctttgtcccaaaccctggttttgagt

SEQ ID NO: 1538 - DNA, 189 bp, Glycine max
  Clone ID: LIB3028-044-Q1-B1-F4
ggaaagacaagctttttgggcacattgctcttttccaggggcatgcaccagccattcctttggatgacactaaaggggcaggggtacctgaggcacccattcatgatagcaaacagaacaacaattaggttcagagcatgaacttcacttttggatcaaatccttcaaatgcagagtaagttccaaatg

SEQ ID NO: 1539 - DNA, 335 bp, Glycine max
  Clone ID: LIB3028-044-Q1-B1-F5
caacggcacagcaggtggtggaagcatcattgccaatgacaagaaagcagtgtacaggcacattgtgaagtcagaagtgaatctcaatgctattattaatgggaaagcaggcttttcttccaacacgccttcttcaattaatccagacatatcatgtgaaagtaagactccacaagtagaggatatacacgatggttctagtgtgcttcacctggcatgcataattagtgattctgcaatggtagagctgcaccgacagtagggtgcagacgtgaatgctattgattctagagggaggacacctctacattacagcactatgagagggaagaatg

SEQ ID NO: 1540 - DNA, 313 bp, Glycine max
  Clone ID: LIB3028-044-Q1-B1-F6
ggaaagggaacaattggagtgcacgaaaatcattaaccacagccctaagccccccgacgccttccatcggatcgcctcctaaaacaccacacatcacaacgaccgtgtttcggagcaatcaatgtaaaatctatggacaataacgacgaatctttattctctctccgtcgttgtttgttgcatcattaagagtagatgccaatggatccgaatccgcaagcctccgtggagtccgacccggacccgcttcgcgtgaagacgaagacccttgagggggtgctcttgcagtgtcagagagctctcgaagtgatta

SEQ ID NO: 1541 - DNA, 359 bp, Glycine max
  Clone ID: LIB3028-044-Q1-B1-F7
ggcaaagattttgagcacaatggcctccacacaatgctttttgcaccaccacgccctcaccactccagcgagagcttcaacacagcgcctagttgtgagcaccaaaccataccacattgtttgcaaggcagcacagaagcaggttactgtccaagagggtgaggacactactactggccttgtctctcgcaggttggccctcactgtgctcattggtgctgctgctgttggctctaatgtggcacctgctgatgcagcctatggagaagctgtgaatgtgtttggaaaaccaaagacaaacacagacttcctttcatacaatgggaatggattcaagctctcaattccctcaaagtgga

SEQ ID NO: 1542 - DNA, 332 bp, Glycine max
  Clone ID: LIB3028-044-Q1-B1-F8
atccccaggaagcttgaatttaactatgtaataatgcattgaattagacatttaatgtattttagcccttaacatgtgttcattctacatttgtgatgaatattattgtagaatgaacacatgttaaaggccaaaatactattcatcacaaatgtagattttaagagtaggtaagtaattatatgtactaagaaaggaaaagtgtccaagcacttggaattcatagtcctacttacaaaatgccatcagtaagtttcactggtttactcccaagggtggtatcaaaatcttagaatagagtagaatagaccaatcgaattcacttttaaagt

SEQ ID NO: 1543 - DNA, 351 bp, Glycine max
  Clone ID: LIB3028-044-Q1-B1-F9
tgagaaacatggcttccttaagctccttagtgctgctccttgcagctctaattctatcccctcaagttcttgcaaactatgagaatcccccagtgtacaagcctcccactgagaaaccaccagtttataagcccccagttgagaagcctcctgtttacaaacctccagttgaaaaccccccaatttataagcctccagtagagaagccaccagtgtacaagcccccagttgagaaacccccagtgtacaagcccccagttgacaaaccaccagtgtaaaagcccccagttgagacagcagcagtgtacaagcccccagttgatcaagccccagtttacacgcccccagttg

SEQ ID NO: 1544 - DNA, 206 bp, Glycine max
  Clone ID: LIB3028-044-Q1-B1-G1
agaacttggtgataggcccgcctttgttgaatcttcatttatggtctttctttctattagttgttcttgtttgcgatatctttaaagctcttgcttttgttttgcttcaaggtgtggtgtgtttcacatttgaagtaacactgagacgagaggaaagtgaagttgagagttgaagaagatcatgaaatgggggttggttcccagga

SEQ ID NO: 1545 - DNA, 377 bp, Glycine max
  Clone ID: LIB3028-044-Q1-B1-G10
atgatatttgagaggttcttccctcagaactcagccaggctgagtgttcctggaggaccaagtgttgcatgtagcacagccaaagctgtagagtgggatgctgcttggtctaacaaccttgatccatctggtagggcagcacttggagtgcatgcatcagcttatggaaatcaggtcaaagctgtagaaccagagaagatcataccaaagatggaagtttccccactaggagttgccatatagagctagtatgagccatagcaaaaactagtagttgccctagaaccaaaatatattattatactagtcatcaatcactcattaatcatcataaatgaaaatttggcctgctgtgtagtttattcaggcaaggctat

SEQ ID NO: 1546 - DNA, 377 bp, Glycine max
  Clone ID: LIB3028-044-Q1-B1-G11
gtaaagagaagggcgtggagagatagagagggaagaaaaatgagtgtatcattgactgtgatgaccttcaatctccatgatgatgagccacaagacagtcctaattcgtgggagaagagaagggatatgtgcataagcgttattaccagttactcacccatcatcctctgtacccaacaaggagtgaaagcacaattggattttctccagcatggtttgctaggttatgatcaatttgggatatcacggatagggccccaagacactactgatcagcattgcactatcttctatgataaggaaaaggtcgagcttctagaaggtggaaccttttggttgtctgagtctccctctgtacctggaagcaggtcaggggg

SEQ ID NO: 1547 - DNA, 141 bp, Glycine max
  Clone ID: LIB3028-044-Q1-B1-G12
aaaacgtaaccatcgccggaacgatcccatttcccttgacttctcgacgtgaagatccttgtgtcacacagacccacttatcatgtcagagggaaatgtccggaaacgatagataatcgccatcatctgcgtttcaacctt

SEQ ID NO: 1548 - DNA, 313 bp, Glycine max
  Clone ID: LIB3028-044-Q1-B1-G2
atttttgaggagttaggagaccttaacagcttggttggattgggtgaaggcagtttttcctgtggccagaaaaatgaatatactacaagcgaaatgctttatactgttgatatattcgggtcttgtgaccatgacttcttggagttgcttgacctagagacaccgcagctctggctgaataaacatggaagtggtagccaagataagtaaggctaaaaaattgagggaagtatcacagcagattgattgaactatagccccaactacctaaccttgaagagagtaaacaaaggattctcttccggttcttcat

SEQ ID NO: 1549 - DNA, 370 bp, Glycine max
  Clone ID: LIB3028-044-Q1-B1-G3
attcatattctggaaaaaggttaaatctgttttaaactcagcttatcttgaagcaattcatgttgaattcttgaacttcactgtttttttattgccttttcttactagtaataatttgatttttaaggaggctccaaaattactagtcattattcactaccattcaactacattttcctatcttctagaattgagcttgtatttcagagagagtaaatataatgattactgaattaacgatttcttgtttctgtttttctcttttagtaactaagagtcttaaatgttcattgtaatggaataatgtacggatatatgaagcaacttcattggagcacaatagaaagaaatctatccgaaattcagattt

SEQ ID NO: 1550 - DNA, 225 bp, Glycine max
  Clone ID: LIB3028-044-Q1-B1-G4
cttacctcattggcactcttcctggtgacaatggatttgaccctctgggactagctgaggacccagagaacttgaggtggtacgttcaagccgagcttgtaatgggacgttgggccatgttgggtgttgcacgaatgctacttcctgaggttttcaccacgattggaatcatcagggcccctcaatggtatgatgctgggaaatcggagtactttgcatcaacgt

SEQ ID NO: 1551 - DNA, 353 bp, Glycine max
  Clone ID: LIB3028-044-Q1-B1-G6
atcgtagccgtcgcactctgtgttttcagcgccgtctccgatctccgacaatggcgacccaaatgagcaggaagagaaagttcgtagctgatggagtgttcttcgctgaactgaacgaggttctgacaagagagttggccgaggacggttactccggcgtggaagttagggttacgccgatgcgcaccgaaatcataattagagccaccagaacccaagctgttctcggtgagaagggaaggagaataagggaacttacctctgtggttcagaagaggttcaagtttcccgagaacagtgtcgaactttatgctgaaaacgtcaacaataggggtctttgcgctattgctcag

SEQ ID NO: 1552 - DNA, 356 bp, Glycine max
  Clone ID: LIB3028-044-Q1-B1-G7
ggatgaaacaattaaaaatcccaagtctgagagtgcacaaggagatgctgctgcaagtgccatgggcagaggtcgtggaggtggattccgtggtcgtggacgaggaatgcgaagatgatgatgagaagtgtattctacgggttgagtgtctgttcattgtctgtctaattcgtgaggccaatgcatgcttgtgtcttctacttggtgttgctggaagcatgccgatttttggacctacaaatcatgaaatgaaaatgtaatggagattctggcaacatcatctgatcaacctaggatagcaattttcaagcattgtctttctgacgatcgtttcgacttgagcttcgtgtgaaatt

SEQ ID NO: 1553 - DNA, 377 bp, Glycine max
  Clone ID: LIB3028-044-Q1-B1-G8
ctccactaaaaataccttgattaaatatttatatagtgaatagcagcaaagtggcaggagcttgcgtctgcaaattctatgttgtttgatttgcgtgagtgaattgggaagatgctgtgtctgggtcgattcggcggggtctcttacggttggagttggaatcggaggagggacaacaccattaacaggcccagatggcgtttgatggcccaggaatcaccctctctcgactcagacaaaaccgccactgctggattctgcatcattgaacgcccccaaactgtacaggattttgccaagatggagcttcaagaaattcaggacaacattcgaagtcggaggaacaaaatcttcttacacatggaagaggttcgcag

SEQ ID NO: 1554 - DNA, 378 bp, Glycine max
  Clone ID: LIB3028-044-Q1-B1-G9
cttctcttttctctttctgttttttcctggttactttctatgcctgctgtacgtcagggaaacgtgttatccattctgagttaactgaaagaaaattcattgaagtccagaaagctctaagtgctactgaagctatggatgttgatcactgtgaaccaaacagcaagttcaaaaaaactggtttccatttaaatggaagcaactatgacgtgtctacatgtggggttctccactccattggatcagatttaacaagaatgaaagtgacatctgagacaaactatagtgactccgggagtggacagaaaactataaaggcaaaagagcccgggaacactcccataagcatgccagttatctcaagagagagttttgcgc

SEQ ID NO: 1555 - DNA, 240 bp, Glycine max
  Clone ID: LIB3028-044-Q1-B1-H1
agctactactcctcctccaccaccacctgttgcatcattggagcatggtgaaggtgctcatcatgaaggagaggccaaggagaagaaaggtatattagaagagatgaaagagaagcttcctggttatcactccaagacataggaagagaaggaaaatgaaaaagaaagtggtgctcattgatatttaagattgagacaaggcttttttgtttggttggagatccatgattgtggtgtgct

SEQ ID NO: 1556 - DNA, 381 bp, Glycine max
  Clone ID: LIB3028-044-Q1-B1-H11
aagaattccagactatgtacgaatcagtaaagagtgtaggcaccttttgtctagaatatttgtggccaacccggaaaagagaattaccataccagagattaaaatgcacccttggttcctaaagaatttgccactagaatttatggacgagggcgaatgggtgttgcagaatgatgatcatgtgaatgaagagtcatctgaaatcactcaaagcattgaagaaatactggccatagttcaagaggctaggaaaccgggtgagggcccaaaagttggtgagcaatttgttgggggcagcatggacctcgatgatattgatgcggatgctgacatcgatgacattgagacaagcggtgattttgtctgtgcattgtgaatgat

SEQ ID NO: 1557 - DNA, 168 bp, Glycine max
  Clone ID: LIB3028-044-Q1-B1-H2
atttggaaattctcacaggcatacactgcgaccccactctccctgtcgaccctatctcccactctcttgcccgcgacgctagctctcccattctcgctcgacgctggttccgcatgctccccttgctcgcggtggttcagatcaatctgtctcgcatgcactgtggtc

SEQ ID NO: 1558 - DNA, 320 bp, Glycine max
  Clone ID: LIB3028-044-Q1-B1-H3
gaaactgtatgacatatagattgagtgttgctgatgtatattggtaacattgaagttgggaatgcgtttgagggcgtttctgaatgaaattcgtattgtgcattcaattagcacttttccctagttattttaactgcctgtagttggcctctttaacttataatttcctttgtgttatcttgcagcttcttgggtgccatggaccattgggcaatcgtgaacctgggaagagcctttttggatactgcaactacttcgtagtcggtcttttaagcgcgacggactagacctttggataacattagttttgcaagagtgaa

SEQ ID NO: 1559 - DNA, 368 bp, Glycine max
  Clone ID: LIB3028-044-Q1-B1-H4
gaatgattgatcgaatgatattgggtatacaacacctgtacaagagaccaatatatgcgcggatgcctgaatgcagtggtaattctcccaactatggaccattacctcctgatgctcctgcttggtgtcaggccccttttgatcctgaaggactcctaagttcagtgatggctattgtcacctgcttgattgggttgcactatggacatattattgtccattttaaggaccacagactcagaatcatatactggatgatcccaacctcttgtcgtttagtttgtggccttgcgttggacttatttggaatgcatataaataaggttctctactcgctcagttacacaggtgtcactgctggtgctgca

SEQ ID NO: 1560 - DNA, 351 bp, Glycine max
  Clone ID: LIB3028-044-Q1-B1-H5
ctgataagatggaggtgatgattaaagattttctcaaggagaactcaatggacattacagaataaagtcttttaaagctcaagtatgacccaaagtctagttggggttatgttgaggttcacattgagcagggtcctgtgctagaatacgttggtttcccacattgagtgtggttaaaggcatatctgggcagacacgattgaaggttacagttagaggttcacaaggtgatgctggaactgttccactgtccatgcgccatgatcttatggcgtgtgctgcggaataaattgtagtcttggaaagcctctgtaaacaccctgaagtataacgttctgtatgatggtcatt

SEQ ID NO: 1561 - DNA, 343 bp, Glycine max
  Clone ID: LIB3028-044-Q1-B1-H6
cgcattttccggctgcgttcactctcacgttttccgcttcagtttgcacgggaaaatcatggtgaaaggtcgaggcctctactctgacattggcacgagagctcgcgatcttctgtgcaaggattatcagaatgacgacacgtgcaccatcaggacttacacttccagcggagtggaaatcacttcagctggagtcaggaaaggtgagatatatttggccgatgtcagcactagggtgaagaacaagagcatcacaactgatgtcgaagtggacactaagtgacatctgcgtagaatcattactgtggatgaacctgcccctggactcaagacagtttttagc

SEQ ID NO: 1562 - DNA, 354 bp, Glycine max
  unsure (1)..(354): unsure at all n locations
  Clone ID: LIB3028-044-Q1-B1-H8
attcatctgaagcttctatcaaagattccaagcttgtgatatctgcaaaaagcattaattatgggcttaacattctacagggcattcaaaatgagaacaaaaacttaaaaaaatcactgaaggatgtggttactgagaatgaatttgagaaaaaacttcttgctgatgttattccgccaaccgatattggggtcacatttgatgatattggagctttagaaaatgtgaaggacaccttgaaggaattggttatgcttcctcttcagaggcctgagttgttttgcaaaggacagctgaccaagccttgcaagggaatattgctttttgggccccctggcacagganaaacaatgc

SEQ ID NO: 1563 - DNA, 382 bp, Glycine max
  Clone ID: LIB3028-044-Q1-B1-H9
gatcgagataactagaaacagtgtgatgaaaatgaaggtccttgttttcttcgttgctacaattttggtagcatggcaatgccatgcgtacgatatgttccctctccgaatgaacactggctatggtgcccgtactccggaggtgaaatgcgcaagttggaggcttgctgtggaagcacacaacatctttggctttgagaccattcctgaagagtgcgttgaagcaacaaaggaatacatccatggcgaacaatatagatcagactccaaaacagttaaccaacaagcttacttttatgccagagacctcgaagtccatcccaaggacacatttgtgttcagtatagatggcaccgtactctctaatattccatactacaaa

SEQ ID NO: 1564 - DNA, 387 bp, Glycine max
  Clone ID: LIB3028-045-Q1-B1-A1
gttcttaaagcagctatggccataaatgctcaaactctatcagaaatggagatccctgaaagctatattgaatccctacccaagaatggaagatcaagtcttggggacttgatctacaggagcattacagatgattttttcgatcctgatcagctcctatcagccatggacatgtcatcagaacataaaatcgtagatctcaaggacagaattgaggcatccattgtgatttggagacggaagatgaaccaaaaagatagcagcaaatcagcttggggttctgctgtgagtatggagaaaagagaaatctttgaagacagggccgaaaccatcttacttctcctaaagcatcgttttcccgggactccccaatctgcattggatata

SEQ ID NO: 1565 - DNA, 368 bp, Glycine max
  Clone ID: LIB3028-045-Q1-B1-A10
tatctacacacttctcaaccaacaatggcaatggaaactcaagcctctctcttcaccccacttctctccggtctcaaacccagcgaccgagcatcgcgcgatggtaacaatcctccaacctctccttctccacctcgaggcccctcaagttctcgcgatcaatcagagcatcagccaccgaccagaccacagaggcaccggttgggttcactccatcggaactggacccaaacaccccttctccgatcttcggaggcagcaccggcgggctcctgcgcaaggcccaagtggacgagttttatgtcatcacatgggactccccgaaagaacagatctttgaaatgcccactggcggcgctgccatcatg

SEQ ID NO: 1566 - DNA, 387 bp, Glycine max
  Clone ID: LIB3028-045-Q1-B1-A11
aatatccaccaggagttggatactggtcgtgctagctagcgggccaaagtagtgcctaagtcttcctcatatcttccaccctttggcttattagtgggagcaatacatatcattcattcagaggcaacaaaggagttgtaaattaagagcatggctgcacaagctcttgtatcatcatcatctcttaccttctcagccgaggctacaagacaaagtcttggaccaagatcactccaatctccatttggcttctcaagaaaagcctcctttcttgttaagggagctgctactccccctgttaagcaaaggatcagacagacctttgtggtttgcatcaaagcatagtccttcctacttggatggcagccttccgggtgactatggatt

SEQ ID NO: 1567 - DNA, 343 bp, Glycine max
  unsure (1)..(343): unsure at all n locations
  Clone ID: LIB3028-045-Q1-B1-A12
ctctggaactctcattacngagaatatgcaagagaacttgaagaaactgaaagaggtgaatacgaatcttcgtaaggagattatgcagagaatgggagattgtctgaacgagctgggcatggaagatctcaagctccttgaggaagaaatggacaaggccgccaaggttgttcgtgagcgtaagtataaggtgataacaaatcagattgacacccagaggaaaaagtttaataacgagaaagaagtgcacaacacgctcctgcatgacttggatgcaaaagcagaagattcacgttttgcattgatagataatggangggagtatgagtctgtgatcggattc

SEQ ID NO: 1568 - DNA, 273 bp, Glycine max
  Clone ID: LIB3028-045-Q1-B1-A2
gtcaacctcaacgccattaaccaggtcaatgggaagaagccatggtcactctctttctcctttggaagggcacttcaacagagcacccttaaggcatggggcggaaaagaagagaatgtgaagaatgctcatgaagcccttttggtaagagccacagctaactcaaaggcaactctgggaacctacaagggtaactcacaccttgctgatggtgcctcaaaaagcctccatgtttcgaactacagctactgatcaatcaagtttggtgttgtt

SEQ ID NO: 1569 - DNA, 323 bp, Glycine max
  Clone ID: LIB3028-045-Q1-B1-A3
tcggttcgggatttcatcgtgcattcaatggccaccacagcagctctatccggaacaatggtgagcacctccttcatgaggaggcaacctatgaccaccacaggcctaaggacattccccaacgttggggaaactctttttggtctgaaaattggacgaggtggtcgtgtcacttgcatggcctcgtaaaaggtgaagctcataaccccacaaggagaagtggagtttgaatgcccacatgatgttttcaatgttgacaaagcagacgacgaaggcattgaacttccctactcgtgcaaggccggttcttgcgtttcctgtgt

SEQ ID NO: 1570 - DNA, 402 bp, Glycine max
  Clone ID: LIB3028-045-Q1-B1-A5
ccaaacccttataatttacagcctcgagcttcctgataaatgcaagcctttgaaaaaggatacaatttgcagccaaaggcgtcatgatgcggaggttctggcaagttctacaggttcaaaggtagcaagtaatacatggattctgaattcaattgcagcctgcaaactgaaatgccttgctcaatgaaatgtgaaaattgagatcatttacatgcatatgatctcaaactgatgtttttcccttttcatcattaattatcatgttaaaaataatattggcaatattatgcaacaaaaaatttaggagtcataatatatactgtgaatgtatccccgatggagcgagaattgtgtttgaaaccgtcttatatcaatggtaaaatctcaatccttggcaatttt

SEQ ID NO: 1571 - DNA, 406 bp, Glycine max
  Clone ID: LIB3028-045-Q1-B1-A6
caacaatccaccctgtacgtatcccctccacttcatccaggtgctcggcccaatgtgtcaggaaaacaagagtccaagagcaagtcatccagggagagcatggctgaaaagaatgaggaatctaatgatgtcactacagaccttgagttgaagactcctgggtcttctgcagatcaggatttatcatctggacaaagaaaatctagcaagttgtcaaggagggaaagcagctgcactgaatggagttcattaggtatgtgttcttcttgtagcgttcaggacagctcatcaagcagtgtggtggcgagcagaaaggataacgaatgataaagtagacaagttagtcaagttcttgtgccttgaagctgctgaagtttttcattgtgcatctgctgcaactctggag

SEQ ID NO: 1572 - DNA, 397 bp, Glycine max
  Clone ID: LIB3028-045-Q1-B1-A7
gaaccaagacaaagaaagggttaagtacattaactcaaggatctcaaagaacttgggccaagatagtagtgtgagtgaattggactcagttacactaccagccaagtctggtagccttattgggtctgggaattactttgtggttgttggtcttggaacacccaagagggacttgtcactcatctttgacactggcagtgatctcacttggactcagtgtgaaccatgtgctcgttcttgctacaagcaacaagatgctatctttgatccatcaaagtctacatcatattccaatattacatgcacatctacgctttgcacccagctctctactgctacagggaatgagccgggatgttcagcctccacaaaagcatgcatatacggcatccagtac

SEQ ID NO: 1573 - DNA, 376 bp, Glycine max
  Clone ID: LIB3028-045-Q1-B1-A8
cgaggccgggctcatcgccggtggcatcggcgccgccgtgggaaaccccgccgacgtggagatggtccgaatgcatgccgtcggccgcctcactccggcacaacggtgcagctacaagtctgttgcggacgccatcattctaatggctaatcatgagggcgtcactaggcagtggagaggctcatcgcttacggtgaaccgctccatgctcgtgacagtgtcgcagatggcttcctacgagcaattcacagaaatgagtcaccagaactgcatgatgctcgacagcctcgggacccacgtcacggagagcttcgcggtggagttcgtggtcgaggtcgcgtcgaaccgcatcgacatgatcaagaccacagtgatg

SEQ ID NO: 1574 - DNA, 246 bp, Glycine max
  Clone ID: LIB3028-045-Q1-B1-A9
aaacactcataacacaaagcacaaagcaaagctcatccttgagttaaaaaatggcagcagcttcttccatggctctctcatccccatccttggctggcaaggccgtgaagctgggcccatcagccccagaagtgggaagggtgagcatgaggaagaccgtcaccaagcaggtctcctcaggaagcccatggtacgggccagaccgagtcaagtacttggggccattctctggcgaacccccgttct

SEQ ID NO: 1575 - DNA, 386 bp, Glycine max
  Clone ID: LIB3028-045-Q1-B1-B1
ggaactgggcttgcacttgttggagttttcttgtactcaagggcaaagaggatcaagtcagtccaaaagacaaattgaggctgcataacccttcaaaaaagaaaggaaacaggcagagggaaaagtaaatattgtagacacataacagccattgattttttttttctttctttttacattttgtgagggtatcactactccttgttaattggccatcctatgcgactaaatcttagtaaataatataggagtttaatagacatgtactgtaagtttaattttttttacaaatattcagaaatctttattgacatgactatagttattataaaatttaattaacttaatatatatatatatatatatatatatatatatatatatat

SEQ ID NO: 1576 - DNA, 383 bp, Glycine max
  Clone ID: LIB3028-045-Q1-B1-B10
aaaacatggcacttttgcaacaaaaactaggcttctcatatctactaatcctttgcttagccactcttgtttcttcacacaggccttatacaactccaagtgtcacacgcttgactgattcttttcctcgtgtccaagttgatagtgctttttctaagacctttggggccaaaaatatccagtttcttagtaatgggtccacggtcacactggctcttgacaaaatctcaggctcaggcttggtatcacaaagcagatactcctatggattcttcagtgctgcaatcaaactaccttctggtttgtcacctggagttgttgttgcattttatttgtctaattcagataaatttcctcacaaccatgatgagatagacattgaa

SEQ ID NO: 1577 - DNA, 359 bp, Glycine max
  Clone ID: LIB3028-045-Q1-B1-B11
caagattttccttggttctcttctctcgatcgggtgtgtacgtaattaacataacatgtttcgataagcacacaccccttgtgtcatggcatgatgatgatgatgatgagaccagtaacgtggccctgataaagttttcaaagtctaagcatcttcttccttgttgtcatgcatgcctgatggaatcgacgacgcagaagaacaaaagcaaaaagtcatcgctgttgatgcgtctcaaacccgttatgggcttcgacgactctattatgcccaatcgcaatggggatgacccagttttgtcgtatctcgcgatcgctaacaagaacggcgctgttttgccggccatgttgtcgtcgatg

SEQ ID NO: 1578 - DNA, 376 bp, Glycine max
  Clone ID: LIB3028-045-Q1-B1-B12
ctcatgacacggtacttaccccctatcaatttgttgaatgtatgattaacataggaattcgcgtggcacgcacacggcatatgatcaagaataaggacaacaatgataagacaattgagctgctacatgagtttgcacgcacacactttccatccgcgacctacatggcatatgctgttcaagttgacacctacacactcacacaggcacataatttaattcctaacgtagattgtgcaattggatctcgtctcctggatctccatgctggtagttcgctgttcaccagacacaatattgacgaaactctcgatattggctatctgaatggcctctttgtgctggaactctccattggtctcattggacacacctt

SEQ ID NO: 1579 - DNA, 306 bp, Glycine max
  unsure (1)..(306): unsure at all n locations
  Clone ID: LIB3028-045-Q1-B1-B2
acccaatctatctgaaaattccaacaaaggatcgatggcaactcctagagccagtaaagctagcaaagtggtgatggnggctgaaaatccgttctggatacaaatgtgacaggtatagggagtagtaaatattgtagacacataacagccagtgattttttttttctttctttttacattttgtgagggtatcactactccttgttaattgggcatcctatgcgactaaatcttaataaataatatacgagtttaataggcatgtactgtgagtttaattttttttatcagtattcagagatcttt

SEQ ID NO: 1580 - DNA, 390 bp, Glycine max
  Clone ID: LIB3028-045-Q1-B1-B3
acaagagcgagtcatcatcacagctcaacgtcaagtgaccaaaaaagcttcaattttcgcatccaattcgcatacccatttgacttttcttctttccctcttctccattcttcgcattttcaagatccattcagaaatagcacaattgttaaagttggttgaagttcaatataattgtagctttattagcaatggaagaagaaaatgccatagagcttctccagagataccggagggaccggagagtgcttcttgattttatactctcagggagcttaatcaagaaagttgtaatgccacctggtgcagttacactggatgatgtggatctagatcaagtcagtgttgattatgtcctcaactgtgccaaaaagagcacattgcttgagc

SEQ ID NO: 1581 - DNA, 396 bp, Glycine max
  Clone ID: LIB3028-045-Q1-B1-B4
tggttggtaaacacttgcaaggggaatggctgtcaacaaggtcagtggagatgttgaatgcaatccaactcttaaatatagcagtgaaaggaaagtacgttggcatggttgatttgctcatccactattctataccaagcaacaatggtacatccaggaaatacgtatttccaccgaatcttgagggtcctggtggtattacacccttgcacttggcagcatgcacatctggttctgagagtgtcgttgactcgttaacaagtgatccacaagagattgggttgaagtgttgggaatcacttgtggatgcaaacggacagactccacatgcctatgccatgatgatgaataatgactcatataatgcgctggttgcccataaacttgctgatagac

SEQ ID NO: 1582 - DNA, 358 bp, Glycine max
  Clone ID: LIB3028-045-Q1-B1-B5
gcaatgtagggataaagaatgagcaaatggctgaggcctctgcacaagcttgtgtctctattccttccaatccttggagttctctgcaaaggggtttcagtgcataataattcctgtaatgtgcaccagtaaagaccaaagtatgattattgttacattatgctatatgattgtacttgtatatacatattttgtcccgcctttgtaaatacaattgggacactactaggattgggaagaagggtctttacatttttagtttggcaaatagatattgcaactacctttgtataaatctatttctgaagaagcaattacaactttcaagggatgatagcattttgtggcataaagatta

SEQ ID NO: 1583 - DNA, 399 bp, Glycine max
  unsure (1)..(399): unsure at all n locations
  Clone ID: LIB3028-045-Q1-B1-B7
ataacacaaggcagaaagcaagctcatcctagagttttaaaaatggcagcagcctcctccatggctctctcttccccatccttggctggcaaggccgtgaagctgggcccatcagcccccgaagtcgggagggtcagcatgaggaagaccgtcaccaagcaggcctcctccggaagcccatggtacggcccagaccgcgtcaagtacttgggcccattctctggcgagcccccgtcctacctcactggcgagttcccaggtgactacggctgggacactgctgggctttcggccgacccagaaaccttcgccagaaaccgtgagctcgaagtgatccactccaagtgggccatgctcggggccttgggctgcgtcttcnccgaactgttgtcncgcaac

SEQ ID NO: 1584 - DNA, 384 bp, Glycine max
  Clone ID: LIB3028-045-Q1-B1-B8
gttttggtcattgtgaaattattattatttactattctgggcctacttgtaccaccgtgtaggtgtgtaaccccaaaaggagagaaaaattgggggaaacagaaagagtgagggagcggtcgaaacagcgtgctgtggaattgtgcggtctaaggatatggtcattagaagaagggatttggtgggtctccaatgttttgtaccagtttgacctatcatcttttgttttgttgggtatgacctatatattagttactagttaggtgtttttttttattcagtttatagtattacttaacttttccccctctaaacagagactttgtgtaaagtgcaattatctagttaaattatatagggtttggttcccgtggcctatttcac

SEQ ID NO: 1585 - DNA, 368 bp, Glycine max
  unsure (1)..(368): unsure at all n locations
  Clone ID: LIB3028-045-Q1-B1-B9
caattgtttgattcagacagaaaaaaaatgttatcgtaacttatcttaattatctctcgattcatttcctctctctttggagagtttgctacttccccttccgaagctgcatggctttttctcatcccgctcatagctaatgccctcttctattatttcagtgtaacaatggatagcgatggaggctccaaattgactgggattaggcagattgtgaagataaaggaaatgctccagaagtggcaaagtgtgacattaggcccaaaaccttgcaattccctttctgatcatgtggctaatgatgatggaagcatatcaccattgatcaacanaagggtagtgaatgtgatatcggacaacgaagacag

SEQ ID NO: 1586 - DNA, 337 bp, Glycine max
  Clone ID: LIB3028-045-Q1-B1-C1
cacaaatcaattaactgaatgcttagagagagaaagaggagaaggagtagtgataaggtgatcatagagcatattataagagagtgaaaactaatggaggttggcctcaagaaggagaacatggggtttgaggaaactgagttaaggcttggactgcctggaaacggaggcactgaagaagtgctcatcaggaagaggggtttctctgagactgaaactggtcatgaagatgagtctgccaccactgtggatttgatgcttaatctttcttctaaggaggccgcaaccactgctgctgctgctgcagattcaactgataagcacaagactttgccta

SEQ ID NO: 1587 - DNA, 345 bp, Glycine max
  Clone ID: LIB3028-045-Q1-B1-C10
attcattttccgatggcttctgcagatgttgagtaccgttgctttgtcggtgggctcgcttgggccactgacgaccatgccctcgagagagccttctctcagtacggcgaaatcgttgaaacgaagattatcaacgatcgtgagactggcagatccaggggttttggatttgtgaccttcgcctcggagcagtccatgaaagatgcgatcggagcgatgaatggacagaacttggacggccgtaatatcactgtcaatgaagctcagtcccgcggtggcggcggcggcggcggcggaggaggaggaggatacaatcgtggtggcggtggatatggtggtcgtaat

SEQ ID NO: 1588 - DNA, 387 bp, Glycine max
  unsure (1)..(387): unsure at all n locations
  Clone ID: LIB3028-045-Q1-B1-C11
cttcaatgtagaaacttgatttggacaagctcaagagcattccatcagtgtcttgagctccaaatggagaacacctggatcctgacttttcaccttctcctcctcctgctccatccaaatgcagcaaaaggggccattggtgttggtgttggtgttggtggcagaggtggcatangtgttggcattggcattgggggcagtgttaacaccccagggccctctggatcaaacctcaagagtgccttcacagcactccaggcatggaaatctgccatgaccgatgacccattgaagattctggatacttgggttggtcccaatgtgtgttcctacagaggtgtcttctgtgcaaactctcaagatgataatggaattgtcacaacagca

SEQ ID NO: 1589 - DNA, 387 bp, Glycine max
  Clone ID: LIB3028-045-Q1-B1-C12
tgaacaacagcaacaacatcacaatcttcgctcccagaaacgaagccctcgaacgcgatctcgaccccgatttcaagcgtttcctcctcgaaccccgcaatctccattccctccaaaccctcctgttgtcccacatcgtccccaaaagaatcaccaaacccgaattcaaaaccgggtcgacccgacacagaactttagcgtctcaccaccacctcactctccaagccctgaatttgactcactggaatgttgagtcttcccgggttattaacccgaattcggtaacccgacccgacggagtgatccacggcatcgacactctcctcatccctcgctcagtccaagacgaattcaaacgtcgccggaatctgatctccatcgccgcgg

SEQ ID NO: 1590 - DNA, 352 bp, Glycine max
  unsure (1)..(352): unsure at all n locations
  Clone ID: LIB3028-045-Q1-B1-C3
cacctttgctattacctctttttcaaaactctaaaaatttttagttccacaaaaccaaaccaaaatggcagcagcctcggcctcatcaacaatgatatcaaaacaagccttatctccaagcacaagcatccaaaagcaccatcatttgaagccatccaacgtgtgctttcaaggccttagacccctcacaaggttcacaaccaaagtgagcagcaccaccaaaagggttattccaaagggtggtgtcngtgttagagctgaactcaactcagcacttgtcataaacctcagcactgggctccccctcttcttggggaaggtttgtgttcttcaacttccaaaggggagaacg

SEQ ID NO: 1591 - DNA, 394 bp, Glycine max
  Clone ID: LIB3028-045-Q1-B1-C5
gcaaggtgaacaacaggatgtggggaactgtgaaaggaggaggaaatgatgaagatggtttaaggactttgaacattagccaatgcactgcactcaccccatctgctgttcaagctgtttgtgactcattcccttctctccacacatgctcagggaggcactcactcatcatgagtggctgcctcaacttgacatcagtgcattgtgcctgtgctgtccatgcgcaccgtgcattcaccactttcccttatcctgcccattaagaagctcatgcttttgatgttgaacacacttcgaggatgtgccccttgaaagggctcagagaagtgaaagaagtgaaatccaccccccttgtagatgtatgcctgcataagagagacttgaatctagctga

SEQ ID NO: 1592 - DNA, 403 bp, Glycine max
  Clone ID: LIB3028-045-Q1-B1-C6
gtctcaagcaaccatggcaatggcaacccaagcctctctcttaaccccacccctctccggtctcaaagccagcgaccgcgcctccgtgccatggaagcaaaactccagcctctccttctccagcccgaagcccctcaagttctccagaacaatcagagcagcagccgccgacgagaccacagaggcaccagcaaaagtagaggctgcaccggtcgggttcaccccaccagaacttgacccaaacaccccttccccgatcttcgggggcagcaccggcgggctcctgcgcaaggcacaagtggaggagttttatgtcattacgtgggactcacccaaagaacagatctttgaaatgcccactggcggcgccgctatcatgagggaaggtcctaaccttctcaag

SEQ ID NO: 1593 - DNA, 380 bp, Glycine max
  Clone ID: LIB3028-045-Q1-B1-C7
gcgtcttccctatcgcgcaggagaatgtgttggcttcttctccccgacgaactgtggaggcgaattctggagatcggaatcgagagcaacggtttcagttacaaggatctctgctgcgtctcaatctcatgccgccgccttcatcgcctctcctcggaagaacctctttggaaccgtcttctcttctctgactatccccaatcccaatctcacccttcttcttcttcttcttcttcttcttctaaatctctttacagattaaggtaccaattcattcgattctgcattttcaaattaaagttttttgtgtgattttcttgttcagatttttatcatttattggcttaattatatatttggtcacttgattataattaaag

SEQ ID NO: 1594 - DNA, 394 bp, Glycine max
  Clone ID: LIB3028-045-Q1-B1-C8
cagagtgagaaagagaaagagagaattcgtaaaccctaatttcggaaagatcggcgatgactgcctccaaggatcgcgagaacttcgtctacatcgccaaactcgccgagcaggccgagcgttacgaagagatggtggaatcaatgaagaacgttgcgaatctcgacgttgaactgacggtggaggagcggaatttgctttctgttgggtacaagaatgtgattggtgctcgcagagcgtcctggaggatcctgtcttccattgagcagaaggaagaaacaaaagggaacgagttgaatgcgaagcggattaaggagtacagacagaaggttgaattggagctatcgaacatctgtaatgatgttatgagagtgattgatgagcaccttatccc

SEQ ID NO: 1595 - DNA, 386 bp, Glycine max
  Clone ID: LIB3028-045-Q1-B1-C9
gagctctctctcactgacagagtgcaaggaaagggaaataagagagagagagaaacagaaaacttcagaagaagagcatcaattgctagctccaatatattaccacaccactgcaaaattttctgaagcagagatcattgtccattatcacagaaatgggtgaagtaagagttctctcttacacaaaaaattcttgtctatatttattcttaatcaatctgtctctttccttttttcgacaacttttgctttgaaaactaactacaccacgggactaggatcgtgttttttaaacttttatgatcttttgtatataatgtctgttttatgatgtatatggggggatcaatatcaagtaatgcatgccacacacacacacacacaca

SEQ ID NO: 1596 - DNA, 303 bp, Glycine max
  Clone ID: LIB3028-045-Q1-B1-D10
agcggttccagaattggttcaactgtgtgagaatgaaaacctaaacctacgagcaagtgctgtaaagttgttttcttgcttggtagagagttgtgacgaaggcatcatacaggagcatgtgaatcagaaatgcattaatactctactccagatcataaaatctccatctgatgaagaggaaatactttctgccatgggaataatatgctatcttcccgaagttgaccagataactcaatggcttttggatgctggtgcactgccaatcattaaaacttacgtccaaaatggggaaaacagaga

SEQ ID NO: 1597 - DNA, 379 bp, Glycine max
  Clone ID: LIB3028-045-Q1-B1-D11
caccattataactctttccttctttggcccatttgcttctagttctagccccttcctttgttaactcttttgtttattcagaagaatggcatcctggttattgggaaggtcgagtaggatcttgattcatcaacatcaccaccttcacaaaaagtacttgcctttcttgttaggaccatttcttaaccataataatagctcttgttcctcttttccatcaactgaaccatttaggtgccgtgatgcatttccgggtaagaactcatcacccaccctcttccgattctcgcgtcatgaatcaaccaaagctgaggcacaattggaattggagcaagatgttgccaccgaggatgagcctaatcaggtcattgattttcct

SEQ ID NO: 1598 - DNA, 331 bp, Glycine max
  Clone ID: LIB3028-045-Q1-B1-D12
ctggccttgtttacgaggttgtctttatcagccacacccacgagcagcttcccaccactgactactagagggggggaaatgaaaataaaaaaaaaaaaattgtgtattattgaatttctctggaatcttcttctgtgtatggttttccttccttgtgttttcttcctaattcactttcgagggttgtacttgttcctttcgtcttaaatccttggatggttgatgatcatgaagttctctttaaagttaaattattatcattttgtgcatgctctctctctctcacttggtccacaacaattgaattgaatgtagtatcattattcgggtc

SEQ ID NO: 1599 - DNA, 396 bp, Glycine max
  unsure (1)..(396): unsure at all n locations
  Clone ID: LIB3028-045-Q1-B1-D3
tttttattctacctaacaccacatggatacgttgccggaggattgtgtttccaaaattctgtcttacacatctccaccagacgcatgtagattctctatggtctcttcaaccctacgctcttccgctgactctgaccttctctggcgaactttctttccttctgattactctgacattgtctcaaaggctctcaaacccctcccccttaattcctcttcttcatacaaacaccttttctatgctctttgtcatccactcctcctagatggaggcaacatgagcttcanattagacaagtcttcgggtaagaaatcttatatcctatctgcaaggcagctttctataacgtggagcaatgaccctttgtattggagctggagaacagttcctgaatc

SEQ ID NO: 1600 - DNA, 399 bp, Glycine max
  Clone ID: LIB3028-045-Q1-B1-D4
aaaaaaatttacgctgataatataaaaccattaaacaatttggtttaagtggtactcaaaaccttattttgaatcaagaaatataccaaatataataatgaaatcatcaaaacttatttttaaccaaggtattataatgataataacttgagactaaatatgtattataatgatcgtcagtatttacgggaccaaaactaaaacttcaagggcgttgtttatagatatagacatacagcccatgagtaaacggggatccaaaatattaaaaatatagcttaatagtttttttttctatattatttccacaaatagtttgaaattttatcttgttttatgtcctttttatccaaataaatgtaataattagaaaaatctcttgggtattttttttgttac

SEQ ID NO: 1601 - DNA, 392 bp, Glycine max
  Clone ID: LIB3028-045-Q1-B1-D6
ctcatttcttgttctcctttgctagcaaacgctagaggccaccatcatgcaggtggccatcatctagggttggtagggcaaatctgcacggaactcatccaaaaccagacgacttgcacggaccttgtaaaggcagcagatcctaaaattgcacaggcaaagacattccaagagcttgcacaggcagtgctagaatttgccgtgaacaagggaatagagggccaaaccttcctcaagggcttggcactgattgagcaatcaccagccattaaggaatgtgcaaactttttctatgatggggtggttggatccttccgtagtgccttacgtgagttgaaagaagatgctcagaccgctagctatgatgccaaagccgcttatgatggccctga

SEQ ID NO: 1602 - DNA, 387 bp, Glycine max
  Clone ID: LIB3028-045-Q1-B1-D7
gacaggtttggcattgttgagggtttgatgaccactgttcattccatcactggtgagcctattgctcgcaatttgattggttgcatgccttttactgtgttacctattatgatatgtcttgcatatccggtttatgtttttgttttgtaaaccagctacccagaagactgttgatgggccatcagccaaggactggagaggtggaagagctgcttcatttaacatcattcctagcagcactggagctgccaaggctgttgggaaagtccttcctgctttgaatggaaaattgactggtatggcattccgtgttcccaccgtggatgtctctgttgttgacctcacggtgaggctggagaaggaagcctcatatgatgaaattaaaaa

SEQ ID NO: 1603 - DNA, 398 bp, Glycine max
  Clone ID: LIB3028-045-Q1-B1-D8
attggtcttgaattcagtgatgtatatacagcacttggaagtgaggttacttttatagaagctttagatcaacttatgcctggatttgatcctgaaattagcaagttggctcagagggtccttataaatccccggaatattgactatcatactggagtttttgcaaccaagatcacgcctgcaagggatggaaaacctgtcttgattgaacttattgatgcgaaaaccaaggagccgaaagacacgctggaggtggatgctgcactaatagcaactggaagggctccgttcacacaaggtcttggattggagaatattgatgtggtaacacagcgtggttttgttccagtggatgagcacatgcgagtaattgatgcgaatggcaagctggtgcctca

SEQ ID NO: 1604 - DNA, 385 bp, Glycine max
  Clone ID: LIB3028-043-Q1-B1-D6
ctcaatttttctctcaaccggcccaatttagcataagcccagcatggccaccgcaacagcagcagccacctcgtccttcatggggacgcgcctcgtggaggcccactccggggcggggcgggtgcatgcccggttcgggtttggcaagacgaaagccgccgccccgatgaaagtttccagggggtcgggctctagctccgataggcccctgtggtatccgggcgccaaggcgcccgagtacctggatcggagccttgtccgagactacggattcgacccatttgggctatggaagcccgccgagtacctgcagttccagttggactccctggaccagagccttgcgaagaacctggctggggacatcattgggaccaggatccga

SEQ ID NO: 1605 - DNA, 390 bp, Glycine max
  unsure (1)..(390): unsure at all n locations
  Clone ID: LIB3028-041-Q1-B1-D12
aagtcttgaagggcaattttggaaagttaaacttggaaaaagggattccagaactgccaactttacggctgctaacactggtgttattccacctcccacatctaacctcaccaaccttatcacaaggtttcgagatcaaggactctctgctanggacatggttgctttatctggagctcacacatttggcaaagcaaggtgtactagtttcagagatcgcatatacaatcaaaccaacattgatagaacatttgcattggccaggcagaggaagtgtcctangactaatggcacacgtgacaacaatctagcaaatctagacttcagaactccaaatcattttgacaacaactacttcaaaaaccttctcatcaaaaggggactcctgaa

SEQ ID NO: 1606 - DNA, 395 bp, Glycine max
  Clone ID: LIB3028-041-Q1-B1-D2
atcagtacaacaactcactcactaagctaaacaatttcatcaagcctgccatggcttcctcgtgtgcttcctctgccattgcagctgttgccatctccacaccaagttcccagaagaatggatcactcttgggaagcacaaaagcttcttttcttagtgggaggaaactgaaggtgaacagttttacagcaccagttggagcacgatccagcactacagtgtgtgcagttgctgagcctgataggcctctgtggttcccaggcagcacccctcctccatggctagatggcagtttgccaggagattttggctttgatcccctaggtcttggatctgatcctgagagcctgagatggaatgtccaagcagagcttgtgcactgcagatgggccatg

SEQ ID NO: 1607 - DNA, 194 bp, Glycine max
  Clone ID: LIB3028-041-Q1-B1-D3
atttaacttctgttaaactttgcaaaaaaaaataaattattaaaagaagaatatagtagctatggaattgcactgctgctaaatattcacctgcacaagacaaaccagctgaattttttgtgttcatgtaatatctttatgcgtatttatcattttgtgacgatatcaattgaggaaattcagttgttgctatt

SEQ ID NO: 1608 - DNA, 354 bp, Glycine max
  Clone ID: LIB3028-041-Q1-B1-D4
ctcgagccgagaagacaggcaaagggctttgttgcagttgcagtggaaagtgatgagtgacaagcctaaagaggaccaagaagtgaattcaaaacaggttgacttgtgtttgaatctatttgtctgtgtctgtcttcaaatggatgccatatttgctcattttcatgttgggttacctttggtagtttggtttgacatattacatttatcatttggtaggcacagttggggaaatgagaagacatttgttgtatacctaaatgtgcttctttaatattctttcaacacaagcctgagaattgtgaacttaaatacatagaagggtgatgcaaataaaggcccactggttcacat

SEQ ID NO: 1609 - DNA, 419 bp, Glycine max
  unsure (1)..(419): unsure at all n locations
  Clone ID: LIB3028-041-Q1-B1-D5
ttgcatgcgtgcaggtcgactctaaaggatcccctcggggaattccaattccacattttcaagaaataaggaggcaaaaatgttcatatatgaattggaattatttgttttcttattaggcctatcctgaagccaaaggaaatgagatcggaattcctcggggaattccaattccacattttcaagaaataaggaggcaaaaatgttcatatatgaattggaattatttgttttcttattaggcctatcctgaagccaaaggaaatgagatcggaattcctcggggaattccaattccacattttcaagaaataaggaggcaaaaatgttcatatatgaattggaattatttgttttcttattaggcctatcctgaagccanaggaaatgagatcggaattcctcggnggtaccgagct

SEQ ID NO: 1610 - DNA, 389 bp, Glycine max
  Clone ID: LIB3028-041-Q1-B1-D6
aagatcttcctaatccacatggaaatctccaacgtccttttcacgaagatcctcatcaacgaaatagtcatggacgaaacaaggcgtaacacaccccagtacaacaagcttgaccgcatgatctcttctgaattgatcactcttgtgctcttcaaaatcgcatacttcactcttcttctcatattctctctcctttctacctcggcagtagtctacaccatcgcatcaatctacaccgcaaaagaagtgacattcaagagggtcatgagtgttgtccctaaggtgtggaaaaggttaatgttgacctttctatgtgcctttgctgcttttttcatttacaatatcgtgaccatgttggttatgttcttgtcaatagtcacaatatggat

SEQ ID NO: 1611 - DNA, 368 bp, Glycine max
  Clone ID: LIB3028-041-Q1-B1-D7
ggcgaagacacgttcttctctcaagtgctgaaaaaaaggaaatagcagaaagttatatggataacaaatcaccgagcaataaggcatctgaggagctggcacgtgagttgcttattgctatctctgattctttaccagataaaactctggattccgattttgtgcccgaaagcaaggacgcagacagctttgcaagaccaaacggtgattgggatgacaagtttaggtctgaattgatttcaatctcctatgttgaatctcccgatgtcaaaatctgatatattacgagtctagactgttagtaacttatgctacccttctggtttgttatgtggatgaatttccgctgtgccaattgttgtgaattg

SEQ ID NO: 1612 - DNA, 337 bp, Glycine max
  Clone ID: LIB3028-041-Q1-B1-D9
ctcaggcaaaagggcaccgagttccctggaacaggagagtatgacaagttctttgatgagggagtttacaactgtgctggttgtgggacacctctctacaggtccttaacaaaattcaattctggttgtggctggccagccttctatgaggggattcctggagccataaatcgcaatccggaccctgatgggatgaggacagaaataacgtgtgctgcttgtgggggacatctatgtcacgtctttaaaggagaaggatttccaacgcccactaacgaacgccattgtgtcaatagcatttcactgaaatttgcgccagccaattcctaataaaaat

SEQ ID NO: 1613 - DNA, 371 bp, Glycine max
  unsure (1)..(371): unsure at all n locations
  Clone ID: LIB3028-041-Q1-B1-E10
tgaattctccagagagaagaagaaacttaatcgatcatcacttcacttcactaatacatcatggcagacgagacccagaacaagtatgagagctctgaggttgaggtccaggatcgtggtgtttttgactttctcggtaagaaaaaggatgaagaagacaagcctcatcctcaggaggaggtcatcgccaccgagtttcaaaaagtcactgtctcagaccaaggagagaacaagcacagcctcttagaaaagcttcaccgatctgacagcagctctagctcttcangtgaggangaaggagaagatggagagaanaggaagaagaagaagaaagaaaagaaagggctgaaagagaagatcgaggagaaaat

SEQ ID NO: 1614 - DNA, 379 bp, Glycine max
  unsure (1)..(379): unsure at all n locations
  Clone ID: LIB3028-041-Q1-B1-E11
ctcattacattttaactgttcanaatattattagggacgagtatgtgggtaaaccagctactatggaagttttgtatgcttaaaaatgttggacctgtttttgcanggtttgaatgtctatagcattttaccgcttgacacaagtgatggtccccgagatgctatgaacataattgtttggcacaatgcttttgaggctgaaactatttttggtgttccctttcatttacaccaactaggataatgttttgtatgtcatgtcgatttcggtttaagggattggtttctcatggtttttaatgataacatcttggccctgaatctggtcttaacagttctttcaaaaacattggatctgaatatctgataagctagcatg

SEQ ID NO: 1615 - DNA, 225 bp, Glycine max
  Clone ID: LIB3028-041-Q1-B1-E12
caagatgcaattgtgaaccggggggggccaagtcacaatgggaaattcaactacgggtaagccaactcccctggcaagagatcctcaatgggagaattttaagaaaccaggatttgaggggttgaaagggaaaatggtgggcctttcgcgatttttgatgggatggttaaaccatcctggcctcctcaactccaggttgggcactgaatgggaaacatgcccaaa

SEQ ID NO: 1616 - DNA, 388 bp, Glycine max
  unsure (1)..(388): unsure at all n locations
  Clone ID: LIB3028-041-Q1-B1-E2
tttggttccaagttttccatgttttgccaatatttacatgtctctcatggagaagccgcatgttgattttggactaaaactgcttggagctgatgcaatgtctatttctggcctttataggattgtccaggaaatcattaaagaccaagtcgcaaacatgtatctgtggccaaaggccttagaggtgcaaataatggatccaacaaaggccatgaaagttccagttggaatccttcatgtgaaagttgtgagggcagagaagcttaaaaagaaagatctactgggggcgtcagacccttatgtgaaactcaaactcacagaagagaaacttccttcanagaaaacaactgtganatacaagaatttgaatccggaatggaatgaagaa

SEQ ID NO: 1617 - DNA, 387 bp, Glycine max
  Clone ID: LIB3028-041-Q1-B1-E3
tgcactgcttgtgtatgatgttaccagacatgtgacttttgaaaacgtggagagatggttaaaggagcttcgtgatcacacagatgccaacattgtaatcatgcttgtggggaacaaggcggatcttcgtcacttgcgtgctgtctccacagacgatgccaaggcatttgccgagagagaaaatacgtttttcatggaaacatctgctcttgagtccttgaatgtcgataatgccttcaccgaagtgctcactcagatatactgcgttgttagtaggaagactcttgagattggggatgaccctgcagccttgcccaaggggcagaccatcaatgttggcagtagggatgatgtctcagctgttaaaaagtctggatgctgctctgc

SEQ ID NO: 1618 - DNA, 383 bp, Glycine max
  unsure (1)..(383): unsure at all n locations
  Clone ID: LIB3028-041-Q1-B1-E4
atggcaatgctgactcagctgaagatttcttcgacaagtctctccgcgagaagtattgtgatggtactgctggtctatcatatgcggaattcctacataagatagggaactatccaatggcaaaggaggtttaccgaaatgtcgtacaaggggctattgaagtaaaaaatgctggcagaccatacttaggagctggtaacatgagcgtggacgaattaattgtagggtccatgtttgctttaggacagctggaattacttatgggtaactactctaatgcagagtgccatttgacacaggcattaagtanggcagaggaagcctatggagactctaaacatcctacggtgggggttgccttaacaagcattgctcttttgtat

SEQ ID NO: 1619 - DNA, 382 bp, Glycine max
  Clone ID: LIB3028-041-Q1-B1-E7
gggtaaaagtgttgtcccaaagaaagagcatctttctcctttctttcatcaccgttggaagagactgagatgggttcaaaaaccaagacttttacctttgaggaggtggctaagcacaatcacaggaaggattgctggattatagtcaaagggaaggtgtatgatgtcaccccatttttggatgatcatccaggaggtgatgaagttttagtgactgcaacagagaaggatgccaccactgattttgaagatattgggcacagtgattcagcaacagagatgatggaaaaatactttgttggtgaggttgacaccaacactcttccagcacaagttaccagcagcagcagtgtacgcccaccaacacaagcacctgtctata

SEQ ID NO: 1620 - DNA, 381 bp, Glycine max
  Clone ID: LIB3028-041-Q1-B1-E9
ctcgagccgaaatacaattatacaaacacatattcattctcctcacataccaaaaataaattatttttcttgttattttccctttgctaacgaaaagccatgaaattcgggaagagcctgagcagccagatcgagaaaaccctgccagagtggcgcgacaagttcctctcctacaaggagctcaagaagaagctcaagcaattcgaccctcccgcccccgcctccgccgccgatgaacgccccggcaagcgcctcaagaccgacgccggcaacgccgacgccgacgccgtttccgacgcctccgacatgtcgaaggaggagagcgacttccggaacctgctggagaatgaactcgacaaattcaacaccttcttcgttgag

SEQ ID NO: 1621 - DNA, 394 bp, Glycine max
  Clone ID: LIB3028-041-Q1-B1-F1
catcaacttcgacgtgaagttgaaatacaaagtcatctccgacatccccacatcttgcgcctctatggatacttttatgaccagaaacgagtttatttgattttagagtatgcacccaaaggtgaactttacaaggaattgcaaaaatgcaaatatttcagtgaaaggcgtgcagctacttatgttgcatcattggcccgagcccttatatattgccatggaaagcatgtaatacatagggacattaaaccagagaacctgcttattggtgcacagggtgagttgaaaatagcagactttgggtggtcagtgcacacattcaatcgcaggcggaccatgtgtggcacactggattaccttcctcctgagatggtggagagtgtggaacatgatg

SEQ ID NO: 1622 - DNA, 361 bp, Glycine max
  Clone ID: LIB3028-041-Q1-B1-F10
ttcagtctttcttggaactttgttactctcacacatgtctcgctccgtgcctttggtttcaaccatttttgtcttgcttctgcttctggtggccactgagatgatggggccaacaatggtggcagaagcaagaacttgtgagtctcagagccaccgtttcaaggggccatgtttgagtgacaccaactgtggctctgtttgccgaaccgaacgtttcactggaggacactgccgtggcttccgtcgcagatgcttctgcaccaaacattgttaattttaaaaaattaattaagagtgctttgatagaagatgatagatctatcatctttctactcgtgttgttaattaaccactttgtgtt

SEQ ID NO: 1623 - DNA, 370 bp, Glycine max
  Clone ID: LIB3028-041-Q1-B1-F11
gacatgttgacgctgatccaagtacgtctcaccttctccgacgaaaacgggaaccttcccacctgcggcacggatagcccctgcatctggcaattcaacttccgcgagttcaacgtcagcgaagacatcttcgcgagcgactcgatcgagctgttgcgccagtgcggaatcgacttcatgaagaacagcgagaatggaatcgacgtgaaccggttcggggagctcctcatgtcctccgggatcgtgttgaacgactccgtgcgctgggttaccttccacagcggctacgatttcggctacctcctgaagctgttgacatgccggagcttgccggacacgcaggccgggttcttcgatctgatcaagatgt

SEQ ID NO: 1624 - DNA, 258 bp, Glycine max
  Clone ID: LIB3028-041-Q1-B1-F12
tccaagaatgacaacggtagctgcttctctggatgccaatcaggtgtcaacctcgaaaactgaccaaaaccagttgtgtgacggtgatccccagactagccatgtcttcaaatcataattaccagatatcccaatctcgaaccagatccctctcaacgcttactgctttcagaaactatcccaattctccgaacgcccatgcctcatcgtctgacccgccgccaagacctacacctagtccgagagatacctcatttc

SEQ ID NO: 1625 - DNA, 396 bp, Glycine max
  Clone ID: LIB3028-041-Q1-B1-F2
gggataactacactcacggaccaggtagaagtgtaataatggatggaagcaatggggatatcgcgattgatcattatcatcgctacctggaggatatagatttaatggaaactttgggagtaaacagctaccggctatccctgtcatgggcaagaattctaccaaagggtagattcggagagcccaaccatgctggtatcgagttctataacagactaattgatgttctactactcaaagggatccaaccctttgtaactcttagtcactatgacattccccaagagcttgaagacagatacgggagttggctaagtccccagttacagtaagcaaccagttttctagtttacatgaagaggtttcaataccacattgatcatacgagctcctaaa

SEQ ID NO: 1626 - DNA, 399 bp, Glycine max
  unsure (1)..(399): unsure at all n locations
  Clone ID: LIB3028-041-Q1-B1-F3
tccataattaaggatcaaccatactaatgtgaattgggtcaaagtaatttaccattttcttttgccacttatattgaatggatgctgtagctctgatgccataggaaagggtaagtttagggaagggatgaagaagaactccaagcttgtggcttatgctaaaaagcatggccatggaaactggcgcacagttcctgccaaagctcttcttcgaaacaagatgcttcaagtctagtgcaacaagttacgtatatatgagtgccatatatataggaaagaataagtttagggaaggatgaagatgaactcaaagctcgtggcttatgttgaaaattaaagcatggccatggaaactctggcgttcagttcatgcttaaganggtcttcaaagatgtagaa

SEQ ID NO: 1627 - DNA, 385 bp, Glycine max
  Clone ID: LIB3028-041-Q1-B1-F5
cgtttccgttccgttcaaacagttccttttttctcacacacttcctttgttcgtcaccgcagtttcaatctcagatccaacattgttcaatccaaattcaacgcattccatggcgaatcctgcatccgcaagattctccgctcttcttcttctcgtttctttgctagtcaacatcgccgccgaatcgccggctccggctccgactccgaagccggatttgcctccgtcgtcttctcctacttctgctcctgcttcgaacccttccccggccaattcgccgccatctccaactccggcgccttctcatcactcgccgccggctccttcgcccggtaccaatccttctccgtctccggctcctgctccggcggatgacgcacatgac

SEQ ID NO: 1628 - DNA, 376 bp, Glycine max
  Clone ID: LIB3028-041-Q1-B1-F6
ataagagctctgcaattgaatgaaatcagtaactggagggcaatctcagggaggtgatatgaatgtagttgaagctacaaaggatgtgtctccatctgttgaacatcttgttgctgctaaaggaagccctctcaagagtgatagaagaagtgaaggccatgttatatcccaagatgaagggaagcaatctcttgttaggcccgctaatgagtctgatagagctgaatctagtgatgatggtggtggtcaggatgactccccaatgttggaaggtactagtggggaaccttctagcaaaggactaaacacaaagaaaaggaaaagaagtggacaggatggtgataatgataaagccaatggagctcaagaactacct

SEQ ID NO: 1629 - DNA, 397 bp, Glycine max
  unsure (1)..(397): unsure at all n locations
  Clone ID: LIB3028-041-Q1-B1-F7
gggaagatgaacttgagatggatggaagcggtgctgccgctgggaatcataacgggaatgctctgcgtcatggaaacgctcagtattacattcacaaatccgcgcatggcagacctaagcacatcgggaacgatatgtgggacgtggccatggaacgaagggacaagaagcttgtcgagcaagcctctccctccaattaacatcgttgttttgccaatgacattgtgaagaaaataaactgctcacctggatttacgactgtgttctagggaagcagggttaatcacaagaatcaaattccgtctgttttcttgtatgcaattcaacataagatttataaatatatctatgttccaatcgcaattacttccgctaaaaaaaaaggtnaaaaagaaaa

SEQ ID NO: 1630 - DNA, 388 bp, Glycine max
  Clone ID: LIB3028-041-Q1-B1-F8
gatgtctttctctctctcttttcctctcacactcttcccatctattccctcatggtttcttctctcttccttcccaataaaaattacccacttctaatcagacaaaaagtagagtggttataagtccatttgtttcttcagtttccacacaactttcaccagaagaaactaacaccttccgttactggctttttctgtgtccttggcaaccctttgctgattttcactgccacaatcacaaccaattgaagaagaagtttctgggttatggttcacgggtgccgtatagttatataatctgagctgggccccattccatacgcaacttttcctccttcattctcctttttttttttattgtcttaagaagtgatggacatggaagaaa

SEQ ID NO: 1631 - DNA, 367 bp, Glycine max
  unsure (1)..(367): unsure at all n locations
  Clone ID: LIB3028-041-Q1-B1-F9
gcgacacatactccctgctgattgttctccctttctctcgctcacacatggcttgtttaaagcctccatggttctcttcattgcgcgtcgtgtccccggcanaactcgcagcaggcccgccgccttcaacaacgtacaagcccgccaagctgctcttttgggccgtgggcccagacaatgctgaatcttctgagcccgcctcccccgacgctccagagcccgccgcacccgttgattccgtggagttggcgtttagcaaggccaacgtgtataaagctgattataataataatgaaaattcggctgaagaaagaaacgttggtgatgaaaccccaaatgatttgccagattctgtgaagattgcaat

SEQ ID NO: 1632 - DNA, 315 bp, Glycine max
  Clone ID: LIB3028-041-Q1-B1-G10
ctctcattctctagcttactgtgaatttctgttgcaataaatttcgctacagaaagataccctaagagagcttccacaatggtaagcgcagcaactgctcatagcttcgtcagcgtaagatgcactatgaacgccattggcttattcgtttcaccagcgcgaacattctatggaatcgtcacatagaaatcagtgtaagagttcaagacatatccttaaagatcaacggtgttgaaatgtgcatgttgggtattccatggaaagccttttgtgcacgcacagagtattttaattgtcattatcaacagcgttggg

SEQ ID NO: 1633 - DNA, 370 bp, Glycine max
  Clone ID: LIB3028-041-Q1-B1-G11
tacgtaaaccggaatcggcccaaggcaaggtaggccttaaagcaatccattgtgtggtgggttttggcggttgggtttgggtttggaggatgggcaaccatgaccaacttcattaggcaaattgacacatttgggccctttgccaattgctacaaatgcaaggcccaaactcaacaacccatggaagcagcacaacccccgcatgctcaacatcatcactgagtagtacaacccactcatgactcacaacttcaccaaaatattaatgaaactatgattcaattaaaattttgtatcaaacatgggcatccttagtaacaccccccttaaatttaaggtgtgccggttgtgttttgctgcaattttcttt

SEQ ID NO: 1634 - DNA, 327 bp, Glycine max
  Clone ID: LIB3028-041-Q1-B1-G12
acaaaaaaataacgacctaaaatgccttcaagtgaatgaacaataagtttaagaccaaattaaagggggtttggtgccaatcccggaacaggggtcattggccaagaaattacggaccaattggggggtaggctttccaataaccaccaatttatgacataaacgcaccaaacctttacattccgtaaatggcatttggtacctatgtcattcttgctggcctctcattgggtcttcacggaaagtttagtcgagaagctttgaacttagtattcatcaagggactgctcagttggtttatgcaagctgcactacttaaggtgacac

SEQ ID NO: 1635 - DNA, 186 bp, Glycine max
  Clone ID: LIB3028-041-Q1-B1-G2
cgatcaccttgctgaccctgtcaacaacaacgcctgggcctatgccaccaacttcgtccccggaaagtgagcgtcaaagaacgaaatgacttttgagagtttttagatttgtgtttggtgaagtacttcagataatgtgaattatcttgtgtatccgaatccaacttaatgttacttgctttttac

SEQ ID NO: 1636 - DNA, 390 bp, Glycine max
  Clone ID: LIB3028-041-Q1-B1-G4
tgctcctcaaagttttcataataatctgactcaaactgcaagaggagttcacagtaactactctcaaagatccactccaacttttagggcttcttctagcttacgtttgggacgtgtggcaccttctgatgatggattgcatatggtgtccgaaagttactcttctagacagccaaggccattgaccaccgttggctggcagaacaataatagaaatggaagatcaagaatacctagtgacagatatcggtcattggatgatgagggtttcatgattgttgatcgcacttcactgtatggacctaggaatatgcttgatcgacatagagacatgaggatggacatagacaacatgagttatgaagaactacttgcacttggagagagaat

SEQ ID NO: 1637 - DNA, 383 bp, Glycine max
  Clone ID: LIB3028-041-Q1-B1-G5
agagaagaagttgttgggttgagttggattggatttctaatctaatctatacctttcttttttcctatgcttttaaggcacaaacccttctttcttccctcttctttcttcttcttattgttattccttgcctttaccctttagggaaggaagaaggaacaactatactactattatccttattattgttattattgtaattaatctttttattatagttattgttgttgttattattcctcaaatatggattcgttgtgcctctccaacgactcagttgtttctggattcaaagacaaggagtcaatggttgacccctttttggtcgaggctctccagaaccctcgtcaccgcctcaccattttgaggatggagctggacat

SEQ ID NO: 1638 - DNA, 344 bp, Glycine max
  Clone ID: LIB3028-041-Q1-B1-G7
caaaaccaaaaccaaacaactgaagctggaaggcaccaagaggttggtcacaagagccttctccagagtgatgctctttaccagtatattctggagacaagtgtctacccaagagaacctgaatccatgaaagaactgagagagttgacagcaaaacacccatggaacatcatgacaacctctgcagacgaagggcagttcttgaacatgctccttaagctcatcaatgccaagaacaccatggaaattggtgtctacactgggtattcacttcttgccaccgctctcgctcttcctgaagatggaaagatcttggccatggacattaacagggagaattatga

SEQ ID NO: 1639 - DNA, 384 bp, Glycine max
  unsure (1)..(384): unsure at all n locations
  Clone ID: LIB3028-041-Q1-B1-G8
aaccctagattcgtaactgtaccacgtcctcgtcccaatcaagtgaaagctcgatggctgaaatggaccagaacacgggcggtgagcatgaggcggaggaaacgattgagattgaggcggaagtgcacggtggtgaagaggcggttgttgcggagaagaagtggccggggtggcccggggagagtgtgtttcggatgttagttcctgcgcagaaggttgggggtatcattggacgcanaggagagttcatcaagaaaattgtcgaggagacacgagctcgagttaaaattcttgatggtcctccgggaactgtgcaaanggctgtantgatatcagctaaagaggaacctggttcctctgttcctcctgctgtggatggcttat

SEQ ID NO: 1640 - DNA, 380 bp, Glycine max
  Clone ID: LIB3028-041-Q1-B1-G9
ctttctctcgttttttctcagaaccttctgaggttaaagcaaaaaccaaagagagagagagagagaaaatgatgaagccatcgatgctcagatctctccactccgccgccacccgcggcgcctctcatctcttccgccgtgggtacgcctccgagccggtgccggagcgcaaggtacccgttctcggcgccgccggcgggatcgggcagcctctctcccttctcatgaagctcaatcccctcgtttcgagcctctccctttacgatatcgccggaactcccggcgtcgccgccgatatcagccacataaacaccagatctgaggtagtggggtaccaaggtgatgaagagcttggaaaagctttggagggtgccgatgtt

SEQ ID NO: 1641 - DNA, 373 bp, Glycine max
  Clone ID: LIB3028-041-Q1-B1-H1
gagctagacagggtaattgggcttgaaagggtgatgactgaagcagacttctcaaatctcccttacctacaatgtgtgaccaaagaagcaatgaggcttcacccaccaaccccactaatgctcccacaccgtgccaatgccaatgtcaaagttggaggctatgacattcccaaagggtccaatgtgcatgtgaatgtgtgggcggtggcccgcgacccggccgtgtggaaggatccattggagttccgacccgaaaggttccttgaggaggatgtagacatgaagggccatgactttaggctacttccattcgggtcgggtcgacgagtatgcccgggtgcccaacttggtatcaacttggcagcatccatgt

SEQ ID NO: 1642 - DNA, 54 bp, Glycine max
  Clone ID: LIB3028-041-Q1-B1-H10
gtggttgcaagggatattatataatatataaatatgttttgccgtatctattcc

SEQ ID NO: 1643 - DNA, 320 bp, Glycine max
  Clone ID: LIB3028-041-Q1-B1-H11
tccaaggaaaattatgctggcaaggcaaacaggcttgaccagaaacaaggtggcaaattggttcaccaatgcaagggtgcgtccctggaacccattggttgaggaaatgtacaaagaggagtttggagattccgagatgaactgcaacctttcatctgagaacaacacggtcacaagtaaaagagatgatgttcaagagtctgataacattaacaataataataataaatgggaagagtcacaagacaatttaataactgttgacagtgtgcaagtccaacctcaagcaaaaatggataaaatggtccatgttgaaaatg

SEQ ID NO: 1644 - DNA, 360 bp, Glycine max
  unsure (1)..(360): unsure at all n locations
  Clone ID: LIB3028-041-Q1-B1-H2
tggatccaccaccctctaagttcgtaatcgaagcatcggaagcccttgccctggcggagtccgccgccgtgaccctcccggaactcctccccaccctggtccccgccgcccagcccctcgcccgaccccccatctccaagttctccgtggccgccgtgggcctggccccctccggccgcatcttcgtcggcgtcaacctggagttccctgggctccccctccaccactccgtccacgccgaacagttcctcatcaccaacctctccctgaatgcggagccccacctggtgtcnctggccgtctccgccgccccctgcgggcactgccgccaattcctccaagaactccgcgccgccgccg

SEQ ID NO: 1645 - DNA, 339 bp, Glycine max
  Clone ID: LIB3028-041-Q1-B1-H3
tgcgattgcaatattacaacttttccattgcatggtccctcaagttcgaaagccagaattctggggtgtcccattcatgccgtggataccctctatatcaatctttctgaatgtgtttctgttgggatcactggatgggccatcctatgttcgatttggattcttttcggctgttgcggtgcttttctatgtcttctacagtgttcatgccagctttgatgctgaaggagatgattctttgactgcaaataagaatggggaaatccacgtggaatcaaaagaaattgaagaccaaagtttcgaagtgtagatagtcctttatttgtgttctttttctat

SEQ ID NO: 1646 - DNA, 337 bp, Glycine max
  Clone ID: LIB3028-041-Q1-B1-H4
gggataactacactcacggaccaggtagaagtgtaataatggatggaagcaatggggatatcgcgattgatcattatcatcgctacctggaggatatagatttaatggaaactttgggagtaaacagctaccggctatccctgtcatgggcaagaattctaccaaagggtagattcggagagcccaaccatgctggtatcgagttctataacagactaattgatgttctactactcaaagggatccaaccctttgtaactcttagtcactatgacattccccaagagcttgaagacagatacgggagttggctaagtccccagttacagtaagcaac

SEQ ID NO: 1647 - DNA, 340 bp, Glycine max
  Clone ID: LIB3028-041-Q1-B1-H6
ctgaagcccgcttcctccttaattactctattattctttctcctcctcagaacctcaaacacggaaaccaagcattacaattcccagtttcatagaaagaccagagtcaatacaaacacataacagcacaagcagtgaaaaatggcgagctcggtggagaaggagagtggcgcgagcgaggaaacttgcgctttggagctgcctgctccaccaggttggaagaagcagttcatcccaatgaaagctgggaccccaaagagaaatgagatggggttcactgcaccagcaggagaggagatcaataacaggaaacagctggaaaaatatttgaaagcacacc

SEQ ID NO: 1648 - DNA, 359 bp, Glycine max
  Clone ID: LIB3028-041-Q1-B1-H7
caagcaaagaaaaacgaggctgctgtgagaccaaataaatcagtaatcgctgattctggccctagcagaccacctaaatcaaccatgcagaagaaaggcaacattgaaccaaagatgcaacaaaatatcgtgaagagtgctatcccaagaaatcctcacattcatcagctagataaacccaagtgttcagacgatgctgctgtgcacgtaaagttagaagccactaagagaaaacttcaggagcgttatcaacaagctgaaaaggctaagaggcagcggacggtacaggttatggagttgcatgacctcccaaagcaagggattggccatcgaaatccacatgtgaaacccggaaatca

SEQ ID NO: 1649 - DNA, 389 bp, Glycine max
  Clone ID: LIB3028-041-Q1-B1-H8
cactttcaacccaatccaatcctcgcacacatgcatgctgtctctgccaaagttggggccaagtcataactacatttccattgttacgattctttctttccatcccaaccacttattaagcgtctgatccaatttctttctctcaccatggatcatcgcaaaccattgttacccacttcctctgacgatgctccaaatccacgcactcggaaggaccttgttctaatgatttgcggtttgtttttgctctcttcccttgttgcctttggagggtacagggcctccaacgcgccacatgctgacgtgtcatcgccagcatcgaacgatgaacaacctagtcccacatcggtgccttctccgaaatgggtaccggttttcacggggtgttc

SEQ ID NO: 1650 - DNA, 308 bp, Glycine max
  unsure (1)..(308): unsure at all n locations
  Clone ID: LIB3028-041-Q1-B1-H9
ctggaaaaggcatggggaacaatgaagaaggtaaaaaaaatggtaccaacttgaatgaaggcaaagtccccggaaaaaaagtcctaaaaattggtgggaaccccccctttgggttccctcccgttggtaaaaatttggcgcgccctgaattccaaggttccggaaaaaactgttgggttcgcaaaggtggtgcttataccggttaagttagtgctgaaatgcttgttaatttgggaatttcttgggttantattggtcactctgaaacgaagcagcttttaaatgaatcaaacgaatttgtgggaaat

SEQ ID NO: 1651 - DNA, 356 bp, Glycine max
  unsure (1)..(356): unsure at all n locations
  Clone ID: LIB3028-042-Q1-B1-A1
aagagatgtcggcaaggcaatgtaatctttataatgtgtagtgttaaatcagcggcccggatgcatttatacttacaccgaatcacgaggcgacaacatcgacatggagggtctcatcaacggcttcatcaacgttgctctcggagctgatggtggcgatcgggaagaacaacaacacgggagagacgaccgtagtagaagctcctgggctgaagtcgtctcccaggatcaacaagatcaccctcttcctcatcancaacacaaggaacaatatcgtcctcagtacgaggagccccaatctcaaagttcctacaaaccccagaaggtggatgaaggtgaagatggatggcaaactg

SEQ ID NO: 1652 - DNA, 352 bp, Glycine max
  Clone ID: LIB3028-042-Q1-B1-A10
gaacttttgatgatgcactgttctgcatgatttccaagccacgcaacaatgaccatactccgatcgttgggcatgctgatttgaatacattgattgctagtcttaatttgggggccgacatcccagccatgcaccacaacatggttgctaatgatcagtgcttgtcaggtactggatcctcacaagttggcgatgaacattaggttccacacaacaaacaacggcacatacacatgccagcattcacctggggcaatcacccgcaccgttttcaacttagcagcgcttgcctgtcaccctataccgcgactatgcactatgcagacgatgacttaactttcattgacgtctg

SEQ ID NO: 1653 - DNA, 382 bp, Glycine max
  Clone ID: LIB3028-042-Q1-B1-A11
gctacgattaccattaccagaccctaaaggacaacgtcgacatgctcaaactcatccaattgggcctcactttctccgacgagcacggcaaccttcccacgtgcggcgacgaatccggcacgtgctgcatctggcaattcaactttcgcgaattcaacgttaacgaggacgtcttcgccaacgactccatcgagctcttgcggcagagcgggattgatttcaagaggaacaacgaatacggcatcgacgctcaccgtttcggggagcttctcatgtcctccgggatcgtcttgaatgacaacgttcattgggttactttccacagcggttacgatttcgggtacgtgttgaagctcttgacgtgtcaagatttgcccgatac

SEQ ID NO: 1654 - DNA, 376 bp, Glycine max
  Clone ID: LIB3028-042-Q1-B1-A12
tggagttgcaggaaatgtgtttgcttttgggttgtttgtgtctcccatacccacatttaggaggattatcagaaatgggtcaacagagatgttctcagggttgccatatatttattcccttctgaactgcttgatctgcatgtggtatggcacacctctgatatctgctgataatttgttggttacaactgttaattcaattggagcagtctttcagtttgtgtacacaatcatcttcctgatgtatgctgagaaagcagagaacgtgagaatggttggattattgctggcagttcttggcatgtttgcaatcctattggttgggagcttgcagatagatgacgttataatgcgtcggttctttgtggggttcttg

SEQ ID NO: 1655 - DNA, 363 bp, Glycine max
  Clone ID: LIB3028-042-Q1-B1-A2
ccaaatcatcgacacctgagccattcaattcccctccgttattgcattcaagtttcaacactacatttattatctgaaagaatggctttgaaagtttcgcttttccgtggacctgatcaagtgtctaataacctccgccctgagacaagagctgctggatccagcattggcgaaaactcgaactcagaggagaagaaagagcctgagttcttgttcaagcatgaaggtggggtgtataatccacggactggacatgttggctttccacataaatttcatcacatacctcagaatccattacctggtggcaatggaaatggaggagcaggaaccggagcaggatcatgatcaccagtaggtagc

SEQ ID NO: 1656 - DNA, 327 bp, Glycine max
  Clone ID: LIB3028-042-Q1-B1-A3
ggagtcaatttacatttcaatcaatcctaattgattccctaatggatgctaagcttacacacactcaatcatcctctcataatgtgtctatgtggattccgggacatgctgcgattgatccactacctgataaacggagcactgagacctgctatcataggttgggtatgccttgttttcagcatcaatgtctttgctgaaagcccccatactgatatgttacatcacagatacgaggatcgtccactacatgaccatgaacttgtccacgataattttcaacaatgcagtcatgtcgatcatctagtgccttctccacagggatta

SEQ ID NO: 1657 - DNA, 387 bp, Glycine max
  Clone ID: LIB3028-042-Q1-B1-A4
aaaaaatttaagtgaggagctagagaatgatgatgaagtctgctatgtgtggagtggtggttgtagcacttcttcttctggcggaggtggggcccatggctgaagctgtgacatgcaccccaacagagttgagtccgtgtcttccagcaatcacttccggtgctaaaccttccaatgcttgttgcacgaagctgaagcagcacacaccatgcttatgtggctacctcaaaaacgctagcttgaagcagtatgttaactctcctaatgcccgaaaaaccgttgcttcttgtgggattccctttccaacttgttaattaattaagccttcttataattaaagtgtgggatatatatatatatatagataaacagtttagtttatacaca

SEQ ID NO: 1658 - DNA, 376 bp, Glycine max
  Clone ID: LIB3028-042-Q1-B1-A5
gctttattatataattaatttgatggctcgacaaccttgtgatgacaaatcatcatctggattctgctactctgatgtgtcatcgggaaatccaacgatgttggtgaatcagatccaaggctttgtgtcagacccggagatgtacaacctaaccacaggcatggaaatgatagggtttccaaagagtgacaccaacgctgtcatgtggagaagtttcatccccaaaccgggtccttcctcttccaaaaccatcaacgataattccacaactttctaccaccacgactacaacaacaagcatgcagatttcacaccagctgggaatatttctcaaacaagtgccgataatctaatcgtgggaagtcatgattcagcc

SEQ ID NO: 1659 - DNA, 386 bp, Glycine max
  Clone ID: LIB3028-042-Q1-B1-A6
gccagactgagaggaagagagagggagattctttgtttgctaccttctctcggaaaaatggttacgttcaggtttcaccagtaccaggtggttgggagggctcttcccacggaatcagatcagcaccccaagatctaccgaatgaagctctgggccaccaacgaggttcgcgccaagtccaagttctggtattttctgaggaaactgaaaaaggtgacgaagagcaatggccaagtgcttgccatcaacgagatttttgagaagaacccaaccacaattaagaactatggtatatggttgcggtatcagagtacgactggttaccacaacatgtacaaggagtaccgtgacaccactctaaacggtgcagttgaggcaatgtacaa

SEQ ID NO: 1660 - DNA, 361 bp, Glycine max
  Clone ID: LIB3028-042-Q1-B1-A7
gcctgatagccctcatattttttatacctgtggtgaatatggattactgcagcgttttgatctgagaactggggctgcaacagaactttttacatgccagccaatcaaggataggtggagttacatgccagtcatccatcttaatgcaattgcaattgatccaaggaaccctaatctctttgcggttgctggctctgatgagtatgctcgacgttatgatattcgcaagtataaatgggacggatcaactgattttggtcaaccaaccaacttcttttgccctccacacttgattggcgatcagcaagttggaataacatgcttggccttttctgaactaagagagctgcttgtgtcatac

SEQ ID NO: 1661 - DNA, 382 bp, Glycine max
  unsure (1)..(382): unsure at all n locations
  Clone ID: LIB3028-042-Q1-B1-A8
gcctgttccactgcaaacggcttgaacacgttattgttcttgcatagggcaatgtggtgatcatgaacaatgagtgcagcattgcaagtttttacacagccagcgccacagagacatgtggattgacatgccactggaccacacaagcacaatcgcagatggtgcacggcatttcaatgtcgatgcaggtagaggtacagaacgtctccgtgcgatgtcaggangattcacagcttcatattggacagcttgtctgagtgtagacgttggttgaacatcatatgcacacaacatctgatggcggataagtagcttgagacattcgaccaggtgtcatggatctcctactttcagcgagtgtcacactcttgtcagctaaata

SEQ ID NO: 1662 - DNA, 329 bp, Glycine max
  Clone ID: LIB3028-042-Q1-B1-A9
catatattgatgtttcaacgttgtacatgctaactcatctccttccccttttcccttcgtataatgtatatcatggtaatatgatttcagatttggtttgtttttacctgtatacctggttgatatgcaggaccccatagatgaaggatcaccagtggatgtggctaagttgtagatgcgcacacgccctccatgggcatcatcttcgatataccagactaaacctcactcaccatctggaattcagctatttagtgaagaaacaccatatctatttggcaacaattctacaccagcctccaaattgacaagggattctgctgctactg

SEQ ID NO: 1663 - DNA, 391 bp, Glycine max
  Clone ID: LIB3028-042-Q1-B1-B1
cccctttctctgcaactccctccaatttagttagagttatagaggcattgttgctgtttggaaacagatctctgatctgaaaatgagtgcatcgaggttcattaagtgcgtcaccgtcggcgacggcgctgtcggcaaaacctgcttgttgatttcctacaccagcaacacttttcccacggactacgtgcccacggtttttgacaatttcagtgctaatgttgtggtggatggaagcaccgtaaacctggggttgtgggatactgctggtcaggaggattataataggcttagacccttgagttatcgaggagctgatgtatttatacttgccttttctctcataagcaaggctagctatgaaaatattgcaaaggagtggatccctgaa

SEQ ID NO: 1664 - DNA, 378 bp, Glycine max
  Clone ID: LIB3028-042-Q1-B1-B10
tgaaggcagaaaagtctgcacttattacagactggattcaattcctgttgtacttgttattgatcccatcactggccaaaagatgcgctcttggattggaatggttcaacctgaaagcttattggaaggtctactagcattccttgatgcagggcctaaggatcatcatattaccatgtctcacaagcgtcctagaggaagttctagcccaccaaaatctaaagccttggtagaatcagatgagaataaagaggagtatgaggaagttcaaagagctctggcagcttctatggagagcatgaaagaatcaactgctatggctggaagagacaataaagatgcagatgttgcagtcaatgggcaagaaacaccatggct

SEQ ID NO: 1665 - DNA, 375 bp, Glycine max
  Clone ID: LIB3028-042-Q1-B1-B11
attgcagtgagtatgatgttgatggggctgaagaagagccgaacttcgatgttgaggaccggaagcccgaccatcttcatccatcaaaccttgggatggagagaatgatgggaaggatgccaattcagcaaccttctcatcccatgaagggagatgttgtcacaaacctagatttcatccggaagaggaagatttctagtgacttcaacatgatgatggatcagaaaatctacacatgcgagcatccccaatgcccttacagcgaagttcgccttggtttccatgataggtctgctagggacaatcatcaattgaattgtgcatatagaaacagttctgcagattatggtggtggtcccaatttccatgctactg

SEQ ID NO: 1666 - DNA, 383 bp, Glycine max
  Clone ID: LIB3028-042-Q1-B1-B12
gattgggccacaaggggtgggcttgtgaaaacggattggagcaaggccccattcacagcctcatacagaaacttcaattcccaaacttcttcctccactggccaatcactggacgccacggggcaggcaaagatccgttgggtgcaaaagaattacatgatttacaattattgcactgatatcagacgtttccctcaaggccttcctccagaatgctccattgcatgagaatatttaattcaatgttgcatatcattataaaatgatcctcatgaacgtgacacacatgtgttgcctattacgttaatttactttcttgtgtaaattaatgcaactaaaactgttattattgttggtttgtgctttgttgagcactactccat

SEQ ID NO: 1667 - DNA, 388 bp, Glycine max
  Clone ID: LIB3028-042-Q1-B1-B2
ttcagcttttccctcgttgaaatgaaaatgggttcttctttgtggactttgtgtcgaattttggcttcactagcctcttctgcattctgtgcctttccacggaggccagtggatgttccattcggcagaaactacgttcccacttgggcttttgatcacatcaaatacttcaatggaggttctgagattcaacttcatcttgacaagtacactggtactggcttccagtccaaagggtcatacttgtttggtcacttcagcatgaacataaaaatggttcctggcgattcagctggcacagtcactgctttttatttatcttctcaaaatgcggagcacgatgagatagattttgagttcttggggaacagaacaggacaaccttaca

SEQ ID NO: 1668 - DNA, 206 bp, Glycine max
  Clone ID: LIB3028-042-Q1-B1-B3
ggccattcgcagcactgccctcgagctaagcgcggcgtagatatgcattgttgcagtctcggagaatgtcgcggatcaggctcaggatgaatcggaggtcaatacgctcgtgaacgacatgcacgggaataactactgcgacagctgattggaatcttacggcaggacaacttatcgcagtgaccacacgactactgattatgtcc

SEQ ID NO: 1669 - DNA, 334 bp, Glycine max
  Clone ID: LIB3028-042-Q1-B1-B4
gacagtactaaacactatattgacacgaagaataggattcttgtagttgggggaactggttacattgggaagtatttggtgacggcaaatgtctctttaggccatccaactttggtatatacacgccctcttattgcacaaactccgccctcaaaggcacaactttgcaatgaattgaactccatacgggtcaaacgtgtccatggagaacttgaacatcagcagattctggctgtgattaaacacgtagacattgtgatatgtcctctggcatcaccaccacgtgattgatccacctcaaaattatatatgctatcacagttgctgggtaata

SEQ ID NO: 1670 - DNA, 390 bp, Glycine max
  Clone ID: LIB3028-042-Q1-B1-B5
gttcaaagacacagactaggagctgcccaaaattgctctgccactcttaacggcaaccacaagctcaccgatgctgttcttcctccaacgaaagactggagaaaagaaggtatagtgagttcagttaaagatcaaggcagctgcggatcatgctggacattcagcacaactggggctttagaagcagcctatgcacaagcatttgggaagagtatctctctttctgagcagcagctagtggactgtgctggccctttcaacaactttggctgccatggtgggttgccatcacaagcctttgagtacattaaatacaatggtggactagagacagaggaagcatatccctacacaggaaaagatggtgtctgcaaattctcagctgaaaat

SEQ ID NO: 1671 - DNA, 370 bp, Glycine max
  Clone ID: LIB3028-042-Q1-B1-B6
atcttcttcttttgttgtttgtgtgtttgttttttctctcacctgaaaatgtcttgctgctgtggtaactgtggttgcggaagcgcctgcaagtgcggcaacggctgcggaggctgcaagatgtacccagacttgagctacaccgagtcaaccaccaccgagaccttggtcatgggagtggcaccagttaaggctcaattcgagagtgctgaaatgggtgttcccgctgagaacgatggctgcaaatgtggagctaactgcacctgcaacccctgcacttgcaagtgaggtgttggagagctaaagcttcaagcagaaatggcccttagaaataatgataaaaactatatgtagtttcaaaacttcaaaa

SEQ ID NO: 1672 - DNA, 381 bp, Glycine max
  Clone ID: LIB3028-042-Q1-B1-B7
tcatgtcaagaactatgaaactgcaatcaagggcattgagggtttgcaattataaaatgatgagaaggcacattattgattcctcaccttttcatgttgtaaatataagctttggttgacgggcactacaatagttgcatgttgccaatgtgagtcgcgaagggacgtgaatttgaactcagaagtctgggcttgtgttgtttaacccttgtgctcatgctgatcaagcatggaagctgaaaaaatttgagctaaatcagggattgttcttgcttcgaagctcagggtttacgctggcactagtcttctggcgggaaccctaaattttgtaaccttttcctgtgagttattattgatttaccagatgtctaaagtgtcatg

SEQ ID NO: 1673 - DNA, 381 bp, Glycine max
  Clone ID: LIB3028-042-Q1-B1-B8
gggatctgtagtcctgtgactccgaacaccctcctccctcgatatatctatatccaaatctcccttcaattctcaatctctgaaaacacaattcagaagcgaaacagtttccagctctctcacaaaatgacaacaatatcaaattgctcgcttctcttcctcgtcctcgtcctctccaccctccacatagcttccaccctctcaacccccagcaacttcatcaagtcctcctgcagcacgacccagtacccagccctctgcatccagtccctctccgtctacgcctcgaccatccagcaagacccccacgagctcgtccagacagccctctccctctcgctcaaccacaccgatgccaccaaaaccttcgtcgcaaaatgc

SEQ ID NO: 1674 - DNA, 361 bp, Glycine max
  Clone ID: LIB3028-042-Q1-B1-C1
ctgaggatataaaggaaactggatacacctatattatgccaaagagttcacatatatatggttcacacgaaggtataaatttgaactctgaggatataaaggaaactggatacacctatattatgccaaagaacattttgaaaaagtttatatgcatagcagatcttcgaacacaaatttctgggtacatgtatggcgtaagtcctccagataatcctcaggttaaagaaattcgctgcattgtgatgccaccacaatgggggacacatcaacaagttcatctgccatcagctcttccagagcatgatttcttgaatgatttggagcctttaggatggatgcatactcaaccaaatgaact

SEQ ID NO: 1675 - DNA, 379 bp, Glycine max
  Clone ID: LIB3028-042-Q1-B1-C10
cggctcgagcattctccctttcctctccgaaccctcgatcactctcacgcgctcctatattcgctcctccaccgtcgctctctcgaacaaccacaacaccatcttcatcacatggcaaacgcagcatctggtatggcagtccatgatgactgcaagttgaggtttttggagctgaaggcaaaaaggacacaccgtttcatagtttttaagattgaggagcagcagaagcaggtcattgtggagaagcttggtgagcctgcccagggctatgaagatttcactgccagccttcctgctgacgagtgccgttatgctgtttatgattttgagtatctgactgaagggaatgtccctaaaagcagaatttttttcattgcgt

SEQ ID NO: 1676 - DNA, 249 bp, Glycine max
  Clone ID: LIB3028-042-Q1-B1-C11
ccaccctgtcactgtccatatctgcttctcatccaccctcagactcacacaccgttaaagtcacgcctcttgagactatctcacggaggccttgtggttggtatcagtatatttgaaagcaacatctggtaggccgctgcatactaatgagctcttcaagtctgtaattctgtccggaccggtgacagacacgtgtcatagctttcactattgtggatcatcataaacacgtcagtatgcataatcata

SEQ ID NO: 1677 - DNA, 381 bp, Glycine max
  Clone ID: LIB3028-042-Q1-B1-C2
gtgagtcagaaaaccaagcgctctgagtttgtacagcgtcgaaccaggagaccattctctgtgactgaggtagaagcacttgttcacgcagttgaggaacttggaactgggaggtggcgtgatgttaagttgcgagcttttgagaatgcagaccataggacttatgtagacttaaaggataaatggaaaacattagtgcacactgcaacaatctccccccaacagaggaggggagaaccagtacctcaggagctcttggacagagttttggctgctcatgccttctggtctcagcaccaagccaagcaacatggcaagcatcaagctggaccaggaaccttgaagattacagaagcctcagctgaaagaccttgtgtgtgt

SEQ ID NO: 1678 - DNA, 362 bp, Glycine max
  Clone ID: LIB3028-042-Q1-B1-C3
ctaaatttcagaaatgttactgcagacattatctaaccccacaatactccatgagacactcatatgggtgtggcaaccaatgcaccgtcatgggaagattgcaccaggtcccaatgcgttgccaattagtggcaacctccacatgctacggaaactcccgcaacgcacccttcaaacctttgcaagaaaatatggaccccaaatgtccttgaaactacggcaagtccagaccatagatggattcctccccctgaaacgctgaacgattcctcaagactcatgacactgtttttgcaagcatgccaaagattcaagcctctgaatatctctctcatggcaccaaaggcttggagttttccgag

SEQ ID NO: 1679 - DNA, 218 bp, Glycine max
  Clone ID: LIB3028-042-Q1-B1-C5
ggagaagggaaaaatgtcccaccaacaacatcatgaaaggtccttttataggaccagcactataaattttcctattagcttaactagattgaggtcaagaaagattttgtgcattgggaaaatctttatctgcctcactggtttcattttcattgcgcctttctagaaagtataatgtcagtcaatcaaataatgcaataattaatgccattgtctct

SEQ ID NO: 1680 - DNA, 387 bp, Glycine max
  Clone ID: LIB3028-042-Q1-B1-C7
aaaacaccttcttctgcagttccgcactgcatttcattccaattccaatcaataatcataatcatcatcagcacaatacccattttccatggcaaaccctaaaacgaaaagtcaccattcgctaggcggcgaggacgatctcgactcgaccgaatcgcggtgggtcttccaggaggacgaggaggatccctccgagatcgaggatttcgacgccgccgatttgcgccaccaggccatgtttgattccgacgacgaggacaatgctgaacagagactcgtccgcaccggtccccgtatcgattccttcgacgtcgaagccctcgaggttcccggcgctcacagaaacgactacgaagatgttagtgtgggaaaaggaattgtcttagc

SEQ ID NO: 1681 - DNA, 61 bp, Glycine max
  Clone ID: LIB3028-042-Q1-B1-C8
ctaaaaggttcatgacatgttcttgaaaaaccttggttggaattaaatgtagcactagctt

SEQ ID NO: 1682 - DNA, 326 bp, Glycine max
  Clone ID: LIB3028-042-Q1-B1-C9
aaaaacttgataagaaagcaacacttgaggccatgcctttgaatgagattcttgcttaattaataatagttacatatgtaccatttgcatgcccccttggagtttttagtattttttaatggccatgaattaatagtagtccttacctttgtgcttttgtacatcatatgatttatcctttgtggggacatcatgtgttgtgttcagttgcctatgtcttaatatctagctggatcatctatgtataccttagatttgcctctattacaaatgaaaatacgtggcaatgtcattaatattggctgcatccaaaaaatttttaaatg

SEQ ID NO: 1683 - DNA, 385 bp, Glycine max
  Clone ID: LIB3028-042-Q1-B1-D1
ggctgttataaaggaattatatagcgactctcctccagccatcattcttgttggtcacagcatgggaggatcaattgctgtgcatgttgctgcaaggagatcattgtctgccttggcggggttggttgttgtggatgttgtagagggaacagcaatggcttcactaattcatatgcagaaaatcctatcaagcaggatgcaacatttttcaagcattgaaaaagctattgaatggagtgtcaggggtggctctttaagaaatattgattctgctcgtgtatcaatccctgccacattaaagtatgaccattcaaagaaatgttatctttaccgaactgagctggaaaagactgaacaatattgggaaggctggtatgaaggcctc

SEQ ID NO: 1684 - DNA, 384 bp, Glycine max
  Clone ID: LIB3028-042-Q1-B1-D10
caaggattcacccaattccaagaaggttatactcggtggctctttcgttctcacaaggcaaccgtgtccttctattggtccccttttcttgtagatggtgttccaagaaaaaatccgggactcccttataacaaaattcatttggatcgtgctaatatgaagtgggaaaaggatttggatcaaatagacatcatagtgttgtccttagggcattggtttttagttccttcggtattctattggcgtgacaaagttataggatgtgtgagccatcctgtttctaattgcaccaaagacattggtgtttatgttccaataagaagggccttaaggactgctcttaatagcataattaagaggaaggtgaaaagaggaaatggaatt

SEQ ID NO: 1685 - DNA, 379 bp, Glycine max
  Clone ID: LIB3028-042-Q1-B1-D11
atgacttgcaattgaagggacacacaccaaagtttgtttactacacccttcaaggtgttggagatgaaggggttgttttggtgtatccattgcccaaaggttctatggagaatggtgttgatgggaagtttctgaccatgatttttccggaggatgaaatggtgaagcttaaatctgagctcaagataattggtcttttgcttgagaataattaagttttaatgagattaaaagcatgtttgactttccgttcatcttgttagcacgaatttcaattttaaattcaatggtcaaccgtatattaacgcagaaggaatgatggacatgcttttgcaaacttcatttttcaccaatgttggttcgtcgaatacccaaacac

SEQ ID NO: 1686 - DNA, 379 bp, Glycine max
  Clone ID: LIB3028-042-Q1-B1-D12
ctcgagccgaatcggctcgaggtggcatctatctaagacaggcaccatgtcacttcttaaccagctctttaacagaggcgttttcggcactcgatgcaaaacatgcctgaacctggcaatttcacgcattaagctgctgcaaaacaagagagatatgcaactgaaacaaatgtgcaaggagattagccaattcttgcaggctggccaagaggcaattgctagaatcagggtggagcatatcatacgggaacaaaatacatgggctgcatatgaaattttggagttgttctgtgaatttgttcttgcacgtgtacctataattgagaatcagagggagtgccccacgggattgcgagaagcattgcaagtataatttttg

SEQ ID NO: 1687 - DNA, 380 bp, Glycine max
  Clone ID: LIB3028-042-Q1-B1-D2
gcaataaagacagggtgggttcatcccaatatcaatttagaaaacccagatgaaggagtggataccaatgttcttgtcggctctaagaaagagacactagatatcaaggcggccatgtctaattcattcggctttggtggccaaaattcctctatcatatttgcccctttcaaatgcaatagattttagaaaatattacttgtttattactttaaagaagaataaccagacaatgtattggatactcacactactcctttggttgaacaaaaatgattataggggggattgctttcttggatgatcacttatgttcaaaaacattgaagtaatcctctagaatcaatatttctagacttgtttgttcaaggttttagtgt

SEQ ID NO: 1688 - DNA, 321 bp, Glycine max
  Clone ID: LIB3028-042-Q1-B1-D4
cgagttcgagaccaaaagcactacctcaactggctgaagaaaggtgaagcaccatttgtggcagtttacatgtcattcacgcaatcatcacagacataatcttgatcaatgtctactcacattcttactcaatgtttttgtgacttccgaacatgagtaggttttccgataactacactgactagtgaaatgtcaagtaatgtttcgtactttcatttgtagctgatatgcacctcacattttgtagaagctagataagataacttctatagcacttaactgcatacgttgattttaaaaatcgacgctcaggtcagacgt

SEQ ID NO: 1689 - DNA, 387 bp, Glycine max
  unsure (1)..(387): unsure at all n locations
  Clone ID: LIB3028-042-Q1-B1-D5
aacattctgagctacaacctcggcggaatggggtgcagcgcggggatcattggtgtggacttggccaaggatattctccaggcgaaccctaataactacgcggtggtggtgagcacggagatggtggggtacaactggtaccaggggaaggacaggtctatgcttatcccgaatagcttcttccgcatggggtgttctgctgttctgctttccaaccgtcgaagggactatagccgcgaaaagtaccgtcttgaacacattgttcgcacgcataagggtgccgatgaccgcagcttcaggtgtgtttaccaagaggaagatgagcaaaaactcaagggactaaagatcagcanagacttgattgagattggtggtgatgctctaaaa

SEQ ID NO: 1690 - DNA, 357 bp, Glycine max
  Clone ID: LIB3028-042-Q1-B1-D6
attatctccaaatacatggatttctctgaagtctttccaatttagtccctgcacgagcttctttatatagtaagactgtgtcttccttcatcacactaaacaagttaaaagaacagcatcactgaactaacaaagcaaccctatgtcaaaggtggtttgtgtcaccggagccagcggcgccatcggatcatgggtggtcctactcctcctccagcgtggttacaccgtccatgccaccgtccaagatatcaaggatgaaaatgagacgaaacatttggaggaaatggaaggagcatagagtcatctccatttttttgaaatggatcttcttgacatcgactccattgtcgctgccat

SEQ ID NO: 1691 - DNA, 385 bp, Glycine max
  Clone ID: LIB3028-042-Q1-B1-D7
actactttcatatttcgtgtaacgagataaccaccaaaactcgattttttttagtttttaatcaacgaacacatagcctattgttggttgcttctgtttttaattttcatttcagaataggaaccaatggctcatttgctgacaccaactcctaccactgctgcaacagctctctccgccagagcccggaagagccccctctattcgttgaaaaatgtttactttccaacttcaagagtgtgctgcgttggtcaccaatatcaacaatctcacccctcttccctctctgatcttgatcaagtccctcctcccggtggcaatcactctctgcgtcgcatgacattgatggggttgagtggtgcggcaacgttggggttgagtttga

SEQ ID NO: 1692 - DNA, 385 bp, Glycine max
  Clone ID: LIB3028-042-Q1-B1-D8
gaactgtgactaccatgtcatgtcagcagcactctcccgagagattattcatatgaccaaactgccctcgttcccctaatccgttttcgagagttacaaccaccatggacggcgggaaccgaccggaggcggagcgctggctatacaccgccaacaagctcctgagcgcgcgtgacctgcacggtgcgcgctccttcgccatccgcgcgcgtgagtcggacccgacctacgatgcctcggagcacctcctgacggtcatcgacacgctcctcgccggcgagtcgcggatcaacgaccaccaccgcgactggtacgggatcctccagattctccgctacgccaccaacatggaccacatcgccgcccagtatcgccgcctcgcgct

SEQ ID NO: 1693 - DNA, 371 bp, Glycine max
  Clone ID: LIB3028-042-Q1-B1-D9
cattttcaagctctcaacgccatctccagctgcttccttatcagaagcgcttcgccccagagattctcgcttcctctccttcaatccttcttccaacgctattaattacaaaattaacctctccgcttccctccgatccattcactccctccctcttaaaacctccttgcggatcaaatgctcccaaacagatgggaatggaagtcctgcaaagaggacagtgcttcatgatctttatgagaaagaagggcagagtccatggtatgataatctctgcagacctgttacagaccttcttcctcttatagcaagtggtgtcagaggcgtcactagcaaccctgcgatttttcagaaagctatctcatcatcga

SEQ ID NO: 1694 - DNA, 382 bp, Glycine max
  Clone ID: LIB3028-042-Q1-B1-E1
atttcctagcctcccaacaaggaggccccctatgctcaacagcagaaaataaataaagggcattggggtgcaatggccattgcaaagagtgcttccattcttattattttgtgctttgcattggcctgcaatgcggataatgctggaaaaccagacccagttgctggtcctgacatgttcagcaataaaaatgtggctaaggatgtgctccttcccggggagcaaatagttaacgtccaggattttggagccaaaggtgatggcaagttcgactgcaccgagtctttcatgcaagcatgggcaaagacctgccatcaatcctctgggccagccaggctttacgttcctgctggcagattcgtggtttcatcaatgtatttta

SEQ ID NO: 1695 - DNA, 381 bp, Glycine max
  Clone ID: LIB3028-042-Q1-B1-E10
gagcagccaaaggggaggaataataataagcctatattctaaggccggaaaaataaaaaaggaataacaaaaatgtctggaaaggtaattatctcggctgtttctctcatcctggtggttggagtggccataggtgtggtggtggccgtcaacaagaagggcgaggatcccacacttcaatctcaacaaaaatcagtaggggttatctgccaaaacactgatgaccagaagctctgccacgaaaccctaagctccgtgaagggcatggacaccgctgatccaaaggcttacatcgccaaggcggtgaaagccaccatggacagcgtgaccagggccttcaacatgagtgataggctcagtaccgagtacggaagcaacgat

SEQ ID NO: 1696 - DNA, 333 bp, Glycine max
  Clone ID: LIB3028-042-Q1-B1-E11
tcccacacatctcattagaccaatttcagctcttaattcaggtttggaagcatcaattacagattcgaacgatatttcagccatcttagcaaatgccagaatagtagtagattctgaagatgaaaataagatagagctaagagtggacttgactggcgatcagacacagaaggtattcgacaggatcctaacagacttaggccgtactgccccaccaggttcctggatttcgcatgctaaaaggaggaaaatcactcatggatggcaatggacatccttgtacagatgcttggggaagaacgtgtcaccaagttttcaatacaagaatatact

SEQ ID NO: 1697 - DNA, 159 bp, Glycine max
  Clone ID: LIB3028-042-Q1-B1-E12
taacgtttgacgaagtgaacacattgcatggctaactcaaaggcaggccattactataaatgatattcgagtgtgatcaggaagcaaatctgcaggcttctgacaatcatgtcctacaagcggtttttcctaagagagatatatgccatcaactgaagg

SEQ ID NO: 1698 - DNA, 387 bp, Glycine max
  Clone ID: LIB3028-042-Q1-B1-E3
agagaatcagaatcagaagatgaagaaagaagacacagtgaagctgatcagttccgaaggtttcgaatttgtggtcgacaaagaagctgcaatagtttcacagaccatacataacatgcttacttctccagggagtttcgctgagaggcagcacggcgaagttacctttcctgagatcagcaccaccattctcgagaagatttgccagtacttttattggcatctccaattcgccagtgggaaggagacggaattttccattgaacctgaattaactctggagctaatgatggccgccaattacctccatacataagcattttgacttccccaagggtgatagttcttcgtcctcataatggaactattgcttagttgtgcattcaa

SEQ ID NO: 1699 - DNA, 208 bp, Glycine max
  Clone ID: LIB3028-042-Q1-B1-E4
tgtcatgacataatgtaacagtggaaatagaaaagggaaaacaataatgtgggggaaattaaatagtgattaattgttggaaaacatataatataatgttgtaaaagaatggaggaggtgaaatatgtatgactctcaagctgtgcgattgcttgcaattgtacatatgtaagatgaaaaaacataacacgaacaagtttacattatt

SEQ ID NO: 1700 - DNA, 359 bp, Glycine max
  Clone ID: LIB3028-042-Q1-B1-E5
gaaacagctccacaagcaaacgagtctgaatcaccggagggaggaagagatgctggggagcagcgagacctcaccatactcccccaaatccatcaagcacaccagatccctccccagatccatcaactacctcctccgcgagcagcgcctcttgttcatcctcgtcggcatcctcatcggctccaccttcttcatcagccagcccactctctcccgcttgggcccacccgagccggtccacaccttccttccccgaaccgggcttgcccggttcgccggccccgggccccgcacgggccgcgttcctgtcgggatcggcgggagaaggcagaggatcgtcgtcaccggcggcgcgggct

SEQ ID NO: 1701 - DNA, 359 bp, Glycine max
  Clone ID: LIB3028-042-Q1-B1-E6
ctgacatggcttcttcactcagaatttcaagactcatctctcgctccttttcttctacctccttcttttcacgaggtgggaatggtttccttggttcaagacactgcaaatacagcacttcttctgccattgaagaagaacccgttaaaccatcagtgcaagtagaacacacccaactcttaattgatggaaaatttgtagatgctgcttctggtaaaacttttccaactttagatcctaggacaggtgaagtaattgctcatgttgctgagggtcactctgaggatgttgatcgagcagttgcagctgcactaaaagcatttgatcatggaccatggcctaagatgacggcttatgaa

SEQ ID NO: 1702 - DNA, 360 bp, Glycine max
  Clone ID: LIB3028-042-Q1-B1-E7
agccaccaaatgtctgtgacaactactacagctgtgctgatagtgctacttgttgctgtattttcgagttcggaaatgcttgctttgagtggggttgctgtcctcttgagggtgctacctgctgtgatgaccactacagttgctgccctaacgactatcccatctgcaacacttatgctggaacttgtctcaagagcaagaacaacccattcggagtgaaggcattgaggcgtactccggctaaaccccattggacctttgggcgtaagaacaaggtcagcagtgcttaagcagataaaggaaatgtgaacgtgcaggaaggagccaatgatgaagtaaatgaaagacgaagaattaaaa

SEQ ID NO: 1703 - DNA, 372 bp, Glycine max
  Clone ID: LIB3028-042-Q1-B1-E8
gtactagtgttgggaaggaggaaaggaaacaagaagaggaggggtttttgttttggtgattgaattggggatttagggattgtgtacggtaacaatgaatttcaagatggattccgatagagcgaagctgttcgtaggaggcatttctcgcgacaccaccgaagacgttctcaaactccacttcgccaagtacggcgtcgtttccgactccacaatatccgtagaccgcaccacccgaagccctagaggttttggctttgtcactttctccgacctctccgcagctgataaagccctccaagacacccacgtcatcctcggaagaacggtagaagtgaaaaaagcgattcccaggagtgaacaacatcaaca

SEQ ID NO: 1704 - DNA, 380 bp, Glycine max
  Clone ID: LIB3028-042-Q1-B1-E9
gatggaatcaacatttgcaccctgggccttcatgatgtgaggtctagatttggaattattcctcaagagcctgtcctctttcaaggaacagtacgaagcaacattgacccccttggactgtattcagaggaagaaatttggaagagtcttgagcgctgccaactgaaagatgtggtggctgcaaagccagagaaacttgaggctccagtggttgatggtggagacaattggagtgtggggcaaagacagcttctttgcttgggaaggatcatgctaaaaagcagcaaaatattgttcatggatgaggcaacagcatccgttgattcgcaaactgacgctgtgatacaaaagatcatccgtgaggactttgcggatcgtac

SEQ ID NO: 1705 - DNA, 387 bp, Glycine max
  Clone ID: LIB3028-042-Q1-B1-F1
gctggatatggacttcagattggagcaattccgtgatcacgaacaccagtgcagtccttgatggatatggacttcagattggactgcactggtgttagtgatcacggaattgctggattgctttcttcaacttctttggttctatcaaaggtgaagctccaggcattgactgtttcagatctctctctagctgttattggtcattatggcaagtcagttactgatcttgtccttaattgcctcccaaatgtcagcgagagggggttctgggtcatgggtaatggtaatggattgcagaagctaaaatcacttacagttgcatcttgcaaaggagtaacagatattgggcttgaagctgtaggaaacggttgtccaaatctgaaaatt

SEQ ID NO: 1706 - DNA, 361 bp, Glycine max
  Clone ID: LIB3028-042-Q1-B1-F10
gatcagtggcttccctcactgtcgcaaaccattgtgttcgcacgttgcatcgcactcactctctcacctaagcatcatcccatcacctcccacttccttccgcgccatcaaagtcacaattttttgggctcagtctatcgcactcatccctgtccatacttcccgcttcctcttcttcactcatgtgcgccattttcgccatcgtgcctaaaggttcagagccaccgaattttacgctaatcgcatagaacgggaagagtgttagcctcgccaacttcagcagtacaccagtctgtgtgtatttctaccctgctgatgagacccctggctgttccatacaggcttgcgctttcagggattc

SEQ ID NO: 1707 - DNA, 383 bp, Glycine max
  Clone ID: LIB3028-042-Q1-B1-F12
caccattcaccaacctgcttctctgttctcttctttcccttcccaagaagaagaagaagaagatgccttcttcagaatcatcaacaggcttctccgaaaccatttgtgtgaccggcgctggtggcttcatcgcctcttggatggtcaaactcctcttggagaaaggctacactgtccgaggaaccctcagaaacccagatgatcccaagaacgggcacttaaaagagtttgaaggagcttcccagagactaactctgcataaggttgacctccttcatcttgactccgttagatctgttattaacggctgtcatggtgtctttcacactgcttctcccgtcaccgataaccccgaagaaatggtggagcctgcggtgaatgga

SEQ ID NO: 1708 - DNA, 346 bp, Glycine max
  Clone ID: LIB3028-042-Q1-B1-F2
agtcatctttgtcataatccaggattaagcctgcattaatcaccagaatggctaattcatatgaaaacaacttcccccctcagaagcaagacactcagcctggcaaagagtacctcatgaatccaccaccccaatacaacagctcccaatacaagccatcaaataaacttcagggaaagatagctgtagtaaccgggggtgattctggaattggacgagccgtgtgcaacttgttttcattagaaggtgctactgtgatcttcacctacgtgaaggggcaagaggacagggacgcgagtgacacgcttgagattataagaaaagctaagactgaagatgctaaaga

SEQ ID NO: 1709 - DNA, 387 bp, Glycine max
  Clone ID: LIB3028-042-Q1-B1-F3
tatcatcttcgacataaaatagaagcaagacagatgaaggagataggaaagggttaattgaatccaaaaaaaatgaagagaaaaacacaatgggcacggtttggacttcgatgatagcattgttgctttgcctgatgacatcatcggttcggggcgaggacccttacatttactacacatggaacgtgacctacggcaccattgccccattgggtgtcccccaacagggtatcctcatcaatggtcagtttcccggccccgaaatcaactccaccagcaacaacaacgtggtcatcaatgtcttcaacaacctcgatgagcctctcttgttcacatggcatggtgtccaacaagagaagaactcttggcaagatggcacattgggtg

SEQ ID NO: 1710 - DNA, 379 bp, Glycine max
  Clone ID: LIB3028-042-Q1-B1-F4
gagctatgttcttcacatgatgtttgggtatcagttttactcacaaggcaagttagaagttgcagtgtcatgtgctgttattagcgtggttgcagttgtcaagttcggtgttatgaagccttgtttttatggactggctgtggcagcaagttatacaggtctgccataaccacgaccttttttcccctttgggaagggttgtgtttttttaccaagtcctagtttttttaaagcttcattttttttgaacttggcactgcacctccttattgtcgaatgatattcatacctgcccttgtgctgtatgttatgaaatgtaatgaaataaataaaattcagtctcagtcctagttgcgtgaacagatgtgatgaatatata

SEQ ID NO: 1711 - DNA, 374 bp, Glycine max
  Clone ID: LIB3028-042-Q1-B1-F6
ctcgagccgattcggctcgaggagaaagagatcacatagcagaatggcttctactcaatgtttcttgcaccaccatgctcttaccacccctgccagatccccatcacaacgcatcatggttagcaccaagcctaaccagcttgtttgcaaggcacagaagcaagaggatattgatgtcagcccaatctctcgccggttagctctaaccgtgctcattggtgctgctgctgttggctccaaagtccaacctgctgatgcagcttatggggaagctgccaatgtgtttggaaagccaaagacagacacagatttcctgccatacaatggagatggattcaaactatcgattccctcaaagtggaacccaagcaaag

SEQ ID NO: 1712 - DNA, 341 bp, Glycine max
  Clone ID: LIB3028-042-Q1-B1-F7
gtctcttcgttggtggcattcctctgcttacttgcagcatcttacataataggacaaaccatttgtgttgatggcggcctcaccgtgaacggtctctacataagctaggcctactgtgacagtttcaatgttttgtttagtctgttacacgctacttgtaataatttcactttaagttgtggacagtgcacaccccatatctgtttttaatgacctgataagaatgagtactcagtgataagtttgtttttcgtgtcatgatttagtcacatgtcccatgagtctaggagcactataatcgtgggcagtttatcctacttcccgttggttgtaacgctttc

SEQ ID NO: 1713 - DNA, 346 bp, Glycine max
  Clone ID: LIB3028-042-Q1-B1-F9
attttgctcttctctctaggcctgccctctctccctagggtttgtttcacttatgccttcccaactcctcagcctcagtctttcagaagttgaatgtagatgatacggaaggagagaagttgccctgtcctgtcggtggctctgatctctgtaaatgctcaatgctctccatcttgcatttttgtttggtagtaaggtgataaagcatggagtttttgaaaatcaaaaagttcagaaaatctcagaaagcaaatggagaaaaggatttggcagacaaggcagtgcctgagcctgaggaaccaaagctgaacaccgatggtcctgatcagtgtaaatcagaaaacgc

SEQ ID NO: 1714 - DNA, 386 bp, Glycine max
  Clone ID: LIB3028-042-Q1-B1-G1
aagaaaggtaataagaaaggtcctccagctgcatcagtgacagaaaacaaggtgacaggcttgatatatgtaaatgaacagtttgatggtttggaagccgattgcctgagtatccttcagaacaaatttaacagagatacgcgaacttttgctccagactcagagatattgcaggctttacaacagagttctgtaggtcaatcttctaattataaacaaatccaaaagcgttgtatgcctttcttgaggtttaagaaagaggaagcaattgcacttgggcctcaagccctggatttgagattgccgtttggtgaaattgaggttcttaaggaaaacttggacttgatcaagagacagataggtctagaagatgtggaaattttatc

SEQ ID NO: 1715 - DNA, 384 bp, Glycine max
  Clone ID: LIB3028-042-Q1-B1-G10
tttgctcctaagccctcatctggaccacacaaatcgagggaatgcctgccactcatactcattttgcgaaaccggctgaagtatgctctaacataccgtgaagtcattgctattctgatgcagcgacatgtccttgttgatggcaaagtcaggactgacaaaacataccctgctggttttatggatgttgtatcaatccctaaaacaaatgagaacttccgcctgctgtatgacaccaaaggtcgattccgtctccactcagtcagggatgacgaggctaagttcaagctttgcaaagttcgctcagtgcagtttgggcaaaagggtatcccatacttaaatacctacgacggtcacactatccgctacccagaccctctcatc

SEQ ID NO: 1716 - DNA, 343 bp, Glycine max
  Clone ID: LIB3028-042-Q1-B1-G12
gtgacaatgaaaatgttgcaggtggcagtagtgcaattggctgcgttgcaggtttttgttatttttttgagtggcggtgctgattacataccgccttcaaggttggatcggttcgtctaccaaaatgggtacttagatttggatactgttttgatagaagcgttttatgatccggtgtgcccatacagcaaggattcatggactccactcaaacacgctcttcatcactattcatctcgggtttcgttcctccttcatctcctccctttaccttagcatgacagtgccttcgtcgcgaaccgtgccttgcacattgcgaataccatcgaacgcatctgcaaag

SEQ ID NO: 1717 - DNA, 356 bp, Glycine max
  Clone ID: LIB3028-042-Q1-B1-G4
gcacaacgaaccactctgaaaccgctcacgttatccacaacactctcaaacctccttaaaccctaaccaatccaaccatggcttcttcttccaacttcactgcaatgtccgcctgcaagctctcctcctccgccgccatctcctccttcacctcccgccgccgctccaacgccgtcgttctgtcgaggcgcagccgcgccgccagggtctccgccatggccaatgagttgcacttcaacatagaccgcaccgcaattaagaagctccagagcggtgtgaacaagctcgcggatctggttggggtcacgcttggtcccaagggaagaaatgttgttctcgagagcaagtatggctcg

SEQ ID NO: 1718 - DNA, 195 bp, Glycine max
  Clone ID: LIB3028-042-Q1-B1-G5
caaaagagatgaattacgcccgtctgacttccggcggaggatggcgtctccggcgactgtacacggcggttgagactctcgcgggttgggggccgctcgaccgaatgtccttcacgctggatttcacaggcgagtcccgtgcttttgctccatggctcagtggggcagcatgctttacgtcaccgttctgtaggt

SEQ ID NO: 1719 - DNA, 373 bp, Glycine max
  Clone ID: LIB3028-042-Q1-B1-G6
ggctcgagatcgacgcttcactcaggtcgcaaccagcgaagatgaggacgaagcaccgccgcctcctcctcctcccaagcagcaatcgtcggtcagtgcccccgaagagaaccgttcgaagcagcagcagcgcaagaggaagagaatgaagcttcaagaagaagaggaagaggaagaggagaaagaggaagagaagaagaagaagaagagaaagatcaaagacaagcaagaagagagatcgaacgaagaagaggaaccgccgcaggaagacgcaaagcccattggcgaaccggttaggttatccggaaagggaaggggccgcaaaaagcattacgaatccttcgagtacgacggaaaccaatacatgctggag

SEQ ID NO: 1720 - DNA, 330 bp, Glycine max
  unsure (1)..(330): unsure at all n locations
  Clone ID: LIB3028-042-Q1-B1-G7
ggctcgacatctacgcttcacgcaagtctcaataatttcagataacgattacacaccacattgtcctctggcctccgctaaacaatcgatctgtcaatttactggagtggaatcgttcggatcagcaccacttcatgcaggttatgttgcatcttcagtgatcatgatgacacgattaagttatagacggagtgttttgggatgagacttttgaataaaagacatattccagaagagatctatgcaagtgcatgtcttggatatggagatgcacagtccaatgttgatgtggttatgttatcaggttatggaangggcctcatatgacat

SEQ ID NO: 1721 - DNA, 356 bp, Glycine max
  Clone ID: LIB3028-042-Q1-B1-G8
ggtgccttatcgctgtggttatcatcttcttcttcctctttcttagatctcttctttctctacgccgcacgccgaaaccatggccggaaaaggagagggtcctgctatcggaatcgatctcggaaccacctactcttgcgtcggtgtgtggcaacatgaccgcgttgaaatcatcgccaacgaccaagggaacagaaccacgccgtcttacgtcggattcactgacaccgagcgtctcatcggtgatgcggccaagaatcaagtcgccatgaaccccatcaacaccgtcttcgatgccaagaggttgattgggcgtagattcagtgattcctctgttcagagtgatatcaaattgt

SEQ ID NO: 1722 - DNA, 386 bp, Glycine max
  unsure (1)..(386): unsure at all n locations
  Clone ID: LIB3028-042-Q1-B1-H1
ataagcttgttgtgtccacctcctcctcccttcttcacactgctgttgatcttgttaacgagaccaagttggatgacgagatcaagtcatggctagcatttgctgcacaaaaaattgttgaagttaacgcattggctaaggcattgtctggcaacaaggatgtggccttcttctctgctaatgctgcagctcaggcttcaaggaagtcctctccaagagtgaccaacgaggctgttcagaaggctgctgctgcattgaagggttcagatcatcgccgtgcaacaaatgtcagtgccagactggatgctcaacanaagaagctcaaccttccaatccttccaaccaccactattggatccttccctcagactgtagaactgaggagg

SEQ ID NO: 1723 - DNA, 383 bp, Glycine max
  Clone ID: LIB3028-042-Q1-B1-H10
ggcgacgccgagctccacgatgctttcaacctgtacgatcatgacaagaacggccatatctccgccacggagctctgccaggtgctgaaccgcctcggaatgaagtgctccgtcgaggaatgccacaacatgatcaaatccgtggattccgacggcgacggcaacgtcaacttccccgagttcaagcggatgatgagcaacaatcgtgaaaatgctagcagtggcgaagaaaaaaccgattaggcgctttggatttgatgtttatagctaggctgggcaaaggcaattccctcctgaatactaaatctatgcctgtttgttatgatcgatttgttattacttttacccctcgtttcctcttttttttttctataaatataaat

SEQ ID NO: 1724 - DNA, 382 bp, Glycine max
  Clone ID: LIB3028-042-Q1-B1-H11
gttagggttcacaacttttccttttccttttgcttgcgaatctgaatcaaataatcaatcatccattcattattcatcatgtcgtcggcgaagaaaatcacgctgaagagttcggacggcgaggctttcgaggtggaggaggcggtggcgctggagtcgcagacgataaagcacatgatcgaggacgactgcgccgacagcggcatccctctgccgaacgtgacgagcaagatcctggcgaaggttatcgagtactgcaagaagcacgtcgaggccgcgaatcccgaagacaaaccctccgaggacgatctcaaggcctgggacgctgaattcgtcaaggtcgaccaggccacgctcttcgatctcatcctggctgctaact

SEQ ID NO: 1725 - DNA, 400 bp, Glycine max
  Clone ID: LIB3028-042-Q1-B1-H12
acatgaacttcggattcggctcgagctcgagccgaatcggctcgagaagtaagcttgctcatgagaacagcagcattaaaactcgtgtcaggaatgaaggcgggattccaccgcttgttcatttgcttgaatttgcggatacaaaggtgcaaagagcagctgctggtgcattgcgaacccttgcttttaaaaatgatgaaaataaaaatcagattgttgaatgcaatgcccttccaactcttattctaatgcttcgctcagaagatgctgctattcattatgaagcggttggtgtcattgtaaatctggtccactcttcccctgatataaagaaagaagttcatcttgctggagccttgcaacctgttattggactacttagctcctgttgctctgaaag

SEQ ID NO: 1726 - DNA, 382 bp, Glycine max
  Clone ID: LIB3028-042-Q1-B1-H3
gttttcccagtgccaggaggacccttctggccaaggcactttgcaactgaaagcttgtgcaaaatttatcagcataactggttcgacccttacttcaaagtggttcggagatgccgaaaaactaaccaaagctcttttctcatttgccagcaagcttgctcctgtcattgtaattgtcgatgaggttgacaattttgcttggtgctcgaggtggtgcttttgagcattagggcactagaagaaatgagaacgagtttatggcagcttgggatggattgaggtcaaaagaaaaccaaagaatccttattctaggtgcaacaaaccggccatttgaccttgatgatgctgttattcgtcgcttaccaagaaggatatatgttga

SEQ ID NO: 1727 - DNA, 356 bp, Glycine max
  unsure (1)..(356): unsure at all n locations
  Clone ID: LIB3028-042-Q1-B1-H4
cctgttcatggtggcggctaccctggccgtggtggtggatactgtangcatggctgttgcggtggccggacatacaacggaggttgcagaaggtgctgctataacgctggcgaagctgttgctgcacaaactcaagataagactcacgattaagacgatgcagttctacttaattagtacttttgatattttaatttcatgaaataaaacagcttgtgactggagaggcatggattctcatcatgcatgagtccatgatctttcataccactagagatatttcgcaagtagaaattaagagtgttgttgaatgtataataatacacgtcttcgtgcctgtgtgatgagtttaagag

SEQ ID NO: 1728 - DNA, 380 bp, Glycine max
  Clone ID: LIB3028-042-Q1-B1-H5
cggctcgagaacaaactcattaattagcggggataataagggtgcagctgcacgatttatggaagactggtttgagcgaaaggggtctgtaagaatggatttggttagatttgaaaatgatggagtcccccgaagaatttcaaacataattcccagtcttcatgataattaccatgaattactggaacttgctgcctcattccgatctcctcttggtaaacctgcaaccaaaacttcaagcattgctagacgtgttagaggtgtccttaggcaggttgacaagcctagatttgtttctgcattttgtcaaacaaattgtggtgatgttagtccaaatgtactcggaactttttgtatagacactggactaccttgtgact

SEQ ID NO: 1729 - DNA, 386 bp, Glycine max
  unsure (1)..(386): unsure at all n locations
  Clone ID: LIB3028-042-Q1-B1-H7
cacaacagtgggagggagatccaaaaagagagagtggaaaagatggcgcggttgatcacagtggtgtggtgcgcggtggcggtgctattatgcgccgcggccggtgcgtcgtgggtggaggaggcggcgaacccgatacgaatggtgtctggcgtggaggcggaggtggttcgggtgatcggggagtgccggcgtgcgttgaagtttgctaggttcgtgagcaggttcgggaagagttaccaaagcgaggaagagatgaaggagaggtacgagatattctcgcagaatctcaggttcatccgctcccacaacaagaagcgtttgccctatactctctctgttaatcattttgctgattggacttgggaagagttcanaagacacag

SEQ ID NO: 1730 - DNA, 330 bp, Glycine max
  Clone ID: LIB3028-042-Q1-B1-H9
caagcattggcagagagggaaggtctctcgtttcttgagacatctgcactggaagcaaccaacattgagaaggcattccaaaccattttgacagagatttatcatattgttagcaaaaaggcgctcgctgctcaggaagcagctgttggtaccatacttcctggtcaaggtaccaccatcaatgttggggatgcatctgggaatacaacgagaggctgctgctccgcttaatgtgacatgtgaggaaaaagcgatggtagcagatagtattttttccccccaattctgttttgcccctttctcttttcatcttttttttttcctcctttc

SEQ ID NO: 1731 - DNA, 141 bp, Glycine max
  Clone ID: LIB3028-043-Q1-B1-A1
ctataatgatgcttattttaaaatcctttgacagagaagattagcataatctatcgatgactatgtttgttttaaaactatgtgataaaatcaggaaatcgttgtggtttgagtgatagtaaactcaagtttaagtcttat

SEQ ID NO: 1732 - DNA, 318 bp, Glycine max
  unsure (1)..(318): unsure at all n locations
  Clone ID: LIB3028-043-Q1-B1-A10
caaaatcagcctctaatatttttctcactgtctctccagagaacttgatacagagatggcagctgcaacatctggtgctgtgttaaatgggttgggatcttccttcttgagtggaggaaacaggagccaaacccttctggcctctgctattggaggcaaagttggtgctgctgttactgttaatcccagaagactcattgtggtagctgctgctgcaccacagaagtcatggctccctggtgttagaggtggtggcaatctcgtcgacccagaatggcttgatggatcgctaccangtgactatggttttgatccact

SEQ ID NO: 1733 - DNA, 340 bp, Glycine max
  Clone ID: LIB3028-043-Q1-B1-A11
cactctttacatctctctctctctctctctctccaaagcagacagaaacagcgacaatcacatgactcgtgccttgagatatttaggcgagcgaaactcggccatggactccgccgtcgtcgattccgacttcgtcgtcatcttcgccgctctcctctgcgctctcatctgcatcctcggcctcgtcaccgtcaccagctgcggctgtcgccgccgcctccgcctctcctcgtccaacgctagtccccagcctcctcacgcctctgcaaacaaaggcgtcaagaagaatgtcatccgctcgctccccaatgtcatcgactccgccgaatccgctgtcaag

SEQ ID NO: 1734 - DNA, 319 bp, Glycine max
  Clone ID: LIB3028-043-Q1-B1-A12
caatcttctctatctaaaatggagtttgttctaaattacctaaatgccactgccattggagttctttctataaccctcatctttttgtatttgtataatcccttcaaatttgcattacgtaaaaaagaggctcccaaagttgcaggtgcatggccaatacttggtcacctaccactattgagtggttcagagacacctgatagggttttgggtgctttggctgataagtatggacccatattcaccatcaactatggtgtcaaaaaggctttggtaatcagcaactgggacattgctaacgaatgcttcaccaaaaacg

SEQ ID NO: 1735 - DNA, 355 bp, Glycine max
  unsure (1)..(355): unsure at all n locations
  Clone ID: LIB3028-043-Q1-B1-A2
gtatggtaacatctagctagtcttaggctttagtgttaggatcagtcatgtcttcataaatatgtttttatttttattttttattttatcaattttcacaaaaaggggtttaaccagccaaccaattaacaatcttccctttgggtaaggggaggcaatatctaactactgtttttttatcctgtaaattcaaagaggctaaactatgggagtttaagcccaatccactaatctttaggagggatagtgttttaatttcccgcttagcataagtagtacatttcatcatcatcttgaggactacgtcaatggatgtggaactcaaaacacttgcatggaaccctgngagatattt

SEQ ID NO: 1736 - DNA, 281 bp, Glycine max
  Clone ID: LIB3028-043-Q1-B1-A3
ctcagaacaagggttgccatggacacttctcaccttgttttctgagttatgttaatttgaaagaagctacgtggcatcaagaatgggttcaggtgattggtttaagacaataattagctcaagaaaatcaaaagaaggaagatcaaagaaattaaagactaagatttatacaagaaaaaagtccaatggtttagcaaatggaatgaaaagcgaaaatctagagtcagatggggtatcagttgaaactattgctgcaacaaggatccaaacagcattccgag

SEQ ID NO: 1737 - DNA, 407 bp, Glycine max
  Clone ID: LIB3028-043-Q1-B1-A5
taacttcacacctacaaagctgaattcaaccacactttccattagcccttccaatgatatcatcaagtctctatcagctagtgagattgaactatctgaggactacacttgtgtgatttcccatggccccaatcccaaaacaactcacatttttggggattgcattttggagactcattctaatgcatttaaaacccatttcaagaatgaagagaaggagcatggagtgaagccattgggtagcaacaagttagggagtcctaagccatatccctctagtgacttcttaagtttctgccaccattgcaacaagaaacttgaagaggggaaagacatttatatttatgggggtgaaaaggcattttgcagtttaacttgccgtgccatggagatcatgattgatgagg

SEQ ID NO: 1738 - DNA, 408 bp, Glycine max
  Clone ID: LIB3028-043-Q1-B1-A6
caaagagccattgaactttgactataatattcagagttcagattactcactctaatcttctaagttttcattttggggtttaagtttctgaaggaaaaaaaaaaatgataaagtttgttctatttttgttctgctttgcctctgcactgaccctttcagtatcggagtccaaatcagcttcagtgcaacctcatgctgctgaatctttctctgttggatatattcagatgaagactgcagcgaactgttcttacctggtagttatatctacgagttgttcatcgcctaagttcacaacggataagatcggtatcacgtttggggatgctaatggcaaccaggtatatgaaccaagactggatgatccaatttcaaggacatttgagcagtgttcttcagatacatttc

SEQ ID NO: 1739 - DNA, 407 bp, Glycine max
  Clone ID: LIB3028-043-Q1-B1-A7
ctactatactctctctctcgcactcagtctctctccctcggtcgccggaacgtatctccgatcagacagccgccgccattccggtgattcgccacttcgatcctcccgcagcgccgtcgtttcttcagatctgtggctgtgatgcgaaagtcgttggaggcgaagcagcagcagcatccgcggattaagaagacccttcttcccaattcgttatcctagttagggttagggtttcaagaatcgttcccccaagaaatgttcaagcgcatcatgaacggagggcagaagaagccctccaagacggacccgagcgatccgtcgcccttcgctccggcggcggcagccgctccggcgctggtagttcctcagccgtcgggcaccatatagcccctctcgctcttccgcga

SEQ ID NO: 1740 - DNA, 412 bp, Glycine max
  Clone ID: LIB3028-043-Q1-B1-A8
gagaagagagtttcaagaatggggagcgaagaggagaagggtgaattctacttgcgatactacgtgggccacaagggcaagttcgggcacgagtttctggagttcgagttcagacccgatggcaagctccgctacgcgaacaactccaactacaaaaacgacaccatcatccgcaaggaggtttacctcaaccctgccgttttgcgtgagtgccgccgtatcatcgccgagagcgaaatcatgaaggaagacgacaacaactggcccgaaccggaccgagttggacggcaggagctggagattgtgatggggaacgagcacatttccttcaccacttccaagattggatctctcgtcgatgttcagagcagtgcagattccgacgggctacgcatattttactatcttgttc

SEQ ID NO: 1741 - DNA, 346 bp, Glycine max
  Clone ID: LIB3028-043-Q1-B1-A9
gattcctaatacaaacatggcaatgaagaagctcttgtgggttgtcctgtctctatctttggttcttggagtggccaatagctttgattttcacgacaaggatttggcgtccgaggaaagcttttgggacttgtacgagagatggaggagtcaccacacggtttcgcgaagcctcggtgacaagcacaagcggtttaacgtgtttaaagcaaatgtgatgcatgtccataacactaacaagatggataagccttacaagctgaaactaaacaagtttgctgacatgaccaaccatgaatttaggagtacctatgctggctcaaaggttaatcaccacagaatgttc

SEQ ID NO: 1742 - DNA, 375 bp, Glycine max
  Clone ID: LIB3028-043-Q1-B1-B11
cactgacagagtcagtgtttctggttgtttgcactttagattcaaacctgataggcgtcgttgtaaaaggaaaaaaaaagttcagtgtttttgtggtctcgtatcagaactcagaagttatcatccttaatatcttcaaacaaggtttttcacagcacatcgatacgaggatgttgcggctgtcgattcaacgagtgaggaagttgaactttctcagtccccagatctctgctttgggaaggtcccatttgtcaactgctgctgaaccatcttccagtaagagcaatccaccgagggttccaaatcttattggaggcagttttgttgactcaaaagcatcaactgtcattgatgttaaaaacccagcaacccaag

SEQ ID NO: 1743 - DNA, 397 bp, Glycine max
  Clone ID: LIB3028-043-Q1-B1-B12
tgagaagcagagaaagaaggctgctttgcaagctattcaagcacagaaagagaaagccaatgaagctgctgagctgaataaggtcgttgagagtaatacgagcagcgtggagaatactaatactaataatactcaaaataggtctatggtgtcttcttctactgtgaatccggcggtgtttcagggtgttttctgccgcgatcttacggtggtggggaacttgctttctcaggcggggtttaaccggtccatgccggtgaagtatgaagcgttgagctgttgattgaatcgaaattggtcggaaatggaaatgtttggttggggggctgttggagatggtaccggcagagggaatctctggttcgttcgttcacttttgtttgtacaaaattatgca

SEQ ID NO: 1744 - DNA, 395 bp, Glycine max
  Clone ID: LIB3028-043-Q1-B1-B2
gtagcattcctatggctaattcctagggtatactactcaacagtgcacagcacccttttagtacgagccaccaattcaactttctctcttccgagactcccttcactttttacaccttcctttcttactctgctcatcgtcttggccatcctaggtagttagtagtttttggaggatgaggttgttgtgtttgtgtttaacgttgttgctgtttctggctagtgtggcaatggcagaagaagattcagatcataataagcactcgctagaagcgacgtcagacgcgcagatccagtgcacaatgtgttcctcttgtaacaacccttgcaaccaagttccatctgcgccagcaccttcaccaccaccaggatctccttccacaaacaactgtcctc

SEQ ID NO: 1745 - DNA, 223 bp, Glycine max
  Clone ID: LIB3028-043-Q1-B1-B3
actcacattctcatcaccacgatttgttcaaactcactgccctgagatctgatcgcactttcaatcacaaaggaaactcgtgtgactgatttatgcgcgaattgcaattgcactgcgagcgtcactctgccgaatcgggagatgggaatagtgttcaacacattgttttcctctcgtttcggtaacaaaggagatcgaatcctcggtctccgggctcgacaat

SEQ ID NO: 1746 - DNA, 364 bp, Glycine max
  Clone ID: LIB3028-043-Q1-B1-B4
tggtaatgtaaaatactgctaatgttaatatgaagtttggatggtcttattggcagaagatgctaggtggtgttcatcaatattctgaaaggtaaaacgattttggtttttaatgataatataaccatgaatctaacatcagatattgaacgctacacatcaaaaataaatcgagccaacgcatttaattgtaagtgtcttcatattacctgtgttctgtcacatctttttgcataatattggcactaagtcttttttgatagaaattgttaagatgtactgttatcattgtatcaactatattgtgcccttctttttttacttgatttggcaaacactgctacttttctccatataagatgga

SEQ ID NO: 1747 - DNA, 369 bp, Glycine max
  Clone ID: LIB3028-043-Q1-B1-B5
aaggtataccatttgaaaatggcttcttgtgtgtcatccatgtcttctaccatcctcatcctaattgccatctgcacactgtcctcacttctgtcagctgcatctgcagcaacagaggagggacgaacaaggcccttcaaaagggtctatgcctttggagactctttcacagacactggcaacaccaaaaatgccgaaggtccaagtggctttggtcatgtttcaaactctccctacggcaccactttcttcaaccactccacaaacaggtactcagatggtatgcctgtgattgattttgtagctgaagcactttcactgccttacttgcccccctagcgtcacatcaaaggcaatgacacttttggt

SEQ ID NO: 1748 - DNA, 321 bp, Glycine max
  Clone ID: LIB3028-043-Q1-B1-B6
gggagatcgagaccatgcggatggagatggaaatgaagcgcactgagatgattctagaatcgcaacagcggattgtcgaggcatttgccaaggccgtttcggaaaagaacaggaagaagaagcccaagactgtgccatcagcctctggttgaggttcagtggtcctttggcccagctgcacttcaacttctatcagtttccatgtacaattggctaaatctctttaatatgtaacgtttatcattatctattacttcatcagcttcgtactttctttgctcttttaaatctaacgctgttgtgacttcattttttctaccc

SEQ ID NO: 1749 - DNA, 407 bp, Glycine max
  Clone ID: LIB3028-043-Q1-B1-B7
ccaccgtcagagctccgataacttcatgttcgacgctcacggaaggtggttacactcttcggcttacgcgcaggagctcgggactcgatcttcgagcttgaggagaaacgacgatgatcgcgttttaaccagtggcttgcttgatctgcattctttcgataccgagcttttacctgagggacaaagttttgatggctacgagtcgattctctctggcaacaaacttgtaccaaggtctcggggcttgcctgagagccatctccttaaaagtgtctcagcagataaagagagagcaaacaatgttgccaagatcaaagttgtggttcggaagagaccactaaataagaaggaaatagcacagaaagaggaagacattatttacatagattcaaattttctcacagtgc

SEQ ID NO: 1750 - DNA, 397 bp, Glycine max
  unsure (1)..(397): unsure at all n locations
  Clone ID: LIB3028-043-Q1-B1-B8
cagcgtgcatcattgcacttactgatcagggccttaatgctatcaatttgggagacagtgggtttatggtggtccgggatgggtgcaccatattccggtccccagtgcagcaacatgatttcaatttcacttatcagctggaatgtggtagtaatggtgatttacctagttctggtcaggtttttaccattcccgttgcacccggtgatgtcatagttgctggtacagatgggctatttgataacttgtacaataatgagattacagcagtggtggttcatgccatgagaaccggattaagccctcaggtgacagcccagaagatagctgcattggcacgtcaacgggcactggatanagacaggcagactcctttttcaaccgctgctcaagatgc

SEQ ID NO: 1751 - DNA, 379 bp, Glycine max
  unsure (1)..(379): unsure at all n locations
  Clone ID: LIB3028-043-Q1-B1-B9
cctctctctctatctttttcttttccttctcctagccctcttccctataggagaaggaataacaaaaacaaaaatacacaatggctttcactttcaccagaatcctaattctctttgtctccctctcctctctcatcctcgacacccacgcagcccgtgcgccccgcaccatccagacccgcctctacagcctctgcaagcccaccaccaacatggacctgtgctacaagaccatccttccggaggtggtgggcctgtcncgcttcagcaactacaaggccctcgaggtggagatccttgccacccagaaacaggtggagacaacctcgaagctcataacctcgctcctggcgangcctgacaactcgaaagacctgac

SEQ ID NO: 1752 - DNA, 371 bp, Glycine max
  Clone ID: LIB3028-043-Q1-B1-C1
ctccgcagcagccacacttcttcgccgtttcagctgaagagccatccgcaggtaagcaatggttaagcataataatgttatccccaatgggcacttccggaaacactggcaaaactatgtgaagacttggtttaatcaaccagcccgaaagaccagaagacggttggctcggcagaagaaggctgtcaagattttccccaggcctactgctggatctctcaggcctattgttcatggccagactctgaaatacaacatgaaagtcagagccgggagaggattttcactggaagaattgaaggctgcaggaattcccaagaaacttgctccaactattgggatttctgttgatcacgcagaaagaatcgttc

SEQ ID NO: 1753 - DNA, 361 bp, Glycine max
  unsure (1)..(361): unsure at all n locations
  Clone ID: LIB3028-043-Q1-B1-C10
ttcggatataaacaataaaataaaataaaacagaagagaaggaaacagaagtaaaaaaaataaaatgggttacacaagatcttctcttctgtccgtggctcttgtcttggcattctgttcaagcattcagggtttggacatcaccaaattgttgggcgaatatcccgaatatgcacagttcaacaaatacctaactgaaaccaagctggcggaccaaatcaacagccgtaacgccgttacagtccttgcccttgacgacgccgcaatggcttcnctctccggcaagtcgcaagacgccgttaaggccatccttagcaaccatgtgctcgtcaacttctacgacgagaagaagctgatggaa

SEQ ID NO: 1754 - DNA, 83 bp, Glycine max
  Clone ID: LIB3028-043-Q1-B1-C11
tgagaatatggctatcgattttaattaggagcaaaatgtatgttcttactccatttttaatgcaatttctttattttcttgcc

SEQ ID NO: 1755 - DNA, 411 bp, Glycine max
  Clone ID: LIB3028-043-Q1-B1-C2
gaggctgccgattggtcaaaatatataaatccatttgttgaaatttgttactgtattgcattgcgtttgctgcacccatcaatggcaggcgtttctctcaagtgcggtgactgcggtgctctgctgagaaccgtataagaagcgcaagagcacgctgaactcacctcccactccaacttctccggatccaccgaaccggttctcaacctcatctgcatcgcttgcgccaaaccctgccgatccaaaaccgagagtgatttgcacacgaaaagaaccggccataccgagttcgttgacaatacttccgaggccgttaaaccgattagtttggatgctccgaaggtggatgcaactgcttcatcggaaaaaccttccgctgctgcatccacggaccaaagtgcagaaatggtt

SEQ ID NO: 1756 - DNA, 151 bp, Glycine max
  Clone ID: LIB3028-043-Q1-B1-C3
caagcattggcaaattgcggcattaaggtaggcaaatccaaagaacaaattaaaacaaccggttttcaaggcccaattgggccaaggccaatggagttccaataatccccagaattacaaaaggacttttgggaaccagtttccaattggg

SEQ ID NO: 1757 - DNA, 407 bp, Glycine max
  Clone ID: LIB3028-043-Q1-B1-C4
aagcatggacattggaaatgatggacatgctacttcagctatattatccaagaacacctcagatggtttcagtgatattggttgtcataattatgatggatttagagtgacagattctcatcactccagtcaaagagaagcagcactagtgaagtttcgactgaagcggaaagagagatgcttcgagaaaaaggttcgatatcaaagccggaaaagactggcagagcagcggcctcgggtgaaggggcagtttgtacgacaacataatcatccattcgctgaggctggtggtgattcatgaacattgttctctttaggtttcctgtagtattaaattacagttgactgtaacaccgattgtgtcaacaaggattagctgtacggtggtatctgtgtgttgttggaat

SEQ ID NO: 1758 - DNA, 409 bp, Glycine max
  Clone ID: LIB3028-043-Q1-B1-C6
cggctcgagcggctcgagctacgttaaggctggtatctacgacgagtacatcaccgttgacaagaagaagcccaatcttttcatctacggtgatggccccacaaataccatcatcactggccgcaagaactttcacgagggtaccaagacaatgagaaccgccaccttctctactgttgccgaggatttcatggcgaagtcaattgcatttgagaacaccgctggtgcagaaggacaccaagcagtggcacttcgcgtgcaaggtgatcgttcagtgttctttgattgtgctatgcgcggttaccaagacacattgtatgcccacgcccatcgtcagttctaccgcaattgcgaaatctctggaacaattgatttcattttcggatactccaccaccttgattcaaaac

SEQ ID NO: 1759 - DNA, 385 bp, Glycine max
  Clone ID: LIB3028-043-Q1-B1-C7
ctatatttcttcaatcttctctcccttctacttctagggtttcgcttctgcaacggacgaccttcttcaactcatcaaagttgactttgtgagccaattcaatcaggcttgagaaggtatcctagtgttgtttgttcaccttcatctccatgatggaatactgtaaagatgtcctcagctgtcttgattcggatacgtctcttaagatattcatgtgtctggatgatctggctgatcttgttcgggttacttgtgtctcgcgatcttggagacactttgtgatagcaaatggtctttgcaagcagctatgcttgagaatgtttcctcagttatctagagttgcttttgttgttgaactgaatcaaaatggagcgaaggaacatgc

SEQ ID NO: 1760 - DNA, 409 bp, Glycine max
  Clone ID: LIB3028-043-Q1-B1-C8
gaaacgtgaaccagaaccagaatggatcttcaacaacgaccactgaaacttcactttattccttacctgtcaccggggcatgtgatccctctctgcggcattgcaacactcttcgcctcacgcgggcagcacgtgacggtgatcaccactccctactacgcccaaatcctccgcaagtcaagcccctccctccaactccacgtcgttgactttcccgccaaagatgtgggccttcccgacggcgtcgaaatcaagtccgctgtcaccgacctcgctgacactgcaaagttctaccaagccgccatgctcctccgcagacccatctcccatttcatggaccagcacccacctgattgcatcgtcgccgacaccatgtattcctgggcggatgacgtggccaacaacctcc

SEQ ID NO: 1761 - DNA, 378 bp, Glycine max
  Clone ID: LIB3028-043-Q1-B1-C9
gagaaatagagagagaacttcaagtgagggtgagagtgacacaaatctagagagagcactagtactctaaaagtctattatattcttcaaaatatgaccatgcatcgcgagtcttgggcttttgtcttcggcgttatgggcaacatcatctcctttggagtgttccttgctccattgccaaccttttaccaaatctacaagaagaaatccactgaaggtttccagtcacttccttatgttgttgcactgttcagtgcaatgctttggatttactatgctttcgtgaaaagggaaactgccctccttctcattaccattaacacatttggaattgttgtggagtcaatttacctttctatcttcctaatttatgcccca

SEQ ID NO: 1762 - DNA, 396 bp, Glycine max
  Clone ID: LIB3028-043-Q1-B1-D1
cgcaagcaaaaagaaagaatcccaggcgaggagaaagatggaggggaaggagcaggatgtgtccgttgggagccaacaagttccccgagagacagccgattgggacggccgcgcagagccaagacgacggcaaggactaccaggagccggcgccggcgccgctggttgacccgacggagtttacgtcatggtcgttttacagaccacggataccagagtttgtggccactttcctgtttccctacatcaccgtcttaaccgttatgggagtccccgggggcaattcgaattgtagtaccgttgggattcacggaatcccttgggccttcggtggcacaatcttcgacctcgtttaactgcccgctggcctctcagggggacacataaccccggcgg

SEQ ID NO: 1763 - DNA, 352 bp, Glycine max
  Clone ID: LIB3028-043-Q1-B1-D10
gcagagcagtacctggctgcaaaaaccaaagtggttctgatgaggaaagtggatggacatcttacttagaagatttctcaaaaggcatagagccaagttattgttccagtttggatggctcctctttgctctcagatgctgcttcttgtgctgcatggaaattttctcatcagaattttaaggtcagcactgcaccaaatctacccaaaaaactaagcttcaagaaagcaagagccaaacagatatcagaggatgaccctttggaagacactgctagctctccagtcaatagccccaaggttagagacttgaatccagctgaaatgagttctaggaaggttgatgatcaact

SEQ ID NO: 1764 - DNA, 371 bp, Glycine max
  Clone ID: LIB3028-043-Q1-B1-D12
cggttaaaaaccttcgggtgggtggcacacttcttccctacaggcagcgtcagctaagaattaagccaaaataattaattaattcttggcaaaatcacatggccgccgccgcagatgggctcttccggccgatctacgagggctgcatctccgcctacgacaacgacgtcgagcgccgcccctaccacaagaactgcggctgcgctctgcacagcaagtcgaggaggaacagcagagcgtgcacgcacaagttgccgaaatgcaacaacgtgtcctaccccatgaggagggcttggagtgaagggagcttgtcaatggcttcggcaacaacttccgcgcattcctctccttcttcttctcccgccgctggg

SEQ ID NO: 1765 - DNA, 410 bp, Glycine max
  Clone ID: LIB3028-043-Q1-B1-D3
ccccagttgtgacaaatgctgaagccagtactcctcaaaatgataatcaaagtagtaaacaagtggcaaccactgaagctacccctctaaatgatcaacactccaaacaagtggaacccattgaagccactccgcctctcaatgctcaaagcaacaaacatttgcctgctactgaagctggttctcctctgaatgatcaaaacagcaaagaagtggcatctactataggtgataacgctcaagatgataaccagaaaaaataaaaaactgcctaagagtgtgctcttgtttgttcctaatttgtttttgcaattgaggacaaaaatctttaccagtttaagtggtcgaaacatacatcagtggcttaaagtcatggtgctgtgcagtatacacattctcatttcaattgc

SEQ ID NO: 1766 - DNA, 84 bp, Glycine max
  Clone ID: LIB3028-043-Q1-B1-D5
tatgagcagcactccattgaggagttcccagtatacttgtcagggatccgtgccctcgacatcgccagcgacttgccctccaca

SEQ ID NO: 1767 - DNA, 334 bp, Glycine max
  unsure (1)..(334): unsure at all n locations
  Clone ID: LIB3028-041-Q1-B1-D10
tccaaaatttcaaaaccccgtgctccgttccgttcaataacaatggctttaagggtgcaaaaccttgacttcggctttccaatcctccccccccccttgtcaaccatttcggcaaaggtcttcttcaaggaccttttcaataacggatggggaaatccgttgggttaaatcagatttggaaaaagatgagaacctggctggggagtggaaccacacctctggccaatggaatggagacgctaacgacaaaggtattcanaccagtgaggattacagattctacgctatttcagctcagtaccctgaattcagcaacaaggataagacactagtc

SEQ ID NO: 1768 - DNA, 288 bp, Glycine max
  Clone ID: LIB3028-039-Q1-B2-B5
caacaatctatcactaacgaacgtccctccattcaatatgtttgtgcagcaatgaaacccagtgttactatccattcatacgcattatcatcagtcaagtcgcttgacaaaggcctatggttctgcctatgtaacgcaccgctcagtttggcatgtttaactatcctgtcaagctcatgcttgtttaaacattggtttatttcacaaacggtggaccaattcatttttacagcttgtaaactgtcctttatgagatactagtttaccacgtttatggataattaattg

SEQ ID NO: 1769 - DNA, 304 bp, Glycine max
  Clone ID: LIB3028-039-Q1-B2-B6
cagaaggccgttgagaggctcgacgggagaatggttgatggtcgcgaaataacggtccagtttgcgaaatatgggcctaatgctgaaaggattcacaaaggaaggattattgaaacatccccaagatcaaggcgatcaaggagccgtatcccaaggaaaaggcatcgtgatgattacagagacagagattatatgagaagaagtcgcagcagaagttatgataggtatgaacgtgacaggcatcgcgggagagacaaagattatcgtcacagaagtaggagccgtagtgccaatcttgattaca

SEQ ID NO: 1770 - DNA, 324 bp, Glycine max
  Clone ID: LIB3028-039-Q1-B2-B9
gctagtttatcgtgaggagaatatgaagttgtttgttttctttgttgctgcagtagttttggtagcatggccatgccatggcgcaggctaccaaaggttccctctccgaatgaaaactggctatggtgagcgttcttcggaggtaaaatgctcaagttttaggcttgctgtggaagcacacaacatcgcagcctttaaaaccattcctgaagagtgcgttgtcccaacagcggactacattaatggcgaacaacttagatcaaaccctaatacagttagccaacaagcgttcttttatgctagtgaacgcgaaatccatcacaa

SEQ ID NO: 1771 - DNA, 416 bp, Glycine max
  Clone ID: LIB3028-039-Q1-B2-C1
caatgctgattcaatggattacacatttaccatgccacaaagttccgtcgagcattatccggcagaggaggtagttgacaaggtggtgaaagacgcaataagcaaaccatggctacccttgcccttgggtttgaaacctccttccccagatactgtgttggctgagctatccaggcaaggcatttccaacatccctccaaagggttcaaattcatgctgacctggatgcatgcaccaaagagagtggttctgatggtgaccaactacaaaaaggttccacctgatcaaacaccctgttgcaattacttttgttttctctaagtgtatgatgttccaacttgtagtttgagtgggaatacgagttgttggagttgggaccattttgttttgtttatttggtcccatcaaaccaaatt

SEQ ID NO: 1772 - DNA, 227 bp, Glycine max
  Clone ID: LIB3028-039-Q1-B2-C2
agaaaatagctgttgattatatatatgcatttcttaggaagatatgcagggaaaattgtgtaatcttcaatgtccctcatgagagtctcttaaatgttggtcagattttctatgtatagcatagccccatatccttgtgattgccattttttttgcaaaatgagctgagtgtagcatatgaacaacactttgcttatggtaatcaagatacaattcggaattgactt

SEQ ID NO: 1773 - DNA, 450 bp, Glycine max
  Clone ID: LIB3028-039-Q1-B2-C3
tcaccgcagtctgctccaccccaaacactaattccctatcctaatccgctttctctcaaccatcatccgcagaggtaagtccacgacagaatctctcataaccgacgccaaaattgctgtgaataaaacaggggccgccatgaacacgaggaaaaccccccggtcagggaatgcagtgaaggatcagctcaccacacaaaggagttcaaataccttcccaaatggtacagacgcattcaggcatgtgttcaaccacgaacatcagtggatcagatcgtgatcagctataggacggttccacctgatcaaacaccctgttgcaattatttttgttttctcaaagtgtatgaggttccaacctgtagtttgagtgggaataggacttgttggactagggaccattttgttttgtttatatggtcccaccaaaccaaatttaaggtctctcct

SEQ ID NO: 1774 - DNA, 330 bp, Glycine max
  Clone ID: LIB3028-039-Q1-B2-C4
ctcaaagaaaagttcaagcgcatgtgtgaaaagtccatgataaagaagcgatacatgcacctgacggaggagtttctgaaagagaacccgaacatgtgcgagtacatggcgccatcgctggacgtgagacaagacgtagtggtgatggaggtgccgaagctgggaaaacaagccgcaacgaaagcgattaatgagtggggtcaaccaaagtcaaagatcacacaccttgtgttctgcaccacttcaggcgtggacatgcccggagcagattaccagctcacgaagcttctcggcctgaggccctccgtgaagcgcctcatgatgtatcag

SEQ ID NO: 1775 - DNA, 437 bp, Glycine max
  Clone ID: LIB3028-039-Q1-B2-C6
ttcagactgttttggacgttattaactcataccgcaagcatcatcagtgtagcaatgtcatctacatgaaggctgttaactagtgagtgagtacatgcaccgttgacaacatgaatcccaatcttctcagctacggtgatggcctctcaaagaccagcatcactgtgacgcatcaactttcacgatggtaccaataccatgagaagggccaccttcacgactgttgctgaacatttcatggccaaatcagttgcattcgagaacaccgctggtgcggttcgacaccgatcaatgacactccgcatgcaaggtgatcgttcactgttctttgattgccctatgcgtggttatgagtacacattggaatcccacgcctatcgtcaattctaccgcaactgcgaaatctctggaacaattgtcttcagcctcggctactc

SEQ ID NO: 1776 - DNA, 295 bp, Glycine max
  Clone ID: LIB3028-039-Q1-B2-C8
aaattaagcaccacaccactctccaatatccccaacatggctcaagtgggttctctatcttccgaaatggggacactgaatcatgtcctagccctagtggaggcattccgagcatttgacgcggacaacgatggccgaatcacgcaggcagagctaggaggaatcttggggtcactcgggtacaaccctagcgagcaagaagttatggcaatgattgagcacggcgacaagaacagagacgggttggtgagcatcgacgacttcttggagatgattaccaaggatttgggaggtg

SEQ ID NO: 1777 - DNA, 548 bp, Glycine max
  Clone ID: LIB3028-039-Q1-B2-C9
cgacctcgcatcgcaccttcaacttaacctattccacttgtaatcgtaaacgctttgctagaagaagagacaaagtgtgtctgtgtgtgtgagagagagagcaatggctggctcgtgggcacgccgttctctgattgttctagccatcatttccttcggatgtctatttgcgatttccattgctaaggaggaagccaccaagttagggacggtcatcggcattgatcttggaacaacctattcatgtgtcggtgtttacaagaatggccatgttgaaatcatagccaacgaccaaggtaaccgtatcaccccatcgtgggttgctttcaccgacagtgagagactcattggggatgctgccaagaatcatgcagctgtcaacccagaaatgaccatctttgatgtcaagagacttatcggaagaaagttcgaagataaggaagttcaaaaagacatgaaacttgttccttataagattgtcaacaaggatggaaaaacctacattcaggtgaaaattaaggatggtgagaccaaggtgttcaaccctg

SEQ ID NO: 1778 - DNA, 200 bp, Glycine max
  Clone ID: LIB3028-039-Q1-B2-D1
gatggcgcaaaattcaatgacgctttggctgtgtgcttcaatcgcattcactggcatacggaatcacgaaattagccgggaccatgcgatcacatgtttgggccctctactggcatcccgctcatcttacacgctgagccacgtctttccgttatcgccaacggtcatcacaccactcaaaggccgtaatactgatatcc

SEQ ID NO: 1779 - DNA, 114 bp, Glycine max
  Clone ID: LIB3028-039-Q1-B2-D10
atcttccttgtcactgcccgtgtgtcgccgccatggccaccgtcaccacccaagcctccgccgcaattttccggccatgtacctcgaaagcgatgttttttaacgggtcttccg

SEQ ID NO: 1780 - DNA, 447 bp, Glycine max
  Clone ID: LIB3028-039-Q1-B2-D2
ctcacttcaccgtccgcacgcacgcgcgttctcttcgttcgtgagccaaatttatgagaagtgcttcactcgtaccacgtccatatcccaaccaaacgctcccataaaggacccgaagaaaaaaaatacttataatactattcataataattattattaatttttaacataaaaacaaaacaaactaggcggccatccagccacaggattgaagagtagtaccacattagtgaagaccatttttcaattagtctcctctctctctctctctctctctctctctctctctctcactttggccttaacagaaccgaacacaacacaagagagataaagatacaatacaagaacaaactccgacatctctcgctttctccacgttcccctgtttttaatcggaaccaagcaaggcttatttatatagatccctcttttccgtgcttcact

SEQ ID NO: 1781 - DNA, 387 bp, Glycine max
  Clone ID: LIB3028-039-Q1-B2-D3
gtggtgccttagcgctgtggttatcatcttcttcttcctcgttcttagatctcttctttctctaagccgcacgccgaaaccatggccggaaaaagagagggtcctgctatccggatcgatctcggtaccaactactcttgcgtcggtgtgtggcaacatgaccgcgttgaaatcatcgccaacgaccacaggaacacaaacacgccgtcttacgtccgattcactgagaccgagcgtctcatcggtgatgcggccaagatatcagtcgccaagaatcccatcaacaacgttcttcgatgccaaaaaggtgaattggtcctagattcagtgattcctctgttcagaatgatatcaaattgtggcctttcaaggtcattcctggtgctg

SEQ ID NO: 1782 - DNA, 547 bp, Glycine max
  Clone ID: LIB3028-039-Q1-B2-D4
ctttgttattacctctttccaaagtccaaattttctagttccaccaaaccaaaccagaccaaaatggcagcagcctcagcctcatccatgatatcaacaccagccttatctccaaccatccaaaagcaccatcatttgaagccatccaacgtgtgcttccaaggtcttagacccctcgcaaggttcaccaaagcctcatcaaccaaagtgagcaccaccaccaaaagggttattccaaagggtggtgttagagctgaactcaactcagcccttgtgataagcctcagcactggcctctccctcttcttgggaaggtttgtgttcttcaacttccaaagggagaacgtggcaaagcaagtgcctgagcagaacgggctcacacagtttgaggctggtgatacacgtgccaaggagtatgtcagcctcctcaaattccaatgaccctgttggattcaacattgttgatgtcctggcttggggctccatttggcaggttgttgcttaatacatcttggccaccactaacaaggggtatgaccctgcattc

SEQ ID NO: 1783 - DNA, 560 bp, Glycine max
  Clone ID: LIB3028-039-Q1-B2-D5
gagatactgtaattcttactcttattcatcgatgtcctgcatgtcgtccaaccattagtttcagggttttctcatcgagaattctaccaatcgtctccgcttcacatccttatcgggtatagttcgcactgaatcaatcacgtgacatatttcagatgatcgcttgtcgagaggtccgtcatctcactcaatggtattcagttcctggaccatgctagagagacagtactgactacgttctacgttaccaatgtaggtaagattgccagttcagttagcggacacgcttagttccaggctaaacccctcaagatcatcagtagcggaggtatttatcgttggccgttgactacactattcatctccagtctcgactaattttgctaagcagttgatttggtgtggtatcacacagtacgacggcatttaataaatgggttcttgatgacgaggcattctcactgacaaagactcttaaaatgtacaaaaaatcgtttgctctcgggatcaggattgtattcttatcagaagaaccactgagtcctagggatgtaacagcc

SEQ ID NO: 1784 - DNA, 457 bp, Glycine max
  Clone ID: LIB3028-039-Q1-B2-D6
caatatagcccaagccctatacaaccaaaccctaacacacacccatttgattcagtttccatggctagcctcaaggttgcatttttggctgcagtgctctgcatggttgtggtgagtgcacccatggcacatgcagctatcacgtgcgggcaggtgacgaatagcctgatcaattgcatcggttacctccagaacggaggaacgccgccgtcgagatgctgcaacggagtgaagagcctcaatgccgccgccaagaccaccgccgaccgccagacggcgtgcaactgcctcaagtcggccgccagccaaatctccggcttcaaagccaacaacgccgcctcgctccccggcaaatgcggagtctccatcccctacaagatcagcacctcgaccagctgcgctaccatcaaggtttgaagaaaaagtcatggtcgcaggaaaccggaaactactcact

SEQ ID NO: 1785 - DNA, 411 bp, Glycine max
  unsure (1)..(411): unsure at all n locations
  Clone ID: LIB3028-039-Q1-B2-E1
actttccacttgtctccgaattagttatcttgagaaacattattcccattgctatatattatggctagcatgaaggttacatgggtggttgtgatcatgtgcatggccgtggtgggtgcaccgatgatggcgcaagccatgacatgcaatgatgtgacggtgaacatggcacagtgcctatcctacctgatgcagggaggaacaccttcaacactttgctgcagcggagtcaagaacattcttggctctgctgtcaccaccgttgacaaacaaactgtgtgcaactgtcccaaagcggatgctgctangtacaacatcaatgaccagtatgctcaaggaatcccctggtttctgcaaagtcaatgtcccttacaagatcagccgctccactaactgtgcaagcatcaaggt

SEQ ID NO: 1786 - DNA, 374 bp, Glycine max
  Clone ID: LIB3028-039-Q1-B2-E10
tgttggattacaagagcaggtttttgttcggaacgtgattgaactgcatgacaagtacctggcatatgtgaatgattgtttccaaaatcatacacttttccacaaggctcttaatgaggcttttgagatcatttgcaacaatggtgttgctggaagctcaagtgcagaaatgcttgccactttctgtgacaatattcttaagaaaggaggaagtgaaaaattgagtgatgaagcaattgaagaaactcttgaaaaggttgtcaagttgcttgcctatattagcgacaaagatttgtttgctgaattttataggaagaagcttgctcgaaagctcctttttgacaagagtgccaatgatgatcatgacagaagta

SEQ ID NO: 1787 - DNA, 384 bp, Glycine max
  Clone ID: LIB3028-039-Q1-B2-E2
gccgcacatcacttcgttgtgtcatcttctttcaacaatcaatcaccgcttcctctctcactttccctaacttcgaagtcaccaacttcttatatttcaagacaaaaggaatggtgggtttatctcttggagaaacacatttcatccaaggtggcattgctcaagatcttcgttgtgatggtagaaagagattgacatatcgaccaatctctgttgaaactggagtgattccccagaccaatggttcagcaagagtcagaatgggtgccacagatgtcattgccagcgttaaggctgaacttgggaagccaagcttgttgcaacctgacaaaggaaaagtctctatatatgttgattgcagttcaacagcagagccagcttttg

SEQ ID NO: 1788 - DNA, 376 bp, Glycine max
  Clone ID: LIB3028-039-Q1-B2-E4
cgcacacgtcgtttttttctttttgttgcttcggagccaactcaacaacaacgccgtgcctaatccttaagaataacgaattacaacaaccaaccatgttgcattgtctcaacacttcctgttcggacatcacagtcttggaaagacaacgggaagcaaccatcaagtgccagaaccaccaaccaccctacttaacggactttaacgccgtcttcgcttcttcatcttcttcttcgtcttcttcctcttcttcttctcatagtcagggcttgctcatgatgtgctcggattcctcgctcggccaggtcctaactcactccgtcaaaaccgattcgggcgtctggcccgaattcggttttccacccgcaatttcgag

SEQ ID NO: 1789 - DNA, 574 bp, Glycine max
  Clone ID: LIB3028-039-Q1-B2-E5
gaaaaacaaaaaatcaacgaatggcacttacggggggtaagcaacgaacgccaagagacttgggtggaggagtaatctcgaccactttgtagggaaggatgctacctcgttctctgtctctgtctctcttcctactgcacgaaacctcaaacgacatcgtctgctaaaagagagcgaaaacgagattaactaatgaagaatcatggaaaagatagaaaagtgggtgagtgcggtaccttctggcatgaagcgagacccatgttccacgacgccattacaattagcttctcttctcttcaattctcgtcacgcaaaatggcaacagcaaagccagaaaaaactccggattttttttgtggtgggacacgagtcacatggctaggcctaagccaaagtaggagactacacagataatcctgggagttgcagactcccaaactattagcaagaaacattagcctaagagaggctggcctctgctaagaatctccaccattctgcaggctttatgagcaagcacatccacacattgattagcttcgctataaatgtgataaatccttatattgtcatg

SEQ ID NO: 1790 - DNA, 458 bp, Glycine max
  Clone ID: LIB3028-039-Q1-B2-E6
aaggtgagaagaagatcaaggagcagtttcataccgataccttggacaatgttcagaaactcactggcatcatccttgacattgtgagtggtttgtcgaacatcctcgagaagttcgggttgaagtttaatcttaagcccgcgtctcgccgtcttctcggcaacgatgggttgcccacttggttctctgctgctgatcgtaagcttttgggtcgtggatggagatcacgtgtcaagcccaatgttgtggttgcccaggatggcactggtcagttcaaaaccgttgccgatgctattgcttcctacccaaaggataacaaaggtagatacattacctacgttaaggctggtgtccatgacgagtacatcaccgtttccaaaagttcaaagaacattctcatgttaggtgatggccctgctaataccaacatcaccggtcgcaagaaattcgtcgatggt

SEQ ID NO: 1791 - DNA, 286 bp, Glycine max
  Clone ID: LIB3028-039-Q1-B2-E7
gttggcttctgttttctctctggtttgggtcaagattaacccttttatcagcagacctgacagtgcaagcatttcccagacctgcatttctatagattgctaagtcatctgcctatataaaaagttttgaccatatgttaaaaatatggatgatgatgatgattgattgtgatttgagccgcagttgaaatgtgtaagcactttaaatgtaaggttgcaaacatggttgttacttcttttccatgcattggatgaaatttcctgtgtaaagatcaaccgttgactc

SEQ ID NO: 1792 - DNA, 368 bp, Glycine max
  Clone ID: LIB3028-039-Q1-B2-E9
ggctgctgctgcattgaagggttcagatcatcgccgtgcaacaaatgtcagtgccagactggattctcaacaaaagaagctcaaccttccaatcctgccaaccaccactattggatccttccctcagactgtagaactgaggagggtacaccgtgaattcaaggctaacaagatctccgaggaagagtatgtaaagtcaattaaggaggaaattcgcagagttgttgagcttcaagaagagcttgatattgatgttcttgttcatggagaaccagagagaaatgatatggttgagtacttcggtgaacaattgtcaggctttgccttcaccgttaatggggtggtgcaatcctaagggtcccgttgcg

SEQ ID NO: 1793 - DNA, 373 bp, Glycine max
  Clone ID: LIB3028-039-Q1-B2-F1
agaagccagagtatcacttttgggcacagagtttatcaaagttgcaacgaacattgatcctgactgttaaatgataatcaacgaaaaagggcgaaatgcaaaatgcgcaatgaggaaggcctttgtggatgaataaaatccttaactgccaaagcatattttatataaggaacatcaacaaatcactgatagagatggctaaggttgagactgatagccttaaagctcatgctgagaaaccttgacctgacagaatgattgcacaatgctgccaacattttccccttcaatactccaaccagcaagagaaacataccactatacaatgatcattgataggttcttccctcagaaatcaccaaggctcactgtt

SEQ ID NO: 1794 - DNA, 207 bp, Glycine max
  Clone ID: LIB3028-039-Q1-B2-F10
aaagctccttggaaagtacctgattatttgtcatttccatttggagacatcgttcccatgtttgctggtgaaacccttgaatgggaggcattgccttgttgatttgctgtgtctatttgaaagtttggtatccttcagcttaaattattgattgctgagatgagaatttatgcagcgttcaagaactagagtcaagcaattttgttc

SEQ ID NO: 1795 - DNA, 568 bp, Glycine max
  unsure (1)..(568): unsure at all n locations
  Clone ID: LIB3028-039-Q1-B2-F3
aatgcatgctgtcgagcttttgttactttgtgacaaatggagggtccttagttctgtttctctttcttctctctgtgctttcaaccaagttctcaaatcactcttcttcttcaaccttctgatctgctaattctcaaggtattcaaaattgggtggttttcgattgaactgtgatgtccaagccactgctatgcatancggaagaggaaagtcaaagcaatgtcactttgttggtttcttcctcaaccaccaaggaaagtgtgtgcctgaatagctcaaaactgaaagagcgcaactacatggggttatctgattgttcatctgttgacagctccgcgccgtccttctcagattagactaagaacaatcctaacctcaaagctactgaactcagactgggggcttcgggggtcgcaatctcccgaacgagattcagatcttttgcttagaagttccatttcagtttgatgaaaagccactgtttcctttgcatcctgcaactgatgaacaccattcctcatcaaagcctgctgttttgggaaacaaaatagggttctcaaatgtcatg

SEQ ID NO: 1796 - DNA, 290 bp, Glycine max
  Clone ID: LIB3028-039-Q1-B2-F7
gaactttcgaccatggctactgccgaacattttaaggaaagacacattgcatgggatacaactgcaagatatgttgcatctgctgtgacttcagttcatgatctggtgaatggattcaatatatggtctttcaatggcaagcatctatatcggattctgaatgatcacttctatcagttcttacgggaaccatagccaccatctttcttgactcaggataaagaggaagatattgcaaagaacttgaagaaatacagcaagaaatacgaagcagaagataaagatgtttc

SEQ ID NO: 1797 - DNA, 483 bp, Glycine max
  Clone ID: LIB3028-039-Q1-B2-F8
aatttctcttgccaaggagccaaaagcagaacgtttgtttcacatgtaacgcacatgctacggtggtcaagtgtgtaaacttgtgtatggtatacaaatttttttaaccctcagattactcttttggtacatcatactatcttgaacttctcacacaatatccttcctctatacaaaggaaaacgttcatgaacccatttagagaccttggattgcgggaaagccttcgtcggactcggaaagaactaccctctccctttcgtccacaatctcaattctccgtcgcggaaaccaccgttaccgccatcaccggcgtcaacaccaccgaccttgaccgcgccatcatcggatttatgccaccatcgccgcctcattcctccgccaatatcttcttcgcctcccactcctgctccggcgtggcgccgacgccgtcgtgtctactgctcttctgtgacttgaacattgaccagaacgacctcgccg

SEQ ID NO: 1798 - DNA, 240 bp, Glycine max
  Clone ID: LIB3028-039-Q1-B2-G1
gtagtctccaccaccctaacgggcaccaaattaatccagacacatctccgacggcaccaaaaccgactccaccaccgcaaatgccacaatgtccaaagctaaacaccagccggaactcacgcgtcttgggaacctaggcatacagccaagggtccgccgcaatgaactcgtcggaccttccggaataggatgtataaggccccagctatgacaccggggaccacgagtggcattcacact

SEQ ID NO: 1799 - DNA, 105 bp, Glycine max
  Clone ID: LIB3028-039-Q1-B2-G11
aacagagtcatgcctatgattcatactttgatgatggtatggctttctgctatgacatattcaacactcccaatcaatcggggggactgtcatagttccgagttt

SEQ ID NO: 1800 - DNA, 265 bp, Glycine max
  Clone ID: LIB3028-039-Q1-B2-G5
cactataatcaatttgcaccctcttcatcgatctcgtttattctcatcatacttctgctaaggcgtctggatactctggtctcagggattccacaaccacaagcatctactcctcttccgacaacatacactgcccatacgactactactacaactacgattctatgttctacccgtagtcatatcgatacggattttcacataacatagatggtcggttcagtaacgtctcctactattgcttacaagcaactcgaacattctc

SEQ ID NO: 1801 - DNA, 399 bp, Glycine max
  Clone ID: LIB3028-039-Q1-B2-G6
ctctcgatatattcttctctctcttcagcgacatcggttttcgccacaagcatcgggtatggcgtcaggatcctcgggtcgctgaacctccgccaccaaatgctgcgaattcgcttccgataagatacgctgcgcctacaacaaccacgctcagcgctaatccacgtcgaactgcaggcagaacgatccggacttgcacacatgaatgacagaaagaacattcatgtttcatagtatagcttattatccactcgaaaaatcttgaattccagatgtgattgcgactgtggagaagactgtcaaatgatatcctgaaaaccgaaagcagttcctaaacggaatcagttcaaggataagacttctggaaatagagtgttactaacgcgatgggtcaacagg

SEQ ID NO: 1802 - DNA, 481 bp, Glycine max
  Clone ID: LIB3028-039-Q1-B2-G7
gttctcacacactatactcacgacacacctcctgctccttactctcctctttcacgcggcggcatccagggtacactggtagctcctccacagcctcatcgggattgtcgccatgcacatgcaacttctccagaacgaacgagtcatcatcttcgagcgcaccgacttcggactctccaacctaagcctcgccgacggaagatgccgcagcaacccagacgagttggtcgtcaaacgcgactgcatcgtgcactcgatcgaactagacgtcgcaatcattatattccgcgctctcgttgtccaaaccaatgtctggtgctcctccggttcggtctatccggacggaacattaggccaaaccggtgggttcaacgacggctaccgtgcggtcagaaccttcaacccgtgccgctcgagcgactgggtagaagttcagcatggagtcccggggcagagattggtcgccaccaagcacatcttg

SEQ ID NO: 1803 - DNA, 128 bp, Glycine max
  Clone ID: LIB3028-039-Q1-B2-G9
atctcatgatccagaaatgagatatgcaccatggatcatggcacaagacttgatcttgatcaactatattgcaaatcacgggggaagtgtttgaaattctttaaccaatgcttccggtcttaatccac

SEQ ID NO: 1804 - DNA, 323 bp, Glycine max
  Clone ID: LIB3028-039-Q1-B2-H10
ctcgagccgaatcggctcgagcggctcgagcgttcacataccacgtagaaacagttcaatcattcttagccctaagcagagttcacatactcatccacttagtggcagtgttgtctctctgttactaccgcatcacccacttcttcctccaacctccaacagcgccatggcttctcatgactgctgcggagcttcttctctcgctgctctggttcttcaaccaagccttccggtggcgaccggtgtcgcggagcgtcatgactgagaagcttccgactgaggagaagctgccggggcttgacatcttcgtgtggacgctcgat

SEQ ID NO: 1805 - DNA, 157 bp, Glycine max
  Clone ID: LIB3028-039-Q1-B2-H11
cgacacagtcgcaagatggataacgatgagccctacggcgatgcaatgatgataaaggcataacctactgcgtttcatcagggaagggactatttgggtatcaatacgtctggttcatctacctgtcctagaatattggacccttttctcccttgtc

SEQ ID NO: 1806 - DNA, 377 bp, Glycine max
  Clone ID: LIB3028-039-Q1-B2-H2
ccctctttcctatcacactttctagatagctagccaaccagagtaagatctaaagatatttcttatatatcctatggtccgagagtgcccttgttctgcgccaaccctttcttccacatcttgcgtttcaacctcttcctctcttgagtccccttatcatcaaatacccttcttcttcaacctccaccaaattcaacccccacataacaaatctcctcccatcccatttttcagcaccaaagtttgaaacttttctcaattgggttgtatagagtttgactcatcaatttttagttttttatttttattttctctaaccaggtagaagtgcaataattaaatgtccaacatcttcatgttgttgatgtttgagattc

SEQ ID NO: 1807 - DNA, 395 bp, Glycine max
  Clone ID: LIB3028-039-Q1-B2-H3
gtcatattcattatctgaatcaggtccatggagatcatttacagggctaggtgcttctgaaatttgcaaggttgaagaacttgagtatgcagagctaccaggctctggggatagctgttgtaaacttaaacttagatttccagatccttcttcgtgtgtgcatggcaaatcgtttaaattaactctacctgaattgattaacttcactgattttgttattgagaaaacatggtatgatactgccatgaagagaaattggtcttcaagagataaatgcatggtctggtggagaaatgaagatgggaaaggtatcgggtccagtacaagactgatcccaccgagaatcatctgcaaaggccgtgggaactatatggttctgagatgctatgggagca

SEQ ID NO: 1808 - DNA, 401 bp, Glycine max
  Clone ID: LIB3028-039-Q1-B2-H4
ctatttttcaagtaacttaacgtttcaaacctaagaagttggaagtcatggcagcaacattgatggcagcaacaacaagttctggtactcttaaagcaactcctttccttggccaaggcaatggtgccaatgccaatgctcttatggatgttgtctccatgggaactgggaagtacaccatgggcaatgatttgtggtatggaccaaacagagtgaaatacttgggacccttctcagctcagaccccttcatacttgaaaggagaattccctgaggattatggatgggacactgctggcttatctgctgacccagaagcatttgccaagaacagggctcttgaagtgatccatgggcgatgggccatgcttggagcactaggatgcatcaccccagaggtg

SEQ ID NO: 1809 - DNA, 88 bp, Glycine max
  Clone ID: LIB3028-039-Q1-B2-H5
ggtgacatgacgtcattataaagcaaacgtgcagctccatttagatatcaagggcctattgtggtgacatgacatccgctccacttaa

SEQ ID NO: 1810 - DNA, 331 bp, Glycine max
  Clone ID: LIB3028-039-Q1-B2-H6
caaacattgattgcacccacggtagtaagtgagtttcccttataaaattcaatccccaaaacaagtctcacaaaattgagaaaaatttaaagaaatcaacacacacaaacacaacaacatatggaggtgctaagggtgcaaaccatagcttccaaatccaaagatgctgccatcccagccatgtttgttagggcagagacagagcaaccaggcatcacaaccgttcaaggggtgaaccttgaggtgccaattattgattttagtgacccagatgaaaggaaagtggtgcatgagattttggaggcaaatacggactggggcatgttccaaa

SEQ ID NO: 1811 - DNA, 432 bp, Glycine max
  Clone ID: LIB3028-039-Q1-B2-H7
ggaaagggaagccaaagcgaaaccctaaccctaacggagagatggcggagcacttggcatcgatattcgggacggagaaggacagggtgaactgtccgttctacttcaagatcggcgcgtgcaggcacggcgaccggtgctcccggcttcacacgaagcccacaattagcccaacgttggttctgtcgaacatgtaccagaggcccgacatgaacatgaacatcatcaccaaccccgatcagccccagccccaatctctcgaccccgataaggtccaggatcacttcgacgacttctacgaagatctctttgaggagcttatcaagtacggccccagtcagagcttgaatatttgcgacaacctcgccgatcatatggttggaaatgtgtacgttcagtttagggaagaagaccatgcagccaaagccctca

SEQ ID NO: 1812 - DNA, 477 bp, Glycine max
  Clone ID: LIB3028-039-Q1-B2-H8
caaaaacgtcatctgcagcaccaatgttcctgcaattcaaggtatagatgctctcataatcctcacaagtgctgttccacagataaaacctgggtttgatcctaccaaaggacaaagaccagagttctattttgatgatggtgcatatcctgagcaggttgactggattgggcagaaaaatcaaatagatgccgctaaggctgctggagtgaagcacattgtgttagtagggtctatgggtggaacagatcttaaccatcctttgaacagcttgggtaatgggaatataccggtttggaaaaggaaggctgagcaatatctggctgattccggcatcccatatacaattataagggctggtggcttgcaagacaaagatggaggtcttcgggaaccacttgtagggaaagatgattaccttctccaaactgaaaccagaaccagaactagatctgatgtttgcaaaagtctgcattc

SEQ ID NO: 1813 - DNA, 320 bp, Glycine max
  Clone ID: LIB3028-039-Q1-B2-H9
gtgcgcagaataaaatttctcatcgacgatggcgaataccttacaacgcgcccttcgcgccaccatggcccggccgttctccaccggcgcattggccgaaattaagcgaggcgagatcggaatggtttctggaattcctgaagaacaccttcgtaggagggttctaatttactctcctgctagaactgcatctcaacaaggatctggaaaggttggaagatggaagatcaacttcttatcaacccaaaagtgggaaaatccactgatgggctggacatccactggggacccctactctcaggttggtgattcagccttga

SEQ ID NO: 1814 - DNA, 336 bp, Glycine max
  Clone ID: LIB3028-040-Q1-B1-A1
atctattcctgcacctctctacacacaaatacacaaatgttggacatatttaatgagagcgtgagagcgtgagaggtgagacaaaggattgccaacctgaatgtgaataattttgcatgaaatgggttggtttaccaagttgcttaagggctctgatcataaaattttacgaggacaataccatggcaaatatggagaggacagaatttgggataatcatcatagttcaatggatgatttgactgatattgagaaagaagacattgaccgtgcaattgcactttctctgtcagaggaggatcataaagggaaaaaagttgttgatgaagaactttg

SEQ ID NO: 1815 - DNA, 386 bp, Glycine max
  Clone ID: LIB3028-040-Q1-B1-A10
tccaaggcaaaagaaaattcaccatgcattatttttataaatgaaattgatgcaattggtacaaaccgttttgatagtgaagtaagtggagacagagaggtacaacgaactatgttagaattgcttaatcagcttgatggttttagcagtgatgaccggatcaaggtgatagcagcaactaaccgtgcagatattcttgatcctgccctgatgcgttctggtcgtttggatcgtaaaattgagtttccacacccaagtgaagaagcaagagctcgaattctacagattcattcaaggaagatgaatgttcacccagatgtcaactttgaagaacttgcccggtccacagatgatttcaatggcgcacaactgaaggctgtctgtgt

SEQ ID NO: 1816 - DNA, 365 bp, Glycine max
  Clone ID: LIB3028-040-Q1-B1-A11
cttacattttttcttcaaaccccatgaagggttcttcaattttgtagtttgtgtcattgtggtggccgggttaaacttcatttaataattatttggagtccaaaccttggcagctggcatcaataccggccagcaacaacgatgatgactagacaatagtatggcgaactgtcagcaatattattttcctttgctttctctggcaatttttattcccaccctgattgccaattccttatagaaagatgagtattggcagagccatgtctatgagtttgatacttattggcaggaaagggcaaaagccgctaaagtggacagtcaggcagcttattttgaagacccatattcagtctccagcaact

SEQ ID NO: 1817 - DNA, 310 bp, Glycine max
  Clone ID: LIB3028-040-Q1-B1-A2
ccgagaacgtggttgtgacaggatcattgagctcggcaagaatggaagaacacaggttgagcttgagaatgagcacgcttgtcttcactctttccattatcatcatcgtactctcttacccagcacaaccacttgcgttgaaccattcgccgaaattcctaggaaaattcgcagcaacagcacgagcccattcaaattcggagccaccgcggcaattccactacgaaaaaggatacttccaacagcgcctcgacaacttcagcttctcggagctacccacgtttcctcaacgctaccttatcagcaccga

SEQ ID NO: 1818 - DNA, 345 bp, Glycine max
  Clone ID: LIB3028-040-Q1-B1-A5
ctaattctcatttcttcatcgttcgattcttctcctcctaaagatgcagatcttcgtgaaaactttgaccggtaagaccatcacccttgaggtggagtcctccgacaccatcgataacgtgaaagctaagattcaagacaaggaagggatcccacctgaccagcagagacttatctttgcgggtaaacagcttgaggatggtcgaacccttgccgactacaacatccaaaaggaatccactctccacctcgtgcttcgcctcaggggtggcatgcaaatctttgtcaagactttgactggcaagaccaatcacctcgaggtcgaatcctcggacaccattgataa

SEQ ID NO: 1819 - DNA, 398 bp, Glycine max
  Clone ID: LIB3028-040-Q1-B1-A7
cgtgttcgttctttagtctttacccaaaaaggcaatgagagggacacagatactgttcgttggtttgctttggttcttctgcgtttatgcaccttcttcgttttgcgcaaatgtcacgtatgaccacagagcattggtcatcgatggcaagcgccgtgtcttggtctctggttctattcattaccctcgtagcactccagagatgtggccagacctcattcagaaatccaaagatggaggacttgatgtgattgagacttatgttttctggaacttacatgagccagttcaaggccagtataattttgaaggaagggcagatttggttaaatttgtgaacgcagtagcagcagcaggtctatatgtgcatctccggattggtccatacgcatgtgctg

SEQ ID NO: 1820 - DNA, 396 bp, Glycine max
  Clone ID: LIB3028-040-Q1-B1-A8
ggggggaagtggtcaagggtgcacctttggttgagccaggagatgaattgttctggttcaatcgaccccgcctcatcctctttttgattcatcttgttctctttcagaatgcatttcaactagcgttttttgcttggagcacatatgacaatgggttcaaaataaactcttgtttccacaaaactactgcagatattgtcattagacttacaatgggggttctcacacaagttctatgcagttatgtgactttgcctctttaggctctagtcacccagatgggttctaccatgaaacctactattttcaatgaaaatgttgcagtagccctgaagaactggcatcacactgctaaaaagcacatcaaacacaacaaggattctacttccaatacac

SEQ ID NO: 1821 - DNA, 349 bp, Glycine max
  Clone ID: LIB3028-040-Q1-B1-A9
tggttatgcagggtaaatccagtgattttgctaagcatgctcttccttccacacgcaaacaacgcatactggttaccttcacaaagtcccaaccaagaaagtcactatcaagtgatgctcaacagcttgcctcggcagtagcatcttctcattggggtccaccgccaagccgatctcccaatcatgttcgtcatcacgtaggccccaagcattacgctacacttccaacaactggggtactgccagctccacccattcgaccacaaatggcagctcccgttggcatgcaaccattgtttgttgctgctccagttgtacctcccatgccattttctgcacctgtgccaat

SEQ ID NO: 1822 - DNA, 291 bp, Glycine max
  Clone ID: LIB3028-040-Q1-B1-B1
aaaaaattgtagctgatgcatcggttgctttgtctcgagcagtttgcattgctacaagatatagtgctgttagaagacagtttggatcacataatggaggtctagaaacacaggtgattgattacaaaacacagcaggctaggctcttcccattgctggcttctgcttatgctttcagatttgtgggcgagtggctgaaatggctttatatggatgtgacgaaaagattgcaagctaatgatttttcaacattacctgaggctcatgcatgcactgctgggttgaaatcct

SEQ ID NO: 1823 - DNA, 389 bp, Glycine max
  Clone ID: LIB3028-040-Q1-B1-B10
aggaacccttacttaaccccggaattcggtccaaaattttccggtttccctctctctctctctctcatggcgaatctagcacacttctccaagagagccctaagaagcgcacacgcgctcgcaaggcaccacgtgcagccgcagctgctggcagcggaacgcgcttttgcgacggaggcggcgaaatcgatatccccgtcggcggatcgcgtgaagtgggactaccgagggcagaggaagataatcccgttagggcagtggctccccaaagtggccgtggatgcttacgtagcacccaacgtggtcctcgccggccaagtcaccgtctgggacggagcctccgtctggcccggttgcgtcctccgcggcgatctcaacaagatcagcgt

SEQ ID NO: 1824 - DNA, 355 bp, Glycine max
  Clone ID: LIB3028-040-Q1-B1-B11
gacgatttaaccgatcctgcgcctgctacgacatttgcacatttagatgctactactgtactatcaagaggattagcggccaaaggtatctatccagcagtagatcctttagattcaacctcaactatgctccaacctcgaatcgttggtgaagaacattatgagactgcgcaaagagttaaacaaactttacaacgttacaaagaacttcaagacattatagctatccttggcttggacgaattatccgaagaagatcgcttaaccgtagcaagagcacgaaaaattgagcgtttcttatcacaaccttttttcgtagcagaagtttttaccggttcgccggggaaatatgtta

SEQ ID NO: 1825 - DNA, 369 bp, Glycine max
  Clone ID: LIB3028-040-Q1-B1-B12
aagttctcctaaaacatctcaatgggttcttcttctattacaacatcgcccgcaaccatgaccatggctgcgatcgtgctcctgttcacggtctttgccgtttcctccgccctagacatgtcgataatctcgtacgacagcgcccacgcggacaaggccgccacgttgcgcaccgaggaggagctgatgtccatgtacgagcagtggctcgtgaagcacgggaaggtgtacaacgcgctcggcgagaaggagaagcgcttccagatcttcaaggacaacctgcgattcatcgacgaccacaactccgcggaggaccgaacctacaagctcggactgaaccggttcgctgatctcaccaacgaggaatac

SEQ ID NO: 1826 - DNA, 358 bp, Glycine max
  Clone ID: LIB3028-040-Q1-B1-B2
gtgcttgggactgaacttgaggccaccaaatcggggacgttcactgggtttgttaagaagcctggtgtgcttgttggggagcataagaaagtggctctggtgaaggagtttcagggtaatttacctgacttgggtctaggtgatagtaaaagtgattatgacttcatgtcaatttgcaaggaagggtacatggtgccaagaactaagtgtgaaccactaccaagaaacaagcttttaagtccaattatttttcatgagggtaggtttgctcaaaggccaactcctctagctgccctcttgaccttcctatggctgccaattggcatcatactctccatcttaagggtctaccttaaca

SEQ ID NO: 1827 - DNA, 374 bp, Glycine max
  Clone ID: LIB3028-040-Q1-B1-B4
ctattgctgagttggatacactgggagaggagtcatacaaggatagcactctgatcatgcaactccttcgtgataacctcaccctttggacctctgacatgcaggatgatggagcagatgaaattaaagaagcagcaccgaaacaggatgaccagtaaaaatattttactgctaattagaattgaacttctcctccatatctttttgaagggagaaggtgtttgttgctaatatctctttggtactgagattttaggcattcatgtttgttatgattgtggatgtactgggccgtttttagtttgtccttccattttcaagtgttttccaaattgcctattttattaaggacgctgaagtttttactacatgga

SEQ ID NO: 1828 - DNA, 313 bp, Glycine max
  Clone ID: LIB3028-040-Q1-B1-B5
aaggaactcaagaacggtcgcttggctatgttctccatgtttggtttctttgttcaggctattgtcactggcaagggccctattcagaacctttacgaccacgttgctgatcctgttgccaacaatgcttgggcttatgccactaactttgtccctggacaatgaggatgcctacatgcaatgcaatcttctgctcccttttgcagttcccttgtgtttaactccattttcactaatgtaactacacctgtgtagcagaaatatctgtatgagaaccattatatttttatatattagaaatttgggtccccag

SEQ ID NO: 1829 - DNA, 390 bp, Glycine max
  Clone ID: LIB3028-040-Q1-B1-B6
gttgggcttgacacaatacactgtcatccacaatcatcttctgaggtcaacttcacaagactaactttccggcaagtgcatttgttggaaaagattgactctgtgggtctccgtcgctaccctgcaagatctcacaattgcactaagcattgatgtcgacgatttcacgatgattaacatccctttacagcgagctttcacagtaagtatgtcagtgagtacgtagattgtcaatctaacgttcatgctggaatagacatatgtacataatcatagtaggtcgaaagggtacaagaattgagaggattagctcgtcttgcgcaagactcacgaagatagcaactacaagcttgctttggatggacttcccccaaaggtgccaattccccc

SEQ ID NO: 1830 - DNA, 344 bp, Glycine max
  Clone ID: LIB3028-040-Q1-B1-B7
agaacatagcttttaaatcgcagtacgcggcaataacagcataatatcaagccacaagctgtgatttaaaactttaacatttcgtgttgttgaggttaaagttggtaatcaccatggctacggcgagggccctttttctcttaggggctgctctcctctcttgcaccttgataggtgcatcttcgcgtggcgttgagaatcgccgtagcctcctccttccagttccaaataatggtcctgcaatttttgatgtgacgaaattcggtgctgtggcagatgaccagactgacaatattgatgcatttaaggctgcatggggagaagcatgcaaaaacagtactact

SEQ ID NO: 1831 - DNA, 399 bp, Glycine max
  Clone ID: LIB3028-040-Q1-B1-B8
gtagcacttcttcttctggcggaggtggggcccatggctgaggctgtgacatgcaccccaacagagttgagtccgtgtcttccagcaatcacttccggtgctaaaccttccaatgcttgttgcacgaagctgaagcagcaaaaaccatgcttatgtggctacctcaaaaacgctagcttgaagcagtatgttaactctcctaatgcccgaaaaaccgttgcttcttgtgggattccctttccaacttgttaattaattaagccttcttataattaaagtgtgggatatatatatatatatagataaacagtttaatttaaacacactttgattctacaaagcatcctggcacaagcattcaatacgatttcaacactttaacgcaacattttaacatga

SEQ ID NO: 1832 - DNA, 305 bp, Glycine max
  Clone ID: LIB3028-040-Q1-B1-B9
tataataattgcttataaggttgtatttgggggctgaaaaggagtgttatcattttttgtcttttgggtactgccacaagtgtgataagatggtgaattactctgcttccgtacattttgtgcatagttcacttgatttgttgcgtgagatgtttagtcttcaaagcaaatgtatgtctgctagtagaatctccgtttattggagcattgattttttgaaccacgtgtacaagtttttgtgattatatgtaaacacgggatttggtgtgtaatactctaccatcaaatttcaaacattattttgt

SEQ ID NO: 1833 - DNA, 215 bp, Glycine max
  Clone ID: LIB3028-040-Q1-B1-C1
gtacgttaactcgagatctcgattcggggccatcaaatccttcatgttcagggagatagcatcaacacataaacttcccgttcaagactttgtggtgcgcaatgacatgtcatgtggttcaagcattggtcgtattcttgctagtggagtaggtattcgcaatgttgatgtaggtgcagcgcagttgtcactggatagcataccagaaatttgtg

SEQ ID NO: 1834 - DNA, 374 bp, Glycine max
  Clone ID: LIB3028-040-Q1-B1-C11
ctcgagccgaatcggctcgagcttggctttgcatctgagcttggaaactatgctgaatacagcggtgcacccaaagaagaggaggtcttgcagtatgccagagttgtaattgattgtgcaactgcaaaccctgatggccagaagagagctcttgtgataggaggaggcatagccaactttactgatgttgctgccacatttagtggtataattcgggcattgaaggagaaggagtcgaaattgaaagcagcaaggatgcacatctttgtgaggagagggggtcccaactaccagaagggtctagctttgatgcgagcacttggagaggagattggcatccccattgaggtttatggacccgaagccacaatgac

SEQ ID NO: 1835 - DNA, 388 bp, Glycine max
  unsure (1)..(388): unsure at all n locations
  Clone ID: LIB3028-040-Q1-B1-C12
cttccanaaccctccattatgaagaacgctaacagcaacacaaaactaatccttctccacccttatatccaaaaacaaggaagctccaatcgcctatggcttttagccttcatatccttctttacattagccttccttgccacccttatttacacaagagacacaacctcatcttcctctaccactacctcttccaccccattatctagtttcgctaacacccctttaccatccactgtaatcaacaccctcctccactatgcctccaaatccaacgacaccttccacatgccccactcagacctaaaaaccatctctgacgtgctccgaaagtgtcnctcaccatgcaacttcctcatcttcggcctcaaccatgagaacctccttt

SEQ ID NO: 1836 - DNA, 357 bp, Glycine max
  Clone ID: LIB3028-040-Q1-B1-C2
cagaatctgagaaccagaccctctcaaaccggaaccgcaaatgaagcccaagagcattcgcatccgtaacttaccaacgcacctgctgctaatcgctgtttgtctgttcacctcttcgtccgcttccaagatcggagaaaattgtgggtcagacaacaaatgcgacgctggactcagctgccaaacatgtcctgccaatggaaatacccgaccaagatgttcgcggacacaacctttgagccccacctccaaggtgaaaggcttagcgtttaaccggtattcatgggtgacgactcataactcttatgctctggcggaggcgagatctgtcaccgggtctgtcaatgtggcccctat

SEQ ID NO: 1837 - DNA, 400 bp, Glycine max
  Clone ID: LIB3028-040-Q1-B1-C3
atgacactcctcctgctccttattctcctctttcacgcggcggaagccaagggacagtggcagctcctccacaaaaacatcggcattgtcgccatgcacatgcagcttctccacaacgaccgcgtcatcatcttcgaccgcaccgacttcggactctccaacctaaccctccccgacggaagatgccgcaacaacccaaacgagttggtcgtcaaacgcgactgcaccgcgcactccatcgaatacgacgtcgcagccaacacattccgcgctctctttgtccaaaccaatgtctggtgctcctccggttcggtctctcccgacggaacattagtccaaaccggtggcttcaacgacggctaccgtgcggtcagaaacttcaacccgtgccgctcgtgcg

SEQ ID NO: 1838 - DNA, 383 bp, Glycine max
  Clone ID: LIB3028-040-Q1-B1-C5
cacatccttcatattcagggagatagcatcaaaacataaacttcccgttcaggactttgtggtgcgcaatgacatgtcatgtggttcaaccattggtcctattcttgctagtggcgtaggtattcgcactgttgatgtaggtgcaccgcagttgtcaatgcatagcatacgagaaatttgtgctgttgatgatgtgaagtattcatatgagcacttcaaggcattttaccaagaattctctcatgttgatggtaagatggtcgtggatatataggaatatctctaatcacgaaatcctcattaatcctttgctctagaagctgttgctgaaatggtcgtgtttcgtaatttagtaccattataatgccgacgttattatgatg

SEQ ID NO: 1839 - DNA, 398 bp, Glycine max
  Clone ID: LIB3028-040-Q1-B1-C6
gttctgcactcacagtagttaatgcctcattgtgtgtttcattattattccctaaccaactctcttgaccctgacttcttcacttgtgctttttttttttagatcaacaaattaaagtattaaactttgagcatcagattttggttcttgtaattataatgatggggggtgggaagtttagtagtttttttgttgtttttgtgttgttggtggggtcagggagtgggattggtgtgaattgggggacacagtcaacacaccctttgtcaccgtcgaaggtggtgaagatgctgaaggacaatggcattcagaaggtgaagctttttgatgctgatgctggtatcttggatgctctcaagaagtcggaatacaggttatggttgggattccaaatgaca

SEQ ID NO: 1840 - DNA, 393 bp, Glycine max
  Clone ID: LIB3028-040-Q1-B1-C7
cagaaactcaatcaaaataaaaatttattatggatcataggttacgttgttttgtgacaatacccaaaattccttttctattgctactttctctgattctcgtcttcagttacgttaacgcagccttcgacctcgctactatacccttcaacgatggctattctccgctcttcggagatagcaacgttgttcgctccgaggatggcaacggcgtacaactccgcctcgatcgctacacaggttcgggtttcatttcctccagtatgtaccagtatggattcttcagcgcgagaatcaagttgccatcgaattatactgctggtatttgcgtggccttttatacatcaaacggtgatgtgttcgagaagtcccatgacgagttggactttgaat

SEQ ID NO: 1841 - DNA, 394 bp, Glycine max
  Clone ID: LIB3028-040-Q1-B1-C8
gccaaaagaacaacatggacattgatctttctcctcagttgcccaagaaagtttacggtgccaatggtggctcctactacgcatggtccccctccgaccttcccatgctccaccaaggcaacattggtgccgctaagcttgctctcaacaaaaacgcctttgctcttcctcgttactctgactcttccaaagtcgcttatgttcttcaaggtagtggagtggctggaatagtgttgcctgaatcagaagagaaggttgttgcaataaagaagggtgatgccttggcactcccctttggtgttgtgacctggtggtataacaaggaagaaactgagttggttgttctgttccttggggacacttccaaggctcacaaggctggtgaattcactga

SEQ ID NO: 1842 - DNA, 373 bp, Glycine max
  Clone ID: LIB3028-040-Q1-B1-C9
ctcgagccgaatcggctcgagtctcatggcatcttcttctggtagtttagacacctctgcaagtgcaaactccttcaccaacttcaccttctccacacaccctttcatgaccacttctttctctgacctccttgcttctcccttggacaacaacaagccaccacagggtggtttgtctgagagaactggctctggtgttcccaaattcaagtccacaccaccaccttctctgcctctctctccccctcccatttctccttcttcttactttgctattcctcctggtttgagccctgctgagcttcttgactcgccggttctccttaattcttccaacattctgccatctccaacaactggagcatttgttgct

SEQ ID NO: 1843 - DNA, 319 bp, Glycine max
  Clone ID: LIB3028-040-Q1-B1-D1
cggatcaacagcgtttaatcttcgccggaaaacagctcgaagacggcagaaccctcgccgactacaacatccaaaaggagtccacgctccacctcgtcctccgcctccgcggcggcatgcaaatcttcgtcaaaacccttactggcaaaacaatcacgctagaggtggagtcctccgacacaatcgataacgtgaaagccaagattcaagataaggaagggattcctccggatcaacaacgtttgatcttcgccggaaaacaactcgaagacgggagaaccctcgccgattacaatatccagaaagaatcgactctgca

SEQ ID NO: 1844 - DNA, 309 bp, Glycine max
  Clone ID: LIB3028-040-Q1-B1-D10
cgtagcgtatgatcaggtccagtaacgtacaaatcacatacggttccacacagtcataaaggcgttgatgttaggggacatcattttgatctattaccaattgatggcggtggaaatctgtctcctgtaaaaggacttagccttcaaatggttcaattgcgtcttgctagtcgttctcaatcatatgcagtcctaaaaccatcacagtgagctatacggaggactgatcccgttgtcttacagcaatgcgtacagccactccacatttagagtttactttcaccaacgagttaccaatcgatgtggtat

SEQ ID NO: 1845 - DNA, 338 bp, Glycine max
  unsure (1)..(338): unsure at all n locations
  Clone ID: LIB3028-040-Q1-B1-D11
gtttaggatgtatacattcaaagtgaagccttgttcgagggcgtattctcatgattggacagagtgcccctttgttcatccaggggaaaatgcaaggcggcgtgatccaaggaagtatcattacagctgcgtcccttgtcccgagtttaggaagggatcttgcagcaagggcgatgcctgtgagtatgcacatggcatttttgagtgctggcttcaccctgcccagtaccggactcggctttgcaaggatganggtggatgcacaaggagggtatgcttctttgctcacaagcttgaggagcttcgccccttgtatgcttctactggttctgctattc

SEQ ID NO: 1846 - DNA, 301 bp, Glycine max
  Clone ID: LIB3028-040-Q1-B1-D12
aaagattttccttcacctggacttggctcaagatattgagttgggtttgcttgatcatttctattatctcacttgtgggttccatccaaggcctttcggttagtatcaagaaatacaagcccttccaagcagaacaatagaactttcatacttagtattccaacttgagccaagagtttctattgagggcgacaaaatttgtattactatgttttgaaatagttgttatattttcaattctcgaaatcgagacaacttgttatactaaagtaatataataaaatgtttagtttgctatgtt

SEQ ID NO: 1847 - DNA, 251 bp, Glycine max
  Clone ID: LIB3028-040-Q1-B1-D2
taaggcactagtattatgaatctatcagtgaggtcatgtgaaagctatggttaggatcaataagggtagttctaagttggtctttaaaatgttacagctgctttctgtttctttctcattttattattcctggcttgaaattctatacttttaattcctcattaggcatatggttgcctccttgtttaatttctctgtctcttcataggatgattgatatcaaagttgatggatggctattacctatagtc

SEQ ID NO: 1848 - DNA, 393 bp, Glycine max
  Clone ID: LIB3028-040-Q1-B1-D3
tggtaagatggtggtggttagagtagtagtatagtggagtagaagcatagggaagccaaatcagagatgctctgggcatatattgacgtctataatataatgagccaagaattcgtcaagttcaactttgtcaaaagaacaagtggtaacccacttaatctctgattttgttaatttatagagaaaaaaaaaattcatataatacataattatagatcgcattcccatgagttgcttccatttgaaggacagtgatatttttgtacagaattgttttacgggcacttgtattattgctgagcatgatacagtaatactctgctctttattgtcaagtttcaatgattgtttttattgaattgggaaatgaccttttggtaaagtggagaattt

SEQ ID NO: 1849 - DNA, 390 bp, Glycine max
  Clone ID: LIB3028-040-Q1-B1-D5
gttttgttctcattctgtgactctgtgcttagttaacgttaacagtgacttaagatggcggattctgcagatgtcacccacgatgttgtgtccctcctctcttctcctcaaagggactttcttcttcgaaacaacggcgatcaggttaaaattgacagcttgaagggtaagaaacttggtttgtatttttcggcatcctggtgtggtccatgtcaaacatttacgccaactttggtggatgtgtacaatgaggttgcaaaaaaaggtgacttccagatcgttttcattacggctgatgaagatgatgagtcctttaacggttacttttccaagatgccatggcttgcaatcccattttctgattcagacacacgcagccgccttgattaa

SEQ ID NO: 1850 - DNA, 397 bp, Glycine max
  Clone ID: LIB3028-040-Q1-B1-D6
cgacaaattgggccgcatcgccgactggactcgcaacttcaacaacccgacccgctccaagaacccggcggacgccgtctttgacttcacgaacgacgactccttccccgcatccgccgacgacgacgcccccttccgcctcgtcgaccccaagcccccgccgcgccccaaatttggtcccaagtggcgcttccagcagccgcgccagctccctcagcgccgcgacgaagaagtcgaggcgaagaagcgcgagcaggagaaggaacgcgcccgccgagatcgtctctaccacatgaaccgctcaaaccctaatcagcagcgccgtgaagccgctgttttcaaatcctccgtcgatatccaacccgaatggaacatgcacgaccaagatcccttcagc

SEQ ID NO: 1851 - DNA, 395 bp, Glycine max
  Clone ID: LIB3028-040-Q1-B1-D7
cttttctctcccgttatatatatagtatttgcttatatatatatatactactcattaggaactgtgattgcagttcctaatgcagattttaacgcggcgccaaggagcatttttgtgcttctggttgtctgtgctttttgtggtagtagacttttgctatggtgaccatagtacagtcgaggtagtagggttgggagaatgcgcagattgcaaggagaaaaacattcaaactagccaggctttctcaggtttacgtgtgacagtagactgcaaggcagcaagtggaaactttgaaaggagaggggtcggtgagcttgatgaatatggaaacttcaaagtttcccttcctcatgacactgtaaaagacgataaactgatagaagaatgctatgctc

SEQ ID NO: 1852 - DNA, 403 bp, Glycine max
  unsure (1)..(403): unsure at all n locations
  Clone ID: LIB3028-040-Q1-B1-E1
attttcctttgtaatggaaagttagaaaccctcatcgtcaaagcacgcgttttttttaatctctctctctcaacaaatatttgtgggtagattcaattcaccatgtcgagctcatcggagtactctgaattttccggccagaaaccggcgaggtcgccggagaaatcgagcttctctcagacttgcagtctgttgagtcaatacatcaaggagaagggtagcttcggagatcttaccctcggaatgacatcatgtgggtcacctgagacatcttgtcaatctgctacaaccatgaacttgtttcctcccaaggaaaacaacgtggcaccaaagaacctgacagctatggatttgctctcntcacaagcttcctcctatggaccttcagaggagattccaacct

SEQ ID NO: 1853 - DNA, 358 bp, Glycine max
  Clone ID: LIB3028-040-Q1-B1-E11
cgtggcttatgatagggtgcgggaagaaataattagagtgctgggacccagggttaagaaggggtacgtgtacggtggagtggcggacatgtgtttcgatgggaatgcaatggagatcggacggctgttaagggacgtggccttcgagttcgagaaaggcgtggagatcgtggttccgaaggagagggtgctcgctgacgtgggcggtggggtccactgcgtgggaatcgggaggtccgagagattgggtgcggccagcaacatcataggcaacttccaccaacagaatctatgggtggagtttgatctcgcgaatcgaagaatcggattcggtgtggccgattgtagcagattaagt

SEQ ID NO: 1854 - DNA, 300 bp, Glycine max
  Clone ID: LIB3028-040-Q1-B1-E12
cgcgtgttacaatatggtgcgcggatacaccattatcgtgctgggactcagggataccaacgggtacttgtacggagcactggccaacatctgtttcgctgggactgcaatggagatccgctcgcagtctcccggtacgtcgtgcatcatagtctcgaggaagatgcgcgagatcatcgtaggttccaaacggatagggtgctcactgacataggcggtacagtccactgaatcagaatcagtaggtcccaaacaatgggtaccgtgaccaccatcatctgaagctttcagtagcagcag

SEQ ID NO: 1855 - DNA, 89 bp, Glycine max
  Clone ID: LIB3028-040-Q1-B1-E2
agtgaatagaaggaatatgattccttcatctacctatgtatggttaagttatgtatttggggtgattgaatgttctcgtgtttgctgtt

SEQ ID NO: 1856 - DNA, 86 bp, Glycine max
  Clone ID: LIB3028-040-Q1-B1-E3
ttctatcaaaaatatttttttcttaaaataatatatagttaaattaaatatttaaaagtgaattaaatattcacaaaatttgaagt

SEQ ID NO: 1857 - DNA, 343 bp, Glycine max
  Clone ID: LIB3028-040-Q1-B1-E4
caaatatccaatttttacaaaattggatcgttttacgaataattgggttctcaaatatccatttttttgtgccagctctagtttatcactagcttttaaggaaggattctccaagtatctaggtgtttatcaattggtatttgtgtttattgttgtatctaaaaaattatatattttaaataattttgtgacgctaaaaaaaaaaaaaaaaaaaaataaaaaaaaaaaaaaaaaaaaaaaaaaaagaaaaaaaaaaaaacaaaggaaaaatcacaagaaaaaattaaaaaccgaaaaaaaataaaggggcgggccccaaaaaggggccctctcaacccgggaa

SEQ ID NO: 1858 - DNA, 388 bp, Glycine max
  Clone ID: LIB3028-040-Q1-B1-E5
tagctatttcgcatcccaaagcttttgaagattccagaacaaaagcacatatagtgtctgaaagagtttttattattagctttgcggttctgcttttcaaggttcgtcctttctgcatcaatgctcgaatttctcgccgcaatttgcgtgctgtagtttctgcttgagtctgctttagaatcacgaggtttatttggagaggaaaatattggtggagatttgaagaggagcatttacaactctggccaactctatagagatatcttcccaaaccggaagaggcttaggtctttatatttccggttttcagatttgttcagaaagtatcttgtctcttgttctgcgccttcctattgattatggctaacatttgattcaatgtgatagc

SEQ ID NO: 1859 - DNA, 371 bp, Glycine max
  Clone ID: LIB3028-040-Q1-B1-E6
aatttccgtgttgaagtgcgattagaacttagaagcatcaattcaagctccaatcttcgacactgtcacttaatacattgaaagcagagtatgccgagtaggaatagtgccaaaactccaaagaaggatggaaacaactcaaattccagtctttcttctctagaaaataatttctatgaaggagaacgtctcaccaatttgctccaatcaatccgtagggggatccaatctgcaagacatttggatggaagttccttgccagagaagatatggttaaagcaacaattttctattggggtcaatgatgtaactcgtgtccttgagcgcatgaaaccttgcacggagttagaaagctctactgaactcatctc

SEQ ID NO: 1860 - DNA, 357 bp, Glycine max
  Clone ID: LIB3028-040-Q1-B1-E7
gttcaagacgctctcaacaaccaccacttctcttccaaagaagataataagaacccaccaccacaaactgctgctcacaaggaagaagttgtaactgaaactaaaactgatgctgccccagcaaaaaccgaagaggagcaagctgaaacaaaggaggaagaggaaaagaaggaggaagtgaaagaaacgaatgaagaagctgcggtggatgatgatggagcaaaaactgtggaggccattgaagagaccgttgttgctgtctcttctaccgttcagcctcaagctgaagagaaagcttcatcgccacttccacctgaagaggtttccatttgggggataccgctgcttgcagatgag

SEQ ID NO: 1861 - DNA, 375 bp, Glycine max
  Clone ID: LIB3028-040-Q1-B1-E9
agggccttaaacagttctggagtctcagataggaaccaaagggttcattgtcctcaaacgaaccccttcttgggtgaggcatcccaagattcggggttcagaaaggaaagggataagtttctgttggctcaaggtggtcagcctaagaacttgggcggtggtttttcagggttgtgtgaagacgaggtggaggttgacccctttttctgtgctgtacaatggggtgatattaacttgaggcaatggttgtataaacctgaacgataggtgggtgccttcgaatgcttgcacatatttaggcaaatagtacacattgtcagtgtaccgcattctcaaagagttgtaattcacaatgtgaggccttcctgctttgtc

SEQ ID NO: 1862 - DNA, 307 bp, Glycine max
  unsure (1)..(307): unsure at all n locations
  Clone ID: LIB3028-040-Q1-B1-F1
aaaggtgttccgccagaaatttcatcttcaatggtttcacagacatttgaagtccctgatatgagcttcaattcaattgattctacaatagatggtagtggcttcttgaataggggtccatgggatctgccaccaccacctccaccacaacaacaacaggttcaacggattagaacatacaccaaggtatataaacgtggagctgtgggaaggtccatagacataacacgatattcaggttacgaggaccttaaacaggatctggctcttaggtttggtattganggacagctggaggatctacaaa

SEQ ID NO: 1863 - DNA, 289 bp, Glycine max
  Clone ID: LIB3028-040-Q1-B1-F10
gtcacacctcccagatatacgccatcaggcagagcatagccaaggctctcgtcgcttactaccagaagtacgtcgacgagcagtccaagaaggagatcaaggacatcctcgtcaggtacgaccgcaccctcctcgtcgccgatccccgccgctgcgagcccaagaagttcggtggtcgcggtgctcgcgccaggtttcagaattccaaccgttgatttccccctttttttttaagctatccaccataatttgttaaagtacttccccggtttaatgggtccggccctga

SEQ ID NO: 1864 - DNA, 393 bp, Glycine max
  Clone ID: LIB3028-040-Q1-B1-F11
cagaaagcaagctcatcctagagttttaaaaatggcagcagcctcctccatggctctctcttccccatccttggctggcaaggccgtgaagctgggcccatcagcccccgaagtcgggagggtcagcatgaggaagaccgtcaccaagcaggcctcctccggaagcccatggtacggcccagaccgcgtcaagtacttgggcccattctctggcgagcccccgtcctacctcactggcgagttcccaggtgactacggctgggacactgctgggctttcggccgacccagaaaccttcgccagaaaccgtgagctcgaagtgatccactccaggtgggccatgctcggggccttgggctgcgtcttccccgaactgttgtcccgcaaccgggt

SEQ ID NO: 1865 - DNA, 432 bp, Glycine max
  Clone ID: LIB3028-040-Q1-B1-F12
aggaagccttagttaaccccggaatccggtccaaattcaaatgggaaaacaaaatggcaataacccgacaagggaaaaatttggaaccaacggtacaaatggaaagaaacgaaaactaattcttcatgggcttacaggttatgcccagccagggagacttttggctataattggtccttctggcagtggcaaatccacacttcttgatgctttagcaggaagattgacatcaaacataaagcaaacagggaagattctaatcaatggccacaaacaagaactggcttatggaacatcaggctatgtaacacaagatgatgctatgctgtcatgtttaaccgctggggaaactttatactactcagctatgctccaatttccaaacaccatgtctgtagaagagaagaaagaacgagcagatatgacactgag

SEQ ID NO: 1866 - DNA, 387 bp, Glycine max
  Clone ID: LIB3028-040-Q1-B1-F3
gtataatcctgctgtacctgtgcctccaaatgcttggatggttccacctcgacctcagccatggttttcacagcctccagctgtttcagttcctcctgctgccccatacacacagcagccattatttcctgtgcagaacgtgaggcctccactgccagctactgctcctgcgctccaaactcagattactcctcctggattgcctacatctgcacctgtcccagtttcacaacctttatttcctgttgttggaaataaccatacaactactcaaagttcaacattttctgctccacctctgccctcaagtgttccatcagttacttcagtgatgtctgcaaatgttcctgttgatacacatttgagcagcaattcttctgtaacaag

SEQ ID NO: 1867 - DNA, 402 bp, Glycine max
  unsure (1)..(402): unsure at all n locations
  Clone ID: LIB3028-040-Q1-B1-F4
tctgaatcagagaatagataataatggctacaccggaccacctgttcaacctccgcaacaacttgtatctcggggcgtaccaagccgccatcaacagcggcgacgtcaccaacctctcccaagaagactccctcgagcgcgacaccctcgtccaccgctgctacatcgccctcggccagcttcagttcgtcatctccgagatccatgacgacgctcccacacctctccaagccgtcaaactcctcgctctctatttctcctcccccgacaccaaggattccgccatcgcgagtctcaaggagtggcttgccgatccgccatttcanacaacgccacgctgaggctcgtcgccggtctcgtcttcctccatgaaaatgatttcaacgaagccctcaaacacac

SEQ ID NO: 1868 - DNA, 373 bp, Glycine max
  Clone ID: LIB3028-040-Q1-B1-F5
gttttcccgttgggcatttctcccacatggtactggaaatgcaacgatcaaatcctttgtcagttcttcagtttacttgtaggtttctggaaaactggagcttgaacacgctctcattgagctcttcaccaatgcaacacttcaaaggaatccaagagtccaagactatgagaaatgaagtttaatattgtcacaacaaattttcattcagactcgatccatttattggattcatttaccctgcgatataagcacacccatatttacaaccccatttcacagtaatggtggtttgatatattattttaacagcattctgttatgatcaagcacaaagttcctagaattcgaggtctaaggcctccagagcaac

SEQ ID NO: 1869 - DNA, 355 bp, Glycine max
  Clone ID: LIB3028-040-Q1-B1-F6
atctcatctgtgaaagaagctgaaaaacacatgccagatgaatgcattgaacctgatgcagattttcatcccaacctggtgaatactgtttcctatatggtgagcatgatgcttcaggtggccacatttgctgtgaactatatgggtcatcccttcaaccagagtatttctgaaaacaggccgttccggtatgcacttgttgctgctgttgttttctttactgtgatcacatcagatctattcagggacttgaatgactggttgaagttagtgccattgcctgtgggattaagggataaactattactttgggcgtttccaatgtttttggtttgctattcgtgggagagactgt

SEQ ID NO: 1870 - DNA, 366 bp, Glycine max
  Clone ID: LIB3028-040-Q1-B1-F7
caagaacaagaacaacaaagtaacgtgaaagagagagagatggaggcgattgttccagtggtggatttccagaggctttcagaggaagaggagcgcaagaagctgagaaaaacatgtgagaaaccagggtgtttcagaatcatcaaccactcaattccactaacactcatggctgacatgaagtcagtggttaaatacttgcatgaccttcccacggaaatcaaaatgcgcaacaaaccctccgtccctgagagtggctatagggcggcaatgccaacaagtcctctatacgagggcatgggaatatatgacatgcatgcctcaccacaagcatttgaagatttctgctccaacttgaatgtgtca

SEQ ID NO: 1871 - DNA, 372 bp, Glycine max
  Clone ID: LIB3028-040-Q1-B1-F8
ctgaaatgcttgttaatttgggaattccttgggttattattggtcactctgaacggaggcagcttttgaatgaatcaaatgagtttgtgggagataaagttgcctatgcacttcaacaaggtctgaaagttatagcatgcattggggaaactcttgaacagcgtgaagctggtacaacaacggctgttgttgctgagcaaacaaaagcaattgcagctaaaatatcaaattgggacaatgtcgttttggcctatgagccagtttgggccattggaacaggaaaggttgcaactcctgctcaggctcaagaggttcatgctgatttaaggaaatgggttcatgacaatgtgagtgctgaagttgctgcatctg

SEQ ID NO: 1872 - DNA, 407 bp, Glycine max
  unsure (1)..(407): unsure at all n locations
  Clone ID: LIB3028-040-Q1-B1-F9
aggaacccttacttaaccccggaattcggtccaagcacacagacacacacatttcgtcggaatgggaagggtgattcgcgcacagcgtaagggtgcggggtcngtgttcaagtcccacacccaccaccgcaagggtccggcgaggttccgcagcctcgacttcggcgagcgcaacggctacctcaaaggggtcgtcaccgatatcatccacgaccctggtcgcggtgctcctctagccaaggtggcgttccgccaccccttccgctacaagaagcagatggagctcttcgtcgccgccgagggcctctacaccggccagttcatctactgcggcaagaaggccaccctcgtcgtcggcaacgtcttgcccctccgatccatccccgaaggtgccgttatctgcaacg

SEQ ID NO: 1873 - DNA, 400 bp, Glycine max
  Clone ID: LIB3028-040-Q1-B1-G1
cgaacgtggttgatgatctaaggttgagtcatcccaccaaagtatcaagattcacttctgctgcggataaaaaaaaaaaagggattcacttcctagttttcagccctttaaatacctctttgcaatacaaggaactcatcaacccaagttagcataacttccttaacaacctagtatttcagaccattcttcttgatcagaatccttattaatcatcaatcatgcagacttcacttcttcaaattgttggaactccagtaatctcagcaacatatgatcagcttcaaaagtcagttaacagatacttacctggtcctgccactcaatgtcaatattcaaccacaacatcaaagcaaatgaggctgaggacaaatatatctgaaactgttaagagaaagat

SEQ ID NO: 1874 - DNA, 364 bp, Glycine max
  unsure (1)..(364): unsure at all n locations
  Clone ID: LIB3028-040-Q1-B1-G10
ggatcttgcagtggggtctcagatcctgtggctgcaatcaaaatgcattattccaattctgacaagtatggtggtcagactgggagtattgcaagagaggatgaatcatggggagggaaaggggattgactgagacaggtagtagattgtgctgagcggcaaacacctctttttgccgcactcctgtattatagtttctgttatttgctcaatacagtgtagggtgatttaatggttctcaagcccgtctttttggtaaaatatttaggtgcttgtaatatggcagcagctttgtatttgttgtatttgatgaaaatacagaaataatctctgaaaaaattangaggggcgattgccattgcca

SEQ ID NO: 1875 - DNA, 395 bp, Glycine max
  Clone ID: LIB3028-040-Q1-B1-G11
gttcctcaacacacacacaaaaaaaactcccttgtatattgttgcagctctagctagggttttgcaagtgcgatcgaagaagaacaacgacgatggcgatggctgcagctctgcgtcgcgaaggaaggcgtttgacccaaccaatcaacgccctccactcttctctcaattcctccctcatctctcaagaccaagcccctcatggcgcgcgctccatttccactcaagttgtgaggaaccgaatgaagagtgtgaggaatatccagaagatcaccaaggccatgaagatggttgccgcgtccaagctgcgggccgttcagaccagaactgaaaattcccgcggcctctggcaaccgttcaccgctcttctcggtgacgattccagtgttgacgtt

SEQ ID NO: 1876 - DNA, 283 bp, Glycine max
  Clone ID: LIB3028-040-Q1-B1-G12
gcagattaagttcatccttatatgcatgggaagctttgaaggcatgaatttggttgcagtgatggcaactataagaatgattgtgcaaactcatcacatttatattctctgctgatatgaatgatagcatcatcttatctttaatttattatagcttctgcattgcatatgtcagctaatgtaaaatagaattatgcgtgtcaatttactttcgattgttgtcagacattcaacatgaaaattatagtttgctgaactggttatgatttcatcaaggtttttg

SEQ ID NO: 1877 - DNA, 370 bp, Glycine max
  Clone ID: LIB3028-040-Q1-B1-G2
gcatgtcatccaggacatgcttgttcctttgtacaaggtgggagaggctttagaatgggttcaccgtgagatggaggtataccccatttggctctgcccacacaaattgttcaagctgcctgtcaaaactatgatttacccagagccagggttcgaactacatcgcaggcaaggagacacccaaactgctcaaatgtacacagatgttggagtttactatgcaccaggtcctgtttttaggggtgaggtatttgatggggcagaagcagtgcgtaaaatggagaactggttgattgaaaatcatggttttcagccacagtatgctgtgtctgagctgtctgaaaaaaactttcggaggatgtttgatgct

SEQ ID NO: 1878 - DNA, 349 bp, Glycine max
  Clone ID: LIB3028-040-Q1-B1-G3
aataattcctgtaatgtgcaccagtaaagaccaaagtatgattattgttacattatgctatatgattgtacttgtatatacatattttgtcccgcctttgtaaatacaattgggacactactaggattgggaagaagggtctttacatttttagtttggcaaatagatattgcaactacctttgtataaatctatttctgaagaagcaattacaactttcaagggatgatagcattttgtggcataaggattaaggaggcataaaggaccaattgctttggaatattcactcatgacaaggcacaaggtcatgcgtgtatgccaacacatagtaatgatgtgtgttttt

SEQ ID NO: 1879 - DNA, 400 bp, Glycine max
  Clone ID: LIB3028-040-Q1-B1-G4
cgcacgaatatcttgttgtttggagcgatccgagaaaaactctgtaaacatgttggtttaccaggacctccttacaggtgatgagcttctctctgactccttccgttacaaggaaattgagaatggaatgctgtgggaagttgaggggaagtgggttgttaaaggagcagttgatgtagacattggtgcaaacccttctgctgagggtggaggagaagatgagggagttgatgatgcagctgttaaggttgttgacattgttgacacattcagacttcaggagcaacccgcattcgataagaagcagtttgttaccttcatgaagaggtttatcaagaatttgactcccaagctcgatgcagagcaacaggagttgtttaagaagcacatcgagggagca

SEQ ID NO: 1880 - DNA, 370 bp, Glycine max
  Clone ID: LIB3028-040-Q1-B1-G5
ggccaattcggccactctcctctgagaaagcctccagcctctcctccaaagtcccctgcggttcgttcggttattcttcgaaccgttgtctgaagtttacaactcaaaacttcaccgaacgcatttcattcaccaattcgtccaagtctcgtatcaatcaatcagcctatccgtcttgcggttggagagatcggaggggagagcagccatggcgcatcgagtagaccacgagtatgactatctgttcaagatcgttttgatcggagactcaggtgtaggcaaatccaacatcctctccaggttcactcgaaacgagttctgtttggagtccaaatccactatcggagttgagttcgcaacagaactcttc

SEQ ID NO: 1881 - DNA, 391 bp, Glycine max
  Clone ID: LIB3028-040-Q1-B1-G6
aaaagaaagaaagaaagaaagtgcaacttcctctgttttgctcccctgtttaagccttatcataagcttagaatggcacacaaggaattttccattgccctagtgactctcattgttctctttgtcaacacgaacctccaaggtgccacggctgactatggtggtggttggcagagtgctcatgccactttctatggtgggggtgatgcttctggcacaatgggtggagcatgtgggtatggaaatttgtatagccagggatatggaactgacactgtggctctaagcactgctttgttcaacaatggcttaagctgtggatcttgctatgaaatgagatgtgatgatgacccaagatggtgcaaacctggctctattaccgtcactgcta

SEQ ID NO: 1882 - DNA, 396 bp, Glycine max
  Clone ID: LIB3028-040-Q1-B1-G9
cggctcgagcggctcgagggaaaccaagaagtgtgtccctgctatgcaagtttgactactcatggtggcaaacgcaagtgcccttagacttaattggaccactatcctatgcatgcctttgatttatattataaaataaaaataatactatatataacatgttaattgcttaatatgtgctttaagagtaaagaataacatcgtgaaatcaaattacccctttttcaatacgtgttgaatcatcgatcttggtttgtaatttggttgtatattcacaaaattaataagtatattgtgatgtgattaattcccttctctgttatggtgtacttgccttccctgtattgtccatctccatcgtctgtctattaataagaattcttatgtgatattttc

SEQ ID NO: 1883 - DNA, 327 bp, Glycine max
  Clone ID: LIB3028-040-Q1-B1-H1
aaggaccacaccatgttgcagcgagttatctgagaaatacacatctatgatgttcttgttagttgatgtggatgatctaactgtaagtactgaatctacagattactactatttcacatagttatttttgtatcaactagtattccccttcaatacaaacataaaacaattcaaatgtcaaacatattcaattcaacatgaactagaggacactatcacatattaaacattgtctgatgaccatgtagtttattgaacatgggtggtttcattgcatatgttccaggacttcagcacttcatgggacatcaaagccacaccaacttt

SEQ ID NO: 1884 - DNA, 391 bp, Glycine max
  Clone ID: LIB3028-040-Q1-B1-H10
tccaactccaagcgattcggctcgagtattttttgatataccttaccaaaacatagcttgctattagtatataaccattttctaaaaaaaaactgctagaaaaatattatatccctagaagtcgtttcttgttaaaaatggttatatactaatagcaagctatgttttggtaaggtattttttgatatacaaacttattttagaaacttattttctacaaattacttcaagtaatttattttcaaaagctacttgaagtaacttatagaaaataagctactttataaattattagcttttttttcttcatcacaattttatttttattattttatttgaaattttgtttaccattttattcaataaaattctcttatcttttttttgcttg

SEQ ID NO: 1885 - DNA, 346 bp, Glycine max
  Clone ID: LIB3028-040-Q1-B1-H11
aatgtttcaacactggtcaaatcatcattaatgttgcttgagattatagaccttggtatcacataataattacatacactaatctttctccaatttcctgactattttggctgggaaatcatatacatgatgttgaatggttatggtgataggattagagatatgcatttggaaatgtaaattttgagatattgatttatctgatccatgtacattctacggattacgtcatgtcctgtatcttcatgtgcgacttggtgtaacatagtcatgatatgatactttagaaattattagcttttttttcgtcatcacagtttaatttttacgactttacttgaaattt

SEQ ID NO: 1886 - DNA, 357 bp, Glycine max
  Clone ID: LIB3028-040-Q1-B1-H12
gtggggttggttgcctctgccaagtttgatgaactcttccagcccagttgggctatggaccatttcatccatgaaggagaacttctcaaactcaaacttgataactattctggtgctggatttggatctaagagcaaatatatgtttgggaaagtgaccatccagctcaagcttgtggagggtgactctgctggaactgtcactgctttctatatgtcatcagacggcccaactcacaacgaatttgatttcgagtttttgggcaacaccactggtgaaccttactcagtccaaaccaacgtgtatgtgaatggcgttggcaacagggagcaaagactcaacctctggttcgacccc

SEQ ID NO: 1887 - DNA, 374 bp, Glycine max
  Clone ID: LIB3028-040-Q1-B1-H2
aagaattatttgattttatagcatctaaactagcaaaattcgttagttctgagcctgaagagttacaccctccccctggcatgcaaagggaattgggttttaccatctcaattccagtgaggcaaacatcaattgcatctgggaatacaataaagtggactaaaggtttcaatattgaggatgcggttggagaagatgtggtgggtgaactgaccacgtccttagaacaaattggtctggatatgcatgttgcagctctagttaatgacacagttggaacagtggctacagcaagattcaccagtcaagatgtcattgctggagtgactcctggcactgggacaaatgcagcttatgtagagtgtgcacatgca

SEQ ID NO: 1888 - DNA, 365 bp, Glycine max
  Clone ID: LIB3028-040-Q1-B1-H3
cgaggatataaacacacttaccgagcctcattcaatcttgtgtccggatgttgcgtgtttatctgtttagaattttggttgttttgctaactggagacatatgatttgtatccctagagtcaaggaaataatcttcaagccaggttgtagatttatagaatcagtttttgccggggtcttaccaactctggcagcaaactttgctcgggcatgcaatagctttatatgacagtttaagctgtgaggtgagtagatttcttagcaaggtatcaaagcctgtttgaactataactagtggtcaagttttcaactcttccactgcattcttcatacttgaatgaaagttgagtatttaactttgtcct

SEQ ID NO: 1889 - DNA, 382 bp, Glycine max
  unsure (1)..(382): unsure at all n locations
  Clone ID: LIB3028-040-Q1-B1-H4
gagaatttgcaaataagggcatccannaccagaacctaatcatccttttattgcaaacttttgcgcattgggatttggagggcataaaaaagatgcgatgctacacgcaaacaagtagttcaagtccaataagcaaagcaagatagaaagattggctagctcacacacctcaattgatacaacacccagttgctgatagttattatatagagttcaattcatgcttgcaagcttaaccatggaacggtatgagataattaaagatattgggtcagggaactttggtgtggcaaagctggtcaaggaaaaatggagtggtgaattgtatgctatcaagttcattgagagaggcttcaagattgatgaacacgtgcaaagagag

SEQ ID NO: 1890 - DNA, 234 bp, Glycine max
  Clone ID: LIB3028-040-Q1-B1-H5
aatcaattaatcaagccaattctctttcatgaatcctaggagttcataatatcaagagaagatagaaagaaattaaacaaactcctttgtatatattttggtggtggtggtgtctcctttagttttgttttgggacattagcaatgtgtagagagaaggaataaaattttgggggatttgttttgacaatgatcacaaatgtaatcatatactattatgttaatttcccttttt

SEQ ID NO: 1891 - DNA, 288 bp, Glycine max
  Clone ID: LIB3028-040-Q1-B1-H7
cattctcctctctgaattcctcttattcaggaatttggagagtattgatatatcaaggtaggataaaccagtagccaaggaagatatggagttttctatgattttcaattgttagcaacattatgcggcttttcatttaagcatttgcaaaaactgctattcttccctctctgagccaaattcaagaacaagccccggaacaagacttcgtgaacctcactgatttacccattgttgctggccggtttaaaactttccttggtaaccttgattcaactaaattgattg

SEQ ID NO: 1892 - DNA, 392 bp, Glycine max
  Clone ID: LIB3028-040-Q1-B1-H8
tgacattcgggttgttcctacgacgcaaggtgtcgttgataagggcgttgttgtacatggtggcacagtgtgccggtgctatctgtggtactggattggccaaggggttccaaaaagcatactacaacatgtaaggacgtggtgccaactctgttgctgatggctacaacaatggtactgctttgggtgctgagattattggtaccttcgttcttgtctacactgtcttctctgccactgaccctaagaggaacgctagggattcccatgttcctgtactggcgccacttcctattggatttgccgtgttcatggttcacttggctacaatcccaattactggtactggcattaacccagcaaggagtttcggagcagctgtaatctacaac

SEQ ID NO: 1893 - DNA, 324 bp, Glycine max
  Clone ID: LIB3028-040-Q1-B1-H9
gaaaaacaaaaaacacagaacaacacagaaactcaataccaaggtaaaattattatggatcacattcataggttacgttgttttgggacaatacccaaaattccttttctattgctactttccctgcttctcttcagtttcgttaatccatccttcgacctcgctactatacccttcaaagacggctattctccgctcttctgacctagaaacgttgttcgcgccgatgatggctacggtgtacacctccgcctcgatcgctacacaggttcgggtttcatttcctccactatgtaccaatatggattcttcaacgccagaatc

SEQ ID NO: 1894 - DNA, 317 bp, Glycine max
  unsure (1)..(317): unsure at all n locations
  Clone ID: LIB3028-041-Q1-B1-A1
aaagcattcttgccatctgggccacccaagttatcttgatgggtgccgttgagggttaccgtattgctggtgggcctcttggtgaggtgactgacccaatctatccaggtggcagctttgacccattgggccttgctgatgacccagaggcttttgctgagttgaaggtgaaagagctcaagaatggtaggttggccatgttctccatgtttggtttctttgttcangcaattgtgacaggaaagggacccttggaaaaccttgctgattaccttgctgacccagtcaacaacaatgcttgggcttatgccacaaac

SEQ ID NO: 1895 - DNA, 371 bp, Glycine max
  Clone ID: LIB3028-041-Q1-B1-A10
ctcgagccgattcggctcgagagcgagtgtgttcgaggccatcgaagaggaagatcatgtgattgagaaggaacaagccctacctcctgcattgcttggtagctgcaacgatcgagctaaacagcttcacgcttctcctccagggagacttctttcggcgatgatatgtgaataccttgactgggcgcagctcagtcatacgctaaaagtttatcttccggaatgtaatttggagaaagatttttggaagacagagcttaaggagtttagtaccaaaaatggatatgatctcaacagaaacagagatagtcctctactcttggatgtgcttgaaggattcttgaagctcgagaatttatcccaagcaagag

SEQ ID NO: 1896 - DNA, 335 bp, Glycine max
  unsure (1)..(335): unsure at all n locations
  Clone ID: LIB3028-041-Q1-B1-A11
caacgtcatcgcacgctcacgtggagctcatcaacaagngattacccgccggtcttctccccgccacaaccgtcttgggctacgccgtgaaccgtacctccggtgactttatcgtcaagctcggcggcacgtgcaagatcacgcgcccgctggacaactacgtcgccacctattccgacaccatcacacggaagatcgtgaacgggaaaatcgctgaactcgatgtgattagggttcgcgcgttcttcaagtggtggtccatcaccggaatccgctcctccggcgatgatatcgtcttcgaggtcggtatggtcacagcgaagtatccatcgaag

SEQ ID NO: 1897 - DNA, 339 bp, Glycine max
  Clone ID: LIB3028-041-Q1-B1-A12
caagcgcacagctagcacctacattgatgatcaaggcaactggcacagaagcaccacgggtgcccctgagcatcttagtgaactttgtgaactcaagggacaggttttgaaacatgcccacaaggtcattgatgagtatgctactcgtggtttacattcattgggtgtttcacgccaaactgtttcaaaggagaataatgagagtgcaagggaatcatggcaattcgaggaacgcttgcgcctccttgatctgccaatgcacgacagtgctgagaccattcggcgagcacatgatcttggagtcaactttaagatgatcactgtatgaccaccttgcca

SEQ ID NO: 1898 - DNA, 82 bp, Glycine max
  Clone ID: LIB3028-041-Q1-B1-A2
tcttgccattgatgatgtgccatctgagccttcaaaacccactacttgtattgaaaaatccgaaattgttgatcctcctgtg

SEQ ID NO: 1899 - DNA, 364 bp, Glycine max
  Clone ID: LIB3028-041-Q1-B1-A4
gttcacaaaccaccattaccatgtccaccacccacgtcatctccaactccaccccatgtacaccctccctatgtcccaaaaccgcctgttgtgccagttacaccaccttatatccctaaaccaccaattgtgacaccaccatatgtccctaaaccaccagtggtgccagttacaccacgatatgtccctaaaccacgactggtgccagttacaccaccttatgtgccaaaaccatccattgtgacaccaccatctgtttacccatcagttgtgccaaaaccaccaattgttacaccaccttatgtgccaacaccatccattgtgaaaccaccaattgtttatccaccagttgtgccataaccac

SEQ ID NO: 1900 - DNA, 385 bp, Glycine max
  unsure (1)..(385): unsure at all n locations
  Clone ID: LIB3028-041-Q1-B1-A5
cattaattgcaagaatggcacttcgttgcttggtgatgtccctttctgttctcttcactcttggtcttgcgagagaaagccatgccagagacgaagatttttggcatgctgtttggccaaacactcccattccaagttcattgcgagatcttctaaagcctggccctgcaagtgttgaaatcgatgatcaccctatgcaaattgaagaaacacagtacccgaaaaccttcttctataaagaagaccttcatccaggcaaaacaatgaaagtacaattcagcaagcctccctttcaacaaccatggggtgttggtacatggttaaaggaaattaaagacactactanagaaggatatagttttgaagagctatgcatcaagaaaga

SEQ ID NO: 1901 - DNA, 312 bp, Glycine max
  Clone ID: LIB3028-041-Q1-B1-A6
tattggcgcgagcaaagaaagattacaacgttagagatccttacatctcgcagagtggagcaactacagcatgttcgtgtctccgaagttcaaagttcgatcaaagagctcttcaatgtttggtcaagcaacaagaataatgagtctggctatgcgttgctggagctgaagcaatggttttctcaattgacatacaacatggttcttcgaatggtcgtcggaaagcgacttttcggtgctagaactatggatgatgagaaggctcagagatgtgtggaggctgtgaaggagttcatgcgtctgatgggggtg

SEQ ID NO: 1902 - DNA, 320 bp, Glycine max
  Clone ID: LIB3028-041-Q1-B1-A7
gaccattccaaccctaatttctctgctaaatcctagatgtttggcacttccactcttctccctcgtaaatcttctcccattccctccggtagctttccatatccaaatacatcatggttttctgggtttttggctacggttcattggtgtagaagtctgtattcgattacgactagaagactattggattcatcaacgactacagacgcgtgtttgatttagcgtgcattgatcatccgagaacgactgataacccaacgggaacttgcacattggaggagataaaaggggctatttgctggagagctgcgtaatgtgtt

SEQ ID NO: 1903 - DNA, 339 bp, Glycine max
  Clone ID: LIB3028-041-Q1-B1-A8
cgcaattcccaaattcatttcaatcctaattctgcacttcttgataattcgacttttctcctcaagatgcagacactcgtacaaactttgaccggcaagactatcacccttgaggtggaatccgccgacacgattgacaacgtaaaagctaagattcaggacaaggaagggatcccacctgacaagcagagacttatctttgcgggtaaacaacttgaggatggtcgcactcttcccgtgcaaaatctcaaaagggactcagctctatatcgtgtgttgcgacacaggggggacatgcatctctgtgtcaacattgtgagcgggaagaccatcaccctt

SEQ ID NO: 1904 - DNA, 170 bp, Glycine max
  Clone ID: LIB3028-041-Q1-B1-A9
cgagtccatgcatcccctcctcctcaataccactacaaggttatttctgaagaatataagccaataaaaaacgttgttgatagcaggaagatgcacttcgcaattgcacaaggaaaacaacggaagccaagtttccgcgcattttgtcacataagaaaaacgaagtgtca

SEQ ID NO: 1905 - DNA, 404 bp, Glycine max
  unsure (1)..(404): unsure at all n locations
  Clone ID: LIB3028-041-Q1-B1-B1
gtgagtgctgaatcgaatcgaatcgattctccgaacatggcggcgagcgatcgcacagtgttgcaattctcttcatcatcttcttcttcttcgcagatcttgtccgcgaaggtccaccctctggtcatcttcaacatctgcgattgctatgttcgacgccctgaccaagccgaccgcgtcatcggaaccctactcggctccgtccttcccgacggaaccgtcgatatccgaaattcctatgctgttcctcacaacgagtctatcgaacaggttgcattggatatagagtaccaccacaatatgttaatatcccaccanaaagtgaatccanaggaaatcatagtaggatggtattcaaccggtcttggagtaactggtggtagtgcattaatccacgagtttta

SEQ ID NO: 1906 - DNA, 376 bp, Glycine max
  Clone ID: LIB3028-041-Q1-B1-B11
aaatgagtgatttggagtttggagcgactgaactaatcattaatttgcactcgctgtttcagcttcatcaaccttcttttgcatcatttatatctcttgagaaatggcacaagaaacctttctattcacatctgaatctgtaaacgagggtcaccccgacaagctgtgcgaccagatctctgatgcagtacttgatgcgtgacttgaacaggaccctgacagcaacgttgcctgtgagacatgcaccaagaccaacatggtcatggtcttcggagagatcacaatcaaggccaacgtagactatgagaagattgtccgcgacacatgccgcgaaattggattcatctctgatgatgttggtcctgatgctgacaaa

SEQ ID NO: 1907 - DNA, 285 bp, Glycine max
  Clone ID: LIB3028-041-Q1-B1-B12
accgacaattggattgtaatggaaaagatgaaatgagagaattaataagtgtccaaaataataattaatgaaaattgttaagaaagaagaagaatgtgtccccgaagtcaacgggtccggtgaccggaaggggaaggttcaaccgattccaaacggtgcctcaacctccgaaacaaggctttaagggttccaacaaccaaaaaccttaaaaattcctcaacgaaaccgttcaaaaggttcgcccgctggtccggccccaacctttcaacaaacttaaccttcttc

SEQ ID NO: 1908 - DNA, 341 bp, Glycine max
  Clone ID: LIB3028-041-Q1-B1-B2
gtttgttgttgtaactcgttcttcttcttttgttgttctgtgtttgtgtttgttttttctctcacctgaaaatgtcttgctgcggtggtaactgtggttgccgaagctcctgcaattgcggcaacggttgcggaggctgcaaaatgtacccaaacttgagctacactgattcaaccaccaccgaaaccttggccatggaattggcacctgttagggctcaatttgagggtgctgaaatgggtgtgcccgctgagaacgatggctgcaaatgtggaccaaagtgctcctgcaacccgtgcatttgcatgtgatgtgttgagagagcaagcttcacgcagata

SEQ ID NO: 1909 - DNA, 401 bp, Glycine max
  unsure (1)..(401): unsure at all n locations
  Clone ID: LIB3028-041-Q1-B1-B3
attccattctctctgtgtatttccctacctctcccttcaagatgcagatcttcgtcaagaccctcaccggcaagaccatcacccttgaggtggaaagctctgacaccatcgacaacgtcaaggccaagatccaggacaaggaaggaatccccccggaccagcaacgtctcattttcgccggaaagcaacttgaggacggccgtacccttgctgactacaacattcagaaggagagtactcttcacctcgtcctccgtctccgtggtggcatgcagatcttcgttaagacactcaccggcaagaccataaccctagaggttgaaagctccgacaccatcgataacgtcaaggccaagatccaggacaagganggtatccccccggaccagcaacgtctcatc

SEQ ID NO: 1910 - DNA, 359 bp, Glycine max
  Clone ID: LIB3028-041-Q1-B1-B4
aacaacacaaggccatcatcatggcagctgcttctcctatggcaagccaactcaagtccaccttcactaaaactcttgtagctcccaagggcctctctgcctcttcaccactccacctcctgccttctaagaggcaatttagcttcactgttagggccatccaatcagaaaagccaacctatcaagtgattcaaccaatcaacggtgatcccttcattggaagccttgaaaccccagttacatccagccccttgattgcatggtacttatcgaacctccccgcatacaggaccgcagtgagcccactactaagagggatcgaggtgggcctggcccatggctaccttctggtgggccca

SEQ ID NO: 1911 - DNA, 398 bp, Glycine max
  unsure (1)..(398): unsure at all n locations
  Clone ID: LIB3028-041-Q1-B1-B5
agcagagcagagatctagcgtattctctcgctctttctttcactgtcacagagccacatccatgggcttcccagccaacggcgcctctgcggcccagcccctaaacttcctcatctacggccgcacgggctggattggcggcctcctcggctccctctgccgggcccagggcatctccttccattacggctcgggccgcctcgagaaccgggcctccctcgaaaccgacatagccctcctcaagccctcccacgtcttcaacgccgccggcgtcacgggccgccccaacgtcgactggtgcgagtcncacaaagtcgagaacatccgaaccaacgtcgtcggaaccctcactctcgccgacgtctgccgcgaacacggcctcattctcatcaactacg

SEQ ID NO: 1912 - DNA, 399 bp, Glycine max
  Clone ID: LIB3028-041-Q1-B1-B6
caacacctgtcactgtgagcccaccaactactccagttgaccctggaacccctagtatcccctcaccaccactcattccttccccatctcccttcactggcacatgcaactattggaggaatcatccagcaatcatctggggaatccttggctggtggggaaccctaggaagtgcatttggtgtgacaggtactactgttccagggttcagtcctggccttagcttgccacaagcactttccaacacaagaactgatgggctaggagcactctacagagaaggcacagcttccttcctcaactccatggtgaacaacaagttcccttacacaaccaaccaagtcagggacaggtttgtggcctcactcaactccaacaaggcagcagaagcacaagccc

SEQ ID NO: 1913 - DNA, 375 bp, Glycine max
  Clone ID: LIB3028-041-Q1-B1-B7
gtggtacacaatatggttccatcatataccctgtcaagaggactatcctgtcatgcctactgtatcatcaagttttgatttgaagcctgctaatttctttgagagaaatccaatccttggagtccctcccaatttcgaagatgatttacctgtttgcaaggctcgtgattcagcttgagatcccatcagttggtttttagtctaattagatacatgctttatttatgcatgtagcaaatgatgatgcccaaactgaactttaaacctaacttaaagtaaagagggtctagttctgttgattaaacagaatgtataaatattgtaaaaccttttgataccatgtttaattcctatgtataagaaaaaatatgatgt

SEQ ID NO: 1914 - DNA, 397 bp, Glycine max
  Clone ID: LIB3028-041-Q1-B1-B8
tggaaagctctgacaccatcaacaacgtcaatgccaagatgcatgacatggaatgaatccccccggaccagcaacgtctcattttcgccggaaagcaacttgaggacggtcgtacccttgctgactataacattcacaaggagagtacacttcacctcgtcgtccgtctccgtggtggcatgcacatcatcgggaagacactcaccggcaagaccataaccctagaggttgaaagctccgacaccatcgataacgtcaaggccaagatccacgacaaggagggtatccccccggaccatcaacgtctcatcttcgccggaaagcagctcgacgactgccgcaccctcgccgactacaacatccagaaggaatcaacccttcacctcgtcatccgtct

SEQ ID NO: 1915 - DNA, 366 bp, Glycine max
  unsure (1)..(366): unsure at all n locations
  Clone ID: LIB3028-041-Q1-B1-B9
aaattctctttagagagatagagagaggaagaaagaatggcagcttgcactgtctactcaacacaatctctgagcacaaattgctccatctcaaccccatcaaagacgcaactcagttttttccaccaaaagcaggtagttttctggaggaacagcaagaagggcagctgcagcagcagaagaagctatgtgataacatgtgcagcaggtgactcacagacagtggtgattggcctggctgcagactcanggtgtgggaagagcaccttcatgaggaggctgaccagtgtgtttggacgagcagcagagccaccaaagggtggcaaccctgactccaacactctcatcagtgacaccaccactgtc

SEQ ID NO: 1916 - DNA, 357 bp, Glycine max
  Clone ID: LIB3028-041-Q1-B1-C10
ctcagttccagattgggtactgccaacagtgccctgataaggttcaatggccctctcactttggtaccaaacctcctctatatttcaatgctggcatgtttgtttatgagcctaatctcaacacctaccgtcatcttctccaaactgtccatgtcatcaagcccacgtcctttgctgagcaggactttctgaacatgtacttcaaggacaagtacaagccaataccgaacgtgtacaaccttgtgctggccatgttgtggcgtcaccctgagaatgttgaacttgatcaagttcaagtggttcattactgtgctgctgggtctaagccttggaggttcactgggaatgaagagaaca

SEQ ID NO: 1917 - DNA, 333 bp, Glycine max
  unsure (1)..(333): unsure at all n locations
  Clone ID: LIB3028-041-Q1-B1-C12
caaggctggttgtcctacaacatcgggtaggtaatcccggcataattcatgggccaggaatttgaattggtaaaaagggaatctcttttcacctgattcattgacagaagctctgaatggggccactgctgtgatctcatttatgggtggttttggctccaacatcaatgctattagagcagcatcagatcacggtgtaacaacatctgtctagatccctactgctgactttggtgtactagatgacatacggcacggctataatataggaaagagagctgctganacagagcttctgaacagatttccatttggttgagtaattctgaggcc

SEQ ID NO: 1918 - DNA, 382 bp, Glycine max
  Clone ID: LIB3028-041-Q1-B1-C2
cacaatttttttgcttatagaggagccttaaacacaagttttctgaggctaaggtacataaccagaatgaagtcactgattgtagtaacttttctttatttcctaaatttttgcatgtagtcctgctacctaccttctcacgagtttagagaatggatttaactgaagctcaaaatttttgttagctttgaacagatgatgtctcaccatttgcattaaattcccttcagagttgtggggttctaggggacttaactgcggattttgttgttcattattgttgtacttttctttatggacagaatattgttgtactgttgttcatatgtgtattttttctttaattctataaattctggggcttttgtacccttgttggatt

SEQ ID NO: 1919 - DNA, 388 bp, Glycine max
  Clone ID: LIB3028-041-Q1-B1-C4
cttattctcttcctctctctctactctgagacacaaaggaaaattataagaaattatggctggttattcaaaagcttcagctctttggatcctttttcttctctttggcttctctgtagctaaggaaattttggttggaggtaagactgatgcatggaaggtttcagcctctgaatcagattcactcaaccaatgggcagaaaagtctcgtttccaagttggagactatcttgtttggaaatatgatggtggaaaagactcagtgttgcaagtgagcaaagagaactatgtgaattgcagcatctcaaaccccataaaggagtacaatgatgataccacaaaggttcagcttgagcatccagggccattctacttcatcagtggtgca

SEQ ID NO: 1920 - DNA, 368 bp, Glycine max
  Clone ID: LIB3028-041-Q1-B1-C5
ctctttaccagttgccacactacaccgagattccccctaaacccgtttgcgttgttgtttgcgaagaaatggcgactaagaggagcgtgggaacgttgaaggagggtgatttgaaagggaagagggtgttcgtgagggtcgatctgaacgtgcctttggatgacaaccttaacatcaccgatgacactagagtccgtgctgctgttcccaccatcaagtacttaactggtcatggagccaaagtgatcctttctagccacttgggacgtcctaaaggtgtaacacctaaatacagtttgaagcctcttgtgccaaggctgtctcaacttctcggaattgaggttacgatggcaaatgactctattggg

SEQ ID NO: 1921 - DNA, 398 bp, Glycine max
  Clone ID: LIB3028-041-Q1-B1-C6
atcattttccaaacgaacatcatcgtaatttcctaagtcaagacaagaactgaagtgctgcttcaatggcttcaagtcaggaaaaggtgatacttttgggggttattggaatcccatttctgcacatggtgcagattgctctcaaattgaagggagttgaatacaaatatttggaagatgatttgaacaacaacagtgatttgctcctcaagtataacccagtttataaaatgattccagtgtttgttcacaatgaaaagcccatatccgagtcccttgtgattgttgagtacatcgatgacacatggaaaaacaagcccatcttgccttctgatccttaccatacaaccttggctcgtttctgggccaagttcattgatgacaagtgcgtggctcta

SEQ ID NO: 1922 - DNA, 363 bp, Glycine max
  Clone ID: LIB3028-041-Q1-B1-C7
ctatgatgagtacatcaccgttgacaagaagaagcccaatcttctcatctacggtgatggcccctcaaagaccatcatcactggccgcaagaactttcacgatggtaccaagacaatgagaaccgccaccttctctactgttgctgaagatttcatggccaagtcaattgcattcgagaacaccgctggtgcagaatgacaccaagcagtggcactccgcgtgcaaggtgatcgttcagtgttctttgattgcgctatgcgtggttaccaagacacattgtatgcccacgctcatcgtcagttctaccgcaactgcgaaatctctggaacaattgacttcatcttcggctactccaccacctt

SEQ ID NO: 1923 - DNA, 398 bp, Glycine max
  Clone ID: LIB3028-041-Q1-B1-C8
gtgatttgtatggtcaggaaagtaactattctgaaagagtgatgctgatttatgatggtctccactacgatgcattagtgatgtctccctttgaggaagctcctgaggagtttgatcagaccatatttgctgtacagagaaacagaagcattggacctgttgaggggcttgctctaacttttgtgaaggaccagcagaggaaacggagttacactgacacatccaacttcactctccgctgtggggtatgccaaattggagtaattggtgagaaggaggcagtggagcatgcacaagcaactggtcatgttaacttccaagagtacagataatgcactccgttgatttgaatgggatacaaattcatgtgtaatctccgttgatttgaatgagcatca

SEQ ID NO: 1924 - DNA, 355 bp, Glycine max
  unsure (1)..(355): unsure at all n locations
  Clone ID: LIB3028-041-Q1-B1-C9
ttcatggctccccaaaccatttccattcactaccacaccacccgcttcttacctcaacccgatgtcttcattcgcacttcccacggaacacgcattccagcccacgccggcattctggcttccatgtcccctgtttttgacaactttatagatcgcccacgtaagcatcggagctccgagagaattatccaaatccacggcgtcncctgcgacgccgtcaccgccttcgtcggattcctctactcctccaggtgcacggaggaggagatggacaagtacgggatgcaccttcttgcattgtcgcacgtgtacatggtgccgcagctgaagcagaggtgcatcaaggggtttgacc

SEQ ID NO: 1925 - DNA, 396 bp, Glycine max
  Clone ID: LIB3028-041-Q1-B1-D1
gactggggttgtgaagcctggtatggtggtgacttttggtcccactgggctgacaactgaggttaagtctgttgagatgcaccatgaggctctcacagaggctcttccaggtgacaatgttggatttaatgtgaagaatgttgcagtcaaggatctcaagcgtggttttgttgcatccaactccaaggacgaccctgccaaggaagctgccaacttcacatcccaagtcattatcatgaaccatcctggccagattggtaatggatacgcaccagtccttgactgccacacttctcacattgctgtgaagttttctgaaatcttgaccaagattgacaggcgatctggtaaggagcttgagaaggagcccaaatttttgaagaatggtgatgctgg

SEQ ID NO: 1926 - DNA, 402 bp, Glycine max
  Clone ID: LIB3028-039-Q1-B2-B4
tacgttaccttacatattccatttgtctctgatcttccaacaccttattcctcagagaagagacaaaatggatcaccatttcacttcagaaacctctctcattattcttctcctcatcacatccctctcctcccttgccaccgccaccaacatcaatatcctccaccacgacctccaatccgacatcaccgaattctgcaagaaaaccaccaaccccgccctctgtgccgagaccatccatccccacttcctcaagaacagaatcgagcccttcaaggcgctcgacatagaagtggacgccaccctggcgaaggcaaaataaaccctaagcaacattcaagcccgtagaatccagaacgggtaccaccaaatcgtccagggagtcgttcgacatttgcaagg

SEQ ID NO: 1927 - DNA, 388 bp, Glycine max
  Clone ID: LIB3028-037-Q1-B1-G4
gcttgctggtgctcaggttcttctgagtcgtttgaggttgttcttgagtcctgggtatccatatgaagaaattttgaggacctttcacaatcagacaagcataatcatgtgctcctatctaccagttttcacaagctttaacagaaccaaaggtggcttgattcaattaaaccatggtaggcctcagcctctccaatatgtggtcaatgcggcctttttggctgccctatatagtgattatcttgatgctgctgatacacctggatggtattgtggacctaatttcttttcaaccgacgtgctccgtagctttgccaagtcccagattgattacatccttggaaataacccaaggaaaatgagttatgtcgtaggttttggtaatcat

SEQ ID NO: 1928 - DNA, 380 bp, Glycine max
  Clone ID: LIB3028-037-Q1-B1-G5
tcataatacaacactggagagagtagctaacgtgttggtgatgttgagcatggtggtgttggtgcttgcatcaaatgctgaagggggacgattacttgaggaagagaatgtggatcagccccagaccttccttggatcaggtggaggccttggtgggatatttccaagcccaagcccaggcttcagcttcaccggcgtgggctttggcccatctgggttttgcactttccctggtggttgcaccggtactccttctttgcccactattcccggtgctggtgggtcactaccagtaccaacacatgcataaggaaatggctttggtagaagacctatattattacttaatgctaaagtaccctaaaaattgtttaagcttt

SEQ ID NO: 1929 - DNA, 382 bp, Glycine max
  Clone ID: LIB3028-037-Q1-B1-G6
attacctctttccaaagtccaaattttctagttccaccaaaccaaaccaaaccaaaatggcagcagcctcagcctcatccatgatatcaacaccagccttatctccaaccatccaaaagcaccatcatttgaagccatccaacgtgtgcttccaaggtcttagacccctcgcaaggttcaccaaagcctcatcaaccaaagtgagcaccaccaccaaaagggttattccaaagggtggtgttagagctgaactcaactcagcccttgtgataagcctcagcactggcctctccctcttcttgggaaggtttgtgttcttcaacttccaaagggagaacgtggcaaagcaagtgcctgagcagaacggcctcacacactttga

SEQ ID NO: 1930 - DNA, 378 bp, Glycine max
  Clone ID: LIB3028-037-Q1-B1-G7
ctgaggtgcaataaggttatgagtgctgttttctcttcttgaacttctctttaatcctcagatcctggattaaaggaaaaacataaacatcagccagaaaattcctgagccttgttttacatctttcttcaggaaggaaaagaagaagcacaatgtcattcacaggaactacaggtaaatgcaaggcttgtgataagactgtttatgtggatgacatgtgaactcttgaaggtataccttaccatagaaactgcttcagatgcagtcactgcaagggataccgaacgatgaatacctacgccacagtggatggtgtcctctattgcaagccacactttgaacagcttttcaaggaatctggcaatttcagcacgaact

SEQ ID NO: 1931 - DNA, 386 bp, Glycine max
  Clone ID: LIB3028-037-Q1-B1-G8
agaagataaaaaaatacgagattgtatcaaaaattatatacaaaaaaatataagaattccctcaacaccagaggatattggacagataaagattcaaaaaagaattgatcttattcaagttataatatatatgggatttccaaagtttttaatagagggtaagtctcaaaaaatcgaagaattacagacgaatatgcaaaaaaaactgaattgtgtgaatcgaaaactaaacattgctattgtaaaagttgcaaatgcttataaacaccctaatattattgcagaatttatagctggacaattaaagaatagagtttcgtttcgtaaagcaatgaaaaaagctattgaattaactgaacaggcgggtacaaaaggagttcaagtac

SEQ ID NO: 1932 - DNA, 389 bp, Glycine max
  Clone ID: LIB3028-037-Q1-B1-G9
caagcaaatgaagcaaaggtagaagggaataagctttttgtagaagggaagtatgaagaggcattattacaatatgaacttgctttacaagcagcaccagacatgccttcatctgtggaaatacggtcaatatgccattcaaaccgtggtgtgtgctttctgaaactgggaaaatatgataacacaattaaagaatgcacaaaagcattagaattgaatcctgtgtacattaaagctttggtaagaagaggagaagctcatgaaaagcttgagcattttgaagaggctattgctgatatgaaaaagatcttagaaattgatctctcaaatgatcaagctaggaaaaccattaggcagctagagccccttgctgcagaaaaacgggaaaa

SEQ ID NO: 1933 - DNA, 384 bp, Glycine max
  Clone ID: LIB3028-037-Q1-B1-H1
agcaacagagccagcgagagcaaaaccctagttcatccatcaccagtcgaggaagaagatggtgaagttccttaagcccaacaaggctgtcatcgtcctgcagggccgctacgccgggcgcaaggcggtgatcgtgaggaccttcgacgagggaaccagggagcgcccctacggccactgcctcgtcgccggaatcaagaagtaccccagcaaggtcatcaagaaggactccgccaagaagacggccaagaaatctaaggttaaggcgttcgtgaagctcgtgaactaccagcacctcatgcccacgcgttacacgttcgacgtggatctcaaagatgctgttacccctgatgttctcggcaccaaggacaagaaggtcactgc

SEQ ID NO: 1934 - DNA, 291 bp, Glycine max
  Clone ID: LIB3028-037-Q1-B1-H10
ctcgagccgagaaaccccttctttcgctccacatttcttcgctctcaaccgttcgactcgttcgatgccaccgagttgactcagatccctaagtaaaattttctgttggaatcctccgtgctgagtgcctatataatatggatcaagaagacaacaagatgggcactgtgaatcctcctgaaatgtcttctaatcctctgtcattaggaaaagatgagacaatgggcactgagaatcctctgtcatcaggaaaagatgatgtggtgggtaccgagaatcctccagaagtgt

SEQ ID NO: 1935 - DNA, 386 bp, Glycine max
  Clone ID: LIB3028-037-Q1-B1-H11
cacactgtgtgtttgtaaaaatggccatcacaggcaaccttaacttcaacctcaacctagtacttcctgtggcacgccatatggcgtgccctccacgcgtcccgtcgtttctcttcactcgcggtcgaggcgcgtggtccccctcgcttctggtcacgcgcgccatcgacgctaacgagtttctgggggatttcggggcgcgggaccctttccccgccgagcttgaaagctcgttcggggacaaagtgctgggatacggcaacactgagcacaagattcttattcccaccattactgctctcggtctctcgcagcaggagtgtgctcccgtttcttctgcgcagccccccatctcgctggatgacgcccagactctcattagaaag

SEQ ID NO: 1936 - DNA, 383 bp, Glycine max
  Clone ID: LIB3028-037-Q1-B1-H2
ccgagccttgcgttgaggggtactcaactcctgggggttattctgcaagggcagtccatcccatagcacttgggaaggtgatgagcattgcaaagatgatgaagtcagagtttgatagtgagaactatacactttctgccattggtggtgttgagacaggcggtgatgctgctgagtttatccttctcggggcaaacactgttcaggtgtgcactggggttatgatgcatggctatggacttgtgaagaaactatgtcttgagcttcaagacttcatgaaaaagcacaatttcacatccatagaagatttcagaggggtttctcttgagtattttactactcacactgacttggtaagaaggcagaaggaagcagttcagaag

SEQ ID NO: 1937 - DNA, 390 bp, Glycine max
  Clone ID: LIB3028-037-Q1-B1-H3
gcggggataagattaaagattcaacaatggcctctgcttctgctactcttctcaagtcatctcctgttcttgacaagtgcgagtgggtcaaaggccagacccttcgccaacctctcgtgagatgtaacccttcctcagcatcagctctcaccatcaaagctgcttcctatgctgacgagctcgtcaaaaccgccaaaacagtggcctcaccggggcgtggtattttggcgatggatgagtcaaatgcaacctgcgggaagcgtttggcatctattgggttagagaacacagaagctaatcggcaggcataccgtaccctacttgtgacagtacctggtcttggtgaatacatctctggtgccattctctttgaggaaactctcctacaat

SEQ ID NO: 1938 - DNA, 389 bp, Glycine max
  Clone ID: LIB3028-037-Q1-B1-H4
ctctctcttaaaattaaaactaagcatgtgctctgccatatcccaagtggaacaagaagagttgctcgaaaaattagaggtgttcaagatcaaaggcagggacaagcatggccgcaagatccttcgcattatcgccaaactcttcccagcgcggttggtgagtgttgatgttctgaagaagtacctggaggataaggttttcccgaagctggggaaaaggaaattcgtggtgctgtacgtgcacaccggacgtccagaggagcgagaattttcccggaatctccggtctccggtggatccacgactcgattccgggcgaacgttaaagggaacctccaagccgtttaatttaatcaacccggccttcaaggccgccttttcctcgccaa

SEQ ID NO: 1939 - DNA, 385 bp, Glycine max
  Clone ID: LIB3028-037-Q1-B1-H5
aaaacactcataacacaaagcacaaagcaaagctcatccttgagttaaaaaatggcagcagcttcttccatggctctctcatccccatccttggctggcaaggccgtgaagctgggcccatcagccccagaagtgggaagggtgagcatgaggaagaccgtcaccaagcaggtctcctcaggaagcccatggtacggcccagaccgagtcaagtacttgggcccattctctggcgagcccccgtcctacctaaccggtgagttcccaggcgactacggctgggacactgctgggctttccgcagacccagaaaccttcgccaagaaccgtgaactcgaagtgatccactccaggtgggccatgctcggagccttgggctgcgtct

SEQ ID NO: 1940 - DNA, 384 bp, Glycine max
  Clone ID: LIB3028-037-Q1-B1-H6
aaagcatttatggtgctttcagcggcttggagtatcttaaagctcagaaaatgaggaatcgccaattgcaatttcacaagaaaatatttgctgaggcagatgtcattgtctcaccaacaacgggtgtgactgcatatcaaattcaagatgatgccctgcagaccggtgaacttgactacgtgaatggagctgcacttgttcgttattccatagcaggaaactttcttggacttcctgctgtcactgttccggttggattcgatagattgggtttgcctattgggcttcagtttattggaaggccttggtctgaggccacactaatccatttggcatttgcaatgcaggctatctgcatgtcagagtacagaaagcccgagcttt

SEQ ID NO: 1941 - DNA, 383 bp, Glycine max
  Clone ID: LIB3028-037-Q1-B1-H7
gggaaaaagagctgcaatccgatttgcagatctcaagaggaaaagatattggttcccgttaatggtataatatgatgctgtataagttctgattttctaaaccctctcttcccaagcatgacttattgtcatttatccaaaaggtcaagcattatttgctaactgagctcctgcaggttggtattggattacttgttcttcagcaattatctggtatcaatggaattttgttctattcaactaccatctttgcaaatgcaggaatttcatccagcgaagctgctacagttggacttggagccgttcaggtcatagcaactggaatttccacatggttggtggacaaaagtggccggaggctgcttctaataatatcctcatct

SEQ ID NO: 1942 - DNA, 372 bp, Glycine max
  Clone ID: LIB3028-037-Q1-B1-H8
ggcctctatagcgagcttgaaccatcttcagcttcagctactttgcactaacaaagcgccccacgttctgagacaaacccagtatgctatctgccatgggggatcagaaagtttcgatttttcattgattgtgtataactgcacaaagaaggtagtgaagcaatgcgtacagcgatcgcgtttctcgttcacccacgattcctccttctcttccttgttctctcaattttcctcattttcacattttctggttctaccaccaccaatggttttactaatcccaaacaagttgttgagatcattgaggagaaaccagaagaggagccagaaattacacacagagtatttttggatattgatattgataaacag

SEQ ID NO: 1943 - DNA, 92 bp, Glycine max
  Clone ID: LIB3028-037-Q1-B1-H9
gggaagatggtgataattgtgattaggcaaaggatctgctgtaagcgttgagaagactgaaagtattgaaaaagaaagaattggtattgaag

SEQ ID NO: 1944 - DNA, 391 bp, Glycine max
  Clone ID: LIB3028-038-Q1-B1-A1
atcatctacctgataaaactgcatccggaggagctagagaaatggacaaggatgctcagaatgttgaaacaagtggttcagatagtagttctgcaaaaggaaagaatgttgttgataatatggataatggagagctttcaaaatcaaatgagcgtcttaaaagaactgcagttgaggaaaatccagaggatgaaaagattgaactttcacaaaggagaaaacgagaacgaacaataatgaatgataaacaggtgatgctgattgagagggcactcaaagatgagcctgatatgcagcgaaatgcagcttcacttcaatcatgggctgataaattaagtgggcatggttccgaggttacatcttcacagcttaaaaattgggtgaacaatcg

SEQ ID NO: 1945 - DNA, 383 bp, Glycine max
  Clone ID: LIB3028-038-Q1-B1-A10
gtgacacaccaaatcaaagacacctgagccattcaattcccctcctttattgctttcaagtttcaacactaattttattatctgaaaaaatggctttcaaagtttcgtttttccttgcacttgttctagtttccaatatcctcctccttgatacaacagctgctggacgcagcattggcgaaaactccaactcagaggaaaagaaagagcctgagttcttgttcaagcatgaaggtggggtgtatattccagggattggacctgttggatttccacataaatttcatctcacacctcaaaatccattacctggtggcaatggaaatggaggagcaggaaccgcaacaggatcaggatcaccaccaggtagcagttatgttcct

SEQ ID NO: 1946 - DNA, 381 bp, Glycine max
  Clone ID: LIB3028-038-Q1-B1-A12
tctcatcgtattctctacgctattccgattaatcaatcatacatagatccattattcatagttaagcataataactgttgtgttacatctcgtgaattgttacaactgcttagccattttctattgcatatggcttcgtcggttctctccgcagcttcgcactctgtctcaccctcatgttctctgtccaccacgcacaagggaaagcccatgattatagacaacactttgggattccacagaggacacatttccttctctagttcaaggtctagaggtcggatctctatggctgttgcagttatcgtttctcggtttgaaggcatacctatggcgcctcctgatccaattctaagagtttctgacgcatttaaagtggac

SEQ ID NO: 1947 - DNA, 400 bp, Glycine max
  Clone ID: LIB3028-038-Q1-B1-A2
ccaatatattccattctctctgtgtatttccctacctctcccttcacaatgcagatcatcgtcaagaccctcatcggtaagaccatcacccttgaggtggaaagctctgacaccatcgacaacgtcaaggccaacattcaggacaaggaaagaatccccccggaccagcaacgtctcattttcgccggaaagcaacttgaggacggccgtacccttgctgactacaacattcagaaggagagtactcttcacctcgtcctccgtctccgtggtggcatgcagatcctcattaagacactcatcgggaagaccatcaccctagaggttgaaagctccgacaccatcgataacgtcgaggctaagatccaggacaaggatggtatccccccggaccagcaac

SEQ ID NO: 1948 - DNA, 367 bp, Glycine max
  Clone ID: LIB3028-038-Q1-B1-A3
gagccatatatcatggggtactatttggtattcgttggtgtgttcttgtggtgtgccatggctagtcacattaatggactagccatgatggatggaaagttaatgagttcctcggcaaataattatgactatggagatgctcttggcaaagccatcttgttttttgaaggagaacgctcggggaacttgcccgccacccaaagagtgaagtggaggggagactccgctctctctgatggcaaacttcaaaacgtggatttgattggaggatattacgatgctggagataacgtcaagtttggatggtcaatggcatttacaactagcttattgagttgggctgctgtagagtacgagagtgagatat

SEQ ID NO: 1949 - DNA, 401 bp, Glycine max
  Clone ID: LIB3028-038-Q1-B1-A4
gtgctaagaaggaatgagaatgctctagtacggaactacaaacatggtttctcagggttcgcagctcgtctatcaaaaaaggaggcaacctcaattgctcagaaacctggtgtggtgtctgttttccctgacccagttctgaaactccacactacacggtcatgggatttcctcaaataccaaactcaagtcaaaattgacaccaaaccaaatgcggtctccaaatcttcttccgtcattggtatcttagacacaggtatatggccagaggcggcgagttttagcgacaagggtatgggtcctgttccatctcgttggaaaggcacctgcatgaaatcacaagacttctattcctccaattgtaacaggaagctaattggcgcaaggtattatgctgaccc

SEQ ID NO: 1950 - DNA, 375 bp, Glycine max
  Clone ID: LIB3028-038-Q1-B1-A5
cggctcgagaacacacttggttttaattggtagacgcgtgccaaggtcttgttaattttgagcgttaagtgctgcaactaatcagatcccaagaccttggcctaccttgccatacagaagaaaatggaagcaaaaaaaaagccaaggtttggagccaacaagaataaagacaaagcacaagtcatggaaagaataatggttggaagtgcaacaaaggttgctttcaccctcttggccactttcgccattgtcattccatgccttgaggctggcattgctgagtttgacgattttctcaaagcccaagctgatgaagcccataaaattgctcttgattcctatgtcccagagcctcacgatgtcgcccatgaactc

SEQ ID NO: 1951 - DNA, 391 bp, Glycine max
  Clone ID: LIB3028-038-Q1-B1-A6
aaccattcaatcctgacatggtagctgatttaattcatctaaggaaagcttctatattacatgattcacaagttgctgagattctgaatgatatttcacgacgaattgtgcgagacacaggccctattgtgatggataaatcaggttatactgaaaaaggttttaagagaaaaatagctgttcaggccctttttggaaaggtcttctatctgtccgagctgccagagttttgttcaagagatacctccttagttgtcaaggaaatcttcggagttacagatgaagatgctgacaaactcagaatccacacaatctctgaagctggcagtctagatgcacttgagaagatggttgatagttcagattcagacgatgctagcgaggattcatt

SEQ ID NO: 1952 - DNA, 395 bp, Glycine max
  Clone ID: LIB3028-038-Q1-B1-A8
ccataacacaaggcagaaagcaagctcatcctagagttttaaaaatggcagcagcctcctccatggctctctcttccccatccttggctggcaaggccgtgaagctgggcccatcagcccccgaagtcgggagggtcagcatgaggaagaccgtcaccaagcaggcctcctccggaagcccatggtacggcccagaccgcgtcaagtacttgggcccattctctggcgagcccccgtcctacctcactggcgagttcccaggtgactacggctgggacactgctgggctttcggctgacccagaaaccttcgccagaaaccgtgagctcgaagtgatccactccaggtgggccatgctcggggccttgggctgcgtcttccccgaactgttgtcc

SEQ ID NO: 1953 - DNA, 391 bp, Glycine max
  Clone ID: LIB3028-038-Q1-B1-B1
caacaagaagtggtagaggaagatggttttttcttgctgcagctccaattgttagtctagtgggcattgttcttgtcttgtggttaggtaataacaactctcagattgaaggaagtagacatctgggcggtcactacttatccgggcaaaatcagcacaccattcatgcttattcctctccaaaccagagggagggtagaagcagagggtggtggtgcccattctaagtgcttcttgatttgtttatcaatatgcctcatgatggccacttgggatgaaatttttaactgactcatggcgtgccttttgtccttagtcctctctaattcaagaagacatgtacagattttagtttgtaatatggtatctgcttttgtttcctgtttccttt

SEQ ID NO: 1954 - DNA, 383 bp, Glycine max
  Clone ID: LIB3028-038-Q1-B1-B11
gatatttccaccaaacccgtttgcgttgttgtttgcgaataaatggcaactaagaggagcgtgggaacgttgaaggagggtgatttgaaggggaagagggtattcgtgagggtcgatctgaacgtgcctttggatgacaaccttaacatcaccgatgacactagagtccgtgctgctgttcccaccatcaagtacttgactggttatggtgctaaagtgatcctttctagccatttgggacgtccaaaaggtgtaacacctaaatacagtttgaagcctcttgtgccaaggctgtctcaacttcttggaattgaggttacgatggccaatgactctattggggaggaagttgaaaagttggttacacaacttccagaaggtgg

SEQ ID NO: 1955 - DNA, 396 bp, Glycine max
  Clone ID: LIB3028-038-Q1-B1-B2
caaagaaaaaaaaagcttcttccattttccgaaatcgaagcattagggttagggttttttccgatctgagaaattcgcggcccaatggcggaggaaccggagagcaccgtcaccaccggcgccgccgacgaatcgctgctcgataagatcaccgagaagcttcacgggcacgattcttcgtcctcttcatctcccgactccgactccgactccgaaaaaaccgttacttcctccgttaaggataaggtttttcgcctcttcggaagggagagacccgttcactccgttttcggcgccggaaaacctgctgatgtgttattgtggaggaacaagaaaatttctgctggcatgcttggcggagccactgctgtttgggttctttttgacttgcttgag

SEQ ID NO: 1956 - DNA, 159 bp, Glycine max
  Clone ID: LIB3028-038-Q1-B1-B3
gtttttgatgataaacttgtgctggctaagacacaagaattctttgctggaaaagctttacctgctccttgtaaacccaacagatcaatgctcaacagtagatcaatattatcatttgaatcaggagcattcctcgagccgactagttctagatcgcga

SEQ ID NO: 1957 - DNA, 399 bp, Glycine max
  Clone ID: LIB3028-038-Q1-B1-B4
aaaagatttccttgttctttttactgcttaaccgttcggctatctcatatatgaacaacaacatgttaggaatgaagagacggagagatgataatgaagggtccttggatttggcaaaatgtcttatgctgttttcttgtccaatagaaagcaacaagacacaacagaaaagttttggttctgtggaatttgagtgcaagacgtgcaaccgcaagttctcttcttttcaagcactgggagggcacagggcaagccacaagaggcagaagctggagggggaagaactgaaagaacaggccaaaagtcttagcttgtggaacaaacccaaaatgcacgagtgctccatttgtggccttgaattctctctgggccaggctctgggtggccacatgagaaaac

SEQ ID NO: 1958 - DNA, 386 bp, Glycine max
  Clone ID: LIB3028-038-Q1-B1-B5
aaagagacatgttggaaattttactgtattagactcataatataatacaaataatttatacttgtgccgctccctctgccgtcgcagggcgccggcggcgtggttccgatgtccgtcgtctccgaggagtctggcggacggccgaggccgtccggggcttccgccggcgggcacctgcggagtctgtcggtggattctgacttcttcgatgggctcgggtccggcgtcggcggcgatgagagaggtgccgggaatggcggcggcgagcggcacagcaactcgatggaggggtcgtcgacgacgtcgtttgaggcggactcggcgacgatgatggatggcatgaagaaagctacggcccctgataaacttgctgagcttgctcttac

SEQ ID NO: 1959 - DNA, 394 bp, Glycine max
  Clone ID: LIB3028-038-Q1-B1-B6
cgaaaaaccaaactctgcagagaagaatggtatctgaaacatcatcaggaagtcttgtattcaacgatgcaattctacaatacgtagcggataccctaccatttggaggagttggtgaatgtgggtttggcaagtaccatggaaagttctcctttgatgcgttcagtcaccataaggctgtggctagaagaagttacttgactgatttttggtttaggttccctccatggactcttgataagctccaactacttgaggtgtcttacaatttagactaccttggaatacttctagttctgctcggcttaaagaaatcaaaacggtcactatttcaggcttgtaactgatgtgcattatgttccttcacttatctatttcaagtgagcccctaata

SEQ ID NO: 1960 - DNA, 390 bp, Glycine max
  Clone ID: LIB3028-038-Q1-B1-B7
caacgatggtgcagaggctcacttatcgcaagcgccatagctatgctaccaaatccaaccagcaccgggttgttaagacccctggtgggaagttggtgtaccagaccactaagaagagagcaagtggacctaagtgccctgtcactggcaagaggatccaagggattccacacttaagacctgctgaatacaagaggtctagattgcctaggaaccgcaggaccgtaaaccgagcctatggaggtgttttatccgggggagctgttagagaaaggattattcgcgctttccttgttgaagagcaaaaaattgtgaccaaggtattgacgatccagaaggcaaaagaaaagcaggcatcaaagagttaagctgttgagttattcgtgagtg

SEQ ID NO: 1961 - DNA, 394 bp, Glycine max
  Clone ID: LIB3028-038-Q1-B1-B8
atcttcttatagcttcatcccaaaaagctcttttccttctaaatttgattccttagttcagcattctattattatatatggcttcttcaccttcctcagaaaacaaaaacctagagggagtagctggtggtgccggagagaaacccattccacttggtgagaacgttctgcagaagcatgctgcattctttgacttgaataaagatggtgtcatctacccatgggagagttttaaagggttgcgtgaaatcgggactggggttttgctgtccgttggaggtgctattttcatcaatgtgtttctcagtcagagtactcgtcccggaaagtttccatctatactttttccaattgaaattaaaaatatccaacgcggcaaacacggcagtgacac

SEQ ID NO: 1962 - DNA, 383 bp, Glycine max
  Clone ID: LIB3028-038-Q1-B1-B9
ctcgagccgaatcggctcgagggatcactatgaaactgctcgtggtgtacagaaagtacttcagaactacaagaatcttcaagatatcattgctattttgggaatggatgagctcagtgaagatgataaattgactgttgcccgtgcccgtaagattcagcgattcttaagccagcctttccatgttgcagaagtcttcactggtgccccaggaaaatatgttgagttgaaggagaacatcaccagtttccagggtgtgttggatggcaaatacgatgacctcccagagcagtcgttttacatggttggcggtattgaagaggtcattgctaaggctgagaaaattgctaaggaatctgcagcgtcttaattacatacaacag

SEQ ID NO: 1963 - DNA, 385 bp, Glycine max
  Clone ID: LIB3028-038-Q1-B1-C1
ctgcaacgatgtcggttaaggagtgccaccaccaccacaagggaaagaagcacaagctctggagacgcatcttctggggaatagtgatcttcgccttcatcgtgttactgacagttcttataatctgggcaatcctaaagccttcaaaaccaaccttcatcctccaagacgtcaccgtttacggcttcaatgccaccatccccaacttcctcacctcaagttttcaggtcacgctttcctcgcgcaaccccaacgacaaaatcggaatctactacgaccgtctcaacacctacgtaacttaccggaaccagcaggtcacgtaccgaacctcaatcccaccctcgtaccaaggtcacaaggaagaggatgtgttggtcccgtttgt

SEQ ID NO: 1964 - DNA, 376 bp, Glycine max
  Clone ID: LIB3028-038-Q1-B1-C10
cttttctggacaagactttcgatgaggaaaacaaccttgacacggcaagaaacaccaagcttgacacaaaccttggattgcggccaatgtaagttgctatttggttccacaaccgtcgaactcgctggaagaccacgacgctggataaggattacgaggctctgcatgcaagttttgagaatcttaagtccaactatgacatcctcctcatggagaaagacagcttatgaactgaggtggcaagcctcagtgagaacgtgcttgacaaagggaaataacaggggcacatcgaccagcacgctgaaagtgcatactaaacacaaagattattgcacttgcaagaacatgatacaccccagaggcttttactggaatc

SEQ ID NO: 1965 - DNA, 372 bp, Glycine max
  Clone ID: LIB3028-038-Q1-B1-C12
ggagcacgcgaactgatgtgtattcgaatcctaggagctagtaatcgacgatatgcttatattggtgacattgttgttgctgtaatcaaacaagcagtaccaaatacgaacttagaaagatcagaagtgatcagagctgtaattgtacgtacttgtaaagaactcaaacgtagcaacggtataataattcagtatgatgataatgctgcagttgtcattgatcaagaaggaaatccaaaaggaactcgaatcttttgtgcaatcgcccgggaattgagacagttaaatttcactaaaatagtttcattagcacccgaggtattataagacgaaactgtgctatggatacattatttttttgtgaaatagatt

SEQ ID NO: 1966 - DNA, 395 bp, Glycine max
  Clone ID: LIB3028-038-Q1-B1-C3
gcgtggccttttatacatcaaacggtgatgtgttcgagaagtcccatgatgagttggactttgaattcctaggtaacgttgccggaaaaccatggcggtttcagacgaacttgtacggcaacggcagcacaaatcgtggccgtgaggagcggtaccgtctgtggttcgatccaaccaaagaattccacagatacagcatcctttggaccgcaaagaatgtcatattttacattgatgaagttccaattagagaagtgctacaaagtgaagaaatgggaggtgactacccatcaaagccaatgtcattatacgccaccatatgggatgcatcaaattgggccacatccggtggaaaatacaaagtgaactataagtatgcaccttttgtgaccgaa

SEQ ID NO: 1967 - DNA, 394 bp, Glycine max
  Clone ID: LIB3028-038-Q1-B1-C5
cacatattctttgttgcaatatcacaaacacctcgtccgtcacaatgcagctagctgtggcggccaacgctgtcgtttcaccgtcgccgttccgacctcatccccttctccggtcatccttctccggcgtctccgttaagctcactccccaatccataacgttttcacgcttgaagcccctcaccgtcgtcgccgccacgaagaaggccgtcgctgtcctcaaggggacctccgccgtcgaaggcgtcgccactctcatccaagaagacgatggcccgacgacagtttctgttagcatcactggccttactccggggcttcatggttttcacctacatgagtatggtgataccacaaatgggtgtatatcaacaggagcacattttaatcctaa

SEQ ID NO: 1968 - DNA, 392 bp, Glycine max
  Clone ID: LIB3028-038-Q1-B1-C6
ctttatatgacagtttaagctgtgaggtgagtacatttcttagcaaggtatcaaagcctgtttgaactataactagtggtcaagttttcaactcttccactgcattcttcatacttgaatgaaagttgagtatttaactttgtcctatattttcaactctgatggcaccaaataccggaggggactactttatccaaagcttaattcttcccaggcgacttcggctgcacttttacctaacttcttcccaaacagattttagaccgccttcttcttaacaaaatcatttttttttttacaaaataaggtgagcttattatttacctttacttcaaggacaaaaggctttgctctagtgccgtgtttgcgatatatatcaaaataaattttgg

SEQ ID NO: 1969 - DNA, 393 bp, Glycine max
  Clone ID: LIB3028-038-Q1-B1-C7
ctcgagccgattcggctcgagaaaaaaccccaagctcgacaccttctactacctcgagctcctcgggatcagcgtcggcggctcgccggtgcgcggcctctccgcctcgctcttccgcctcgacgcagcgggaaacggcggcgtcatcatcgactcgggcacctccgtgacccggctcacccgacccgcctacattgccctccgagacgccttccgcgtcggggcctcgcatctgaagcgtgcagcggagttctcgctcttcgacacgtgtttcgacctgtccgggctcacggaggtgaaggtgcccacggtggtgctgcatttccgaggtgccgacgtgtcattgccggcgacgaattacttgattccggtggataacagtgggagcttctg

SEQ ID NO: 1970 - DNA, 392 bp, Glycine max
  Clone ID: LIB3028-038-Q1-B1-C8
gaacgatatcaggaactggatccaacattttcaggaacacgtgaatatagattgttggcggacattgctgctgcaattgatgaagaagatgttgcaaagtttactgatgttgtcaaggaatttgatagtatgacccctctggattcttggaagaccacacttctcttaagggtgaaggaaaagctgaaagccaaagaacttgaggaggatgatcttacttgaattgtacctttaatattcctggtggttggacctattgtttgatgatttacattgtactactatgtgtgtctgtccagttgttcgtcttacacatccacttacagagtgtacctgctttggttttaattgaattggtctgactgaattcaaaaaatgagtttttactgaaa

SEQ ID NO: 1971 - DNA, 386 bp, Glycine max
  Clone ID: LIB3028-038-Q1-B1-C9
cttggttttaattggtataggcttgccaaggtcttgttgattgagcgttaagtgctttaactaatcaatcccaagaccttggtttaccttgccacacaaaaaaatatataaaaaggcaaaataataataaaaaaaagagaaggcttggagccaagaaaataaacacaaagcacaagtcatggaaagaataatggttggaagtgcaacaaaggttgctttcaacctcttggtcactttcgccattgtcattccatgccttgaggctggcattgctgagtttgatgactttctcaaagcccaagctgatgaagcacaaaaaattgctcttgaggcctatgtcccagtgccagaagatgtcaccgacgaactcaatttccatgttcatt

SEQ ID NO: 1972 - DNA, 387 bp, Glycine max
  Clone ID: LIB3028-038-Q1-B1-D1
ttcgaaaaccaaaagcatgggtcagggaacaccgggcggtctgaaccggcagggtcttccgggggaccggaagccggacggcggcgacaagaaggagaagaagttcgagccggcggcgccgccggcccgcgtgggccgtaagcagcgtaagcagaagggcccggaggcggcggcgcggctgccgacggtgacgccgctgtcgaagtgcaagctaaggctgctgaagctggagcgcataaaggactacctcttgatggaggaggagttcgtggcgaaccaggagaggctgaagccgcaggaggagaaggccgaggaagacagatccaaggtcgatgatctccgaggttctcctatgagcgttggtaacctagaggaactcattgacga

SEQ ID NO: 1973 - DNA, 381 bp, Glycine max
  Clone ID: LIB3028-038-Q1-B1-D11
ataactccctgtaatgtgcactagtaaagaccaaagtatgattattgttacattatgttacatggttgtacttgtatatacatatcttgtcccacctttgtaaatacaattgggacactactaggattgggaagaagggtctttacatttatagtttggcaaatagatattgcaactacctttgtataattctatttctgaagaagcaattacaatttacaagggatggtgccatttacggcataaggattaaggagggataaagggaccaattgctttggaatatccactcattacaatgcatgtatgacaacacatagtaatatgatgtgtgtttttattcagtgggcaactggcagatcgggttttccctggtcactt

SEQ ID NO: 1974 - DNA, 369 bp, Glycine max
  Clone ID: LIB3028-038-Q1-B1-D12
agctgttgtaagaaggtgaaacaatggaccccctattaagttcctccttcctctcagatatgccgctgttctcgctctaattcgtctagcgctgcgggataaacccgtcttgagagatcgcttgtttactgctgtgttggctggggcctttgctcatggcttctatttggtaccagatctgtaggatattgagagcacgtgattaagcatagcatgtttcagacatttcttcggcatcatttacatcacaacctcaggtcttcagtaaatttcttcgacgactatttacagctaaacattctggtaatgccttaaatagcattggtcaattttcaagatgtacaaatatttttttcaattatattgaca

SEQ ID NO: 1975 - DNA, 308 bp, Glycine max
  Clone ID: LIB3028-038-Q1-B1-D2
tgaaaattgctaactactacaagttttgtcgagaagtcagtgaaacaatgatggtatctttttgaggcatttaactttcattatagttgtttgatgaagaacttgaggaatgaccaaaggtagtcaatgacaattgacaccacacctgtggtggcaacctgaaattataaatggcccagaccaacctcaggtctgaattattaccttgtccaaaggatataatttggcgcacaaaaattgagacaccggtaaaaaaacctaaaacgctatacaaagatttctctaggacacatttacagtgttttcac

SEQ ID NO: 1976 - DNA, 117 bp, Glycine max
  Clone ID: LIB3028-038-Q1-B1-D3
gttcaattgcctcaataatcttctcagcattgccgttgtaaattgatttgtatgtattattccaagaatagaactaattctctatttttggtttaaataatatttgtatttcctttc

SEQ ID NO: 1977 - DNA, 401 bp, Glycine max
  Clone ID: LIB3028-038-Q1-B1-D4
ttcgaaatccaccgatctctctcattcttcaatggccaccctttccgcatgcgcttcccctccatggccaaaccctaattctcccaattcaaatccagaccctaatttcctccccgatcaatcccaaaccctcgacttcgactccctcatgcctccgcaacccgaatctccaccgccccaccagcaccactcccccgacgcatcgccgccggaatcctccccatcgctcccgccgccgtcgctcctctacctctccttcaaccaggaccaggcctgcttcgccgccgccgccgacagcggcttccgcatctacaactgcgaccccttccgcgagctcttccggcgcgatttcgacggcggcggaatcggccacgtggagatgctcttcctctgcaacatct

SEQ ID NO: 1978 - DNA, 391 bp, Glycine max
  Clone ID: LIB3028-038-Q1-B1-D6
ctcacttgaagatagattgcagaggcaagtgagcactattagtcaagccctaatatttgtgactcggtcacggggttggtcttatgttgaacgtcctggtattttgcttgtgacagctttcgtgattgctcagctaattgccactttgattgcggtatatgccaactggagctttgctgccatcgaaggcataggttggggatgggctggagtgatatggttatacaacataatattctatatcccacttgaccccatcaagtttttaattcgatatgctttgagtgggagggcttgggagcttgtcattgagcaaaggattgcattcacaaggcaaaaggactttggaaaggaacaaagggaacttcaatgggcacatgcacaaagaaca

SEQ ID NO: 1979 - DNA, 391 bp, Glycine max
  Clone ID: LIB3028-038-Q1-B1-D7
tatttgggttcgattgccactgcagctaacaagcctgctttgaaagactgtaatattactcacattttgactgtggctggtagaataccacctgcacatcctaacgattttgtctataaaattatagacgttgttgacagagatgatgaagacttaaaacaatacttcaatgagtgttttgattttattgatgaagccaaaagactcggtggaggtgttttggttcattgttttgctggaagatcaaggagtgtgactatagttgtggcatatctgatgaagactcgaggaatgagtttttttgaagctctgaaacatgtgaagagtatacgaccagcagcaggtcccaatcagggtttcatttgtcagctggaggactttgaaaagtctc

SEQ ID NO: 1980 - DNA, 393 bp, Glycine max
  Clone ID: LIB3028-038-Q1-B1-D8
agttccggttcttgggagttggtactgtacgcacattggcagtttcagttcttggtattgtgtggctgatttgattctttaacttccattgccacaagtaaataatattttacagcacttaattgatctgtgattctaatagtaactcaaaagatgagaattttggttgctttctctgctcaaactgcgaaacagtagcattaattactgaaatgagatagttgtgttcaatctagagtgaaatccagtgcttagcagatgtttgtggtgctctgcactgtgaccatgagatgaattctggatctaacacatcaacgtgtaatcctgctgctgctgcaaaacatacacatctatgtgaggtatgctttgttctgtctattcatttgctataat

SEQ ID NO: 1981 - DNA, 379 bp, Glycine max
  Clone ID: LIB3028-038-Q1-B1-D9
ctcgagccgaatcggctcgagtctttatagaaatctaatcgtttttagttcatacagttatcaaaagtgaccccacatcagaactaaaaacatgtgcttctgttagtcattaaaaatctattaagtttgtagggttaattaatagggagtgaaaccaaattttgagagtcaacattatctcttgtctctctctctctctctgttctgttgtgcatgatttgctattcctactgatttttctcattgagctccccgttggcccatataacctgcaaattttttactactttacaatgtgcagagctaccaggtgttcttcaagttgttcctagcaggacatatcagctccatggaccaaataacctgcagtagagaatgt

SEQ ID NO: 1982 - DNA, 383 bp, Glycine max
  Clone ID: LIB3028-038-Q1-B1-E10
cattgttgatgaaaaaattaaagagattgaacctctgcagcaggcactgggcaagctgcgtactgcaaataatgctggtcggggtgttggattatgctcatctgaggaggagcttaacaatcttattaatagcttgcactaccgcatacaacatgaaagcattccgtttgctgaagaaaaacaaatccttcgagaaattaaacagctagaggggacaagggagaaggttattgctaatgctgccatgagagccaaagtacaagattctatggggcagaaagaagccattcaagatcaggttaagcttataggtggtgatttggatggagtcaaaaaggagaggcaagcaatccggtccaaaatcaagcaacttgaagatacag

SEQ ID NO: 1983 - DNA, 131 bp, Glycine max
  Clone ID: LIB3028-038-Q1-B1-E11
ttttgagttaagtttatgtcacttgaacaatcttgtgtcaagcaatcaatatttgctattatcttcatcagcaactgtattcaatgaacttaagaaaagtataatattttgataatataattatccttatc

SEQ ID NO: 1984 - DNA, 160 bp, Glycine max
  Clone ID: LIB3028-038-Q1-B1-E3
gtcatgtcatatcccttaacacctgttgagttagattcaccgtgggtatccaatttatatactgcataaaacatcgagtgaatgtgtagatagtttactttcaagcaagtgaagtgggtggacgtttgactattcaacacactaatttcggaattacatc

SEQ ID NO: 1985 - DNA, 379 bp, Glycine max
  unsure (1)..(379): unsure at all n locations
  Clone ID: LIB3028-038-Q1-B1-E4
ttgtgtttgggccttccagcgaccatgaaaggatcaatttcttcccagggatttctgattctaccattacgtcagcaggtgtaagtgaaagagaaaggctagcatcaattcaacacgaaatctggagggttgccagagccattcgaagagctgcttctgcactcagaggagaattcacctaaaaaactaaatgtgaaaaaaaaagttaagttagaggagaatggagatggatgaaatcatctccgtttgagttacctgtaaatatagtagtgtttctttttaacacgagcagagttacctgcattttgaggtatataactgtacattaagttgtaaaaaaggagatgaatgaacatgccagcagtttgaagacacanna

SEQ ID NO: 1986 - DNA, 391 bp, Glycine max
  Clone ID: LIB3028-038-Q1-B1-E5
ctgcatcctttgggatctcttgcatagaccaaccccagaagaagaaggaaaaaaataaaaaaaaataaaaatcaaccctttttattttggggcttgttggtgattctgttgtacagaagtgttcgttagttatacatttgttcaagattgttgtatagattgattcattattttaacgtactttggagcattgcatgagtgattgccctctgattcttttgtgaagtcaactaaagtccctataattacaaactgagattcagaagcctccggtaggggtatagctagagcttattgccttgttaacacagtgtgaagaagatggctggtattaagagaagattatgtagtgattcagatattcatgctcttcacaaagaattggatgaag

SEQ ID NO: 1987 - DNA, 390 bp, Glycine max
  Clone ID: LIB3028-038-Q1-B1-E6
ggagtaccttgaacaggttcgaaccattgtgaagccaggatgcccccaggaggttttgaaagctgctctaagtgtcatggcgtcggttactgaagttctagctgcaatgtcaacatcttctactaacaccctgtcagccatgtgagagtaacaaatggatgttgtattctttccaaaattttctggcacgaggttttagtttctacattttattgccatggaagtagttgttgattggcaataagagttatagctgacatggtgcatgtcaacgtgagatgagatttactgtaatcaaagttttggctctctatgttccctactgggtcatttttttttttacaaaacatgagggttccgtgtgacactgataatttagcttggtgcttg

SEQ ID NO: 1988 - DNA, 389 bp, Glycine max
  Clone ID: LIB3028-038-Q1-B1-E7
atcaaagtttcttcctttctctgctctttgccttctctgacacatttggtgccttgtagagcgtgttttggcaggaaggtggtatggcgaaggacgttgaggttgctgagcgtggctccttctctgggaaggactaccaggaccctccaccagcaccactcattgatgctgaggagctcacaaagtggtccttttacagggctctcattgctgaattcattgccactttgctcttcctctacattactgtgctcacagtcatagggtacaagcaccagactgacctcaaggaaaatggtgaaatctgtggtggggttggcattcttggcattgcatgggcctttggtggcatgatcttcatccttgtctactgcactgctgggatctca

SEQ ID NO: 1989 - DNA, 369 bp, Glycine max
  Clone ID: LIB3028-038-Q1-B1-E8
gtagagtttgttgagcaaaagagccattttcttctgattctaccaaatctagggttagggattcgatttcccaacttcctctttctcacccgattctttttcctttttctttttcttcctgacaaattttccgtctatttttctctctcttgcaaattacgataaccactcttcctcgatctaccctgtttccgatagaaacatggcatttattttcccgggaaaatactcctcatagttttcagggccaacctttcgtccattagatcattccatcatcaatttgttgtagaattccaatttcctaggttgtcgatcgatctactgatccgccaattgtactttggggcaattagattttactttttt

SEQ ID NO: 1990 - DNA, 380 bp, Glycine max
  Clone ID: LIB3028-038-Q1-B1-E9
gagaataatggcattcttccaagtgagtgtcaggcgttggattttaacctttgctatcctttacgtttgtgtatttgggaaaaactttggaaatgctgatgaggatgagtccgaggcacagacaggtggtggtgggtacggtggtgtgggaggtggttttggtggtgctggggccggagttgttggtggtggtggtggatttggagccggtggtggtggttttggagccggtggtggtggggttggtagtggtgaccctgctcaaattgtctccaaagccttgctctgtttcaatgataagaatatttatcgcagctgcgaagagacgtgtagattgaacgagaatggaaacctgaatgtgcctgtagagaaaactgata

SEQ ID NO: 1991 - DNA, 388 bp, Glycine max
  Clone ID: LIB3028-038-Q1-B1-F10
gtttaaagttacatagtttttcattgttttacttaatctacaatggctgcttcaacaatggctctctcttcatcatcattggctggccaagctatcaagcttgccccctccacccctgagcttggtgttggaagggttagcatgaggaaaacagcctccaaaactgtttcctcaggaagcccatggtacggcccagaccgtgtcaagtacttgggcccattctcaggtgagcccccatcctatctcactggtgaattcccaggtgactatggttgggacactgctgggctttctgctgacccagagacttttgccaaaaaccgtgaactggaagtcatccactccagatgggccatgttgggaaccttgggctgtgttttccctgaac

SEQ ID NO: 1992 - DNA, 381 bp, Glycine max
  Clone ID: LIB3028-038-Q1-B1-F11
gtgccaaagttcatattaagagagaaagagagagagagatagaagggaaaaaagcatcaaagatcatgaaacccaacttttcctttttatctaagcttttgatactgcaatatctatcagttttatgcatttctcaggaatttgatttcttctactttgttcagcagtggccaggagcatactgtgacacaaagcagagctgctgctatcctaagactgggaaacctgctgctgatttcagcattcatggactctggcctaacttcaaggatggctcatggccctcaaactgtgaccctgacagtgtctttgataaatctcagatctcagacctcattagcaacatggagaaggattggccatccctgagctgcccaagta

SEQ ID NO: 1993 - DNA, 380 bp, Glycine max
  Clone ID: LIB3028-038-Q1-B1-F12
gttcatttctacacatccctagctctgtcgttccgtcgttgacgatggcgtttcgggtgcgatgccctgacctccgctctctctttcttctctctctcttgtccatcgcttccgccaatgtcttcttcgaagagcgtttcgatgacgggtgggaaaatcgatgggttaaatcagattggaaaaaagatgagaacgtggctggggagtggaaccacacctctggtcaatggaatggagacgctaatgacaaaggtattcaaaccagtgaggattacagattctatgctatttcagctgagtaccctgaattcagcaacaagggtaagacactagtctttcaattttctgttaagcacgaacagaagcttgactgtggtggt

SEQ ID NO: 1994 - DNA, 397 bp, Glycine max
  Clone ID: LIB3028-038-Q1-B1-F2
ctctctccagtggccacggacctcgaaacggcgattcacagtgggttgcctcacaaggacgaccacgacccaccccccgccccattctacgaccccgccgagctccgaaagtggtccttcttccgagccctcatcgccgagttcgtcgccaccctcctcttcctctacgtcaccatcctcaccgtcatcggctacaaccaccagacagccaccgccgccgagccctgcagcggcgtcggcgtcctcggcatcgcttgggcctttggcggcatgatttttgtcctcgtctattgcaccgccggcatatcagggggacacataaacccggcggtgacgttcgggttgtttttggcgaggaaggtgtcgctgacaagagctgttgggtacatggtggctc

SEQ ID NO: 1995 - DNA, 396 bp, Glycine max
  Clone ID: LIB3028-038-Q1-B1-F3
gttgaaacacaaagaagaaaaaatgggttcctctttgtggacttgtctgattttgttatcacttgcttctgcttccttcgccgccaacccaagaacaccaattgatgtgccatttggcagaaactatgtgcctacttgggcctttgatcacatcaaatacctcaatggtggttctgagattcagcttcatcttgataagtacactggtactggcttccaatccaaaggatcctacctgtttggtcacttcagcatgtacataaaattggttcctggtgattcagctggcacagtcactgctttctatttatcatccacaaactcagaacatgatgaaatagactttgagttcttgggaaacagaaccgggcaaccttacattttgcaaactaatgt

SEQ ID NO: 1996 - DNA, 398 bp, Glycine max
  Clone ID: LIB3028-038-Q1-B1-F4
gtaaaactcgactttgatttaaatgaaggctttcctgttgatgatgtaagccaaggggagattgctaggcaggaagatcctatcacatcatctgcagttcatgttccttgcctattgccttttcctatttcgtccatctctgggggcttccatgcttcaattacagtggcatctgctgcaaaggggcctgttgttccacctgaaaacccattgcggattaagggggagcttggttggaaagggtcagccgctaccagtgcatttcggccagctgaacctaggaaaaatgctgagacagcatccactactaatgatattgcttctgttgacggcacttctatcaaacaaggtcgccctcccttagattttgacttacatgtggcagatgaaagatgttt

SEQ ID NO: 1997 - DNA, 392 bp, Glycine max
  Clone ID: LIB3028-038-Q1-B1-F7
cagcggaataacgaagcctcctcgttcttcttcttccgccctttctctctctagaaccgtacggtcgtttctttctctctcctcaaccggagacagcgtcgccttcttttctgaatctcgcggtgttgttagttctgcggcggttgtagttccggcggcgatgggacagcaatcgttgatctacagcttcgtcgctcgcggcaccgtgatcctagcggagtacaccgagttcaccggaaacttcaccagcgtggcggcgcagtgcctccagaaactcccttcctccaacaacaagttcacttacaactgcgatggccacaccttcaactacctcgttgataacggattcacttactgtgtggttgctgttgagtctgctggacggcagattc

SEQ ID NO: 1998 - DNA, 390 bp, Glycine max
  Clone ID: LIB3028-038-Q1-B1-F8
aagacaaccatgcctcagtgagtctcttcatggacaagtttggctacaccaagttcaggactccagctattcttgtcaaccctgtgaaccatcattgctttcaaatatcacccaacattgagatagcaaggttgaagattgaccaagctgagtacctcgatagaagattcatggggtccagagagttcttccctaatgacatagggaatatacttaggaacaagctaagtttggggacatgggtggcatatttcaaaggagatattgcttggggtgattttgggtcagatggacaagtaccaaatagttgggctatgcttagtgtatggaatactggggagatattcacgttaaggctatggaaagcacctttttcttgcttggtatgca

SEQ ID NO: 1999 - DNA, 379 bp, Glycine max
  Clone ID: LIB3028-038-Q1-B1-F9
aagcactatagtaaaaaaaggacattcattcatctatggctacccttattgctcccagcaaccactctccccaagaagatgctgaagctctcagaaaggcttttgaaggatggggaactgatgagaacactgtcatagtaattttgggtcatagaactgtgtatcagaggcagcaaatcagaagagtttatgaggaaatttaccaggaggatcttgtgaagcgcctagagtctgagatcaaaggagactttgagaaagccgtgtaccgatggatactggaacctgcagatcgtgatgctgttttggccaatgttgccatcaagagtggcaaaaactacaatgtcattgtggaaattgccactatcctctccccggaaga

SEQ ID NO: 2000 - DNA, 387 bp, Glycine max
  Clone ID: LIB3028-038-Q1-B1-G10
gcaaagatggggaacacggagaagctgatgaaccagatcatggaattgaagttcacgtcgaaatcgctgcagcggcaatcgcgtaagtgcgagaaggaggagaaatcggagaagctgaaggtgaagaaggcgatcgagaaaggcaacatggacggagcgcggatctacgcggagaacgcgatccgtaagcgcacggagcagatgaactacctccggcttgcctcgcgcctggacgccgtcgtggcccgcctcgacacgcaggcgaagatgacgacgatcagcaagtcgatgggcaacatcgtcaaatcgctggagtcgtcgctggccacggggaacctccagaagatgtcggagaacatggactcgttcgagaacagttcgtgaaca

SEQ ID NO: 2001 - DNA, 381 bp, Glycine max
  Clone ID: LIB3028-038-Q1-B1-G11
ctcacgcatttcctcgtttttttcttcccttttctctttctccggcgacgatctcagattccggccactcctctcgccggcgagcccttactcttccctcctccgtcgagccctctccgattcgaatcgttcccagcctcgcaccaccatgaatcccgaatatgattatttgttcaagcttttgctgattggagattctggtgtaggcaagtcatgtcttctcctgaggtttgctgatgattcataccttgacagctatatcagtaccattggagtggactttaaaatccgcactgtggagcaggatgggaagactattaaacttcagatttgggacactgcgggtcaggaacgtttccgaacaatcactagcagctatta

SEQ ID NO: 2002 - DNA, 402 bp, Glycine max
  Clone ID: LIB3028-038-Q1-B1-G3
gagagagaaagagagggagtaagtgggtaaaggaaagaaaactaaagaaacaaacctaacacaacacaaatccttgaaacgacgacggaaatggccgtttcgagctcgcacatgcgtttcacctttgagtgccgctccgatcccgatttttcgccccccccgccgtccttcgacaacctccgccgccgaaacttccgctcctccgcaggatccggcgcggcgtttcacggcatctcctccctcatcctccgcttccctcccaacttccagcgccagctaagcaccaaggcgcgccgcaactgcagcaacatcggcgtcgcgcaaatcgtcgccgcttcgtggtcgaacaacagcgacaactctccggccgccggggctccggcgccgcccgcggccaccgcc

SEQ ID NO: 2003 - DNA, 396 bp, Glycine max
  Clone ID: LIB3028-038-Q1-B1-G4
tgacaattctatacaagcgtaacgtttgcttaggatgagaaaaagcaaccacttgatcggtctcttaaacttcctaacattcctgctgtcgattccgatcctacgaggcgggatatggctgagcagcatggcgaacaacaccgactgcctcaagttcctgcagtggccgctcatcatcatcggcgtcagcatcatggtcgtgtccctgatggggttcgccggcgcgtgttaccgcaacaccttcctcatgcggctctacctcgtcgtcatgttcctggtcattgccgttctgatcgggttcatcatattcgcctacgttgtcaccgacaaggcgtccggtccgaaggtgatgaaccacgcttacctggcgtattatcttgaggactattcggggtg

SEQ ID NO: 2004 - DNA, 391 bp, Glycine max
  Clone ID: LIB3028-038-Q1-B1-G5
tgaaatttccccaaatctgaatgggaacatttgccctaacccatttccctctattcggctcctccagttacgacgaccacggttcccggatcctgcgctcatcggttctccggggaagcgtatgatggattgcggtgttggctccatcgtgtgggtgcgtcggagaaacgggtcgtggtggccgggtcaaatcctcggccccgacgacctctccgcctctcacctcacctcgccccgatccggaacccccgtcaagctcctcggcagagaagacgccagcgtggattggtacaatttggcgaaatccaagcgtgtgaaggcattccggtgtggcgagtttgatgattgtattgaaaacgctgaatccgctcagggagggccgttgaagaaa

SEQ ID NO: 2005 - DNA, 395 bp, Glycine max
  Clone ID: LIB3028-038-Q1-B1-G8
aggacacattctacatatctcatggatcaccaactttgtccatagatgaatccattcaggccaggaagttccttcagtcatggaagaaggacgtgtttcctcaaagaccctcttcaattcttgtcatctctggtcattgggaaaccgcagttcccacggtcaacgtcgttgactccatcaacgagaccatctacgatttctatggcttccccaaacaaatgtaccagcttaaatatcctgcacctggagctccacaattggcaaggagggtgaaggaactactcaagaaatctggtttcagccatgttgatgaagatagaaagcgaggacttgaccatggtgcttgggttcctctctttttgatgtatccagaaactgacatccctgtttgtcag

SEQ ID NO: 2006 - DNA, 303 bp, Glycine max
  Clone ID: LIB3028-038-Q1-B1-G9
gttttctttccttctttggggatcaagctgccaccatgggttgctggtgcatgcatggctctgtcatctgtaagtgtcgtatgctcttctttgcttttgagaagatatagaaaacccaaacttactacaatacttgaaatagttgtaaattaacgagaattgaaacagaataacttgagggtgcaaatgaatttgacccttgtaattccaattttgtgcattttcctttagatccgctgcacccattggggtgcaattgtaattgtagctgccaattcattgtaaatgctcttgtaatttcat

SEQ ID NO: 2007 - DNA, 374 bp, Glycine max
  Clone ID: LIB3028-038-Q1-B1-H10
ctatgatgatcacaaccatgaaagatttcccccaggtgacccaagcaagagggcatttgcctacttcgtacttacaggtggtaggtttgcttatgcctctgtggtccgtctccttgtcctcaagtttgtgctaagcatgtctgccagtaaggatgttcttgctctggcttcacttgaggttgacctctccagcattgagcctggcactacagtgactgttaagtggcgtggaaagcctgtgttcatcaggcgccgaactgaggacgatatcaagcttgcaaatagtgttgatgttggatctcttcgcgatccccagccggatgcagatagagtcaaggacccataatggctcattgttattggggtttgtacac

SEQ ID NO: 2008 - DNA, 216 bp, Glycine max
  Clone ID: LIB3028-038-Q1-B1-H12
gtttgttgtgagctataagctattttatcgtgaggagaatatgaagttgtttgttttctttgttgctgcagtagttttggtagcatggccatgccatggcgcaggctaccaaaggttccctctccgaatgaaaactggctatggtgagcgttcttcggaggtaaaatgcgcaagttttaggcttgctgtggaagcacacaacatccgaccctttaa

SEQ ID NO: 2009 - DNA, 396 bp, Glycine max
  Clone ID: LIB3028-038-Q1-B1-H3
tgctaggcctaatccacaagggtcattccattatgggaagattactcctacaaaagtaattaagttggccaattcagcacctttgatcaatggaaagctccgttatgctgttaacagtgtctcatatgttaaccctgacacccctctcaagcttgctgattacttcaacattcccggagtcttcagtgtgaatttactccaaaactctccctcaaacggtccaggatacataggcacctcagtgttgcaaacttctctccatgattttattgaggttattttccagaacaacgagaacaccatgcaatcttggcatcttgatggttatgatttttgggtcattggtcatggtttcggccagtggacagatgctagcagaaaaacatataatctagt

SEQ ID NO: 2010 - DNA, 393 bp, Glycine max
  Clone ID: LIB3028-038-Q1-B1-H5
tagtacttgacgaagcaaccgcagcagttgatgttagaacagatgcactcatacagaaaacaattcgagaggaattcaaatcttgtacaatgctcattatagctcatcgccttaacaccattattgattgtgatcggattcttttgcttgatggtggtaaggttcttgaatatgatacccctgaggagctgttgtcaaatgaaggtagtgctttctctaagatggtccaaagtacaggagcggcaaatgcccaatatttacgcagcttagcccttggaggggataagtcagaaagagaagagaacgagcatctagatggcaagagaaaatggcttgcttcttctcggtgggctgctgcagcgcaatttgctctcgctgttagtctcacctcat

SEQ ID NO: 2011 - DNA, 378 bp, Glycine max
  Clone ID: LIB3028-038-Q1-B1-H6
gatgtttttagatctaaagaaatcaaactagcattcctcgtcggagctgggctgcaggctttccagcagttcacaggaataaacacagtgatgtactacagccctaccattgtccaaatggctggtttcaactctaatgagttggctcttcttctgtctctcatagttgccgccatgaatgctactggaacaattcttggcatttacctaattgaccatgccggccgcagaatgttagcactttgtagcttacgaggagtgtttgcatctttgatcgtcttgtctgtctcatttttacacgaatcatcatcttcgactggatggcttgcagtgctgggtttagtcatatacattgcatttttctcgccggggatgggg

SEQ ID NO: 2012 - DNA, 388 bp, Glycine max
  Clone ID: LIB3028-038-Q1-B1-H7
gttttctaaatctcattcgtcacctgcaactatttggattgctgatttttgttaataccatatttactgatattggcgcatttctttgagaaagttactaattcctagatagaggcaaaaatgttgggaattttcaaggagaagttggttaaagcacccaaagagctgaacagtcgagcttcgttgaattcatgcactaagcctaagctaagtcacgaaatccttcaggatttcatgtcctgcaattcctccaatgctttctcaatgtgctttgggaatgaagctttgctagcctattccccttcaaacaagccctccattcagcaaaggttgtttagtggtttggataacatatactgtgtcgtcctgggtggcctgcacaacctta

SEQ ID NO: 2013 - DNA, 168 bp, Glycine max
  Clone ID: LIB3028-038-Q1-B1-H8
cccaccttttttttccaatccagctgtatataactgttccgtttgctggtatggaacacgttaacggagtttggaactgttcaaacgggaaaccaaacactcacatgtattgttgattatggatgacatctcttggtaataatgatattccgttgatgttgccgtgcc

SEQ ID NO: 2014 - DNA, 297 bp, Glycine max
  Clone ID: LIB3028-038-Q1-B1-H9
ctttcactcttcttcgtctcaaacctcttcgttccttcgattcattccatttcttccaaaatggccaaagacccagttcgcgttctcgtcactggagccgcagggcaaattggatatgctcttgtccctatgattgctaggggagtgaagctgggtcctgaccaacccgtgattctcacatgctgaaattctcaacacaaatcgttatggggtaaaaggaattggtgagcgcatcctctctaaggtgtgtgctaaacgattggttaggcagatgggtatatgcttatggtgtgattc

SEQ ID NO: 2015 - DNA, 102 bp, Glycine max
  Clone ID: LIB3028-039-Q1-B1-A1
gaagatcgaggagaaaatagagggtgatcatcagcatcacaaggatgaggacacaagtgtccctgttgagaaagttgaggttgttgaaacagcacatgctga

SEQ ID NO: 2016 - DNA, 319 bp, Glycine max
  Clone ID: LIB3028-039-Q1-B1-A10
cgtttttacatcatcactgtgtgaagataatatagatatggaaatctcccatgacatcaagatcaaggatgacaagctaggtggtgtgaaggaagagaagattaaggtagaagttgaactgaagaataaatcagttgagaaagagcatacaaaaagtaaagaagagaagaaacataaagatgaagataaatcaaagaaaaaaaagaaagagaaaggggaagaggaagatgaagagggagagaagaaagaaaaagatgtaaaagataaaggggaggatggtgaagagaaagagaaaaaggagaaggataagaaggagagg

SEQ ID NO: 2017 - DNA, 178 bp, Glycine max
  Clone ID: LIB3028-039-Q1-B1-A11
aattccggaacggtatctgtctgagtaataactttcaatctacaatattaaagcataaatgtctctcaatgatatcataaatgtccctcagtgaggaatataagatctttcttaactaggtaatcaagactgagaagattgtgaagtatttttttaatcgaaggacagttagtgattc

SEQ ID NO: 2018 - DNA, 444 bp, Glycine max
  Clone ID: LIB3028-039-Q1-B1-A12
atgagatgtatttttggcgatccacgggaagcaccacctcctcttgagaagctcagtcctgaagcaactgtttcctttctctggaaaggagatggttcatttgttgaggagcttgttcagtgcataactcctcatgttgaagaaagcatcttgaatgatctcaagtttaaaattcatgctcacgatccttcaaattctggagatattcataaagagcttcgtaaatctctgttatggttgagggatgaagtccgaaatcttccttgtacatataaatgtcggcatgatgctgctgctgacttaatccaaatttacgcttataccaagtacttctttataatacgggattttcaaaccattacatcaacacctgtctatattagtccaacttgacttaagtcccaagtacactaacaagctgggagcagaaattcaagagtatcc

SEQ ID NO: 2019 - DNA, 376 bp, Glycine max
  Clone ID: LIB3028-039-Q1-B1-A2
gtcactgtttcgtcgtctctacttcttctcaaaccagaacagacagcaccgtcccaagcacctttgatctaggttgttagttttttctctctgaatttaaatgaaatggctcagaaaagacccccaaatagcagggggtactacgttaagatgaaactccttcacaaacatggcagacctcatcagcatcatcaggagcagcaagagaggaactgcctctagagatacgacaagtgggttctctgggattctcgttcggtctatttctgtacgtcggagctcaagagcaacacgagggaggagaaggggcacgcgaaagaaggagctcacgtctcgagagccctcatggaatcaaaccacaccacacctcctcaac

SEQ ID NO: 2020 - DNA, 201 bp, Glycine max
  Clone ID: LIB3028-039-Q1-B1-A3
tatgttgcagagacccccgtttgacagacgagcccagcctcggcatgctgccacaattactcttcaagctgtggcgtgcccatgagtttttcactgagatattgaaacggcatggaccaacaggtgagttcactggaccttggtttaccagcatggacgatttggtcacttgtgaccccatcaacgtccaccacatgctga

SEQ ID NO: 2021 - DNA, 448 bp, Glycine max
  Clone ID: LIB3028-039-Q1-B1-A6
ggtagtaagtgagtttcccttataaaattcaatccccaaaacaagtctcacaaaattgagaaaaatttagagagatcaacacacacaaacacaacaacatatggaggtgctaagggtgcaaaccatagcttccaaatccaaagatgctgccatcccagccatgtttgttagggcagagacagagcaaccaggcatcacaaccgttcagggggtgaaccttgaggtgccaattagtgatttgacggacccagatgaagggagagtggtgcatgagattttggaggcaagtagggacgggggcatgttccagagtgtaagccatgagataccaagtgatgttatgagaaagttgcaaagtgttgggaaaatgttctttgagttgccacaagaggaaaaagagttgaatgcgaagcctgctgggtctgattccattgaagggtatggcaca

SEQ ID NO: 2022 - DNA, 476 bp, Glycine max
  unsure (1)..(476): unsure at all n locations
  Clone ID: LIB3028-039-Q1-B1-A7
gggggganggaagccaaagcgaaaccctaaccctaacggagagatggcggagcacttggcatcgatattcgggacggagaaggacagggtgaactgtccgttctacttcaagatcggcgcgtgcaggcacggcgaccggtgctcccggcttcacacgaagcccacaggtagcccaacgttggttctgtcgaacatgtaccagaggcccgacatgaacatgaacatcatcaccaaccccgatcagccccagccccaatctcgcgacgccgatgaggtccaggatcacgtcgacgacttctacgaggatcgcgttggggagcttagcaggtaggggcccagtcagagcttgaagagttgggacaacctcgccgatcatatggttggaaatgtgtacgttcagtttagggaggaagaccatgcagccaacggcctcatgaatctgactgggaggttttattcaggtcgacccatcattg

SEQ ID NO: 2023 - DNA, 197 bp, Glycine max
  Clone ID: LIB3028-039-Q1-B1-A8
tgctgtgaaccaatgttcctgcaattcaaggtatagatgctctcataatcctcacaagtgctgttccagagataaaacctgggtttgatcctaccaaaggacaaagaccagagttctattttgatgatggtgcatatcctgagcaggttgactggattgggcagaaaaatcaaatagatgccgctaaggctgctgga

SEQ ID NO: 2024 - DNA, 425 bp, Glycine max
  unsure (1)..(425): unsure at all n locations
  Clone ID: LIB3028-039-Q1-B1-B1
aacaangatgagacgttgagaaaccgcactgggccaactaaaatgccttacactctgctctatccttctagtgaggagggattgactttcagaggaattcccaacagtatctctatctaagggctctctcattgaggttgctgtactactctgcctgtttttcaataatgtgaaataggaggaatatgattccttcatctacctacgtatggtcaagttacatttagggtggttgaatgttctcgtgtttgctgtagtctgtttttagaacagattgaggagaaagcaatagaggggatcacgcatgtttcaacgagtgatagctggcatgacaaagtgcaaactagaataaattatcatcctatctaaacgatttccattacaaaagaagagaaggaaggggggaggggggaggagggggagcg

SEQ ID NO: 2025 - DNA, 502 bp, Glycine max
  Clone ID: LIB3028-039-Q1-B1-B10
caccaaatcaaagacacctgagccattcaattcccctcctttattgctttcaagtttcaacactaattttattatctgaaaaaatggctttcaaagtttcgtttttccttgcacttgttctagtttccaatatcctcctccttgatacaacagctgctggacgcagcattggcgaaaactccaactcagaggaaaagaaagagcctgagttcttgttcaagcatgaaggtggggtgtatattccagggattggacctgttggatttccacataaatttcatctcacacctcaaaatccattacctggtggcaatggaaatggaggagcaggaaccgcaacaggatcaggatcaccaccaggtagcagttatgttcctggtggtgatgacacttttgtcccaaaccctggttatgaggttcccattcccggcagtggtggaagtgttccagcaccagctgcaccatgagttaactcaagcatgattaatgtgatgcatggtag

SEQ ID NO: 2026 - DNA, 379 bp, Glycine max
  Clone ID: LIB3028-039-Q1-B1-B2
tgacttgacaggactgcagaatggaattctgaagcgagggagagagattttcctcactgggtgcgacctccgaactcccactggaggttctggacattcacgtcttttgccaacagagtatcttgtgattctattggatgaagtaatggtcaaagattttttaattttaaatttgtccactgtgaagtttaattgggctaacaagaggagtgggtgagtaggctcaacaaacagagatgcctgttaggaagtgaagcccaatgagtcaatttaagtagagggacctcggagtatctgtttgcggagcacggcgatcagcgtgtggtagattctctcgtttcatctttctttattgcataacatttatcacgaaattttt

SEQ ID NO: 2027 - DNA, 210 bp, Glycine max
  Clone ID: LIB3028-039-Q1-B1-B3
atctgttccgtgttgtagctagctcctcgaaaatgctggcacgcctcgccgcgagtcgcttcaacgagatccgtcagattttccgtcagccttctagggctttctcaaccgctctgaactaccaccttgacacaccggacaacaaccctaaacttccatgggaattcaccgaggccaatcaagcaaaggttaaggagattttgtctcact

SEQ ID NO: 2028 - DNA, 192 bp, Glycine max
  Clone ID: LIB3028-039-Q1-B1-B4
ctctgatcttccaacaccttattcctcagagaagagacaaaatggatcaccatttcactgcagagaccgctcgcattattcgtcgcctcatcacatccctctcctcccttgccaccgccaccaacatcaatatcctccagcaagacctccaatccgacatcaccgaattctgcaagaaaaccaccaacgccc

SEQ ID NO: 2029 - DNA, 459 bp, Glycine max
  Clone ID: LIB3028-039-Q1-B1-B5
ggcagcagcgtccaggtgcatccccttcctccgtcaaacccacgcccatttcattcttctcaattcccaattccaaattagggttagggttttcacaatctcaatgaccttctcttcttccttcaccttacaatccctattccactaccgctactactactccctttgtcttcgtcgttgtcgttcgtaaggattaatcaattaacctatcgaatcgtttcagtatcgtcgtcttcgttgtcttccatgggcctcgctcagccgcagtcggaggtgtaggtcggagtttcttcctcgcacgcgtgggggggctcatggctccgacgcggcaggtcggcgtagggctgcatgagaggggaggacggagaatggcaacttagatgttgaatcggacgacgatgaagacaaagaagtcaaggagtttcgcattcaaggccactcaatgtgcctcaagaggcg

SEQ ID NO: 2030 - DNA, 576 bp, Glycine max
  Clone ID: LIB3028-039-Q1-B1-B7
gttctcccacaccacacccatgacactcctcctgctccttattctcctctttcacgcggcggaagccaagggacagtggcagctcctccacaaaaacatcggcattgtcgccatgcacatgcagcttctccacaacgaccgcgtcatcatcttcgaccgcaccgacttcggactctccaacctaaccctccccgacggaagatgccgcaacaacccaaacgagttggtcgtcaaacgcgactgcaccgcgcactccatcgaatacgacgtcgcagccaagacattccgcgctctctttgtccaagccaatgtctggtgctcctccggttcggtctctcgcgacggaacattagtccaaaccggtggcttcaacgacggctaccgtgcggtcagaaccttcaccccgtgccgctcgtgcgactgggcagaagttcagcatggactcgcggggcagagatggtacgccaccaatcacatcttgccagatggacgtcaaataattatcggaggaagaagacaattcaactacgagttttacccaagacacaaggcaagaatacttagagtttacctttt

SEQ ID NO: 2031 - DNA, 429 bp, Glycine max
  Clone ID: LIB3028-039-Q1-B1-B9
gctagtttatcgtgaggagaatatgaagttgtttgttttctttgttgctgcagtagttttggtagcatggccatgccatggcgcaggctaccaaaggttccctctccgaatgaaaactggctatggtgagcgttcttcggaggtaaaatgcgcaagttttaggcttgctgtggaagcacacaacatccgagcctttaaaaccattcctgaagagtgcgttgaaccaacaaaggactacattaatggcgaacaatttagatcagactctaaaacagttaaccaacaagctttcttttatgctagtgaacgcgaagtccatcacaacgacatatttatattcggcatagataacaccgtactctctaatatcccatactatgaaaaacatggatatggggtggaggaatttaatggaaccttatatgatga

SEQ ID NO: 2032 - DNA, 517 bp, Glycine max
  Clone ID: LIB3028-039-Q1-B1-C3
cgctatcctattccgcgttctctcatccatcatgaaatgaggaaagtccaagaccgaatctaagagagccgatgccaaacttgctgtgaataagaacggcgccgccaccaagactaggaaacccgccggaaaggggaaggcagcgaaagatcctaacaagccaaagaggcctccaagtgctttcttcgttttcatggaggaattcaggaaggtgttcaacaaggaacgtcccgacaacaaagcagtgtctgctgtgggcaaaggtggctgggcaagatgggagacgatgtctggaggctggaaaagcgccttatgtgggaaagtctgagaggagggaagtggagtgcgagaagaacatgagagcttataacaagaaacaggcggaaggtcctactggtggggatgaagaaaaatcggagaagtctgtatctgaggtgaatggataggatggttacgaggaagggcattgggaggaggaggatgacgaataaagaatgggctgatgataatagcattt

SEQ ID NO: 2033 - DNA, 251 bp, Glycine max
  unsure (1)..(251): unsure at all n locations
  Clone ID: LIB3028-039-Q1-B1-C4
aagtccatgataaagaancgatacatgcacctgacggaggagtttctgaaagagaacccgaacatgtgcgagtacatggcgccatcgctggacgtgagacaagacgtagtggtgatggaggtgccgaagctgggaaaacaagccgcaacgaaagcgattaaggagtggggtcaaccaaagtcaaagatcacacaccttgtgttctgcaccagttcaggcgtgggcatggcccgggcaggttaccagctcac

SEQ ID NO: 2034 - DNA, 186 bp, Glycine max
  Clone ID: LIB3028-039-Q1-B1-C5
ggaaggattttaagcttgagaggtctagtatgtgttatatacataacaatatataataaaaacttgcatgttaccattatatgtagctttgtgattgtgtgtttctatatcagtgtagccatcttgttacttaaatatttttcttatgttagactgtgatataaataagatttgaatttctcttct

SEQ ID NO: 2035 - DNA, 481 bp, Glycine max
  unsure (1)..(481): unsure at all n locations
  Clone ID: LIB3028-039-Q1-B1-C7
ggcggggagggtggnaccatggctactgctgaacattttatggcaacagatattgaatgggatccaactggaagatatgttgcaactgcggtgacttcagttcatgaaatggagaatggtttcaatatatggtctttcaatggcaagcatctatatcggattctgaaggatcacttctttcagttcttatggagaccaaggccaccatctttcttgactccggagaaagaggaagagattgcaaagaacttgaagaaatacagcaggaaatacgaggcagaagatcaagatgtttccttgctgctgagtgaacaggagcgtgagaagcgcaggatgttgaaagaagagtgggacaagtgggttaatgaatggaagcagatccacgaagaagagagtttacagaggcaaaagctcagggatggagaggctagcgatgaagaggaggaatacgaggcaaaggacatcgaggtggaggaagtga

SEQ ID NO: 2036 - DNA, 433 bp, Glycine max
  Clone ID: LIB3028-039-Q1-B1-C8
aaagcagaacgtttgtttcacatgtaaggcacatgctacggtggtcaagtgtgtaaacttgtgtatggtatacaaatttttttaaccctcagattactcttttggtacatcatactatcttgaacttctcacacaatatccttcctctatacaaaggaaaacgttcatgaacccatttagagaccttggattgcgggaaagccttcgtcggagtcgggagaaactaccctctcgctttcgtccacaatctcaagtctccgtcgcggaaaccaccgttgacgccatcagcggcgtcaccagcacggagcgtgagcgcgccatcatcgggtttatgccaccatcgccgcctcattcctccgccaatatcttcttcgcctcgcactcctgctccggcgtggcgccgacgccgtcgtgtctactgctcctctgtgac

SEQ ID NO: 2037 - DNA, 506 bp, Glycine max
  Clone ID: LIB3028-039-Q1-B1-C9
cgacctcgcatcgcaccttcaacttaacctattccacttgtaatcgtaaacgctttgctagaagaagagacaaagtgtgtctgtgtgtgtgagagagagagcaatggctggctcgtgggcacgccgttctctgattgttctagccatcatttccttcggatgtctatttgcgatttccattgctaaggaggaagccaccaagttagggacggtcatcggcattgatcttggaacaacctattcatgtgtcggtgtttacaagaatggccatgttgaaatcatagccaacgaccaaggtaaccgtatcaccccatcgtgggttgctttcaccgacagtgagagactcattggggaagctgccaagaatcaggcagctgtcaacccagaaaggaccatctttgatgtcaagagacttatcggaagaaagttcgaagataaggaagttcaaaaagacatgaagcttgttccttataagattgtcaacaaggatggaaaaacttacattc

SEQ ID NO: 2038 - DNA, 340 bp, Glycine max
  Clone ID: LIB3028-039-Q1-B1-D10
atcttccttgtcactgcccgtgtgtcgccgccatggccaccgtcaccacccaagcctccgccgcaattttccggccatgtacctcgaaatcgaggtttttgaccggctcttccggtaaacttaaccgggaagtgactatgcggccaatggggtgccctccttctgcctctttcaaggttgaagccaagaagggagagtggttacctggcttgggctccccaacttacctcaatgggactcttcctggtgacaatgggttttaccctccgggggtatacgacggaccccagagaacttgaggtggtacgttcaaacccgagcttgttaaagggaccttggg

SEQ ID NO: 2039 - DNA, 212 bp, Glycine max
  Clone ID: LIB3028-039-Q1-B1-D2
gtcgcttcgatcgggagccagatttatgagaagtgcttcactcgtaccacgtcgcatagtcccaggcaggagcgctcccatagaggacccggagaaaaaaaatacttataatactattcagaataagtattagtaatttttaacatggaaacagaacaaactaggcggccatccagccacaggattgaacagtagtgccacattagggaaga

SEQ ID NO: 2040 - DNA, 169 bp, Glycine max
  Clone ID: LIB3028-039-Q1-B1-D3
gtggttatcatcttcgtcgtcctctttcagagatctcttcgttctctacgccgcacgccgaaaccatgggcgggaaaagagagggtcctgcgatcagaatcgatctcggaaccacctactcttgcgtcggtgtgtggcaacatgaccgcgttgaaatcatcgccaagga

SEQ ID NO: 2041 - DNA, 412 bp, Glycine max
  Clone ID: LIB3028-039-Q1-B1-D4
ttttctagttccaccaaaccagagcaaaccaaaatggcagcagcctcagcctcatgcatgatatcaacaccagccttatctccaaccatccaaaagcaccatcatttgaagccatccaacgtgtgcttccaaggtcttagacccctcgcaaggttcaccaaagcctcatcaaccaaagtgagcaccaccaccaaaagggttattccaaagggtggtgttagagctgaactcaactcaggccttgtgataagcctcagcactgggctctcgctcttctggggaaggtttgtgttcttcagcttccagagggagaacgtggcaaagcaagtgcctgagcagaacggcctcacacactttgaggctggtgatacacgtgccaaggagtatgtcagcctcgtcaaatccaatgacc

SEQ ID NO: 2042 - DNA, 525 bp, Glycine max
  Clone ID: LIB3028-039-Q1-B1-D6
ggagcagtttcataccgagaccttggacaatgttcagaaactcactggcatcacccttgacattgtgagtggtttgtccaacatcctcgagaagttcgggttgaagtttaatcttaaacccgcgtctcgccgtcttctcggcaaggatgggttgcccacttggttctctgctgctgatcgtaagcttttgggtcgtggatggagatcacgtgtcaagcccaatgttgtggttgcccaggatggcactggtcagttcaaaaccgttgccgatgctattgcgtcctacccaaaggataacaaacgtagatacattatctacgttaaggctggtgtctatgacgagtacatcaccgttcccaagagttcaaagaacattctcatgtacggtgatggccctgctaagaccatcatcaccggtcgcaagaacttcgtcgatggtgtcaagaacatgcaaactggcactttcggcaacactgcagaaaggttcattgccaaggcaatgacattccagaacactgccggtgc

SEQ ID NO: 2043 - DNA, 513 bp, Glycine max
  Clone ID: LIB3028-039-Q1-B1-D8
gaatatctatatccatatttaccatagtatttgcagcccttgttgagatgaaaagattgaaaacagctcaagagtctggtgttgttgatgaacctaatgcaactgttccaatgagtatatggtggttgattccccaatatttcttgttcggagtctctgaagtttttaccatggttggtctgcaggaatttttctatgaccaggtcccaaatgaactaagaagcatggggtcgtgctctctacttgagcatctttggagttgggagctttataagtggcgttctcagttctgtgatagagaaactgtctggcaaagatggacaagacagttggtttgccaataatctgaataaggcgcatgttgattacttttattggctacttgctggactcaatgtaataggattggccttgttcatttgctctgctaaatcctacatttacaatcaccagggaatcagacgagaattgtgaattgtgcggttctgtcaattttagctttactgtatggga

SEQ ID NO: 2044 - DNA, 432 bp, Glycine max
  Clone ID: LIB3028-039-Q1-B1-E1
cttgagaaacattattcccattgctatatattatggctagcatgaaggttacatgggtggttgtgatcatgtgcatggccgtggtgggtgcaccgatgatggcgcaagccatgacatgcaatgatgtgacagtgaacatggcacagtgcctatcctacctgatgcagggaggaacaccttcaacactttgctgcagcggagtcaagaacattcttggctctgctgtcaccaccgttgacaaacaggctgtgtgcagctgtctcaaggcggatgctggcagggtaaaacatcaatgaccagtgatgctcacgcactccctggtttctgcaaggtcaatgtcccttacaagatcagccgctccactaactgtgcaagcatcaggttctgaacaagccatggacagatttgctcatttctgcagcgggatactga

SEQ ID NO: 2045 - DNA, 481 bp, Glycine max
  Clone ID: LIB3028-039-Q1-B1-E10
tgttggtttacaagagcaggtttttgttcggaaggtgattgagctgcatgacaagtacctggcatatgtgaatgattgtttccaaaatcatacacttttccacaaggctcttaaggaggcttttgagatcttttgcaacaagggtgttgctggaagctcaagtgcagaactgcttgccactttctgtgacaatattcttaagaaaggaggaagtgaaaaattgagtgatgaagcaattgaagaaactcttgaaaaggttgtcaagttgcttgcctatattagcgacaaagatttgtttgctgaattttataggaagaagcttgctcgaaggctcctttttgacaagagtgccaatgatgatcatgagagaagtattttgacaaaactgaagcaacaatgtggtggtcaatttacctcgaagatggaaggaatggttacagatttgacattgggaaaggagaatcaaacaagctttgaggag

SEQ ID NO: 2046 - DNA, 460 bp, Glycine max
  Clone ID: LIB3028-039-Q1-B1-E12
attttcctcatttccctccgaacatatcatatcacacacccatatagcccaaaagccacaacctgcgaaatcaaaaaagaaaaagaaagagaaaacaacaacaacaacaacaatatcgtattccattccataatgttgtgtaaactggttccggtgccgcgcaagaaaaaacccggtttgaacccggtttaccttaacgtctacgacctaaccccaattaacggttacgcttattggcttggcctcggagtttaccattctggtgttcaagttcatggggttgaatatggatttggagcaaacgaacgcgacacgactgggatttttgaagtggagcctagacactgccctggattcaccttcaggaaatcaattttcattggggtcaacggataatggggccgaaaggatgttcgcgcgttcaaggcgaagatgggtgaaaaagattcggggaaaacct

SEQ ID NO: 2047 - DNA, 412 bp, Glycine max
  Clone ID: LIB3028-039-Q1-B1-E2
acaatcaatcaccgcttcctctctcactttccctaacttcgaagtcaccaagttcttatatttcaagacaaaaggaatggtgggtttatctcttggagaaacacatttcatccaaggtggcattgctcaagatcttcgttgtgatggtagaaagagattgacatatcgaccaatctctgttgaaactggggtgattccccagaccaatggttcagcaagagtcaggagggggtggcacagatgtcagtgggagcgtgtaagggtgaacttgggagggcgcaagcttggtgcaacctgagaaaggagaagtcgctagatatgtggagtgcagttcaacagcagagccagcttttgagggtagagggggtgatgagttggaagcagaactgtcaaatggtcgtcaacgctgtct

SEQ ID NO: 2048 - DNA, 360 bp, Glycine max
  Clone ID: LIB3028-039-Q1-B1-E3
tctgcgcaaacttaaaaagctgtttctttttctcgatcctactgcttctctttttagcaactgttgctctgctctacgttaaggacaagcaagttgaagcaattcctctggatgatgccactcaaccctcttgtttctttcagcttttcggtgctctgaaagagctcaagagaccgatgtggatgctgatgctggtcacagctgtgaactgggtggggtggtttccttacttccttttcgacactgactggatgggtcgtgaggtctacggtggaactgctggggaagacgcgtaagcgaagggagtgcgcgtgggatcattagggctgatggtaaacgccgtcgtgttgggcttcatgt

SEQ ID NO: 2049 - DNA, 486 bp, Glycine max
  Clone ID: LIB3028-039-Q1-B1-E4
tgcttcggagccaactcaacaacaacgccgtgcctaatccttaagaataacgaattacaacaaccaaccatgttgcattgtctcaacacttcctgttcggacatcacagtcttggaaagacaacgggaagcaaccatcaagtgccagaaccaccaaccaccctacttaacggactttaacgccgtcttcccttcgtcttcttcgtcttcttcttcttcctcgtcttcttctcatagtcagggcttgctcatgatgtgctcggattcctcgctcggccaggtcctaactcactccgtcaaacccgatccgggcgtctggcccgaattcgggttttctacccgccatttcgagaacttgtagcagagacggagacttggtttcgcccaaggaaaacatggccagtgggaaagaaaatgctaagaagagaaagcctcagaactccaaggttgttgcggagattgataataacaaggacaaggacaagag

SEQ ID NO: 2050 - DNA, 521 bp, Glycine max
  Clone ID: LIB3028-039-Q1-B1-E5
aagatgaaaatgaaagtgcttgttttgtttgttgctacagttttggtagcatatgaatgccatggctcagactaccagaagttccctctccaaatgaaaactgggtttggtgggcaatacagcaatgaggtggcatgtgccagttggaggcttggcgtggaagcaaacaacgtagtcaagtggcaaactgttcctgcagcttgcggagagtacatagctgactacgttctaggagaccaatatagatcagattccaaaacagttaaccaacaagcttatttctatgctaaatccctcaaactcaccaacaaagatgtcgttgtcttggacgttgacgacactactctctctaatctccagtattttgctaaccatggatttggtgtggaaccacacaatacgacggcgtttaagaactgggttcttgatggcgaggcattcgcactgccagagactcttaaaatgtacaacaaactgttggctctcgggatcaagattgtattcttatcagaaagacactg

SEQ ID NO: 2051 - DNA, 420 bp, Glycine max
  Clone ID: LIB3028-039-Q1-B1-E7
tgttcaagattaggttgccctgtctgttctctcacacactcactctccttctctctcctattgcggctaaggtttgggtttttcactttcagcctctccattccttcaaccttcttcttctctttgatctctgatggagacgttccgtgtttagtagcaagggttagttgaggccttgtgtttggaaacgtacggtgtcgttttggagttgggaaaacagataattctgagagatgggaaccaggaacccttttgatttggtgggtgacgacgctgaggacgcttctcagctcatcgccgccgaacagctcagagcggcggctgctgctgcgggtgccaccgccgctcccaagaaggcgccggctcagcagattaagccggctcagctccctagcaagcctcttcctccggctcaagctg

SEQ ID NO: 2052 - DNA, 427 bp, Glycine max
  Clone ID: LIB3028-039-Q1-B1-E8
gcaggtcacctatgatttttgtccttcgtagaaggacactttctcatagccacgatcgctctctctctctctctctctctcgcttgcgttgcatttccatttccagtttccacccatggctgctctcacttctctctctttctcagcagtgactcattgctcagaaagaaaagtaaccctttcctccactcgttttctcgcgtcctcttcagagggctttgggttccggagggaggtcgcggtagcagtaggttggggttcggggcttggaattcggcggcgaggagggatggtcaatgcatgtgtggtgcgacgggggtgcgtcccggggggtctgaagaagagttaaatttcctcaaggcatataagcgaccaatccctagtatctagagtacgggtacggggagggctaatagtggagcaacat

SEQ ID NO: 2053 - DNA, 477 bp, Glycine max
  Clone ID: LIB3028-039-Q1-B1-F1
ttttgggacaagagtttatcagagttgcaatgaacattgatcctgagtgtaaaatgataaaaaaggaagaagggcgaattgagaaatgggcactgaagagggcctttgatgatgaagaacatccttatctgccaaagcacattttatataggcagaaagaacaattcagtgatggagttggctatggttggattgatggccttaaagctcatgctgagaaacatgtaactgacagaatgatgctcaatgctgccaacattttccccttcaacactccaaccaccagagaggcaataacactatagaatgatatttgagagggtcttccctcagaactcaagcaaggctcactgttcctggaggaccaagtgttgcatgtagcacagcaaaagctgttgagtgggatgctgcttgggctaacaaccttgatccatcaggtagagcagcacttggagtgcatgcatcagcttaaggaaa

SEQ ID NO: 2054 - DNA, 366 bp, Glycine max
  Clone ID: LIB3028-039-Q1-B1-F10
aaagctccttggaaagtacctgattatttgtcatttccatttggagacatcgttcccatgtttgctggtgaaacccttgaatgggaggcattgccttgttgatttgctgtgtctatttgaaagtttggtatccttcagcttaaattattgattgctgagatgagaatttatgcagcgttcaagaactagagtcaagcaattttgttctaattttatcagtcagttctgcatttattttgcagattgttctcatttctatttcctaggtcaggtgaatttaagtatgaaccagaacacccactgtgactaataaattatgggaatttatatagtattcagagctaaggtaattttgtaattcaaaat

SEQ ID NO: 2055 - DNA, 234 bp, Glycine max
  Clone ID: LIB3028-039-Q1-B1-F12
gtattcagtctgttgatagtctgtcatgcactcccactggagtggaaacacctgatgttattgacctccggaagcaacagatgaaagagcctgaaaggcctctttatcaagtactcgaagagaatgaagaaaaaattgctcctgaaactttgcttggaaccactcacacttatgttgttggcactggcacacaggacaagtcaagtgctaaaagggttgatctgcttataggtc

SEQ ID NO: 2056 - DNA, 512 bp, Glycine max
  unsure (1)..(512): unsure at all n locations
  Clone ID: LIB3028-039-Q1-B1-F2
gaatatcctatcgagggaatcatatttgcttcggaagatatgctcttcaagcacttgagccagcttggataacatctagacaaatagaagcgggacggcgggcaatgtcacgaaatgttcgccgaggtggacaaatatgggtacgcatatttccagacaaaccggttacagtaagacctactgaaacacgtatgggttcaggaaaaggttctcccgaatattgggtagctgtcgttaaacctgggaaaatactttatgaaatgggtggggtaccagaagatatagcaagaaaggctatttcaatagcatcatccaaaatgcctatacgaactcaattcattatttcagggtaataaattagaaccaaaggaaagaggtctttaagatgaaaacaaaaaatgcaaatgtaggttcctttttttgaacacanaatatttttacttccattttttgactgaaagaataaaagaatgatatgattcaacctcaaactcatttgaatgtagctgata

SEQ ID NO: 2057 - DNA, 461 bp, Glycine max
  Clone ID: LIB3028-039-Q1-B1-F3
agcttttgttactttgtgacaaatggagggtccttagttctgtttctctttcttctctctgtgctttcaagcaagttctcaaatcactcgtcgtcgtcaggcttctgatctgctaattctcaaggtattcaaaattgggtggttttcgattgaactgtgatgtccaagccactgctaggcatagcggaagaggaaggtcaaagcaatgtcactttgttggtttcgtcgtcaggcagcatggaaagtgtgtgcctgaatagctcaagggtgaaaggagggaactacatggggttatctgattggtcatctgtagagaaggtccgcggcgtccttctcaggtggggactaagagcaatctgaacctcaaggctactgagctcagactggggcttccggggtcgcaatctcccgaacgagattcagatctttgcttgagaagttcgattcagtttgatgaaaag

SEQ ID NO: 2058 - DNA, 426 bp, Glycine max
  Clone ID: LIB3028-039-Q1-B1-F6
tattaactcctaccccaagcatcaccagggtagatatgttatctacgttaaggctggtagctatgatgagtacatcaccgttgacaacaagaagcccaatcttctcatctacggtgatggcccctcaaagaccatcatcactggccgcaagaactttcacgagggtaccaagacaatgagaaccgccaccttctcgactgttgctgaagatttcatgggcaagtcaattgcattcgagaacaccgctggtgcagaagggcaccaggcagtggcactccgcagtgaaggtgatggttcagtgttctttgatgtgccgatgcgtggttaccaggaggcattgtatgcccacgcccatcgtcagttctaccgcaactgcgaaatctctggaacaattgacttcagcttcggctactccaccaccttgat

SEQ ID NO: 2059 - DNA, 465 bp, Glycine max
  Clone ID: LIB3028-039-Q1-B1-F7
aaaagcgtgaaaacgcagcatctcaaacacgcgattccgaagcttttctgcgatcaatggagttcgacccgatcccaatcggttcgtgctccaaagaacaccagatgatctataaggagtggttcaattacgctgattcagataacgatggccgcattacggggagtgatgccaccaagtttttcgccatgtccaatttgtcccgcgaagatcttaggcaggtgtgggctagtgcagattcagggcgacggagataacgtgggttcagtgaattgagcagtgctaggcggggagtgtcggtggggcaatctgggcagtggagagcagcggaatgggctgacggagggatgttaattttacaaatgggaaacctccctcaatggagggtttggacgtattactagttaagagggagcaggggcaaaaagaggttgatgcaaatgggagttctcaattgcagccatc

SEQ ID NO: 2060 - DNA, 186 bp, Glycine max
  Clone ID: LIB3028-039-Q1-B1-F8
atccccaacatggctcaagtgggttctctatcttccgaaatggagacactgaatcatgtcctagccctagtggaggcattccgagcatttgacgcggacaacgatggccgaatcacgcaggcagagctaggaggaatcttggggtcactcgggtacaaccctagcgagcaagaagttagggcaatg

SEQ ID NO: 2061 - DNA, 383 bp, Glycine max
  Clone ID: LIB3028-039-Q1-B1-G1
tttctaaattagttcggatacatctccggaggcagggcaatcgactccgccaccgcatatagcagaaagtcgagaactagcgaccagccggtgcgaacgcatcttgggaacctatgcttacaggcaatgctccgccgccatgaacccgtcggagcttccggaagaggatgtatggggcgccggagatgacgccggtcaacgcgagtgggatccacacgtcgccgccatgagcaacgggaggggaagtccggagccggattccgcgtgagacggatgtgcaccagcgcgtgggttcggctgtctctggcttttgaagcgtccgagagtggggcctcgccggagatcgtgcaccagtttcgcgcgcgtgaagagatggcgtcgac

SEQ ID NO: 2062 - DNA, 280 bp, Glycine max
  Clone ID: LIB3028-039-Q1-B1-G11
aacagagtcatgcttatgattcaaactttgatgatggcatggatttctggtatgacatattcaccaggaccaatgattcaatagaattgtgagagttctgaatttttcatgtgacacgttgaatgagggtattattaaatttggcagatagagtagtttaaatgaaatggtatagcttgaatttgaccgttacaactaaagggtacgataatttctggtgtggggacagcattatcaccagctggacagatctagagggatcgattgacaaagaaaccag

SEQ ID NO: 2063 - DNA, 375 bp, Glycine max
  Clone ID: LIB3028-039-Q1-B1-G12
agcagaacttggacataaccttgaggctctcgacgacgcctggaacgacctcgtgctcgagaccggagtactctccctcggtgttctcgcgaatgacgacgatgtcgacgttgtggtggcgggtgggcaagccgggcaagttgaagcaattgacgagggaagcgtagagatcgaggtcctttctgagctgaacgttgagggagctcacacccccacccaccggagtcctcaaaccacccttcaagcacaccttgttcttccgtatcgaatccagcacctcctccggcacacgcctcatgtccccgtgcacatcgtacttctcgaagtatatgggggcgtgcatcgcctccatcacctgctccaccgcatgagtca

SEQ ID NO: 2064 - DNA, 205 bp, Glycine max
  Clone ID: LIB3028-039-Q1-B1-G3
cactcatcaaacttcggcgctctctctttccgaccagaatgtcgatcaacagcgaatctacgccgccagcggtggtcggaagaatcgggccttacaccgtcttcatgacgccgccgtctacacccaaacccgccggacgacaacgccgttaccaccaccaagatcgcacctccgccgcctcagattcccaaagccgttccttccc

SEQ ID NO: 2065 - DNA, 211 bp, Glycine max
  Clone ID: LIB3028-039-Q1-B1-G5
attctcttcattccatgggtttgcccaaccagcagaccgtggattaccctagtttcaagctcggtatcgtcggcgatggtggcacaggaaagacaacctttgtgaaaaggcatctcaccggagaattcgagaagaaatatgagccaaccatcggtgtggaggttcacccattggattttttcacaaactgtggagagattcgagtttactg

SEQ ID NO: 2066 - DNA, 201 bp, Glycine max
  Clone ID: LIB3028-039-Q1-B1-G6
cgacgggagaatggttgatggtcgcgaaataacggtccagtttgcgaaatatgggcctaatgctgaaacgattcacaaaggaaggattattgaaacatccccaagatcaaggcgatcaaggagccgtagcccaaggaaaagggatcgtgatgattacagagacagagattataggagaagaagtcgcagcagaagttatga

SEQ ID NO: 2067 - DNA, 204 bp, Glycine max
  Clone ID: LIB3028-039-Q1-B1-G7
acctgcggccaggtagtcctattattccttatccttctcgaccaatccacttcggcgagtgcttctaatagtaggtttatagaagtcttttcaaaattaaagaattcttttaatcctaagtctgaagaactaaaatcagaagatataaaggagctcccgagcgtcgaatttttgaagaagaaacatgacggagttaaggacttc

SEQ ID NO: 2068 - DNA, 51 bp, Glycine max
  Clone ID: LIB3028-039-Q1-B1-G8
gattttcctgttaagttttgactcaagaataataaagactcttcgctatgg

SEQ ID NO: 2069 - DNA, 382 bp, Glycine max
  Clone ID: LIB3028-039-Q1-B1-G9
atctcatgatccagaagtgagaaagggaccatggatcatggaagaagacttgatcttgataaactatattgcaaatcacggtgaaggtgtttggaattctttagccaaagcttctggtcttaaacgaacgggaaagagttgtcgactccgttggctaaactaccttcgtcctgatgttagaagaggaaacattacacccgaagaacagcttttgatcatagaacttcatgcaaagtggggcaataggtggtccaaaattgcaaagcatcttccaggaagaactgacaatgagattaagaacttctggagaactaggattcagaagcacattaagcaagctgagacttcacaacaacatggtaattcatccagagaatagtaa

SEQ ID NO: 2070 - DNA, 461 bp, Glycine max
  Clone ID: LIB3028-039-Q1-B1-H1
aaagatgaagctcgagttcgcaaatgtgctacttctgtgccttgtccttagctcttctttcttgggaatctcaatggctggttctcctttctgtgactcaaagtgcgcgcagaggtgtgccaaagctggggttcaggacagatgcttgaggttttgcgggatctgctgcgagaagtgcaactgtgtcccatctgggacttacgggaacaaggacgagtgcccttgctacagggacatgaagaactccaagggcaagggcaaatggccttgaagaatatctaagttcatcatcacactccattccaatagactaacttgtagtgtatcgtcagccttccgtttcagagtattgcattatgccacggatctatgtacctacccttcaacttaagtattccgtctagttaattagcatagctacccttcaacttatggtgttcgacctagtttattagcttaat

SEQ ID NO: 2071 - DNA, 490 bp, Glycine max
  Clone ID: LIB3028-039-Q1-B1-H10
ctcgagccgaatcggctcgagcggctcgagcgttcacataccacgtagaaacagttcaatcattcttagccctaagcagacttcacatactcatccacttagtggcagtgttgtctctctgttactaccgcatcacccacttcttcctccaacctccaacagcgccatggcttctcatgactgctgcggagcttcttctctcgctgctctggttcttcaaccaagccttccggtggcgaccggtgtcgcggagcgtcatgactgagaagcttccgagtgaggagaagctgccggggcttgacatcttcgtgtgcacgctcgatcccgagaaggagcccaccgtggaggtcattggcaccatcatctccgccgtgtccaaggattaaccctccgacaagctttccgtctatctctccgacgacggcgggtgcgacgtgactctctatgggatccgagaggctgctgagttcgccaaaggattgggttccgt

SEQ ID NO: 2072 - DNA, 511 bp, Glycine max
  Clone ID: LIB3028-039-Q1-B1-H2
tagctagccaaccagagtaagatctaaagatatttcttatatatcctatggtccgagagtgcccttgttctgcgccaaccctttcttccacatcttgcgtttcaacctcttcctctcttgagtccccttatcatcaaatacccttcttcttcaacctccaccaaattcaacccccacataacaaatctcctcccatcccatttttcagcaccaaagtttgaaacttttctcaattgggttgtagagagtttgactcagcaatttttagttttttagtttgagtttctctaaccaagtagaagtgcagtaagtaaatgtccaacatcgtcgtggtgttgatgtttgagattcatgtatccgattctcagtgaaatcttcttttccgggtgtatgatcaattccactgttaggcgcaggacccatttagttcaatccttctcagttgccttcctcgattggttgtactacgtttcatgaattctaacccttccttaacttaataatcatctat

SEQ ID NO: 2073 - DNA, 463 bp, Glycine max
  Clone ID: LIB3028-039-Q1-B1-H3
atggagatcatttacagggctaggtgcttctgaaatttgcaaggttgaagaacttgagtatgcagagctaccaggctctggggatagctgttgtaaacttaaacttagatttctagatccttcttcgtgtgtgcatggcaaatcgtttaaattaactctacctgaattgattaacttcactgattttgttattgagaaaacatggtatgatactgccatgaagagaaattggtcgtcaagagataaatgcatgggctggtggggaaatgaagatgggaaaggtatcgggtccagtacaagactgatcccaccgagaatcatctgcaaaatccgtgggaactatatgattctgagatgctatgggagcatccccacattgatcatgagatcagagataagctgctttcctaattcaccaaattagaccgcagggagaggtttgatatccaagcactggaccaag

SEQ ID NO: 2074 - DNA, 379 bp, Glycine max
  Clone ID: LIB3028-039-Q1-B1-H4
aacctaggaagttggaagtcatggcagcaacattgatggcagcaacaacaagttctggtactcttaaagcaactcctttccttggccaaggcaagggtgccaatgccaatgctcttagggatgttgtctccatgggaactgggaagtacaccatgggcaatgatttgtggtatggaccagacagagtgaaatacttgggacccttctcagctcagacgccttcatacttgaaaggagaattccctggggattatggatgggacactgctggcttatctggtgacccaagaacatttgccaaagaacaggggtcttgaggtgatccatggggcgatgggccaagcttggagcactaggatgcatcaccccagaggtgcta

SEQ ID NO: 2075 - DNA, 395 bp, Glycine max
  Clone ID: LIB3028-039-Q1-B1-H5
tctcagagaaaaagaaacatcgacaaggatgtctggaagaggaaagggaggcaagggtctcggaaagggaggagccaaacgacaccgtaaggttctgagggataacattcagggaatcaccaagcccgcgattcgccgtctggccagacgtggtggcgtcaagcgtatcagtggtcttatctatgaagaaactcgcagtgttctcaagatctttctagagaacgtcattcgcgacggctgtcacctacactgaacaggctcgccgcaagaccgtcactgccatggacgttggttacgccctcagggaggaggggaggaccctctacgggattggcggttagacaattggggatttcagcactgcgtcctcgattagggtttcttatagtgtcaat

SEQ ID NO: 2076 - DNA, 191 bp, Glycine max
  Clone ID: LIB3028-039-Q1-B1-H6
ctcttcagccttttcatagttcataacacccctttgctaccaaaccaattcagtgatcgttttgctttgctctttcctgagtttgaagaccttagaaccatttcagtacacaacactttctgttccttaatgagatccagttcaatctcagcctctggctcatggagtgttaaggacaacaaggcctttga

SEQ ID NO: 2077 - DNA, 455 bp, Glycine max
  Clone ID: LIB3028-039-Q1-B1-H9
gtgcgcagaataaaatttctcatcgacgatggcgaataccttacaacgcgcccttcgcgccaccatggcccggccgttctccaccggcgcattggccgaaattaagcgaggcgagatcggaatggtttctggaattcctgaagaacaccttcgtaggagggttctaatttactctcctgctagaactgcatctcaacaaggatctggaaaggttggaagatggaagatcaacttcttatcaacccaaaagtgggaaaatccactgatgggctggacatccactggggacccctactctcatgttggtgattctgccttgacttttgatagcgaacaagcagcaaaagcatttgcagagaaacatggttgggagtaatcggtcaagaagccccacacaccattgctgaaggttaaatcatacgcggacaattttaaatgggaagggccccccaaat

SEQ ID NO: 2078 - DNA, 529 bp, Glycine max
  Clone ID: LIB3028-039-Q1-B2-A2
cgaagtgctaacaaaactccaccctttctcctcctgtcactgtttcttcgtctctacttcttctcaaaccagaacagacagcaccctcccaaccacctttgatctaggttgttatttttttctctctgaatttaaatgaaatggctcagaaaagacccccaaatagcagggggtactacgttaagatgaaactccttcacaaacatggcagacctcatcatcatcatcagcagcagcaagaaaaaaactgcctctacagatactacaaatgggttctctggctttctctttccctctatttcttcacctcctacctcatcagcaacaacaacaacaacaaccaccactccaaacaaccatctcacgtctcgagagccctcatggaatcaaaccacaccacacctcctcaacaacaagctcttaactctctagggtctttgaagaacttgaaggggtttgtatatgatcttcctcagaagtacaacacggattggttatcgaacgagaggtggagcaaacatttgttcgc

SEQ ID NO: 2079 - DNA, 341 bp, Glycine max
  Clone ID: LIB3028-039-Q1-B2-A3
cttcttccacaggagactatgttgcagacactcccttttgagagactaccccatcctcgggatgctgccacaattacgcttcaacctgtggagtgcccatgattttttcactgagatattgaaacgggatggaccaagaggtgagttcactggaccttggattaccagcatggactaattggtcacttgttagcccagcaaggtccaccagatgctgtccaggaatttccacaactacgtcaagggacccgagtttcgtcacatttttcatgccttcggagacgggattttcaccggctgactttgaagcatggcagtacaacagggaatatcttccattc

SEQ ID NO: 2080 - DNA, 429 bp, Glycine max
  Clone ID: LIB3028-039-Q1-B2-A5
gttcagttgagcatcaacgttgaatctcaaacatgaagcaccatcaacaaccatgtccggaacaggaaagggaagcaagggtcccgtcaagggaggagccaacccacaccgtaaagttctgatggacaacattcagggaatcaccaatcacacgaatcgccgtctggccacacgtggaggcgtcaatcgtatcaatggtctgatctatgaataaactcgcggtgttctcaagatccttcgatagaacgtcattcacgactctgtcacctacactgaacacgctcaccaggaaaccgtcactgccatggaacatgcttactcccccaagaagcaagggaggaccctctacggatttggcggttaaacatgtgacgatgtcaccactgcatcctcgattatggattcgtaaaggggcaccttcgatcttta

SEQ ID NO: 2081 - DNA, 292 bp, Glycine max
  Clone ID: LIB3028-039-Q1-B2-B1
ctaagcatatacaacctcagaatgacgacaccttaagaaacatcactgggccatctaaaatgccttacactctgctctatcctactaatgaggatggattgactttcaaatgaattcccaacagtatcgctaactaaaggctctcgcattgaggttgctgtactacacaaggtgtttttcaataatggtaaatacgaggaatatgattctgtcatctacctacctatggtcaagttacatttggggtggttgaaagttctcgtgtttgctgtactctgtttatataacagat

SEQ ID NO: 2082 - DNA, 510 bp, Glycine max
  Clone ID: LIB3028-039-Q1-B2-B2
caagtattgtattttgtccagcagattctatgacttgacaggactgcagaatggaattctgaagcgagggagagagattttcctcactggttgctacctccgaactcccactggaggttctggacattcacgtcttttgccaacagagtatcttgtgattctattggatgaagtaatggtcaaagattttttaattttaaatttgtccactgtgaagtttaattgggctaacaagaggagtgagtgagtaggctcaacatacataaatgcctgttaggaagtcaagcccaatgattcaatttaatgagagggacctctgagtatcttttttcttatcacgtcaatcatcttgttttatattctctcttttcatctttctttattgcataacatttatcacgaaatttttgtaccaatacaatttctcttccaagtttttttaattaaataacttttatacttttgatacaatattttttaaaaataaaaacttgataattttgtattttt

SEQ ID NO: 2083 - DNA, 105 bp, Glycine max
  Clone ID: LIB3028-039-Q1-B2-B3
caccttctctctctgcgatactgtatcctgttgtagctagctcctcgaaaatgctgggacgcctcggcgggagtcgcatcaaagagatcggtcagagtctccgtt

SEQ ID NO: 2084 - DNA, 326 bp, Glycine max
  Clone ID: LIB3028-037-Q1-B1-G3
tccatctcgtcttcaacattccactccaatccgcagcgctgcgttttagtttgcattcaattctaccaatcccaaaattcctcgccggggatagagaatcttaacaattccaccactttccggcgagacatggccgtcgccgtctccgtcaccgcgcgacagaagccgagctccgacgcgagcctcttgacactctgccgcttctggagttcgcgcagcgccaatcaaggctcctctaaaacggtgtcgtccgtctcaagatcactgctccctcccagccgcagattccgcgtcgatacttccaattagctcaattttccatatga

SEQ ID NO: 2085 - DNA, 392 bp, Glycine max
  Clone ID: LIB3028-035-Q1-B1-G7
tcctatctaatttttttcgttccgtcgtttcatcctcgcgagcgtgcatttgcattgcattgctctctctctctcacaaaacgacgacgacgtcgccaccgcgcaccgttttggttttcctttctcttccgtcgtttgcttccgcaaatagcctttcgcatgggaaacgctaacggcagagaagacggatccattccccccgccgccgccgatccctccgccgccgcacgtggaactcacgcgccgccggtctctctccctccggttcgcgccttctcctccgattcaatggccaatagcccgccgcacagccctcgccgctccagatcgccgatcctcttcggtcctcaggttcctctagctccattacaacgaggtaatggccctccttt

SEQ ID NO: 2086 - DNA, 397 bp, Glycine max
  Clone ID: LIB3028-035-Q1-B1-G8
ttttcattgttagcaacattatgctgcttttcagttcagcatttgccaaaactgctagtcctccctctctgagcccaactccagcaccagccccggcacccgactacgtgaacctcaccgagttgctcagtgttgctggtccatttcacaccttccttggataccttgagtccaccaaagtgattgacactttccaaaaccaagccaacaacactgaagaaggaattaccatctttgttcctaaggacagtgccttcaatgctgtaaagaaaactgtcctatccaacctcacctctgaccagctaaagcaagtgatcctcttccatgccttgccacatttctattctcttgctgagttcacaagcctttagcaaaaccagctctactcccacatttg

SEQ ID NO: 2087 - DNA, 403 bp, Glycine max
  Clone ID: LIB3028-035-Q1-B1-G9
attgagaagagtcttgttgaagcttttgagcccatcgggatcagcgactggaactctatcttctggatcgcacatcccggtggtcccgcgatcctcgatcaagtcgaggagaagctccggctcaagccggagaaactccagtccacccggcatgtgctgagtgagtacggaaacatgtcaagcgcgtgtgttttgttcattctggatgaaatgaggaagaagtctaaggaggaagggaagagtaccactggagaagggttagagtggggggtgctattcggattcgggccgggtctaaccgttgagaccgttgttcttcacagtgttcccttggagggataaatcatgctgatgcggtgactagtgatttaagagtgatcaataaggaaccctcggaaataca

SEQ ID NO: 2088 - DNA, 371 bp, Glycine max
  Clone ID: LIB3028-035-Q1-B1-H1
catacattaacaccaacactcaacctcactcagtcgctcgctcgctctcttcacaatttcgagatctgaaatcgaaatcgaaaccgaaactgaagagagagacaaaaaaatgagggagccatcgtcggtgggattcgaaggcaacggcgccgtttcttcgccgccgcaagctctcctcgagagactgaaagactacggtcaagaagacgctttcgccctctggtacgagctctcttacgaggaacgcgagtttctcatcaaggacattgagagtttagatctttcgagaattgaccggattattcggtgctcgctgcgatctcaaggactgccggcggcggccattgagcctgtgccggagagcagtgtgt

SEQ ID NO: 2089 - DNA, 391 bp, Glycine max
  Clone ID: LIB3028-035-Q1-B1-H10
aacttattttttgattgttgacttcaggtaaaacaatgtagtccttgttttcagtaaatatagaggtttcatttcatctgtcccactagtactgctctagctgtgttagtgctaatctcttgggttgatcttcttttcactgggcatatcataaaccattgttatttaaccttcttgatttattaactttgtatgaatatttttgctgtgtaatcagatcatatggtatggagcatggcagaggcggtcgagtaaggaaaaagaggagctgacctcaacccttaaatcaatgttaagcaacatatcaagcatggctgtgttaattgaacacagtttccttgaagcatacggtggagaatcaagagatggctcttcaactgcaaaattctcc

SEQ ID NO: 2090 - DNA, 401 bp, Glycine max
  Clone ID: LIB3028-035-Q1-B1-H11
gatgtttgctttgttctctttctctctcctcaaattttttcctctcgctctagggttccaagagtgtcttgaactactccagaaccctctcttgtttttcacaaatttgggtttagtacagtactgacccagaaaagaacgttcaacaggtacctaagataggggatagaaagaacaaaatagaaactgtacgtataaaagaagagcgatacacacatataaggaaaaagggaaaatattttgaagaaggaacatataaggcaatatatacaaatattagtatttgataataattacgtgtagaactattatggggaggggaagagtggaactcagaaggatagagaacaagagaaacatgcacgtaacgtctgcacacaggagaaatgggcttctcaaga

SEQ ID NO: 2091 - DNA, 400 bp, Glycine max
  Clone ID: LIB3028-035-Q1-B1-H12
aggcaaatcttaaacccatccccgaacacattgatttgagcctcattgttgttgccaagtcatatgccttaagttacataaagttgtttcagttcctaatggcaaaacgtatcaacaccttggaaaaaagaaaaaaggggtttaacattcctgacctataatacaatgccattatacaattccttgcctgcctgaattgaaaaggtggagattgttagattataacatttgttattcttttttttttttcactattggcatactgtacagtcacatagtttcattgtgtcgttgctcaatttttatttgttatcaggcagtgaggttttgggcacacctgtcagcaaacatgtgttcatcttttaccattaactttattggttgtatttatcatagttag

SEQ ID NO: 2092 - DNA, 395 bp, Glycine max
  Clone ID: LIB3028-035-Q1-B1-H2
gcactggcaaatacttaaggactattcataaatgccagacctgatgaagttggagttaataacctaattaattgactgaaggaaaatgaaaattggagaaaagatgtttagcactgtccttggtaattttctgcactgtttccttccgtaagaagtgaaagaatcagaaaagtaatggtaataaagcagtaaagctttggacaagcggcagtgttgaggcttaatgtgttcatggaggatgtacagattaacaagcagcttctcaagtgctagctgatctgtttatttgctaacatcaatgagtcctacatcagttgcgtatctgttggtatggttttgttaaaagagaacaggctacattttttctgtcctggtgatggtccaaaattaggact

SEQ ID NO: 2093 - DNA, 388 bp, Glycine max
  Clone ID: LIB3028-035-Q1-B1-H3
ccttgatctcaaaccacacatcgttttgttcgatttttccacatattggctaccaaacttggctcgtagaataggaataaagtctcttcagtactggattattagccctgcaacagtagggtacatggcatccccagctagacaaagagaagatgacatgagaaaaccaccttcagggttccctgattgttccatcaagctgcatgcacatgaagttcggttccttgctgcagcaaggaaactagagtttggcaatggtgttcttttctatgatcgtatctcagttggtgcagatttgtctgatgctattggattcaaaggttgtagagaaattgaagggccttatgtggactatctagagacacaatttggtaagcccgttttgcct

SEQ ID NO: 2094 - DNA, 358 bp, Glycine max
  Clone ID: LIB3028-035-Q1-B1-H4
gccagtggcagtggcgtggctataatcccctgcggcaacaccggcaccgccgcactcttccctcaccgaacgagaagaaacctccacgtggcgcgcgcgaagaagcccctcaacggcgacgacgtttccgtttacgctgagctcctcaaagccgaagtttccgttttggaaaataataagcctctcgacgacaacgatgccgctttgaagttcctagagaagatagaccgtcagtttcaacagcccgatttatgggaaggaccccagtgggactggctcggcatcttcatcaagttttcccccatcattggcatcgctgttgcggcaagtcttgctatctacggttgctttacatttc

SEQ ID NO: 2095 - DNA, 354 bp, Glycine max
  unsure (1)..(354): unsure at all n locations
  Clone ID: LIB3028-035-Q1-B1-H5
atcgaataaccgggtttagttgagctccatgtacattggcagattgtctacacgttgtagtcctcgggtcgttgaaaaggttgacatgcatttcaggaaatatcaccaatggtggtttgataatttgcatattgacctgcaggcaaggcctgagttaggaatcgtgttgtttgaaactggtagatagttatcatgccattttgtttttacagcagttatgacattgcaatattgtaatcgtgtatatgtatgttatattttatgtattttacctcgtgggatttgtaataaattttgtttaagttaaagaacttttganatataatttaattaagtacttttgaaacatggtac

SEQ ID NO: 2096 - DNA, 372 bp, Glycine max
  Clone ID: LIB3028-035-Q1-B1-H6
tgttgagcttttttgcgagtccatttggcaaaagggttgaatgggcattgaaactgaagggtgtggagtatgagtacatagaacaagatatcttcaacaagactagtctccttctccagttgaacccggttcacaagaaggttccggttcttgttcatgcccacaaacccatcgctgagtcattcgtcatcgttgaatacgttgatgaaacatggaagcagtatccactgttgcctcgagacccttatcaaagagcacttgctcgattttgggctaatttcgctgagcaaaaggtaatttctaaatccccttttagtttttgttttccgcacctggatttgggagatggatatttttttagtttttcataaa

SEQ ID NO: 2097 - DNA, 366 bp, Glycine max
  Clone ID: LIB3028-035-Q1-B1-H7
ctttcattttccctcacactcatcattctcaaaaaacacgcccaaattctaatcaaattagggttagggttttcaactcccctcgaattatccctgtaatgcagtgcgattcccgggtcctaccatggagccatcagcaatgtacggaccctcccagcccctgaacatcccctcgcggatcggcgctggcgaaagagacgacggctccggcaacgagcccgccgtcgacggccaccaccaccacattcagtacgaaacgcacgcgctcgatgacggtgccgccggtggcgccgtggttgtcgaggatgttacgtcggacgcggtctatgtctccggcggtggaggccccgaggagtccagccagct

SEQ ID NO: 2098 - DNA, 392 bp, Glycine max
  Clone ID: LIB3028-035-Q1-B1-H8
ggccgctcgcgatctagaactagggtttgcaaacacctgcaaagatcagcacatatactattggccctttccaatctacaaaaaatgaaaaagcaaaagttaaagtgaaagttcggttgaatgtgcatggaattatatctgtcgaatctgcaactctactggaagaggaagaagaaattgaggttccagtttacaaagaacctgcaggagaaaattccaagatggaaactgatgaagctcctgctgatgctgctgctgctgctgcaactcctagcaccaatgacaatgatgttagcatgcaagatgctaataccaaggcaactgctaatgcccctggagccgaaaatggtacccctgaggcaagagataagcctgtgcagatggatactgat

SEQ ID NO: 2099 - DNA, 400 bp, Glycine max
  unsure (1)..(400): unsure at all n locations
  Clone ID: LIB3028-035-Q1-B1-H9
aaggctactagtgacgagtgagtgagagaaagacagagacattactttttggtagtagcaacaagcaaagggaggaaagaaggaaagaaagagagagaatcttcattcatttttttctgctcattttctgtgtacacctttatcgtttctctcactaactttggagtctgctttactccacactccacaacaaagatcgtctgcattccctttcccttctcttttcacccccctttttttttctctcttcttcttttttctttttctggtgggggcacctcatttgtttttgacttcataatactactacttcttcactcaaaaaagagatagaaagagaaggaaaaaaaaggctattatggcaagaggangagctccagctaaagcagatgagccacag

SEQ ID NO: 2100 - DNA, 393 bp, Glycine max
  Clone ID: LIB3028-036-Q1-B1-A1
caaacatgtcgaacacatgcggcaactgcgactgcgctgacaagactagctgcaccaagggaaacagctatggtgttattgtagagactgagaagagttacatcgagactgttgtcatggatgttccagcagctgagcatgatgggaagtgcaagtgtggcactaactgcacttgcacggactgcacctgtggccattaaggaatatgtatgaaaatgtaattgccatgtgtttggcaatacaaatatccaaataatgtaatcttcgtatgaataaatgtgtgtgctgttatcctacttcaggtctgtgtagtcatgcagtctgaatcatttcaagttcctgtcttagttaatataacagccatggttgtgggcatctatggtttattagact

SEQ ID NO: 2101 - DNA, 355 bp, Glycine max
  Clone ID: LIB3028-036-Q1-B1-A10
agctgatgtgcctaccatagcacagattgaagagttccattcgatgcagaggatgatgaatgctcctgattcaaatgataatattgatctactgttgaacattgatttgttgggtttacaaggagcaagtcaagcttttccaaacaagattgtttttgatgataagcttgtgttggctaacacacatgaattctttgatggaaattttccagtggattcttggttgccaatttttgtgaattgtctttatcctgtaagtcaattaccttcagaagctgtcgttgtaaatgtcacatgtggtactggacctggtggtttacccaccactgcttggattagttctgcagttaacaat

SEQ ID NO: 2102 - DNA, 367 bp, Glycine max
  Clone ID: LIB3028-036-Q1-B1-A11
tgcttattgcggccaattcaagtgggtgtgtaaaagtgttacagatggtttaaaggaaaggttccctgtggcggcaactttcttgcagttttgcgagttcctggagttttgcacttgtcgcccttgcactcaggctaaatcccatcaacctgctgggagcatataaaaaaatattttgacatcttgagctctggcttataatttgaagtagaagggcttcttcaatttcggccataattggatggagaaatagatctgcaatctaaatcctggtctttttaaatcctgatgtgcaactcggatttcaaaccagaatttcacattgtcatatgtagaaaaggcttgttatacttaaatatcactggga

SEQ ID NO: 2103 - DNA, 361 bp, Glycine max
  Clone ID: LIB3028-036-Q1-B1-A12
gaaatggcaacagaaacaaaagtggcagtattaggtggcatcaccgaagtgcagggagctgccaacagcgtcgagatcaacaatctcgctcgctttgctgtagaggaacaaaacaaaagagagaattcagttctggagtttgtgagggtgattagtgcaaagcagcaagtggttgctggagtgaattactacataacattggaagcaaaagatggtgagattaaaaatgagtataaagcgaaggtttgggagagggaatcccaagagttgctagaattcaagccaacattaggtgcaggaggcatcatcgatgtgcctggagctgccaacagcatcgagatcgaccatctcgctcgctttg

SEQ ID NO: 2104 - DNA, 391 bp, Glycine max
  Clone ID: LIB3028-036-Q1-B1-A2
atccgcgacggcgccgtttccgtcctcttctgcgtcctcatcgtcgccttgggtcccattcaattcggcttcacgtgtgggtattcttctccaacccaaggggctatagttcgcgatctaaacctctctatttcggagttttctttctttggatctttgtctaatgtgggagcaatggtgggagctatagctagtggtcagatagctgaatacatcgggcgcaaagggtcattgatgattgctgcgatccccaatataatagggtggcttgctatttcttttgccaaagattcctcgtttttgtatatggggaggttgttggaaggttttggcgttggggatatctcttatgtggtgcctgtttatatagctgagattgcaccccaaaaac

SEQ ID NO: 2105 - DNA, 335 bp, Glycine max
  Clone ID: LIB3028-036-Q1-B1-A4
tggaaagggatacaagccgtccacgtggctttgggtttagcacatttgcagaccgtatgggaatggttgatgcaatcaacgaaatgcattgcccggaaattggtgatcatttcatctcagtcaacaaagcacagcccacaatcgggggtgatgatacagaccaatgttacagatgtggctactcatcacgtggtacgggaagctatagtgctggatatagggtatgacatgatgactgcttcatatgtgggcgtctagtgcattgtgcccaatattgtcctttggcaagatgtggtcgttgtcacagtggtagttcatatccttcacgtcctaag

SEQ ID NO: 2106 - DNA, 239 bp, Glycine max
  Clone ID: LIB3028-036-Q1-B1-A5
caaatcttgctgtttgtcctgcaggaacctttatgttatacctttccactatgtggaatgatgccgatgacggaatgaagctactaacagcagccatgaatgctcttcttacactgcctgtaactggaaacccggaatgtattccaagtgttcatagtgatcatgaagatattgcacccattgtgcactggagtgcattttatactcagaaatgagttatgtgtaatcattaatttatc

SEQ ID NO: 2107 - DNA, 391 bp, Glycine max
  Clone ID: LIB3028-036-Q1-B1-A6
gatgtcgacagtgatgtacgtctagaagtcttttcatggaacatgcaacttgatagaggaggaaagcataacacggtaacaccacctaaatctgcctccaaagagaatcctgaaaaggttactagcatgaaattgcagaatgtatgagaagtctacccccagtgacaatcatttgcgtgatgctatatgtcaaattcttaatgaagttaacttcaatacggacacatttaccgacattctgaagagacttgccatacagtttgatatggatctcactccgataaacgcatctatgatatccatgattcatgaagagctgacaaaactagctgatgatgcagatgacgatgacagataacaggatcctgagaaagatgaagccccatctaca

SEQ ID NO: 2108 - DNA, 60 bp, Glycine max
  Clone ID: LIB3028-036-Q1-B1-A7
taacctcctccaggtacatacatataccacatgtatcaccctgaaagctccatcgtacgc

SEQ ID NO: 2109 - DNA, 401 bp, Glycine max
  Clone ID: LIB3028-036-Q1-B1-A8
gtccgccaatttgttgataacttcagaagatcggcaatgccgttagatgtgctggtttgcaatgctgctgtttacttgccaactgctaaggaacctaccttcactgctgagggctttgaacttagtgttgggacaaatcatctggggcatttcctcctctcgcgcctgttgcttgaggacttggcaaaatccgattacccttcaaagcgcttgatcatcgttggttcaataacagggaacacaaacacattggctggtaatgtacctcccaaggctaaccttggtgacttgaggggacttcacggtggtttgaatgggctaaacagctcagccatgattgatggtggagacttcgatggtgccaatgcgtacaaggacagcatagtctgcaatatgctcac

SEQ ID NO: 2110 - DNA, 349 bp, Glycine max
  Clone ID: LIB3028-036-Q1-B1-B1
gaaagaaaaaaacttagatcaaaatacttaatagcatggcgatacatttatacaaaacttctaccccaagcacacgcaatggagccgtagacagtcaagtaaaatccaatccacgaaatcatttgatctatggacagcatcgttgtggtaaaggccgtaatgccagaggaatcattaccgcagggcatagagggggaggtcataagcgtctataccgtaaaattgattttcgacggaatgaaaaaaacatatatggtagaatcgtaaccatagaatatgaccctaatcgaaatgcatacatttgtctcatacactatggggatggtgagaaaaaatatattttacaccc

SEQ ID NO: 2111 - DNA, 372 bp, Glycine max
  Clone ID: LIB3028-036-Q1-B1-B10
gtatgaatacatgccgaacaaaagcttagaatttcatcttttcaataaagcatatgatcctcttccttggaaaacaagacttgaaataattcttgaagcagctcaagggttatcttatctgcatgaagaattagaaattcaggtgatatatcgagattttaaagcttcaaatgtactactggatgaaaactttaagccaaagttttctgatttcggacttgcaagggagggaccagtagctggtgatactcatgtttcaacagctgtgatggggacatatggttatgctgcccctgattacattgagacaggccatctcactgccaagagtgatgtgtggagttttggggtggtgctatatgaaatacttac

SEQ ID NO: 2112 - DNA, 422 bp, Glycine max
  Clone ID: LIB3028-036-Q1-B1-B11
gagagactagcatgcatgcctgcacgtctactctaaaagatcccctcggggaattccaattccacattttcaagaaataaggaggcaaaaatgttcacatatgaattggaattatttgttttcttaataggcctatcctgaaaccaaaggaaatgagatcggaattcctcggggaattccaattccacattttcaagaaataaggaggcaaaaatgttcatatatgaattggcattatttgttttcatagtacgcctatcctgaagccaaatgaaatgagatcggaattcctcggggaattccaattcgacattttcaagaaataaggaagcaaaaatgttcatatatgaattggaattacttgttttcttattatgcctatcctgaagccaaaggaaatgacattcgtattcctcgggggt

SEQ ID NO: 2113 - DNA, 366 bp, Glycine max
  Clone ID: LIB3028-036-Q1-B1-B12
gttgtgcttccaccaatagtgaagcccccgggttttctccctccaattcttaacccaccaagtacaccaacaccgtcgccggggaagggagggaacactccatgtccaccaccaaagtctcctgcacaggctacatgccccattgacacgctcaaactaggtgcttgtgtggatcttcttggtggcttggttcacattggcttgggagaccctgttgcgaaccagtgctgccccgtgcttcaaggcctggttgagcttgaagctgcggtgtgtctttgcaccactcttaagctgaagcttctcaacctcaacatttatgtcccacttgcccttcagcttcgtgtggcttgtggcaagtctcctcct

SEQ ID NO: 2114 - DNA, 408 bp, Glycine max
  Clone ID: LIB3028-036-Q1-B1-B2
aacagctaagctttatctctatggatcatgtgctaattcgtttggtgtttctaaaagtgacattgatgtttgccttgctattgaggaagcagacatggaaaaatctaagattataatgaaattggcggatattttgcaatcagataatctgcagaatgtgcaggcattgacgcgtgcacgtgttcccatagtaaagctcatggatccagtgacaggaatatcttgtgacatatgcattaacaatctcctagctgttgtgaataccaagcttcttcgggattatgcacacatagatccaaggttgcgtcagctggctttcattattaaacattgggctaagtcaagaagagtcaatgaaacttaccatgggaccttgtctagctatgcgtatgttttgatgtgcattca

SEQ ID NO: 2115 - DNA, 237 bp, Glycine max
  Clone ID: LIB3028-036-Q1-B1-B3
ctcatattttggagaatccgaaaaacacgttaaagaaagtcccattcccactaccgaagcaaattaagaagatgaagatgaagatgggcatgggcatgggcctgggccttttggtggtgatgatggcatgtgggtcggcgagtggtgcggatgatttggcaaccaagtgttcaacggtgattcagaaggtaataccgtgtttggatttcgccaaggggaaaggagtaacgcccaaaa

SEQ ID NO: 2116 - DNA, 375 bp, Glycine max
  Clone ID: LIB3028-036-Q1-B1-B4
taaacctacaattcacccgtttgtgattcctggaccacctccctccctaccaaaggacccgaggtgtagtgtcaacaagaaaaagaagagaagatcacacaagttcaatcggggtcttccagattttgctggaaacagcacggatttgcacagaagccaccatgttgataaccgtgcttcaagctcacacccattgagcccatcattgcctctactttcacatacaggagctctaggaactcagcagattgaatctgaccttaacttgcctcctctaaatttgaaagtggcaagcatcgtcacactcttcaaaaaaagcaagatcatgactgtctccatctcctgaagtgctccagttggatgcatcaagtgttg

SEQ ID NO: 2117 - DNA, 327 bp, Glycine max
  Clone ID: LIB3028-036-Q1-B1-B5
tggtccacgaagtgcgggctctgctctaatgaatctctcatcacctcgcgagaggaggtttgcatattggcggtcccacagctttcacgatcaatgacgtgtctgcactctggtcatacagatgcttttatcggttacaccgcacacatattgcggttgctgctgcatccacagcgtctggggataatgcaagagagctgttgtaagcactacgtttacatggtgttgagattcgtattttgggtgcgttgcaggtgtattcctataggctccgagattgatgagacatcagctccctttgaatccggaagtcttgggtagccatcc

SEQ ID NO: 2118 - DNA, 380 bp, Glycine max
  Clone ID: LIB3028-036-Q1-B1-B6
tgaccgtgaccatggcggctgcgtttacaagtacaagtgcaacactgagactgtcaaatgttggagagagcagaggtttgcagctgcgtaagtgtaaccctaatcctaataagctgaaggttatgggggggtttggaggttgttctggagtggcagtgggtgtgagagaaagaaaacgaattggaatggttatggttcgggttcgagagagttcttcgacggacgatgcagttagtgcgcagtcataattgaataagaaagtatactgtgacagttgtaatggcaatcaacttgggaatcttgtgggacctaacgtgattggactgtactgtgacaatgttgaccaatagggaagagaacttctgtgccctttgaactgg

SEQ ID NO: 2119 - DNA, 121 bp, Glycine max
  Clone ID: LIB3028-036-Q1-B1-B7
tggccctaaaatatttgaacctagagcttggtatgatcttgacaaatgtcccaacttcattggaaagttcttacatgaaaaacccctcaagaaattaaagaaaccccaatggattaaacaa

SEQ ID NO: 2120 - DNA, 89 bp, Glycine max
  Clone ID: LIB3028-036-Q1-B1-B8
aaaaaaattagaccacagtttgtacagctaagagaaaaaaaaagataaaaatatttgagatttaataaataatgtaatggagagacatc

SEQ ID NO: 2121 - DNA, 377 bp, Glycine max
  Clone ID: LIB3028-036-Q1-B1-B9
ttggacatgtgtgagctgtggctttgcagggaagaagagtgtcagtagaaaataaatgtcctcttcccagggacactctctatttcacagatctatatctaagtgtcggtgatcccctttctccttccttctctgagagacaatgacaatgacgtgggcgcgattcgattcgtggaagcagcaatactacaccacaagcggcgtggtggtaggttacgcagtatgctccagcctcctggccatcatcaacaaatacgccatcaccaaattcaactacccaggcctcttaaccgcgctccagtacctcacctccgcactcggcgtctacgtctttgggaaattagggtttctccaccacgaaccctttaaccctccca

SEQ ID NO: 2122 - DNA, 283 bp, Glycine max
  Clone ID: LIB3028-036-Q1-B1-C1
aaagcaagctcatcctagagttttaaaaatggcagcagcctcctccatggctctctcttccccatccttggctggcaaggccgtgaagctgggcccatcagcccccgaagtcgggagggtcagcatgaggaagaccgtcaccaagcaggcctcctccggaagcccatggtacggcccagaccgcttcaagtacttgggcccattctctggcgagcccccgtcctacctcactggcgagttcccaggtgactacggctgggacactgctggggcttcggccgac

SEQ ID NO: 2123 - DNA, 353 bp, Glycine max
  Clone ID: LIB3028-036-Q1-B1-C10
gtccgaacttcttgaaggttaacacgtataggctactcaggcagcagagtgctatatataactacgttgaatacggagacattgacccaacgcctttgggctgttttcaagaaaaagtgattagatatctcaggtcttgataccacaacggaaaaacggtccttctcccatcacactctcgctaggacacacacaagtgaagccaggatcatcccactgactacttttggcaaggctagtccaagtgccgcacacatcaccaacgttctgcaacactcaggatcgcgcatcattcctgattggacaaaatctaatgtgtacagcccagacaacaccagcacgtcgagtgtttc

SEQ ID NO: 2124 - DNA, 407 bp, Glycine max
  Clone ID: LIB3028-036-Q1-B1-C2
cttttcatcattctcatatcctcaatcaccccccctcgcactcgctcttcccttcctctggtggcgacaatgtcgactcctgctaggaagaggctgatgagagacttcaagaggctgcaacaagacccgcctgcagggatcagtggtgccccccaggataacaacataatgctgtggaatgctgtcatatttggtcctgatgatactccatgggatggaggcacgttcaagttgacactccaatttactgaggactatccaaataaaccaccgactgtacgatttgtgtctcgcatgtttcatccaaatatttatgctgatggaagtatttgtttggatatattacaaaatcagtggagtcctatttatgatgtggctgctatactcacatctatccagtcattgct

SEQ ID NO: 2125 - DNA, 296 bp, Glycine max
  Clone ID: LIB3028-036-Q1-B1-C4
cgcagccacttttgaacataggtggtaattaccatgatgaagcaccagaagtatggaggcatgaacttgacctgacgctggaaccattatattccctgtcaccttggatgcttttgaatactttcttacaagtggatgatattatataactatatatgtggtatggcaattgacaacatatttgatggcttatatatgccgccaagttttgtgggtttccctaatctgaagacgcgtatgtctattgtgtgttgtaagttcataatttggttacgctttcctaagtggaagctttg

SEQ ID NO: 2126 - DNA, 395 bp, Glycine max
  Clone ID: LIB3028-036-Q1-B1-C6
ctcttctctcttcactcttcactcttgtcgtcatttcctcacaaaaccagtgtccgtaacatctccaccttaacgatgtcggtaaaggagtgtcaccaccacaagggaaagaagcacaaactctggagacgcatcttctggggcatagtgatcttcgccttcatcgtgttgctaacagttcttataatctgggcaatcctaaagccttcaaagccaaccttcatcctccaagacgtgaccgtctacggcttcaacgccaccatccccaacttcctcacctcaagctttcaggtcacgctttcctcgcgcaaccccaacgacaaaatcggagtctactacgaccgtctcgacacctacgtcacttaccggaaccagcaggtcacgtaccgaacctc

SEQ ID NO: 2127 - DNA, 244 bp, Glycine max
  Clone ID: LIB3028-036-Q1-B1-C7
gttcccagtaccaccttcttcctctcatccttaggctttatatattaatattgcagaggtagatgattactcttgttgggtctgcaagatatgcatgcattttttctgtcttcttttttgtgctttccgtatgatcaagtatattgaggaagtctatttgttgctaataaagccttggaaggatagggcatgtgatgagcctggggtgagaatatacatcaaatttaaactaatatagagcgat

SEQ ID NO: 2128 - DNA, 302 bp, Glycine max
  Clone ID: LIB3028-036-Q1-B1-C8
gtgtgcaatgcaatcatattcctcacatctacaaggattatgtagacccaacccataagtagatgaatattccagttgagtctgaagcacatgcacccactccatccatcaacgagatggagccatcaatactgataaatgaatttcctgaagccgatgcctgtcaaagactcactgagtcaaggatatggtatgtccagaacctaaggtcatggggttttgaatatcataactaaccatatacaaatgtatacatatctgtctcgagcagttaagtatcactgtgatggatattgtggttc

SEQ ID NO: 2129 - DNA, 328 bp, Glycine max
  Clone ID: LIB3028-036-Q1-B1-C9
gtcgaagcttcttaaaatttgctggataaacgagactgagaatgcattgcactggatatgaccatggtgaatgctaagggcaataactccaacgccaagactaatggtcttaaacaaaatgccaagaagatagtccgaattcatgtttctaaaaccaataaatctttcttcttctacctcaatcacgcatataaatacttagtccagggcaatgacgtctagctctctgcattgggcatggctagtccaacggttgtaatcatctctgacattttgaaaagcaacggctgggcatttgggaataatattacaacatccactgttgctg

SEQ ID NO: 2130 - DNA, 392 bp, Glycine max
  Clone ID: LIB3028-036-Q1-B1-D1
gccagaactgtgtgaaaagcacaagaccaaccctcgtcgtgccatggttgaacttgtgagctcaggagctgcccctggccctgtttctgacgtgtcagaggccattattgcatcagcacctgccccttctgccctgtaattttggtcccttgaaatttcactctccttttgcagagatggtgtgaaattgagggagacatttaccattattattattgttattgtgtcactatattagaaaatggagagtatattgcttcatttttatgggttgagttccgattaatgtaacggtaatcaagagttgcgcgtggtgttgataggtttatgttatgttgttgttttccaagtttctcaaattttgggaaaaaaaaggggggaggggagggggg

SEQ ID NO: 2131 - DNA, 263 bp, Glycine max; identical to SEQ ID NO: 835
  Clone ID: LIB3028-036-Q1-B1-D10

SEQ ID NO: 2132 - DNA, 368 bp, Glycine max
  Clone ID: LIB3028-036-Q1-B1-D11
cttgctcttagccctcctcctcttcgccgccgtggccaccgccgcgatggcggtggccgcgtccgacgccgacgagatcctgatccgtcaggtggtgccagatgttggcgaaaccgaagaggaggacaacctgctgaacgccgagcaccacttcgcgagcttcaaggcgaagttcgccaagaccgacgccaccaaggaggagcacgatcatcgcttcggcgtcttcaagtccaacctccgcagagccaggctgcacgccaagctcgacccctccgccgtccacggcgtcaccaaattctccgatctaactccggccgagttccgccgccagttcctcggcctcaagccgctccgcttcccggcgcacg

SEQ ID NO: 2133 - DNA, 362 bp, Glycine max
  Clone ID: LIB3028-036-Q1-B1-D12
cgacaacgaatggggatacagctcacgtgtcattgatcttcttgtattcgttgccaagaagtctctttaaggtgttacttcaaagtagcttgtcttcacattattaccgtatgtttatgtttagctgcgatttagtgtcttgctcgagcaaaaaatgagaggtctgaataaatcggtttctgaaaccagtggtgttacttgttggaggagcattagctcttttttggacttttgatgttttctcttgtggagggggatcgagtttttggatttttatatactcgctgatgtacttggcttgaatacttgctaatgtacttgttattgattgttagagtagatatttgtccgtcctttttttc

SEQ ID NO: 2134 - DNA, 300 bp, Glycine max
  Clone ID: LIB3028-036-Q1-B1-D2
ctcgagccgattcggctcgacggaagcagacctcagtacacacctcagtcacgaatatgtccacattacctgaatctctgtctatgggcgacgtcttcgacggcagtagtgcaccaacaccttcttccactggccgctcattttggtcccttgaaatttcactctccttttgcaaagatggtgtgaaattgagggagacatttaccattattattattgttactgtgtcactatattagaaaatggagagtatattgcgtcatttttatgggttgagttccgattaatgtaacggtaatc

SEQ ID NO: 2135 - DNA, 375 bp, Glycine max
  unsure (1)..(375): unsure at all n locations
  Clone ID: LIB3028-036-Q1-B1-D3
cttcatcaagctccgctccaacacaggggaaaatgagggagatccttcacgtgcagggagggcaatgcgggaaccagatcggttccaagttctgggaagtggtgtgcgacgagcacggcatagatccgacggggaagtacgtcggaaactcagatctgcaactcgagcgcgtgaacgtctactacaatgaagcctcgtgcgggcgcttcgtgccacgcgcggtgctgatggacctggagcccggaaccatggacagcgtgcggaccgggccgtacgggcagatcttccgccccgacaacttcgtgttcgggcagtccggcgccgggaacaactgggctaaggggcactacaccganggcgccgagctcatcgact

SEQ ID NO: 2136 - DNA, 392 bp, Glycine max
  Clone ID: LIB3028-036-Q1-B1-D4
cggctcgagatttggttttactaagcagaacgagctctttgtgggtcgtgttgctatacttggttttgcaacatcactgttgggtgaatgaataactgggaaatgaattctagcacaattgaatctggaaactggaattctcctttatgaagctgagcctcttcttctgtttttcatcctcttcaccctgctacgagccattggaggtttaggtgaccgtggaaaatttgttgatgacgaacctactactggaggtgttattcctccacgcaaaggcttcatggaagctcttggtcctggttcaggtcccttatttggattcacgaaagcaaacgaactattttgtggaagattggctcaattgggtttcgttttctcattgattggagaaa

SEQ ID NO: 2137 - DNA, 381 bp, Glycine max
  Clone ID: LIB3028-036-Q1-B1-D5
ctcaaacacaactcaccaacacagttgttgcattatttcttttttccagatccaacttcaaaattgcaatgggagtggaagatacagatatttgtatcatcaaggagccagatcatgttgtagtctattcagatggcatttctcatgattcgggtcatgaagctggaagtggtcatcacaatattacagagtcgtatgaacaaatcaatgagactactgaacatcatagttcagaggatagtgcaaaggaatatgaggtgaaggaatgcacaacagaagtttctgttaaggtctctgatgtctctaatgttaaaaaatgtgaggataagttaacctcagattctgagggtgtcgtcagtgagaaaagttttaaatctaaca

SEQ ID NO: 2138 - DNA, 392 bp, Glycine max
  Clone ID: LIB3028-036-Q1-B1-D6
ggagaagctgttttcgttcgtcgccactaacactaatcgtttcttcaatgccttacgagaaggaactcgccgctgcaaagaaagcagtcactctcgctgctcgtctctgccataaagttcagaaggctcttctgcaatccgatgtgcactcaaagtcagacaaaagtcctgtcacagtggctgattatggttcacaagcattggtcagctttatacttgagagagaacttccttctgaatcattttcattagtagctgaggaggattcaggtgatcttcgtaaggaaagtggccaggatactctgaatcgcattacagaacttgtcaatgatactcttgctactgaaggatcaaatagcttttctactttaacaacagatgacgtgcttgtg

SEQ ID NO: 2139 - DNA, 383 bp, Glycine max
  Clone ID: LIB3028-036-Q1-B1-D7
ctctctcacgcataactcaaacacaaaaaaatagagcttttgatgagaaaatacaccatccaaaatccatgatccaacaccatctactattattgttgttttgaggttgaaaaaacacaattgggtatatatagaactccaaaacctacgagaagaaaagaagacagtgatcaaaaaataaagtgaagcatggaaaaggacaacgagacgtatctgaagctcttttgggggcgttctaatcatgagaagtcatgtttgctgtcaaagaagggcaaaagcacggcacttagcaccaccgtgattttgctcgtttgctttgtaaccactttccttgttttgactatctggaatacgtccacatttgcagctctttccattccaat

SEQ ID NO: 2140 - DNA, 357 bp, Glycine max
  Clone ID: LIB3028-036-Q1-B1-E10
aaagcattccatagcctcccataaaaatgaagaatactatcttctctgctctctttctactttgtgccttcaccacctcatacctaccttcaaccaccgcggtggtcgataccgacggtgatattcttcagaatcctggtacatactttatcttgtccgtttttcgacccggcggcggagtagaattcgccgccactggaaacgaaacttgccctctcactgtcgtgcagactctcttcgggaggggctttccagcaatattatcgtcccggttacgaatccctttcatcggcgaaggacaactcttcagcatcctgttccgtattgtgccatggtgcgccaccaacccttctaagt

SEQ ID NO: 2141 - DNA, 367 bp, Glycine max
  Clone ID: LIB3028-036-Q1-B1-E11
cttgggtggtgccttttttctttttctttctctctatcgattctcgtaacaaaccctacccttttgagtcttccaagttttcaccatcgtaatgggttccgaaggatccagcgtcgtggttcctaggaatttcagattattggaagagcttgagagaggtgagaagggaattggggatggaactgttagctatggaatggatgatgctgatgacatatacatgcaatcttggactgggactatcatcggtccccctagtactgttcatgaagggcgtatctaccagttgaaattgttttgcagcagggattatccagacaatcctccatctgttaaatttcaaacaatgattaacatgacatgtgtc

SEQ ID NO: 2142 - DNA, 338 bp, Glycine max
  Clone ID: LIB3028-036-Q1-B1-E12
gtttcatttgtgaaactaacaacaacacaaggccatcatcatggcagctgcttccccaatggcaagccaactcaagtccaccttcactaggactcttgtagctcccaagggcctctctgcctcttcaccacttcacctcgtgccttctagaaggcaatttagcttcactgttaaggccatccaatcagagaagccaacctatcaagtgattcagccaatcaacggtgacccattcattggaagcctggaaaccccagttacatccagccctttgatcgcatggtacttgtccaacctgcccgcatacagaaccgcagtgagcccactactaagaggga

SEQ ID NO: 2143 - DNA, 351 bp, Glycine max
  Clone ID: LIB3028-036-Q1-B1-E2
ctctagccgctcgagccgattcggctctagtccaatatattccattctctctgtgtatttcccgacgtctcccttcaagatgcacatcttcgtcaaaaccctcaccggcaagaccatcacccttgaggtggcaagctctgacaccatccacaacgtcaagggcaagatccaggacaaggaatgaatccccccggaccatcaacgtctcattttcgccggaaagcaacttgaggacgggcgtacccttgctgactacaacattcagaaggagagtactcttcacctcgtcctccgtctccgtggtgggatgcagatcttcgctaagacactcatctgcaagaccatatccct

SEQ ID NO: 2144 - DNA, 377 bp, Glycine max
  Clone ID: LIB3028-036-Q1-B1-E3
ctttttcagttctctctctctctctctaagatggccgacgatccaatgcccacgcgctggtctttccaggacttcaaattgtgttatgatgctaagtttggtagaaagaaagtcgcggagaacggagatgatgctgccggtaaagcggtcagcaatggaaatggaaattcagtgacagtggccattgtgtccaatggcaacaaaagggcatcggaaatggctgtttatgagcagtttcgaagcgaggggcagaatcagattcacacaaatggctttgtgccgacccttacagagtgaaaggccgcagaagtctttgcttccagcctttgaatctggggaaatgcgagctttagcagagagcttaagttgggatatca

SEQ ID NO: 2145 - DNA, 329 bp, Glycine max
  Clone ID: LIB3028-036-Q1-B1-E4
ctcaatttttctctcaaccggcccaatttagcataagcccagcatggccaccgcaacagcagcagccacctcgtccttcatggggacgcgcctcctggaggcccactccggggcggggcgggtgcaggcccggttcgggtttggcaagaagaaagccgccgccccgaagaaagtttccagggggtcgggctctagctccgataggcccctgtggtatccgggcgccaaggcgcccgagtacctggatgggagccttgtccgagactacggattcgacccatttgggctagggaagccccccgagtacctgcagttcgagttggactcgc

SEQ ID NO: 2146 - DNA, 255 bp, Glycine max
  Clone ID: LIB3028-036-Q1-B1-E5
cttccgaggtaaaatgcgcaagttttaggcttgcagtggcagcacacaagatccgagccttgaaaaccattcctgatgaatgcgtagaacgaatcaaggactacattaagggcgaacagtttagatcagactctaaaacagttaaccaacaaggtttcttttatgcaagggaacggcaagtccatcacaacgacatatttatattctgcatagataacaccgtactctccaatatcccatactatgagaaacatg

SEQ ID NO: 2147 - DNA, 398 bp, Glycine max
  Clone ID: LIB3028-036-Q1-B1-E7
gacaagaagagatgggtacaggagaagatcgagaaggggtcgcagtaaccgggggcttcttctggtcctacacagacgaaccccatgccacacgacgtcgtcagatcctctccaaataccctcaaatcaaacaactctttggccccgaccactctgctttcttcaggattagtggagttgttctgcttcagcttggtacgggtgctttacttcatgatgctggctggctgaagatatttttagtagcatacttttttggttcttttctcaaccacaatctctttttggctagccacgagttgagtcacaacctggccttctcaaccccagtctacaaccgttggtttgggatttttgccaaccgccctataggtgtggccaaggtccgttaccgtcca

SEQ ID NO: 2148 - DNA, 336 bp, Glycine max
  Clone ID: LIB3028-036-Q1-B1-E9
cgccagggtttcctccatctgaacgaacatgccctcctccacgttctagaaggagattgacaacaaccacactgttgtgcgacgcgatggcccactgcatcgaccttctcagtaacgctggcgatgacatgcatcaatcctttcgcaacttggaccactctgaactagacaagtcgagcaattacgcctatgatctcaacgtcaggatcgcaggtactctcgctcacgaaaagacatgtttggatgagttcgagaacatcaacaccgaggctggcagcgacaaggtcagggttcgcaacacttctttggatctcacatgatcccattggtcatagt

SEQ ID NO: 2149 - DNA, 393 bp, Glycine max
  Clone ID: LIB3028-036-Q1-B1-F1
aattagtactctcgttaatttttttgctaattgctaattgggcacaatggaaaagcttcatgctgtgtgcatcccatacccagcacaaggccacataaacccaatgctcaagctagcaaaactccttcatgttagaggcttccacatcacctttgttaacacagaatacaaccacaaacgccttctcaaatcaagaggttctgattccctcaatagtgtcccatcatttcaatttgaaaccatccctgatggtctctctgataaccctgatgttgatgccacacaagacgtagtttctttaagtgagtctactacaaggacttgtttaactcccttcaaaaatctcctttcaaaacttaatagtgcctcggatactcctcctgtgacttgcat

SEQ ID NO: 2150 - DNA, 377 bp, Glycine max
  Clone ID: LIB3028-036-Q1-B1-F10
atgcaaatgtaatagacctcggaattggtgatacgacacaacccttaccaacaattgtaacatctagcatggttgattttgtgcatggcctttcaacagcaacaggctataaaggatatggaccaaagcaaggtgaaaaggccttgaggaaagcaatttctgttacattctacaatgatctggggataaaaccttctgatgtttttgtttcagatggtgcacactgtgatattactcgtcctcagctgcttatgggtcccaatctgaacatagctgtgcatgatccatcctttccggcctacatagattcgagtgtcataattggtcaagctggcaagtttgtacataaagctgggaagtacaaagacatataatac

SEQ ID NO: 2151 - DNA, 368 bp, Glycine max
  Clone ID: LIB3028-036-Q1-B1-F11
gtgagtgatcggtgttcacctgatccgtcataagtcgtcatcatcaacatcagcatcaccgttgattgaagaagatgccgatcagaaacatcgccatcggaaggcctgaagaggctactcaccccgacacgttgaaggcggggttggctgagttcatctccaccttgatcttcgtgttcgccggttcaggttccggcatcgcctacaacacgctcagcgacaacggcgccgccactcgcgccggcctcatctccgcttccatcgcccatgctttcgcccacttcgtcgccgtctccgtcggcgccaacatctccagcggccacgtcaaccgcgccgtcatcttcggcgccttcgtgggcggcaacatc

SEQ ID NO: 2152 - DNA, 424 bp, Glycine max
  Clone ID: LIB3028-036-Q1-B1-F12
ggagagacaagcattgctgcatgcacgtctactctagctgatcccctccggggaattccaattcgcacattttcaagaaataaggaggcaaaaatgttcatatatgaattggcattatttgttttcttattaggcctatcctgaagccaaaggaaatgagatcggaattcctcggggaattccaattccacattttcaagaaataaggaggcacaaatgttcatatatgaattggcattatttgttttcctattaggcctatcctgaagccaaaggaaatgagatcggaattcctcggggaattccaattccacattttcaagaaataaggaggcaattatgttcatatatgaattggaattatttgttttcttattaagcctaccctgaagccaatggaaatgacattcgaattcctcagggg

SEQ ID NO: 2153 - DNA, 321 bp, Glycine max
  Clone ID: LIB3028-036-Q1-B1-F2
ggctgcaagagaggaagcatatttgtggaatgacaggtgatggtgtcaacgatgctcctgcattaaagaaagcagacattggaattgctgttgctgatgctacagatgctgcaagaagtgcttctgacattgtcctcactgaaactggtctgagtgtcattaatagtgcagtgctaaccagcatggcaattttccaagggatgaagaattatactatctatgcaatgtcaatcatcattcgtatagtatttggtttcatgtttattgcattgatttggaaatttgaatttgcacccttcatggtgttgattaatgccgtac

SEQ ID NO: 2154 - DNA, 398 bp, Glycine max
  Clone ID: LIB3028-036-Q1-B1-F3
gagaaagggtgggtattgcttcacacagacacaacagtgtctgctgcaccttgcaatggtttcgctatcaacatggtttcgctacattgcccacaagctcgaatactccttctccctcagctggaagaactacaaaggaggtcaaattacagacagagaggtacgtgatgttgtttggaaaaacttctttcaaggaaagctgacgtacttgcactggaataaaggagaggagatggcccctactattgatggaaaagcagtaactcttgttcggaaattaccagttgtagacccaacgcgtgtttttgtaggagatgttgtggttgtgaaggaccctgagaagccagataactacctactcagaagattaactgcagttgaaggctatgaaatggttt

SEQ ID NO: 2155 - DNA, 381 bp, Glycine max
  Clone ID: LIB3028-036-Q1-B1-F4
ggaactcgacctgagaagaaagatacccttaattcgcatgcgcgtcttgtgttggacaacaaccacaagatgattaacttcgaagaaaccgagttgcgactcggcctccctggtaacgactcagcactcaagggaagtgctgccaagagaggcttctctgaaactgcttctgttgatttgaagcttaatctttcttcttgcattaacgactctgcctcggattcaccctcatctatgtctacagagaagcccaaagagaacaagaccaccactgctgaacctcctccagctaatgatccagcataaccacctgcaaaggcacaagtggtaggttggccaccagttaagtcatttagaaagaacatagttcaaaggaacagc

SEQ ID NO: 2156 - DNA, 376 bp, Glycine max
  Clone ID: LIB3028-036-Q1-B1-F5
gtaactagccgcagcacgaggagcagcctcaggaggagaaggatgtctcacaggaagttcgagcacccaaggcacggttcactgggatttcttcccaagaagcgtgctgctcgtcacaggggaaaagtgaaggcattccccaaggatgaccgcatccaaggcacccaagctcactgcattcttgggttacaaggccggtatgactcacattgttagagaggtcgagaagccaggatcaaagcttcacaagaaggaaacttgtgagcctgttacaattattgagacccctccaatggttattgttggtgttgtgggttatgtgaaaactccacgtggtctccgaacattgaacactgtctggggctcagcatttgag

SEQ ID NO: 2157 - DNA, 413 bp, Glycine max
  Clone ID: LIB3028-036-Q1-B1-F6
agaagatgtcgggtatgggagacgggtacgtgggcaccgcccaagacgcggtgaggattcgacggttggagaagcagagagaagcggagcgtcgcaaaatccaagagctcaaaaccaagtcgacctccgccaagggccaacccggtctcctccaattcggttccagcacttccgagattcttgagactgcctttaagaaggaaactgtgggtttggtcactagagagcagtatgtagaaaagagggttaacattcagagcaaaattgaggaggaagagaaggagaaacttcagaagcaacagcaagaagaggaggagcttcaattagaaaagcgtaaaaagaggaagatcaggggcaactctcgattgtcctttgctgaggatgttgacaatgatccccaagacgacgaacca

SEQ ID NO: 2158 - DNA, 264 bp, Glycine max
  Clone ID: LIB3028-036-Q1-B1-F7
cctaatttttcgatttcagttagcgtatcatcatcacttaaggagataatggtgtcaaacgtgggagaggcaatgaagaggaacaggcacatgcaaccatatgcacagaatcagcagcagcagctgcagaaacagcttcagtgcaacacacgaaaagctggcaagttcattacgagcagctccaatctggaagaggatggggcttcgtctgccagtctcttactaacttgcatatcttgttcaccttccgatgcttaacgcgca

SEQ ID NO: 2159 - DNA, 375 bp, Glycine max
  Clone ID: LIB3028-036-Q1-B1-F9
gtgaagtttctggctttcataactggctgcagttttaccttgaagaagcaaaggggagagttgattatcaaggatatatttttccccgtcgacggggagaaactcctgactctgaagctcagcttctgactattcagtttgaatggaatggtgtcctaaaatctgtatccagcactttggttggagtgagccctgaatttgaaattgctttgtataccctgtgtttctatgttggtagggaggataaccacattcagcttggtccatatggggttaatatcaagtgctatcgattgggtgatcgaattggatctgttttccccattgcagattcttgaattttcagtttccagcattggtaatagttgttcccca

SEQ ID NO: 2160 - DNA, 405 bp, Glycine max
  Clone ID: LIB3028-036-Q1-B1-G1
atttgttctaagttcagatgctagtttacattctactgaagatacaagagggaaaccttactcaacatttgaggctgctgatgctgaaaaagaactagatatgcttttagattcatttggtgagaccaacattctagattcttcgggctttaagtccaacacctcgattccagtttcatcgggagtagcttctgtgtatcctcctcacatttcaaataaagatccagttccatccaaaactgcaccaattactgctagtctagatgatgtacttgatgacttgctggaaggaacatccacgttgacgaatccaaatgttttattacgaccgcaggaagaaaaacccgtccatcacagcatgcaatcttcttcaaattctggtagcaagtccaaagtggctgatga

SEQ ID NO: 2161 - DNA, 363 bp, Glycine max
  Clone ID: LIB3028-036-Q1-B1-G10
ccaatatcttcacaccacgaaatgagctgggattgttgcaaagtaagtctaggcattgtggagtcattggaagactgttctagatcaaggttttctgggaaaattctccagtcagcaaagagcaagagagttagtctcagtcaccaagtgatgatgatgaaagccccaaattgccagatccacagggattcttctcttgagggatctaagtctttgaccaatgatttttgtaaggctcctccttactatgctcagcaaaagggatctgttgttatcgagaagggtgaatgtgaatctgagtccactgttctttttgagattggagaaagtggccttgaccttcagccgtttgggagaatcacg

SEQ ID NO: 2162 - DNA, 317 bp, Glycine max
  Clone ID: LIB3028-036-Q1-B1-G11
agaagttgagttgagttgaagttgcgcctgaaataaaattgagtgagaatacacagacacaaaacctgaagcaaaccgtggatttggaaggcagtgagaaaaacacgccatccaagatatcacaaatcaagtatccgcatgccagtgacattgacgatcaagaccacagaatgagccatccacctaggaacgggactcaacgcgacttggtcgcagtccagtatattgggacacgcttctccggatcacagacacaactcagtgtccgtagcgacctcggtgcgcgtgaggaaaccttatccaactgtgctggtcaa

SEQ ID NO: 2163 - DNA, 346 bp, Glycine max
  Clone ID: LIB3028-036-Q1-B1-G12
cacgcacacataaatgtttgtttggattggtcagtgtgtggacccaaaagaaaagcacacagcttttgaaattgcccataaatacatagataaggctgcatctctggaaggactatctcctcatgtaccactatacaaagtaacagaatggaatgaaccttgctttttcacaacatacttttcttgggatcatgcaaaagctatggtgccatggaactcattccagaaaaaggtgacattactctttggaactggccatcctgtacaggaaaagtctaatgggtcaagtcaaagagggggaccaagacaaagagcagaaactttggctgccttaaataatgcattc

SEQ ID NO: 2164 - DNA, 348 bp, Glycine max
  unsure (1)..(348): unsure at all n locations
  Clone ID: LIB3028-036-Q1-B1-G2
aattatgctggtttcaggtgcaattatgtgatcgacagtagatccttacagcaaacgcaacacaacatttgttgccgcagatgcttaaaaagtacaagactcagctttgtatattcatttggatgagactatgtagtcaatcactcatcgaggcattaaatcgtacatcctcaaccaccatgntttcaatcgcgagagctactcattcatgttgtagaccatcctgcacactatcagccttccgatgtacttccaccgtacatgcaccaatgttcgctagtctagatgatgtacattctgacatgctggaaagaacatgttcgtcaatgactacagatcttttaccat

SEQ ID NO: 2165 - DNA, 392 bp, Glycine max
  Clone ID: LIB3028-036-Q1-B1-G3
gggaagctggtgatcaaagtatgccatatggtggtggtggtccagagaattctcactctcagggcttcttccaaccattggaatgcaaccctacactacatattggtcctgattacaggtacaatgctgtagcttcagatcagataactgccacaactcaacctcaacaagtgagtggctttattccagggtggatgctttgaactaattaggctcagtgcattcaggtggagacataaaaaagcaaacaccttacaaaagggcaaaagccaaaaatgcatcttggtgttggcaaggtgtaaatgcaaccctgcttctacagttattttggtgtataagaaactgatgttgtgacttgttcaaacttttgaacttttagccatagacatata

SEQ ID NO: 2166 - DNA, 406 bp, Glycine max
  Clone ID: LIB3028-036-Q1-B1-G4
ggaggttttccgccaaattcgaaaatggtgaaagaaatcgaaactctgacagaagatgaaagacgcgcacttcgtggaagcaaattcgcccctcttccccgcccttccaattccaaacctaggttggctcatccaggtggacccttggcgacgaataaagcagcggctttggccaagtttctggagagaaagctgaaagacccaaatggattggcgtctattaaccctgatatccttgaacttgctgtcaataatgccaaagaaactgtctatgcaagtggtacttctaattcacgaagaaatgttcggcatgtggactcctttggtgactctgattctaatgattctagtgatgaagagcagaatgaactatcctgatgtaaaggaatgcacgaagaagaagaag

SEQ ID NO: 2167 - DNA, 398 bp, Glycine max
  Clone ID: LIB3028-036-Q1-B1-G5
gaatttgtcctccaattcatatacagattttgttttcaagcagcagttcctaagtttcttcaattgcacttagatccagctagcagcaatactcttcccgcaaatgggtccataacccaaagtttgaaaattactaatagccaacatgggaagaaatctcttgtcatgcgtataaggatagcatacaagataaatggcaaggatacactggaggaaggacaagtcaataactttcctcatggtttatgaagcccaatgatcaggggtcattaaggtgatgcacaaaacccatcgttttccccagcactccataattattggtgcggttttcatgtttcattccttcaattgaggaaggtatggttcgaccatctggaccactttttggcttaaatttg

SEQ ID NO: 2168 - DNA, 368 bp, Glycine max
  Clone ID: LIB3028-036-Q1-B1-G6
atgattgtcaacgtccttgtattcatcgttgctacacatttggtagcacggcaatgccatgcgtaggacatgtatccaccccgaatgaacactggtcatggtgcccgtactccggaggtgaaatgcgcaagttggaggcttgctgtggaagccacaccatctttggctttgagacgattcctgaagagtgcgttgaagcagaaaaggaatacgtccgtggcgaacaatatatatcagacgccaaaacagttaaccaacaagcgtacctttatggcagagacctcgaagtccatctcaaggacacatttgtgttcagtagagatggcaccgtactctctaacattccatactacaaagtacatggatat

SEQ ID NO: 2169 - DNA, 392 bp, Glycine max
  Clone ID: LIB3028-036-Q1-B1-G7
gcgttcactggacattgagaggccaacctacaccaaccttaatcgtttagtttctcacgtgatatcatcactgactgcttccctgaggtttgatggagccttgaatgttgatgtcaatgaattccagaccatccttgtgccataccccaggattcattttatgctttcatcttatgcacctgtaatttcagcctagaaggctcaccatgagcagctatcagttggtgaaatcactaacagtgcattcgagccatcatctatgatggccaagtgtgatccccgccatggtaaatacatgggatgcagtcacatgtacaaaggtgacgtagtgcctaaagatgttactgcagctgttggaattatcataaccaatcgcactattcaatttgttg

SEQ ID NO: 2170 - DNA, 412 bp, Glycine max
  Clone ID: LIB3028-036-Q1-B1-G8
tagattttccttttcccgaattcacagttccgtgcgacgaaaacaaaaaaatccaaaacattttccatggcccttctaatccactccctggaaatgtccgttactccccaaattaccccaaaccctaaccttaagctgcgcaaattcaacagcttcaaaccccacacaaagggcaaagcgattgggtcaacgcgtggtgtgagaattttctgcaaggtgaaggactgtgcggttttggatgagaacgtgaattcgtacggtcaattttcggttccggtgaagcaagggtcgaagcagagcaaagaggatgaggaagagaagcagaattactatgtgaatgtgggatatgctatccgaactctgagggaggaaatccctgatctcttctacagggaacttagctttgacatct

SEQ ID NO: 2171 - DNA, 397 bp, Glycine max
  Clone ID: LIB3028-036-Q1-B1-H1
ttccttcatttccatccccttctctcttttaaacctcacgcacaacgaaatcgtgattctgttgttcttttgaaatggaaaacgctccggtggtgtgtaaggaagatgatcagatggatttgcctcccggatttcggttccacccgactgatgaagagcttataagccattacctctacaagaaggtcattgacaccaagttctgcgccagggctattggagaagtggacctcaacaagtctgagccttgggatttgccatggaaagccaaaatgggagaaaaggagtggtactttttctgtgttagagacagaaaataccccactggcttgagaaccaacagggccaccgaagctgggtactggaaaggcacaggaaaagacaaagagattttcag

SEQ ID NO: 2172 - DNA, 325 bp, Glycine max
  Clone ID: LIB3028-036-Q1-B1-H11
atctaggcctctttgtttggtcaagcaccaaaggcgggggggaaccactatgggcgagaccccccggcctccattcttttgcatagtccgggggccggacgctgcatagctgcagggcataacggcgccctcgcctgacaccattcccggatctagcatcacacgggcgggccgggcctgaattcacaccagactcttctttatttgagctgctcccacgcacgcagaccggaagatctcagttgtcctggactggacaactacgtacagatcttcgtgggaccggggagggagtcgcaatcgatcatttctaggattccttatc

SEQ ID NO: 2173 - DNA, 375 bp, Glycine max
  Clone ID: LIB3028-036-Q1-B1-H12
cgccgagacggtctttgccttcttcgactctgcattcgtcttcctcagattcgaacaatggcaacgttcaataaaaccctgttttatgaatgaaagtgcttttaaatttggatggtttttcctgttttatctgcttcacataagattctgcatcttagctgcagttgctcctcctatagttatcaaaggcaaatccctgacgtacgtctatttcatatatgttctctatttaacatgctaatattgctcatatggctttatttttgtcacaagaagactaagcattcaaattcattttccttgcacaagatagttttttttttcattcccttctcaaaaatagaagtaaatgacaaatctattggtcattgatat

SEQ ID NO: 2174 - DNA, 325 bp, Glycine max
  Clone ID: LIB3028-036-Q1-B1-H2
aattgccattaacgtataagttgaaagacttgggagtaacaaaagacgatgatagtatttctgtcacactggctcccatatatggggacaagcctgttacaattaaggacgtaaggataaagcgtgtttatcctgaggtggacgatgaataaatctaaattatgtgtgtgctactgctagggtttgttcctccaagggatactctatctgtcatttgttgtttcttaattagtgtgttgtagttattttccttggaacttaatagatccctttcatctgtgagggatactatgttattgttataataaatgtttgttttattgtt

SEQ ID NO: 2175 - DNA, 382 bp, Glycine max
  Clone ID: LIB3028-036-Q1-B1-H3
ctagctttgagcaacatcatgaagatctccattctctttatcacaatcttttcttgtggttttcttggaaatgttgtttcaaatgctagtcctcttccatatgaagctatttttaactttggtgactctataagtgatactggaaatgctgctcataaccacccacctatgcctggcaatagtccttatggttcaacatactttaaacatccttctggacgtatgtcaaatggacgactaatcatagattttatagccgaggcatatgggatgccaatgttgccagcctatttgaatctcaccaaaggacaagacattaagaaaggagtgaattttgcatacgctggttcaactgcacttgataaggattttttagtacaaa

SEQ ID NO: 2176 - DNA, 408 bp, Glycine max
  Clone ID: LIB3028-036-Q1-B1-H4
ctcagaaccctcgatcactcccacgcgctcctatatcctctccttcaccgtcgctctctccaacgatcacaacaacatcgtcatcccatggcaaacgccgcatctggtatggcagtccatgatgactgcaagttaaggtttttggagctgaagacaaagaggacacaccgtttcatagtttttaagattgaggagcagcagaagcaggtcattgtggagaagcttggtgagccagcccaaggctatgaagatttcactgccagccttcctgctgatgagtgccgttatgctgtttatgattttgagtatctgactgaagggaatgtccctaaaagcagaatttttttcattgcatggtcccctgacacatcaagggtgaggagcacgataatctatgcaagctccaaa

SEQ ID NO: 2177 - DNA, 355 bp, Glycine max
  Clone ID: LIB3028-036-Q1-B1-H5
cgtcatcggaaaatcgacgttgttggttacccctaccgtgaacgaccatgccacggagatcgcggagacttggaagagcagcctggaggatcgtggcggcgtggaaaacctgaagacacctgacgtccacactttcttgcagcacgttgttaccttcgggattgtcaagaacgatgactccgatttgtaccggaagcttgttattgcgtccgcttggaggaaacagatgccgaagctcgcgctttcgcatggtctcgctcagcaaatgcctgatatgattgaagagttgatcagcaaagggcagcaacttgatgcggttcactttacctatgaagtgggtctggtggaaaagttc

SEQ ID NO: 2178 - DNA, 405 bp, Glycine max
  Clone ID: LIB3028-036-Q1-B1-H6
ggcgcacgttagcacaaactatcatggccacggcaacagcagctgccacctcgtcctttatggggacgcgtctcctggaggctcactccggagcggggcgagtgcacgcccgattcggcttcggcaagaaaaaggctcccgccccaaagaaagcctccaggggatcgggccgagacaccgacagacccctttggtatccgggcgccaaagcgcccgaatacctcgatgggagtcttgtcggagactacgggttcgatccgtttgggctacggaagcccgcggagtacctgcagttcgagctggactcgctggaccagaaccttgcgaagaacgtggctggggacatcattggaaccaagaccgagctcgcggacgtgaagtccacgccgtttcagccctacagcg

SEQ ID NO: 2179 - DNA, 398 bp, Glycine max
  Clone ID: LIB3028-036-Q1-B1-H7
attgctttggcgactagatgcccccatctgaggtccctaggactgtactactgcaagaacatcacagatagagcaatgtattccttggcacacagcaaggtgaacaacaggatgtggggaactgtgaaaggaggaggaaatgatgaagatggtttaaggactttgaacattagccaatgcactgcactcaccccatctgctgttcaagctgtttgtgactcattcccttctctccacacatgctcagggaggcactcactcatcatgagtggctgcctcaacttgacatcagtgcattgtgcctgtgctgtccatgcgcaccgtgcattcaccactttcccttatcctgcccattaagaagctcatgcttttgatgttgaacacacttcgaggatgtg

SEQ ID NO: 2180 - DNA, 358 bp, Glycine max
  Clone ID: LIB3028-036-Q1-B1-H8
gggcactagcaaggttgccagtggtgatacccatatggtttttggccataatcttccctttctttgggcccataaactctgcagttggggctcttctcgttagtttcacagtctacatcatccccgccacagctcatatgctcacttacagaaaagcctcagcaagacagaatgctgctgagaagcctcctttctttatgccaagctggactgcaatgtatgtctttaatgcattcattgtggtgtgggttttggtggttgggtttgggtttggaggatgggccagcatgaccaacttcattaggcaaattgacacatttgggctctttgccaagtgctaccaatggaaggccccaac

SEQ ID NO: 2181 - DNA, 355 bp, Glycine max
  Clone ID: LIB3028-036-Q1-B1-H9
aaacctttcgttcttgtaaactttattgattgattctgagaatagaactacgagggtatagacatggctatcgcaattgcagcttcttttttggttctgcttctggctttccccactgtatttggagctgaccatgaaattggtgacactagtggatgggccctcggagttaattacaacacctgcgcctctgggacaactttcacagttggtgacactttggtgttcaagtatgactccactcatcaagttgatgaggttgatgagagtggatacaacagcatgcagctcaagcaacagcatcaagaactaccaatatggaaactccaagactgaattgacttcaccaggcaaa

SEQ ID NO: 2182 - DNA, 355 bp, Glycine max
  Clone ID: LIB3028-037-Q1-B1-A1
aagtcaaataagtcaatctctttgcgcagttccctaactctcctttcaagatgcagatcttcgtcaagaccctcaacggaaagaccatcacccttgaggtgggaaactccgagaacaatcgaaaacttcaaggccaagatccaggacaaggaaggaattcccccggatcagcaacgtctcatcttcgccggaaagcagctcgaggacggccgtaccctcgccgactacaacatccagaaggagtcaacccttcaccttgtccttcgtctccgtggtggcatgcagatcttcgtcaagactctcactggcaaaaccataaccctagaggtcgaaagctctgacaccattgacaacg

SEQ ID NO: 2183 - DNA, 386 bp, Glycine max
  Clone ID: LIB3028-037-Q1-B1-A12
gcagacttaacaacagcacaaagcgggttactgtctgttcaagctaccatctctctctctctttcttagtgcctccttgccagaagttaaaatggcccaagaaactttcctattcacatctgaatcagtgaacgaggggcaccctgacaagctctgtgaccagatctccgatgctgtgctcgatgcatgcttggagcaggaccctgacagcaaggttgcctgtgaaacctgcaccaagaccaacatggtgatggttttcggagagatcacaaccaaggccaacgtggactatgagaagattgtgcgtgacacatgcaggaacattggttttgtctctgatgatgttggtcttgatgctgacaactgcaaggtcctcgtcaacattg

SEQ ID NO: 2184 - DNA, 376 bp, Glycine max
  Clone ID: LIB3028-037-Q1-B1-A2
gctgtatttaatctcataggtactttctccaagttgttagctgtaggcattgctgctttccttgtgcacataatagttttcatggagtgccaatttttgtaaaccactaccacgagtcaaagatcactctttgaaacttaaaagggttggctgatgtcttatttattatcggcatacccttgtattgaaacgggaggtggttgcagttttctgagctgtatttaatctcataggtatctttagcacgctgaaaatgaggatctcattgtaaagggtatctcttgttgggaacttgcataattgtatacagtattagtttatctctggatggaaattgtatcatttataaactgctctgactacataaaacagtgta

SEQ ID NO: 2185 - DNA, 373 bp, Glycine max
  Clone ID: LIB3028-037-Q1-B1-A3
cagcgattgatggttggtcacaccaccgaagaaggcttcaggaatctacatagctttttcctcagagcgttgaaaattcccacactcgctcgcttccccaaaatttcacccctttcattcaattcttccctcttctctgctactgatccatccctcgttttctccgaacaatggctgctggtgtcactgtcaagtccgaggttctagaatcttctcctcctgaaggagtttgttccaacacggtggaaaaacacctggtccagaccaatttgtctgatgggtcacccaacaagtctgtgccagcatctggacttgatgcagtgattcccagtgcaaatcagcttaccatcttctataatgggagtgtttgtgt

SEQ ID NO: 2186 - DNA, 385 bp, Glycine max
  Clone ID: LIB3028-037-Q1-B1-A4
ccacaataagtgtcgattttttcctaaataagtgaaagtgtagttacacctttttttgtgtgtttaccacttttgagtgccacagagttctgagtttcataggagaaaaaaaatgacagaagaacaaaccaaaacggttgagtcagaatcagtaacaccaccacctgctgctgctgctccttcacaggttcctcctgctgctgaggctgaacatgttcctgaggctccaaaagatgtgactgaggagaaatctgtaattccagtgccttcttctgatgaaaagcctgatgaatccaaggctcttgtcttggttgagagtaagatatttatatgttgattctggttggttatgttgtcatgttcccaaagctgggaatatatatat

SEQ ID NO: 2187 - DNA, 367 bp, Glycine max
  Clone ID: LIB3028-037-Q1-B1-A5
caactgtatccatctatagagtctagacatcacccaagcttgtgcttattcactgccctgtgtcccccatacactcgcacaccatatgtttgattatttgcgtcagccaacactgaataaaaattgttccttggcagtgttgaatgtggatgcacttgaggccgttctttcgcgaggctaacctgttaaacgggttaacctcgcgagtgcaagcccgttcctatgctcgtcgtcgcgaaccgtttcccaccaaagtttctcactacctccaccgtgcaaaactcattgactccattagacttactctacgctccaacacccccaacccctcccttccctctctcataaaccaccgtcttatggactc

SEQ ID NO: 2188 - DNA, 208 bp, Glycine max
  Clone ID: LIB3028-037-Q1-B1-A6
ctcttgtcgtcggtgttccaattggcaatgctcatgataaattcattatccatccacagacctcattacatggacatagtccatatccacggaagaccacaattggtagcacatcattacatagtgcagctctcgatggatggctcatggttagtttaatcttcacatgtaaagcaagcactcactttggtggttgacacacttcaag

SEQ ID NO: 2189 - DNA, 311 bp, Glycine max
  Clone ID: LIB3028-037-Q1-B1-A7
tgagggaaggtgtacacaatttctttgtaacattcattgaggtgctacgtgatagacctcctggtcatgattgggaacttgaacctggtgtcacatgcggtgactacttgtttggtatgctacagggaacaagatcagctctgtatgccaataaccgagagtccatcacagttactgtacaagaagtgacacctagaacagttggtgctcttattgcactctatgaacgagcagtaggaatttatgcctcccttgtcaacataaatgcttatcatcaaccaggtgtggaagctggtaaaaaagcagcaagt

SEQ ID NO: 2190 - DNA, 374 bp, Glycine max
  Clone ID: LIB3028-037-Q1-B1-A8
gtagtgcagccctctttgattatgcacgtgggggcccacaatttggagcagatgggcttctcattgggcccccattggccccagttatgggtggctttgctgggcctgataccaattctggcattggtgatttaagacaagccaagtctagattgggattgtcttatgccaaaagagaggatgggaaagagtccatttttggtgatgagtcaagggctacccttgaagaagtggaagtcttttgtagtcctcaaattgcaagcttatattagaattgcatattgaatagtgtgtgtgagttataaatctctaatattaatgtttgatttctacgaataaaaaatattagaattgcataaaaggggtaaccgggg

SEQ ID NO: 2191 - DNA, 392 bp, Glycine max
  Clone ID: LIB3028-037-Q1-B1-B1
tcacaatctaagcatcccaaaactaactattgtgctagctacttagttgtgtaagatggcttccaagggaaatgttgcatccacttatgttgcactactcatgtgtctctatttgctttcattcaccatggtgagctctcaaatctcaaccccaccaccaatgccttctcaaaacggtacatgtcctataaatgtacttcgattgggtgtgtgtgccaatgtgttgaacctggtcaatgttacactaggatcaccaccaaccctcccctgttgcaccctcattcagggtttggctgatgttgatgttggtgtttgcctttgcactgccctcagagctaaccttcttggcatcaacttaaacttgccaatttccttgacattgcttctcaata

SEQ ID NO: 2192 - DNA, 384 bp, Glycine max
  Clone ID: LIB3028-037-Q1-B1-B11
cacacatgtatagatatatatatatatatatatatatttaactacttcaattcacttcatcatagttacgtatatgagcatctctatttctctcaattaccttaactagcattgtttcaattcacatataaaatcgtttcgtgctcaacctttgtttgtgtgagatatagagatggaagggttggattcgaataattctacccacaacagcatagccaagggcaaacgcactaagaggatgaggcttttgtccccttgcggtgtcatcgttgctgccatcaccaccaccaccaccgtcacctcgagcacttcgagtgctaattcgggtgcctcgtccaccacatcctacgagagcgatgaggaggacatggcgaattgtttgat

SEQ ID NO: 2193 - DNA, 276 bp, Glycine max
  Clone ID: LIB3028-037-Q1-B1-B12
atccccaatacccatttcggtaaataatataatcgcaatccttcttcactcgcttcgatggcgacagggttactgaagagggcggcgcagaggctcccctcctcgccggggttcaagctggccctcctccgggcccacgcgtcggaggcccaggcccagcaggtggagcccaaggcccgcggcaccccgaccctcaaaaccttccaaatctaccgctggaccccggagaacccctcaaagcccgagctcaaggactaccagttcaacctaaaggat

SEQ ID NO: 2194 - DNA, 389 bp, Glycine max
  Clone ID: LIB3028-037-Q1-B1-B2
gagaggtgaggtgaactcgtgtggggtgtggtagtgtggcagcgacacgtatcaacttcaataatcgcatcgcagaagcagtttccggtgcatctcatcgtctccgaaaatgaacgacgcagatgtctcgaagcaaatccagcagatggtgcggttcatccgccaggaagctgaggaaaaggccaacgagatctctgtctccgccgaagaggaattcaatatcgagaagctgcagttggtcgaagccgacaagaagaagatcaggcaagaatacgaacgcaaagagcgccaagttgaaattcgcaagaagattgagtactcaatgcagctgaatgcttctcggattaaagttcttcaagctcaagatgacgtgatcagtttcatgaaag

SEQ ID NO: 2195 - DNA, 387 bp, Glycine max
  Clone ID: LIB3028-037-Q1-B1-B3
aaaataccaacgcgaacgatttggattcggaggattttcaggagatttctctgtcgtcgttgaatttcgctgaggagttcgagccgccggaggagatttttccggcaaacatcgaacggaaagcgaacagcgttgagcttccgttttcgctgaggataatcaagaagaagctgcagtggaaggaagggttcagagaggcaggggaatccgcgtattgctctgtcaagaaagcgttctcttccatggtttttatcatcagggagcttcacagtttcactatgcagatgagggagtttttgttctacgaagatctgcaagggattctcgaaagggtgcagaacgaaatgcacgcgtccttcgtgtggctgttccagcaagttttctctc

SEQ ID NO: 2196 - DNA, 358 bp, Glycine max
  Clone ID: LIB3028-037-Q1-B1-B5
cgttctttctctcgcaatcttcactacattcaccgagcatttgcattcacattgaatatggctgagactacacaatctaatgctgagttgttggagtggcctaagaaagataagcgccgcttcctgcatgttgtgtatcgtgttggtgatcttgatcgcaccattaagttttatactgaatgttttgggatgaagcttttgaggaaaagagatattccagaggagaaatatgccaatgcttttcttggatttggccctgaacaatcccattttgttgtggaattaacatacaattatggggtgacctcatatgatattggaactggatttggacattttgctaacgcaactcaagatg

SEQ ID NO: 2197 - DNA, 385 bp, Glycine max
  Clone ID: LIB3028-037-Q1-B1-B6
tggaaaagctcaaaagaaatctgaaagggagaatgaattgaaacaatgatttgagcagagcatgaaagaagctgctgataaatatcaaggggcaaacttgtatgtcaaaaatttagatgatagcctcggtgatgataaacttaaggagctgttctccccttttggtaccataacttcttgcaaggttatgagagacccaaatggcataagtcgtggatcaggatttgttgcattctcaactcctgatgaggcatctagagcactcttggagatgaatggcaaaatggtggtaagcaaacctctgtatgtgactctagcccaacggaaagaagataggagagctagactgcaggctcagtttgctcaaatgcgacctgttggaatg

SEQ ID NO: 2198 - DNA, 387 bp, Glycine max
  Clone ID: LIB3028-037-Q1-B1-B7
gcgctatcaacttcagttcagaggacattccaaatggcattggctttgggggacgagtgaatcacttgggtttgtttatatcagcaaactttgatcaaggacatacattttcgtgtaccacgtttggtagcccttgtctctccaagactaaccgtatattgcctgaagtaatagaatgctggggagtcacacaagatgcgacacaagacaagaatgatgctgtcaagggcactattctggagaggttcaaggaagatcgcaacatgctcaaaatggtaggcctagcaaattccagcgagtaaagtgttgcttgcatgcgtttgatataatccacccattggacttttaatatcattgttcatatgccatgagaaatacaactttatg

SEQ ID NO: 2199 - DNA, 351 bp, Glycine max
  Clone ID: LIB3028-037-Q1-B1-B8
cagaagccaaacccaatcacaacaacacatcagaaaaaaagagcacattcagagcaattccaacggttgaattttgtggctgacgacaccccatcgacgttagtcaaataaaacatgtcttgctccgtcgcggttcctaactcgccggtgttctccccatcttcttccctcttctgctctaatcccgacaccatctcttcgtcaccggaaacactctcgctctcgctctcgcaactcatatcttcaagctcatcgacgatgtcgtcatgtccttcagcctctgctgctgcatcctcatcagcatcgccttcctcgcagtctcggcatcgccttcacacactgcccatcgtg

SEQ ID NO: 2200 - DNA, 392 bp, Glycine max
  Clone ID: LIB3028-037-Q1-B1-B9
aagctgtgctcagggctcgctatgaagatgctaagttcttttatgagatggacactcgtaaaaggttttcagaattccgaaagcaactgaaaaacattctctttcatgagaagcttggaaccatgctggataagatgactcgtgttgaaaacatggttactaaactaagttgcctcctagatatcaatgaagatgtgcaacaaattatccgggatgcttcctcacttgctatgtctgatcttgccactgcagttgtcactgaatttacatcactttcaggaattatggggcgtcattatgcccttagagatggatactcagagcagattgcagaggccttgctggagatcacacttcctagattttctggggacatacttcccaaaagtgat

SEQ ID NO: 2201 - DNA, 387 bp, Glycine max
  Clone ID: LIB3028-037-Q1-B1-C1
caccattcctaagctcactctttctaagtttcttctatcctctctccgccatggttctctccaaaaccgcctccgaatccgacgtctctgtccactcaaccttcgcttctcgctatgtcagaacttcgcttcccaggttcaagatggcggaggagtcgataccgaaggaggcagcataccagatcataaacgacgagttgatgttggatgggaacccaaggttgaatttggcatcatttgtgacgacttggatggagccagagtgtgataaactcatcatggctgccattaataagaactatgttgacatggacgagtaccctgtcaccactgagctacagaatcgatgtgttaacatgatagctcatcttttcaatgcaccactag

SEQ ID NO: 2202 - DNA, 329 bp, Glycine max
  Clone ID: LIB3028-037-Q1-B1-C10
aaagaatattgccaatattgattttgatgttgctgggcttgcaacgttgtctcccagacagaggctttctgatgtttcagatgttcattgtagcgagtcacctcttatgacttgttagggatcacgttctgttgttaattcaattagcaacttgttaaaactgtttttggtcacagtaattcctgtttcatgtgtgaattgaccgcgatattcataatgattaagggtttttagggagactattctgttataaagtatcagtatcagcccagaaaaatgtaaccagatatgttttgcctttatagaatttgctgctagtgctttgattt

SEQ ID NO: 2203 - DNA, 389 bp, Glycine max
  Clone ID: LIB3028-037-Q1-B1-C11
gtcaaagcttctcgagagcaatcttctgctccatcttcttcagtaaccgaaccccagaccccagtttcagatactgttgcttttggaaatactagagctacatttaatggtgttgctacagctgcagagttttctctttccaggagtccttactttcttcctagtgaaccagcttggaatcaagaaccggtttggaatcaagagtttgggtataatgaacctttaggagaggacaatgttggtcaaaccataatcacttcaccttctgagctttcaatttgttcatttgctgctgctggaaactgtccacgaggggaaaaatgccctcatattcatggggatctatgtcccacctgtggaaagcattgcttgcatcctttccgacctga

SEQ ID NO: 2204 - DNA, 390 bp, Glycine max
  Clone ID: LIB3028-037-Q1-B1-C12
ctcgagccgcttgaatcccttagcagtaatcatcgtcagggtcctgtacgactggatagccgtgtaggttctatgttcatcaaaccctcacctcttggttctccgcaaccctttcttcctctcgcaccttcacctttggctccattcactaataccactatcccaaagttatcaggactttgcactttgaactttactactgctgaaagtttgataagtgtgacagcaattgattgctgggaagtttttgcaccatttctggctaatgtaatatgttgtccccaattggaagccactctcacaattcttattggtcaatccagtaaacttaacaatgtacttgccttaaacgggaccgttgctaaacattgccttgcagatgtggaacaa

SEQ ID NO: 2205 - DNA, 310 bp, Glycine max
  Clone ID: LIB3028-037-Q1-B1-C2
gcgggctggttcatcaggggatgttggttacaataaatgttggtttcttttctgtactcttgtgtcttcttttctaggtagcttgtttttcggacaaagtttgaagtctccaccatcatctcgcaactgttgttcccagaactgggttcttgatcgacggtggcaaaattgcttttatttatctgtgttttaatgtgttgtgtttgtcggaacccctgattacatttttgttaagcgcagcgagtttcaggactttgctgcgttgtgttgctttggtttattaaatgtcaactttctatttgtagtgttc

SEQ ID NO: 2206 - DNA, 257 bp, Glycine max
  Clone ID: LIB3028-037-Q1-B1-C3
gaaacgatgaatggacttaggaaggaagtgaattgaaggtgcagtgagggcaaaatggaagggattattcagatccgatcagtgctgctactactatccataaccatggcatctctcactctggctgtggccgatggcgtttctcgagaagaagctaaagaacttcgagatgaggttaaggatatgttttatcacgcctttaatggatacatggaccacgctttccccctcgatgaattgagacctctctcctgcgc

SEQ ID NO: 2207 - DNA, 386 bp, Glycine max
  Clone ID: LIB3028-037-Q1-B1-C4
cggcacccacacacacagttcgtcggaatgggaagggtgattcgcgctcagcgtaagggtgctgggtcggtgttcaagtctcacactcaccaccgcaagggtccggcgaggttccgcagcctcgacttcggcgagcgcaacggctacctcaagggcgtcgtcaccgacatcatccacgaccccggtcgcggcgcccctctcgccaaggtggcattccgccaccccttccgctacaagaagcaaacggagctcttcgtcgccgccgagggcctctacaccgggcagttcgtctactgcggcaagaaggccaccctcgtggtcggcaacgtgttgcccatccgatccatccccgaaggtgccgtcatctgcaacgtcgagcaccacgt

SEQ ID NO: 2208 - DNA, 382 bp, Glycine max
  Clone ID: LIB3028-037-Q1-B1-C6
ctctttctttctcccctacacaaaacatggctttgcccaatcagcaaaccgtcgattaccccagcttcaagcttgtcatcgtcggcgacggtggcacaggaaagacaaccttcgtgaagaggcatctcactggtgaattcgagaagaaatatgaaccgaccattggtgtggaggttcatccgttggattttttcacgaactgtggaaagattcgcttctattgttgggatactgctgggcaagagaagtttggtggcctcagagatggatattatatccatgggcaatgtgcgattatcatgtttgatgttactgcccgtctaacatacaaaaatgtccctacctggcaccgtgatctttgccgggtctgtgaaaacatccc

SEQ ID NO: 2209 - DNA, 382 bp, Glycine max
  Clone ID: LIB3028-037-Q1-B1-C7
ctttgcgatatatgaactcttttacaaaggcaacgccattgtctaacacagttaccattagtctttcaaatgagttgccagttgttgttgagtacaagattgctgagatgggttatgtgcggttctatttggctcccaagatagaagaggatgaagaagatacgaaacctcaagtttaatctacctattagatggttgggttaggatattaggattttaatgtctttgaacttgtagctttcgtcatacatcttctgttgaagatattttaaccgtgtgagcaatgaattcacattttgtggatttcttagatgtgtattggttacctaccaccttattttccctcgatttgattgttaagaacaattcgaaacaattggtg

SEQ ID NO: 2210 - DNA, 389 bp, Glycine max
  Clone ID: LIB3028-037-Q1-B1-C9
accgactccaacgccatctcccgcgctgctcggtccagtgatagggctgaggagagggagcaggacactgttacacaggctgatttggaacattttcttcatcttcttgaagggaaggatggagtgatggactggcagagttttatggaaaggtcaacaccaaacatgcaatacaaagcttggcgttacgatcctgagacaggtcctacagtttaccgtagtagaactgtctttgatgatgcaactccagagttggtgagggatttcttctgggatgatgactttcgtcctaaatgggatgctatgcttgcatactgcaaagtattggaggaatgccctcataatgggacaatgatttctcactggattaaaaagttcccctttttctg

SEQ ID NO: 2211 - DNA, 381 bp, Glycine max
  unsure (1)..(381): unsure at all n locations
  Clone ID: LIB3028-037-Q1-B1-D1
caggatcatttcgttcggagctgaggaggcagaaacacaacaacatatgagatggaagctgcaaagggaaccgtcaaaggtgtggctatcatcatcggagacaacaacattagaggctctcttcagtttcttcagcaccccaatgggaccacccatgtgacagggagagtgacagggttgtcccaaggctttcatgggttccatattcatgcttttggtgacaccaccaatggctgcaactccactggtcctcacttcaatccgttcaagaaggatcatggggctccttcagatgataagcgccatgctggtgatttgggcaacattgctgcangccctgatggagttgctgagatttctaatagagatagacagattcct

SEQ ID NO: 2212 - DNA, 390 bp, Glycine max
  Clone ID: LIB3028-037-Q1-B1-D10
acaacatttacattactctctcactttctccaatatggcttcttctcgaaatgagttttatgcacttatgctagtggtggtggttggctccatagtggcttcctgtggtgctaacttcaaccaagactttgatctaacttggggtgatcagcgtgctaagatattcaatggtggtcagcttctatctctttccctggacaaagtctctggctctggcttccaatccaagaaagagtacttatttggaaggatcgatatgcagctcaagctcgttgctggcaactctgccggcactgtcactgcttactacttgtcgtctcaagggccaactcatgacgagattgattttgaattcttgggaaacgtgagcggtgacccttacattctcca

SEQ ID NO: 2213 - DNA, 384 bp, Glycine max
  Clone ID: LIB3028-037-Q1-B1-D11
gttaaagccgtaacctatggactatcacacaacagttctgctactgattacctttgtgagtgcaaccattattctcatattcattcggagattattcaaccaaacctcagaatcagaatatgcaaagcttccaccagggcctcgtccatttcctatcataggaaacatcttggaacttggcacaaatccacacatagcactcaccaaattctcaaagatttatggacctcttatgacttttaaacttggcagaataaccaccatagttatctcctctcctcaagtagccaaagaagtactacttgaaaatggtcaagtcctttctagcagaacaattccacattcagtccatgcacttgaccatcacatatactctactgtgtg

SEQ ID NO: 2214 - DNA, 392 bp, Glycine max
  Clone ID: LIB3028-037-Q1-B1-D12
cccgaggcatgcattgagaaatctgaatttctgatcttgtagcccacgctacaatgcaaaggcatcaattccatacaccaaaggaaattcagcattgtgggtacctcaacattggtctttttataagtgagttaaacataatgccacattgattctcaaccatggaacatggcctccttcagacacacaaccctatttaatataggagttgtcactttttaactaaccaaaatgaaatatgtcaacaataataggcaacttttaattagatttcaacaaattaataccttctttttcatgagatcgattacacaaatattttagcttactttttctcacgcaccctcgtgtacactctgtccaaccacaccaatattctactggatttctgc

SEQ ID NO: 2215 - DNA, 117 bp, Glycine max
  Clone ID: LIB3028-037-Q1-B1-D2
ctctttcttcttttttagctatccctctcttgaaaaatctagatctcgttcttccttgatctacgttacgcttttagtgaccggatctgtatggatctgaaccagatctacacgccg

SEQ ID NO: 2216 - DNA, 387 bp, Glycine max
  Clone ID: LIB3028-037-Q1-B1-D4
ttttgaagcacatgttgctgattttgggctcgctaaattcctgcaagattctggagcatctgaatgcatgtctgctattgctggttcttacggatacatagctccagagtatgcctacactttgaaagttgatgagaaaagcgacgtgtacagctttggagtggttcttttggagcttgtaacaggcaggaaaccggttggcgagtttggcgatggtgtggacattgtacaatgggtgagaaaaatgacagactcaaacaaggaaggagttctaaaagttcttgatcctagacttccctcggttccacttcatgaggtgatgcatgttttctatgtagccatgctgtgtgttgaggaacaagcggtggagaggccaactatgcgcga

SEQ ID NO: 2217 - DNA, 359 bp, Glycine max
  unsure (1)..(359): unsure at all n locations
  Clone ID: LIB3028-037-Q1-B1-D5
gctagaacgaggtttgggttatccaaacctggtgacaatttttttgacatttttttaaaaaaataggatgcgtcttcctcaccttcattttcattgatctcttttagtttaacctatatcttctttcacctattcgaccctcttcaacctctttgacgttattcttcatcttttctctcgtaaaccttcacctttcatctccgaactatgacatgatacaattgcacaatagaatatagaacacagagcggttctttattgtgctcaatacaatacaaaaaaagttgtaagatcataanggatcacaaaaagggaacatggagaacataaaaatgcagcaattaaagcacttaaggtca

SEQ ID NO: 2218 - DNA, 376 bp, Glycine max
  Clone ID: LIB3028-037-Q1-B1-D6
ctgaaattgaagatttaagaacagctctagatccaccaactgagcaagatgattctaataaaatgtgccatagaaatccatagtcaactctgtgatggggctgatcctgaaattgaagatttaagaacagctctagatccaccaactgagcaagatgattctaatacaatgtctctggcaattgatgatcattttgttgaagacaccatactgtacatgcttcaggatgctatatcaaagttagatgtcaaaataagactatgcattagagatagcttgttccggttggctcaaagtgcaatgcaaaggaattatgctaatgatacaagcagtacaaacaacactagcagagaagaacttaaagttgctgcaagag

SEQ ID NO: 2219 - DNA, 375 bp, Glycine max
  Clone ID: LIB3028-037-Q1-B1-D7
tacatgttcccctgttaaatagattgttctccctcatgtgaacgaaacgagacattatgtcactgtgccaattctttgggttttttcatattatcagggcatttcatacatatatagtatttattataatttcagcaagtagaaatggatcattgaaatatacatgtgttacaattctaaatttccactgtaattcaattatcttgagccattataggatatcagactattcccggattaattttatttatttattttccctttccaggatattgattttgagttcaagatattatcacttattgcaggacaggaggaggtcaacagaaggcataattttatttttgtgtacataacccgtttttgttcctgctt

SEQ ID NO: 2220 - DNA, 381 bp, Glycine max
  Clone ID: LIB3028-037-Q1-B1-D8
cggtgacagagtgagagtgagagtgagaaatgggtctgctttctaacagagtggagagacatgagatcaagcctggtgatcacatctacacttacagagccgttttcacctattcccatcatggcatttttgttgggggaagcaaggttgtacatttcagacctgaaaggaacttaaagtcaatgactgagacatcatcaaactgggatgatccaacatcaaacccatgtccaacctttcctgattgtggattcagacagccaaactgtggtgtagtcctttcctgcttagactgtttccttcgaaatgggtctttttactgttttgagtatgaggtttcaccatctgttttcctcagcagaataaggggtggcacatgca

SEQ ID NO: 2221 - DNA, 320 bp, Glycine max
  Clone ID: LIB3028-037-Q1-B1-D9
ctcatattcattaaaaaaacatgacgatgactcatcgtcatttaagcctcatgatgaatagcaggaagattttgaccaaaaccaagagtagttggatgtagattatagatcgagttcctcatctcataatgagcacacgaaatgcaggtgcctaatagcttcagaaagaggaaatgaggaccccacactaccgatgaaggcaccgtttttaactgtatatctgtataaagtaaaatctggtctttgaaaatgaatgtaatctattgtgtatttttgtgttttaatttgatataattaagagaataaaattacctattctt

SEQ ID NO: 2222 - DNA, 352 bp, Glycine max
  Clone ID: LIB3028-037-Q1-B1-E1
tggttatgcagggtaaatccagtgattttgctaagcatgctcttccttccacacgcaaacaacgcatactggttaccttcacaaagtcccaaccaagaaagtcactatcaagtgatgctcaacagcttgcctcggcagtagcatcttctcattggggtccaccgccaagccgatctcccaatcatgttcgtcatcacgtaggccccaagcattacgctacacttccaacaactggggtactgccagctccacccattcgaccacaaatggcagctcccgttggcatgcaaccattgtttgttgctgctccagttgtacctcccatgccattttctgcacctgtgccaatccc

SEQ ID NO: 2223 - DNA, 381 bp, Glycine max
  Clone ID: LIB3028-037-Q1-B1-E10
ctcccacaccacacccatgacactcctcctgctccttattctcctctttcacgcggcggaagccaagggacagtggcagctcctccacaaaaacatcggcattgtcgccatgcacatgcagcttctccacaacgaccgcgtcatcatcttcgaccgcaccgacttcggactctccaacctaaccctccccgacggaagatgccgcaacaacccaaacgagttggtcgtcaaacgcgactgcaccgcgcactccatcgaatacgacgtcgcagccaacacattccgcgctctctttgtccaaaccaatgtctggtgctcctccggttcggtctctcccgacggaacattagtccaaaccggtggcttcaacgacggctaccg

SEQ ID NO: 2224 - DNA, 386 bp, Glycine max
  Clone ID: LIB3028-037-Q1-B1-E11
cgtgaacaaacacacgagagaaagcaaattaagctgagtgcaagtgcttcattgagaaaatgaagatggaaattgaggaagttggcaactgcgaagcacttcccctgctttcactcaaccacgtgtccctcttgtgcagatcggtgtgggtgtctatgaggttttatgaggatgtcttggggtttgttcccatcaaacgcccttcttctttcaagttcactggagcctggttttacaattatggtattggaatacacttgatcgagaatcccaacattgatgaatttgatacctgcgtgaatgaagaaaggcctataaatcccaaggacaaccatatctcattccagtgtactgatgttgaacttgttaagaagaggttggaagag

SEQ ID NO: 2225 - DNA, 388 bp, Glycine max
  Clone ID: LIB3028-037-Q1-B1-E12
ggaacaccccccacgaagcaccaattatggctctgaatctttgtatctcacctaagtttaaatgggttccttccttagatagtgcttcctattctttgagaccttcacttgggtcttgttttggtaacataaacattgctagtgtgagtctaagtactactagaagtttgagtttgaggaggagtgggagtgttagtgtaagatctagtttagaaactgcggggcccacagtcacagtgggacaggtcactgaggttaacaaggacaccttctggccgatcgttaaggctgccggggataaaaccgttgtccttgacatgtacacacaatggtgtggcccttgcaaagtgatggctccaaagtttcaagaattatctgaaaagtatct

SEQ ID NO: 2226 - DNA, 389 bp, Glycine max
  Clone ID: LIB3028-037-Q1-B1-E2
gtggcaaatccacacttcttgatgctttagcaggaagattgacatcaaacataaagcaaacagggaagattctaatcaatggccacaaacaagaactggcttatggaacatcaggctatgtaacacaagatgatgctatgctgtcatgtttaaccgctggggaaactttatactactcagctatgctccaatttccaaacaccatgtctgtagaagagaagaaggaacgagcagatatgacactgagagaaatgggtctacaagatgccatcaacacaagggttggagggtggaattgtaaaggcctcagtgggggacaaaggaggagacttagcatttgcattgagattctaacacacccaaaactcctcttccttgatgaaccaact

SEQ ID NO: 2227 - DNA, 385 bp, Glycine max
  Clone ID: LIB3028-037-Q1-B1-E3
accgtaacgtaacgtaaccacgagatgcctctattctagcacttggaaccccaaatccgtgccaattcctccgctccttttcgcagacgaaggcacattctgacgttcacaagattggaaggcaagactaaagattccaccacctgatacaagctagaaaacagaggtttgaaatggctgtgtcactgtggagaagtcgcactgcttcatcagcactgaacttgttcaacaatactcttcgctgtttctcttccgaggcaacaaactccagtcctcatagtacacgagagagtatgatgtattctgacataaactcacgaattgggagttgcatgccactgtctgcaatgcgcattggaacaatcattcacaacattgagttgaa

SEQ ID NO: 2228 - DNA, 389 bp, Glycine max
  Clone ID: LIB3028-037-Q1-B1-E4
ctcgagccgaatcggctcgagagaaaatgtttatgttcctgagaagaaatttcactctttcaagaaggtgtctcggtccatgggatatggtgagaatgatatcaccttagtatcttttcaatcagtctccaaaggctatcacggggagtgtgggaaacgaggaggttatatggaggtgactgggttttctgcagaagtgagggaacaaatatataaagtggcatctgtcaacctttgctctaatatctctggtcaaattcttgcaagcttggtcatgagtccacccaaggttggagatgagtcctatgactcattcatggctgagaaggagaatattttggcgtcccttgccaggcgtgcaaagacactagaagatgcattcaacaaat

SEQ ID NO: 2229 - DNA, 381 bp, Glycine max
  Clone ID: LIB3028-037-Q1-B1-E6
tcccaggcgaggagaaagatggaggggaaggagcaggatgtgtcgttgggagcgaacaagttccccgagagacagccgattgggacggcggcgcagagccaagacgacggcaaggactaccaggagccggcgccggcgccgctggttgacccgacggagtttacgtcatggtcgttttacagagcagggatagcagagtttgtggccacttttctgtttctctacatcaccgtcttaaccgttatgggagtcgccggggctaagtctaagtgtagtaccgttgggattcaaggaatcgcttgggccttcggtggcatgatcttcgccctcgtttactgcaccgctggcatctcagggggacacataaacccggcggtgaca

SEQ ID NO: 2230 - DNA, 382 bp, Glycine max
  Clone ID: LIB3028-037-Q1-B1-E7
gatttcttcattgttttgctctaaaaatggagagagattttctgggtctgagctcaaaagaaccattggctatgatgaaggaagagatgaatattgatattggaagcaaagacacaggtttcacaaatggagcagtggtaaaatggcccttcatgaacaaagtatatgtccatcctcttttgatgtcattcaatcctcctcaggtgaattctgtgaaccatcctcatggtatgaagatgttttcagttcccaatcaagcaatttcagtttccatgggacatccatccctaaagaatcattttgcaactgttggtcagaatatgaatgttgctactgtgaagcaaccactactcggaggaatacctgttacggtgcctcattc

SEQ ID NO: 2231 - DNA, 385 bp, Glycine max
  Clone ID: LIB3028-037-Q1-B1-E8
agaaggtataagcagccgttttttctgttggtatatgaaggtggtgaaggaagaagaagaagaatggtgacggaccaagatatagcgaaaggggtggagtccctactgcgtcactctgacccaaactccataactacggtaaacggcgtcgttcagcagctggaggccaaactagggttagacctctctcacaaggccagtttcatcagagaccagatcgatcatcttctccggtcacagccacagacatttgctcctcaccctcctccacttcacaaagactattttgcccctcacacccaactgcacttcccaaccacccactttgctccccattttgccctccatgacgagatcaacttcctgcagcacccccaccctcctc

SEQ ID NO: 2232 - DNA, 361 bp, Glycine max
  Clone ID: LIB3028-037-Q1-B1-E9
tgcttgctggcatactctatgatatggaggcaactacaacagagggaggaggcaacacatgtgttggaggtcattgttacaggctagtctttattgtcatgactggagcatgcattgttggattcttcttagacattctgttgtcaatcagaaccaagaatatttacaccaagatttccacgagcaagaagcccaagaaatccttaggaacatcaaataggcagtgattcagaatggtatgacattcctgggattgatgaactttatgctcaagtgatatctcagtatccgtcagcaaggtgacttgtcctatctgatagttaaaactcatttttccaataaaggagggccatttgttttt

SEQ ID NO: 2233 - DNA, 386 bp, Glycine max
  Clone ID: LIB3028-037-Q1-B1-F1
gcagaagcctcctctgcctcgcaatcatcggcattgtcgtcgccgccgtcggaggtcagtctccagcggcggctcccaccacttcctcggcatccccagccacagccccttctaaacctaaaccaaaaccacctgcgccagttgcttctcccacttcatctcctccagcttcatcccccaatgctgcaaccgcaacccctcccgtttcgtctcccacggtagcatctcctccgtctaaagctgctgctccagctccagcaaccactcctccggtggccacacctcccgcggccactcctcctgcggctacacctcctgctgtgacaccagtgagctcgccgccagcgccagttccggtgagttctccaccagcgcctgttccggtg

SEQ ID NO: 2234 - DNA, 382 bp, Glycine max
  Clone ID: LIB3028-037-Q1-B1-F10
ctccatttccatttcctctctctcagtttccaagaatcttaagctatgggaaagtcttacccaaccgtgagcgctgattaccagaaggccgttgagaaggcgaagaagaagctcagaggcttcatcgctgagaagagatgcgctcctctaatgctccgtttggcatggcactctgctggaacttacgacgtgagctcgaagaccggtggtcccttcggaaccataaagcacccctccgaactcgctcacggcgctaacaacggtcttgacatcgctgttaggcttttggagccactcaaagcggagtttcctattttgagctacgccgatttctaccagttggctggcgttgttgccgttgaggtcaccggtggacctgaag

SEQ ID NO: 2235 - DNA, 390 bp, Glycine max
  Clone ID: LIB3028-037-Q1-B1-F11
acaatttcaatctctctctctctctgtctctctctctctagacttagattttgtgaatggctgaagtggaagagggacaggtcatcggcgtccacaccgttgatgagtggaagctgcaactccagaatgcaaaagactccaaaaaactgattgtggtggattttactgcttcctggtgtggtccatgccgttttatggccccagttcttgcagagattgcaaagaaaactcctgaattgatcttcctcaaagtggatgtggatgaagtgaggcctgttgctgaggaatattccattgaggccatgccaaccttcctcttcttgaaagatggcgagatcgtggacaaggtggttggtgctagtaaggatgaccttcaagccaccatagcca

SEQ ID NO: 2236 - DNA, 385 bp, Glycine max
  Clone ID: LIB3028-037-Q1-B1-F12
gaaaatttaacaattagggttgcttctcctttgccgacccatggctcccaaagctgatagttcaaagaaggctgatccaaaggcacaggccttgaaaactgccaaggcagttaagtccggtgctaactttaagaagaagaccaagaagatccgaacatctgttaccttccatcgaccaaggactttgaaaaaggataggaaccccaaatatccacgcattagtgctccacccaggaacaagcttgatcactatcagatattgaagtttcctctcacgactgagtctgcaatgaagaagattgaagacaacaacactttggttttcattgttgacttgcgggccgacaagaagaagatcaaggatgcagtcaagaagatgtatgat

SEQ ID NO: 2237 - DNA, 389 bp, Glycine max
  Clone ID: LIB3028-037-Q1-B1-F2
gcagacttaacaacagcacaaagcgggttactgtctgttcaagctaccatctctctctctctttcttagtgcctccttgccagaagttaaaatggcccaagaaactttcctattcacatctgaatcagtgaacgaggggcaccctgacaagctctgtgaccagatctccgatgctgtgctcgatgcatgcttggagcaggaccctgacagcaaggttgcctgtgaaacctgcaccaagaccaacatggtgatggttttcggagagatcacaaccaaggccaacgtggactatgagaagattgtgcgtgacacatgcaggaacattggttttgtctctgatgatgttggtcttgatgctgacaactgcaaggtcctcgtcaacattgagc

SEQ ID NO: 2238 - DNA, 388 bp, Glycine max
  Clone ID: LIB3028-037-Q1-B1-F3
ctcaaagctcacggacttgcgcctgaaattccagaggacctgtaccatttgattaagaaggcagtttcaattaggaagcatcttgagaggaacaggaaggacaaggaccccaatttcaggttgatccttgttgaaagcagaatccaccgacttctccccaataacagaagaactagaaacctcccaccatctcggaaattacaatctcaaaacgtgcaacacactggttgcctagagaatgtatcaactttcatgggttttgcttccttgcagtcaccgttgagccagcaatttgccatatcattttgatgtttatttgaaggctggataggttatgtggcttagttttgttcagaacctatggttagactgacaaagataattttac

SEQ ID NO: 2239 - DNA, 389 bp, Glycine max
  Clone ID: LIB3028-037-Q1-B1-F4
ataaccatgggtatctccaccatcgcttctccttttgactccatcatcttcggtttgtacttcatactctttctttctttcttttcctttacaactctttcttaattatcttctccattaatcagatttggacgacaccttgtacccctccagcaccggaattgacaagtgcgtcaagaaaaacatccaactctttctcatccagaaatgcggattctcagaatccaaagccttgacccaacgagttgagctcttcaaaacctacggaagcacccttgccggcttaagagcacaaggcctcgatatcactgcagaggactaccacggtttcgtgcacggaaggctaccttacgactccatcgacactgatcatcagttacggaacctcc

SEQ ID NO: 2240 - DNA, 352 bp, Glycine max
  Clone ID: LIB3028-037-Q1-B1-F5
ctgcgacttccaaacggaacgtcacatcttcaagcgccgcaacgacgggatttacattatctaacgttgggaagacatgggagaagcttcagttagcaactaaggttattgttgcagttgagaaccctcaggacatcattgttcaatccgcaatgccttatggtcaatgagcggttctgaagtttgcacactacactggtgcacatgctattgctggtaggcacactcccggtaccttcaccattcagcttcacacctcattcagtgagcctcgtctccttatcctcactgatccaagaacagatcaccagcctattaaggaagctgctcatgagaatattcccacattgct

SEQ ID NO: 2241 - DNA, 384 bp, Glycine max
  Clone ID: LIB3028-037-Q1-B1-F6
attatggagcccagattcgtaatctccgcatcggaggccgaatcccaatcaatctccaaactcctcccttccctcgtttcctcttctcagtccctcgcccgtccttccatctccaactttcccgtcgccgccgtcggactcgccgcctccggccgcatcttcgtgggcgtgaacgtggagttccccggcctccccttccaccacaccatccacgccgaacagttcctcctcaccaacatggccaacaacgccgagacccgcctcgactccttcgccgtctccgccgccccctgcggccattgccgccagttccttcaagaactccgcgacgcccccgacatccaaatcctcatcacctcccacaaaaaccctcacttcagccct

SEQ ID NO: 2242 - DNA, 372 bp, Glycine max
  unsure (1)..(372): unsure at all n locations
  Clone ID: LIB3028-037-Q1-B1-F7
tgctggtgatcgatggagtatcatcacgggacttgttggagacacccattgttaaacacctgagttttgccaaccaacattgtttgttttggtgggttctaccaagacttttcctttatgtatatttttgtagtgaagggagaaaaaaaaccgtttacatttgaagtaacttactaccttctcattggttatatatttatagtattgtaaatgtctttccttttttatttatgatgttgtgataattaacacctttgttccccccaagtcgctggcagaatcattaggggtataagcaaacatggattattttggccagttgactatagtttgttcatttgtangggtgcacgcaatggtatatattcttta

SEQ ID NO: 2243 - DNA, 385 bp, Glycine max
  Clone ID: LIB3028-037-Q1-B1-F8
aacactcataacacaaagcacaaagcaaagctcatccttgagttaaaaaatggcagcagcttcttccatggctctctcatccccatccttggctggcaaggccgtgaagctgggcccatcagccccagaagtgggaagggtgagcatgaggaagaccgtcaccaagcaggtctcctcaggaagcccatggtacggcccagaccgagtcaagtacttgggcccattctctggcgagcccccgtcctacctaaccggtgagttcccaggcgactacggctgggacactgctgggctttccgcagacccagaaaccttcgccaagaaccgtgaactcgaagtgatccactccaggtgggccatgctcggagccttgggctgcgtcttc

SEQ ID NO: 2244 - DNA, 388 bp, Glycine max
  Clone ID: LIB3028-037-Q1-B1-F9
ctcttttggattcttcttcttcttcaccaccctgtgatcgcagactcaacactctcgctagacacttccttccgcaaatggcttctcacgacagcatctccgcttctccaacctccgcttctgattccgtcttcaatcacctcgttcgtgctcccgaagatcctatcctcggggtaactgtcgcttataacaaagatccaagtccagttaagctcaacttgggagttggtgcttaccgaactgaggaaggaaaacctcttgttttgaatgtagtgaggcgagttgaacagcaactcataaatgacgtgtcacgcaacaaggaatatattccgatcgttgggcttgctgattttaataaattgagtgctaagcttatttttggggctga

SEQ ID NO: 2245 - DNA, 354 bp, Glycine max
  Clone ID: LIB3028-037-Q1-B1-G1
ctttctctctcatcatccctctcgaatagaaaaacagaacagaagaaagaagaagaaaagaaaacccaaacaaactctaaaagaaagaaagaaagaaagcacgattacctgcacttgttcttcttcctcctctgcagtaaaaccctagccatcttaatcgatccgaatcccgagatccgattgcaaggctggcgggtattcgggtcaagtaaatgacggatctcccccgccgcgccttattgataatagggttaccgcgctgctgtgacgattgttgttttcaagaagaagaagaagaagaagaagaagagtgaagcatgctgagcgtggtgcgcgtgcaactgccctcggaaa

SEQ ID NO: 2246 - DNA, 389 bp, Glycine max
  Clone ID: LIB3028-037-Q1-B1-G10
cagcgtctcatctcgtgttcgaagacaactccagcgtccccttggttccggaagagaactggtacatcgaagagaactctgtgacccatcactaagccctgtcgtcgaagagaactctgtgacccatcactaagccctgttcaaggtgtgtcgtgccgcgatggtatcgtacgaattgacggacgaagggcagcttgcttgtggcttcaacatctgccaaccaaacccttagtcatctgggatttaaagggagggaccgttgttggttgtcgcatgtggaagagataccatttctactgcaagttccacaaaacgtttagcatctgaaaatgtttttgttgttcaggttctcgtatccttggtctgccgcttcctagttgcttaacctc

SEQ ID NO: 2247 - DNA, 386 bp, Glycine max
  Clone ID: LIB3028-037-Q1-B1-G11
gggtctgtctctttcatccttcaattgtggttagtttattcttaattgcagagttgaatcaagtttttattttttttatatgggtttgtgttattttattgggaaaggaagacttattctggtattgacttggcctttgggattcccactactgtggttgttaggtgcttgttttgtgttgtgttgtgtgtgttgtttcctcctctgtaccatcttgatttcattggtaacagtataaggaaaaggttctttcttgtggaaattagaaaagggtcccttgctttaggacagtgagagagaaaagtatttcttcctggtgatgtcttttgattcgtctctggaatcttatgcaaacccttccttcccttttgcttgcttgcatggga

SEQ ID NO: 2248 - DNA, 397 bp, Glycine max
  Clone ID: LIB3028-037-Q1-B1-G12
acttgaagaacctctgaaaatcctttctttctttcatcgatcactctctctctctagatctgttcaaatctccgaacatttccgctccaattttcatttccctgaacaaaaccaaaccctaaccctttctttctgtatgatacctgattcccccccagaggcgtagtttttgtgtcgatttgtaaattctttcggtagtttaggttagaattttttgtgaagtttttagggttttgaatcggtgagatgaatcacaacaacaacaatagagcgaggtaccctcccgggatggggattggtcgcggaggtttcaatcccaacctgggccagaacccgagcctgaaccagaacccgaacctgaaacagaatcatcacgcgttcaaggctcggccgccgt

SEQ ID NO: 2249 - DNA, 392 bp, Glycine max
  Clone ID: LIB3028-037-Q1-B1-G2
aaccggttcgagccaatacgcgattgcgaagttcatcgaggagaagcacaagcagcttccaccgaacttcaagaagcttcttctctaccatttgaagaagctcgtcgccgccggaaaactcgtcaaagtcaaaggctcgttcaagctcccacctaccagacctgctgcatcttcttcttcttcttcttcgccggcaaagaagaaaaagcccgcagctgccaagtccaagcctaagcctaagcccaagcccgctgcgaaagccaaggatactaaggcaactaaatcgaaggcaccagctaagcccaagccagctgctaagcctaaagccaaagctccagccaaggccaaacccgctgctaaaccaaatgcttctgctgctgccaagcccaagc

SEQ ID NO: 2250 - DNA, 390 bp, Glycine max
  Clone ID: LIB3028-035-Q1-B1-G6
caaaccaagatcttaaaatatctcttccatacaagtttgttttcaaagtgtttttgtctcccaaatcctactcttgtgaccacaagccttcacttcactctctctctctctctctctctctctctctctctctctctctctcttttttgaaacccttttttctcttctcaaaccaaaccaagcaagcaattatattacactactcactcactgagaccatggctcctaatatcaccaccgtcaccgacgctcaagccaaggccgccggcgggcgtggccgtgcctacgtcaccttcctcgccggaaacggtgactatgtgaaaggtgtcgttggcttggccaaaggtctgaggaaggtgaaaagcatgttaccctcgggtggttgcattg

SEQ ID NO: 2251 - DNA, 55 bp, Glycine max
  Clone ID: LIB3028-033-Q1-B1-G4
ctcgctcttcgcttcctctggtggcgagagtgtcgactcctgctaagaagagggg

SEQ ID NO: 2252 - DNA, 53 bp, Glycine max
  Clone ID: LIB3028-033-Q1-B1-G6
ctacattattagtgtctgtgaggggtgttagtaataagggcgtcggggggggg

SEQ ID NO: 2253 - DNA, 204 bp, Glycine max
  Clone ID: LIB3028-033-Q1-B1-G9
aactatcaacgctgactcgaagatctttcgtgaacatgtctagagatgtgggatactactggataaggattactaacctagttgccttaaccctgtccggtgggaaaatcctttaagaaatttggttcaattaaaaaaccaattttggaaaaaggacaagttgcccctttaaaacaaggttcacaggattcaagtccaaaaggg

SEQ ID NO: 2254 - DNA, 270 bp, Glycine max
  Clone ID: LIB3028-033-Q1-B1-H10
tgcccttgttgactcaaggcataagaaggtttttaaggtgaaaaactgcataactgacattgatcctgagagggaaaaagaggaaaaagagaaggctgaaagccaaaatatccgcgcaaatgtgcttcttaaccgaaagcgtgagaaggtgaatcggaagtatactccagctgtggagaggaggcgtcaactttctcctgggtttttagaggatgctttggatgaggaggatgaagcggattattatgataatcgtcgttctcagcatcg

SEQ ID NO: 2255 - DNA, 350 bp, Glycine max
  Clone ID: LIB3028-033-Q1-B1-H11
cgaggatgttgtacctatccctggaacaactaagattaagaacctggatcaaaacataggtgccttagcagtgaaactgtcagaaaaagacctgagagaaatttctgaggcggttcccattggtgatgtagcaggtggtagatactacaatggattggatcacttttcatggaagtatgctaacacacctccaaaagattcaaaaatctcaacctgacgcacccaaccaaccctttggttagggaatctaccaagtcatcatgaattgagggtaacaaggctggcaaaggctaatatcaggatgctatttaaatatcaataatgtagcccttcttgatgttggacttcct

SEQ ID NO: 2256 - DNA, 283 bp, Glycine max
  Clone ID: LIB3028-033-Q1-B1-H12
ggcttctgcagaagtagagttccgatgctttgttggtgggcttgcttgggccaccgaccacgatgctctcgagaaagccttctctcaatttggcgaaatcgtcgaatccaagggcatcaaccgattgtgaaactggaaaattcaaaaggtttggaattgggaccttcgccaaaaagcaagcgattagagacgcaattgaaggaatgaacgggcaaaacctccaccgtcgtaatataaccgtgaacgaggctcaaatcccgtggaaaaggttgcgggcggggcc

SEQ ID NO: 2257 - DNA, 357 bp, Glycine max
  Clone ID: LIB3028-033-Q1-B1-H9
aagaaaatcctcacccattttcttcgtagccaaacactctgaaattcccagttatgtcgtggcaagcgtatgtggatgatcacctactgtgtgaaatcgaaggtaaccacctcactcacgccgctatcatcggccaagacggaagcgtttgggctcagagcaccaacttccctcagttcaaacctgaggaaataactgccatcaataatgactttaatgagcctggatcacttgctccaactggattgtatatcggtggcaccaaatacatggtcatccagggtgagcctggtgctgtcattcgagggaagaagggtcctggtggtgttactgtgaagaagaccggtgcggccttga

SEQ ID NO: 2258 - DNA, 362 bp, Glycine max
  Clone ID: LIB3028-034-Q1-B1-A10
gcaaaaaatggcttctagttcagaatctcaatctcagtctaaaccgctccaagaccgagttgcaatcgtcaccggctcgtcccgcggaatcggccgagaaatcgcgcttcacctcgcctcactcggcgcgcgactcgtcgtcaactacacctccaactcggcccaagccgactcagtcgcggcgcagatcaacgccggttccgccaccacgacaccgcgcgccgtcgtggtccaagccgacgtgtccgatccggctcaggtgaagtcgctcttcgactcggccgagcgcgccttcgactcgccgatccacatccttgtcaactcggcgggcgtgatcgacggcacgtatccctccgtcgccg

SEQ ID NO: 2259 - DNA, 362 bp, Glycine max
  Clone ID: LIB3028-034-Q1-B1-A11
atttgactctcacaaaccttgcatccatccacacatggctggcatgaactctagcgtattggcctgtagctatgccatatctggtgcagcatgctccgagctcaatgggaaggtcacttccgtggcctctgttgcatcctctggctacaagttgccattgatcaaatgtgaggccagagttcccaaatccaaagaatctgaaggaaggagaggtgcccttgttctcttggcagctacccttttcatctctgcagcctccaattcttctgccaatgctgggatcattgatgattaccttgagaggagcaaggctaacaaggaattgaatgacaagaagaggttagctactactggagcaaact

SEQ ID NO: 2260 - DNA, 376 bp, Glycine max
  Clone ID: LIB3028-034-Q1-B1-A12
caaagctcctcaaggagatgttttcttggctgagctgtgggccatatggacaggccttgttctttccttgggtcttgggattaaagcaatatgggtggaatcaaactccatgattgttgtgatgacggttaatacaaagcaactttgtccattagctgttggctatttgaacgagatatggaaactgttaaagaagtttgatagatatcaaatttctcacgcgtggttgcgaaactaatatggcagcagatcatcttgctaagatggatcttttggcaaatgaagtggttttgtcgccagttgattttccacctagcctttccagaatcattgaagatgatgccataggaacgagatatcgtatacgatgatatct

SEQ ID NO: 2261 - DNA, 348 bp, Glycine max
  Clone ID: LIB3028-034-Q1-B1-A2
ttctgacccagcttggctttcatacttgttttgtgtggcagagcaagagagagcgcactggaaggtatctcagtgggtttgaagaagtactggagaagaagcattaggggataccaaagattacacgtctcggatcggcgaaagaaggaaacggttcagcttggaggcagccagagaaggaggagatggcgcatacagttagctcgtaagatcagaattcccaaaatctcttctccaaagaaattggtgctgtgggtcagagacgcctacgtcaggatgatgctgggtatggctaactccatgggtgcctccgccgtcggctacggcggagacgccgcgttcaccgcc

SEQ ID NO: 2262 - DNA, 373 bp, Glycine max
  Clone ID: LIB3028-034-Q1-B1-A3
agttccatcaatgaagaccggtgaagcaccggctctgaaggcagagcaagaaaagactactctagaaaatcctcctcttcaagatcagatgcgggctccagaatactcgggagctcaacaagctcaacattcagcttcaaagtcaccagctgccattttaccagattctgagagtggagatgcgaaattacatacttcatcaacggttactgttcatgagacgaacacaacactttctgagcaccttgattccaagataacagagggaagaaaaccggttgaccgttcctcatgtggttccaacacggcctctagcagcgatgtggaaactgatgcactagagaagggtgagaaagggaacggaagagcctga

SEQ ID NO: 2263 - DNA, 355 bp, Glycine max
  Clone ID: LIB3028-034-Q1-B1-A4
atctacttcagaatgggtttctcacaagacccctgcactgattccaatgccccaacctcaacctcttccaccttagctgtagatcactactgtgactacgacaagctcaaattcacaacctttctcagaaaaatgttctgggaattcggtctcgcctgtgtggccaacccttcccagcgccggagaagctccggcgacggcaaagagacgaacatggagaagaacaaggcgtggctgcttgcggagtctggtgggtgtggagcagaattgaccaatgctgaccctcaatcggttcactcctctttcaggttcagcttctgttctcaagttgagttggcgtccctgaacatgagtt

SEQ ID NO: 2264 - DNA, 368 bp, Glycine max
  Clone ID: LIB3028-034-Q1-B1-A5
ttattttttgggatataggtggtggttttgatatcttcaataaaaaagggaaaaaggtacgttttgttcgttggggatttcctggaaaaaatcgtcgtattattctcgaaatacctatgaacgagcttcactccatcagaataataacagaagttaaagaagagggtatttttactcgtaccagtacttttgagagtatcgtttatctggaaaccatagaacaggggtttattcccttgactcgtattgaagataatttgaatgggacacaaattgcacataaagctggcgaattatctgtatttttgggtgtaccacttttttactgatgagaattgaacttaattagaaattaaattgcacaaaaa

SEQ ID NO: 2265 - DNA, 257 bp, Glycine max
  Clone ID: LIB3028-034-Q1-B1-A6
gaaggagactcgcttctccaaatctccattccaagagtacacagatctactggcaaaaccaacaggaaagactctaatcttggaggaggaaagggtggatgcttgatttgctagttttgctttatggatgttttaggaactttattactttacatactttgttggttctgtgctttacttttggttttgatagacggtatgtctctgtatgcattttgattgtttccaagttttacttgactgcagttgagtaccat

SEQ ID NO: 2266 - DNA, 380 bp, Glycine max
  Clone ID: LIB3028-034-Q1-B1-A7
gctagaaacactcatctgaaaatgaccatgcttgttttgtttgttgctacagttttggtagcatatgaatgccatggctcagactaccagaagttccctctccaaatgaaaactgggtttggtgggcaatacagcagtgaggtggcatgtgccagttggaggcttggcgttgcagcacataacgtagtcaagtggcaaactgttcctgcagcttgcggagagtacatagctgactacgttctaggagatgaatatagatcagattccaaaacagttaaccaagaagcttatttctatgcgaaatcgctcaaactcaccaatcaaagatgtctttgtcttggacgttgacgacactactctctctaatctccagtattttg

SEQ ID NO: 2267 - DNA, 363 bp, Glycine max
  Clone ID: LIB3028-034-Q1-B1-B1
ttcagtttgtggcgaaaggagagaacgtgtgtgcctcgccgtgtaagagtttatgggtgctgcgaaaggagagaacgtgtgtgcctcgccgtcgccggaaatctcgaaggaagtggaccccagccatgcctccgagaccttgcgcatcgttaacgttatgggggctgccacccccattcccgctaactgcaacgcgcgtggcttctacgacgctttcctccgaagcttcatcaaggtcgatcacatccaacgtggaagaatttcatgcactgttgttgccaaaccacccatctgtaatcgctatggaactctgcatggaggttctgttgggtccttggttgagattttatcgaatgcttgtgc

SEQ ID NO: 2268 - DNA, 367 bp, Glycine max
  Clone ID: LIB3028-034-Q1-B1-B10
agcccagcttgatggaacggaacagaagtgctcgtacctttgagtgggaggattcaatagacaactcacaacaagcaagacagccaaggaggaggaaaaggaaatggagttcgttggaagaagagacactaagggctggtgtaaaaatgtttggagaaggaaactgggcaacaatccgaagtttttacagtaacatatttgaaaatagaagtggagttgatctgaaggacaagtggagaaacatgatacggtgacactaacgcgctactttcatgtgtatatcttggtaatgacaattttgacagcagcttctctctatgcaatcaagctttgttaaaacaccatccaaatcgtacagttagtgaag

SEQ ID NO: 2269 - DNA, 368 bp, Glycine max
  Clone ID: LIB3028-034-Q1-B1-B11
gcccaaagctgctgcacctaagaagaaggctgttgccaaacccaaggccaaggctgcggccaccaagcccaaggccaagcccgctaaggccgcaccaaagaaggtcgccgctaagcctgcgaagaagactcccgtaaaggccgtgaagaatcccaagagcgtcgtgaagaaacctacaagcgtgaaatctccagcgaataaggccatggctaagaagtgagggattggaatgggttttaatttggcgttatagtgtttatgtatttcgggttgaatcgtagtacatgtggatatatttttagaagagtattgatgtaaattcctttgctagaaattttaacaagtgttcttcttttgcattgatgaag

SEQ ID NO: 2270 - DNA, 365 bp, Glycine max
  Clone ID: LIB3028-034-Q1-B1-B12
gcccgaacttggggaaccattgcccctggcctaccttatgttgaacaaactataaccaatgctggaaattggttgattgggggtgacgtagaggtcattgaaccaattcagtacaatgatggacttgatcattttcgtctatctccgacacaactccgtgcagagttcacaaggcgcaatgcggatgctgtgtttgccttccagctccggaatcctgttcacaatggccatgctttgctaatgactgacacccgaaagcgccttcttgagatgggctataagaatcctgtcctcttgcttcatccacttggaggctacaccaaagctgatgatgtcccacttgattggcgaatgaagcaacatga

SEQ ID NO: 2271 - DNA, 346 bp, Glycine max
  Clone ID: LIB3028-034-Q1-B1-B2
gttagtaaggagttcgttgagaaaaccgtagtgctacaccgtcaggatattaaaggatgctgcgacatgagagtacgactctgcatcaccgataccttgtatcggttgggacatgggcattatacaagtgactactaacagtacacatcatagtagtaatagaagacgtgaagttgactgccaagagaagaaagcattagctagcatagatatgccatgctgcctgatgttgatccagggacgtcacccattgctagaactgtggcccagttacgttttcataagcctatggagttgacccaacactagtctgacacactggagtcacctagttctaccaaatgtg

SEQ ID NO: 2272 - DNA, 328 bp, Glycine max
  Clone ID: LIB3028-034-Q1-B1-B3
gtgtgttatgtccaagaaaattcctcacaggagtagtttgataaggatgtaatggagtaattgcctgtggatgtcccaaaccccccttcgagggccatggattgcttctccaactcctgtaactgacaatagcccccagatttctgcatcacctgcctcagatacaattaagctaggatcagtcaaaggatctctgcctccttcctctggcataaagaatgttacttctggtgtctctacttccagtacaggtttgcaaagtatctttacaggaactgcctctcagcttgatgcaaacaacgtgacagtatcacctgctcaacacaat

SEQ ID NO: 2273 - DNA, 355 bp, Glycine max
  Clone ID: LIB3028-034-Q1-B1-B4
caaaagcaatggctaatagaccttcgaattcttcaattctcctctccctttttctattggccatcgccctctccctcgctgagtcccaatctttcatcggagtaaactacggccaggtcgccgacaaccttccggcgccggaggacacggccagcctcctcaaatccagcagcatcggcaaagtccgtctctacggcgccgatcccgccatcatcaaggccctcgctaactccggcatcggaatcgtcatcggcgcctccaacggcgacattgcgagtctcgccggcgatcccaacgcggccatccactgggttaacgcgaacgtcttgccctactacccggcgagcaacatcac

SEQ ID NO: 2274 - DNA, 388 bp, Glycine max
  Clone ID: LIB3028-034-Q1-B1-B7
aatcttcttctatgggttggcttagtcggttcataactgccgtggctttcttagccatcggagtgatattctcaccggagacactggggtcaaaatcaaccacactttccacctacctcaaactcgctcacctcctctgcttctccaccgccttcggcgccgctctgtgggtaacattcatcggcggcatcatcatgtttaaaaatctgccgcggcatcagtttgggaacctgcaaagcaagatgtttccggcgtatttctcgatggtgggtgtctgctgcgccgtatcggtggcttcctttggctaccttcacccgtggaaaacttcctccagcactgagagataccaacttgggtttttgctctcttcctttgcgttcaatcctac

SEQ ID NO: 2275 - DNA, 401 bp, Glycine max
  Clone ID: LIB3028-034-Q1-B1-B8
catggctatgctgcagcaccaacaattgcagcacttttctgctttctatacttcttccacaggagactatgttgcagacacccccttttgacagactaccccatcctcggcatgctgccacaattactcttcaacctgtggcgtgcccatgattttttcactgagatattgaaacggcatggaccaacaggtgagttcactggaccttggtttaccagcatggactatttggtcacttgtgaccccatcaacgtccaccacatgctgagcaagactttccacaactacgtcaagggacccgagtttcgtcacatttttcaggccttcggagacgggattttcaccgctgattttgaagcatggaagtacaacagggatctcttcacatctctctttaaaca

SEQ ID NO: 2276 - DNA, 370 bp, Glycine max
  Clone ID: LIB3028-034-Q1-B1-B9
gcttttccctcgttgaaatgaaaatgggttcttctttgtggactttgtgtctaattttggcttcactagcctcttctgcattctgtgcctttccacggaggccagtggatgttccattcggcagaaactacgttcccacttgggcttttgatcacatcaaatacttcaatggaggttctgagattcaacttcatcttgacaagtacactggtactggcttccagtccaaagggtcatacttgtttggtcacttcagcatgaacataaagatggttcctggcgattcagctggcacagtcactgctttttatttatcttctcaaaatgcggagcacgatgagatagattttgagttcctggggaacagaac

SEQ ID NO: 2277 - DNA, 346 bp, Glycine max
  Clone ID: LIB3028-034-Q1-B1-C1
aaacacttaggctctcttaaaacaaaggtccctcaaaccactttccccacactctttagtgtgtcatttttttttttgctctttccccacaaagaagtcttggacccttcttctgtgtagtgcaatggccatggctaaggttttctgtgttctgcttctggcactccttggcatttccatgatcacaactcaggttatggcaacagattctgcttatcacttggatggaaggaattatggacctgggagtctcaagagctcacagtgcccttctgaatgcacaagaagatgtagccagacacagtaccacaagccctgcatggtcttctgcaaacaatgctgcaaa

SEQ ID NO: 2278 - DNA, 358 bp, Glycine max
  Clone ID: LIB3028-034-Q1-B1-C10
tgtttctagagatagggaaaatgtccaaatacagtggtgctgaaacaatggctagctttgcttttattctatttgttttatcttggatcatattgcgcctcatttactacccattctggattctttggagtacaagctatgaagttctgctcactttggataaggaaaagcaccgagtggatggtccaatatattattatgtgttcaatagtcttctgtactgcttgcttgttatgcatatttattggtgggtgttgatatatcggatgcttgttaaacaaatccaagcaagaggaaaagttagtgaagatgttcgatctgattcagaagatgaagatgcacatgaacatgaagattg

SEQ ID NO: 2279 - DNA, 362 bp, Glycine max
  Clone ID: LIB3028-034-Q1-B1-C11
tgttgacatgattgggaagaagcttgtgaactccaaggaaggacctccaacctttgaccaaccgaagatgactttgagcaagctcttggagtatggtaacatgcttgtccaagaacaagagaatgtgaagagagtacaactggcagacaagtacttgaacgaggctgctcttggtgatgctaatcaggatgccatcaaaagaggaactttctatggcaaagcagcccagcaagtaaaaattcccgttcctgaaggttgtactgatccaaatgcctcaaacttcgacccaactgcaagaagtgatgatggaacctgcttatacacaccctgagaacctaagcattctccacttgaagagaagc

SEQ ID NO: 2280 - DNA, 370 bp, Glycine max
  Clone ID: LIB3028-034-Q1-B1-C2
cgttgtatttggccatatcattgatggaatggatgttgtgaagacacttgactcccaggagacgagtaggttagatgtccctcgaaagccttgcagagattgttaattgccgagaactgcctatagagggttgatctttacgtggaagtacaacacttttcgtcagattttcagttcagtttccaatgttctgattgtcccttattaatcacgttaatgtgtctggattatcagtagtggctgccaaattggttgacttccggagacagagtggagatagcacatcgatattttgtatgactagactcatgcttaattcttagaacaatagtattcacttttccaaaaagtgcctttgtgttccacaagg

SEQ ID NO: 2281 - DNA, 214 bp, Glycine max
  Clone ID: LIB3028-034-Q1-B1-C3
aggggagtatcaggaccactgattaatggcacgtatgctgagaagacactagaatcacaagagacgatcaaggcagatatcacttgaagaccttgcagaattgttcatttgggtgaactgcctatagaaggtaccgctttacgggcaacaacagcagttttcatcagatttacagttcacaatccaatgttcagagtacgacggattaaccatg

SEQ ID NO: 2282 - DNA, 387 bp, Glycine max
  Clone ID: LIB3028-034-Q1-B1-C4
cagcagctttgaacgacgcagaaggttcatccaatctccgaatcctttaatcgcattgcaaccatgtcgaggagaaaggtcagagagccaaaggaggaaaacgtgactcttggcccagctgttagagatggcgaacatgtcgttggcgtcgctcgcatatttgcctcctttaatgataccttcattcatgtcactgatctgtctgggagggaaacgcttgtccgcatcactggtggaatgaaggttaaggctgacagagatgaatcatctccttatgctgctatgcttgcagctcaggatgttgctgccagatgcaaggaacttggcattactgctcttcatatcaagctccgtgccacgggtgggaacaagacaaaaactccgggt

SEQ ID NO: 2283 - DNA, 328 bp, Glycine max
  Clone ID: LIB3028-034-Q1-B1-C5
gggtgatgcttgaatctgagtgccgattcaagaagatacggaagcctccttacttcaaccgctggatcaacttgaggattcctttccgtgaggtatttggtgctgtgaggtgcaatctaaaggaagctgttgagatagccggcttggcctggcagggacgtgcacattgcggccttgatgatgccaaaaatactgctcacctattggcacttctcatgcaccggggttttacatttttcattaacaatttcaataatgtggcagacagctgatcgaacactgatgtggaaaaattcacaagacaaacaaatggttttccgcaattccc

SEQ ID NO: 2284 - DNA, 364 bp, Glycine max
  Clone ID: LIB3028-034-Q1-B1-C6
cgaagttcctgactcaatgagaagcatacgaatggccttgtatcttactgtacttggagtacgatttttcttaagtaactttttactcagcagtgtggaacatgtcacggggaaaactggcagaagttggattggaaaggagataaattcaagccgtatggatacgttttagtggatgcgagctgtcataaatgcttttgttctgtgtgtctttctcttggtgtcgaaaaggtacacctataagactgtacagagaagagctatggaaactgattcatgtaagagtgatggggttgagatggtggcatgatgagagcttcacagctgtacctctcactgcgatattttcagctgaatcaaatgt

SEQ ID NO: 2285 - DNA, 372 bp, Glycine max
  Clone ID: LIB3028-034-Q1-B1-C7
aaatatatcttatttgagtggattttgttcaagtttactactgaaagatgggtttgaagacgaagataacattacttactattccattagccatgctccattttgtttcctcagaggtgtcagccattgattttcaagagggaaacgttgttcacgaggctaatactgggggtgatgccaaactatttggcggtggtagcttcttccctgctggtggcattggtggtggtgctggatacatccctggtggtggcattggtggtggtggtggtggtggattcttccctggtggtggcattggtggtggtggaatcctccctgatcgtggattcttcatgccaaggttttgcttcagaggatgttgttttggga

SEQ ID NO: 2286 - DNA, 386 bp, Glycine max
  Clone ID: LIB3028-034-Q1-B1-C8
gcgcgttgctgctctagttaatgatagcattggaacattagctggaggcagattcgacaatcaggatgtcattgctgctgtgattcttggtactgggacaaatgcagcatatgtagaacgagcacatgctattccaaaatggcatgggcttatacgaagctcaggagatatggttatcaacatggagtggggtaatttccgatcatcacatcttcctctaacagaatatgatctagctctggatgctcagagcttaaaccctggagaacagatttttgagacattgctttctggcatgtatttgggggaagttgtaacgagagctttattgacgatggccgaagaagctgacttttttggcgatactgttccccccaaattgaaag

SEQ ID NO: 2287 - DNA, 359 bp, Glycine max
  Clone ID: LIB3028-034-Q1-B1-C9
gttttgcactagtcaatttgagttaatgtcagaacatttccaattacgtaaattttgtttgcaagcctcctcaatttggttatttcaatgttatattttgttatgatgcacaatttatcctttatacgatttgatattcgattttccgtcagttaatactggatcacgaacggtatctactattgtgttttcattgttaaatagagtttgatggcactcgcagagtgtgaaatttcattaaccggacaaaatatcatgttttggtagccatttgcaaactgctttggcgatatctttgatattttgattgatagctgcgtaacatgcctgaacactttccttggagaacatgtcctgat

SEQ ID NO: 2288 - DNA, 364 bp, Glycine max
  Clone ID: LIB3028-034-Q1-B1-D1
ggaatggatagtggctttccaaagaaatctgggccaagctcctccaaagtgcaaattcaggaaactgatgaagcaagaaggaagttctcaaatgctaaatctatttcttcatcccaatattttggcgatcagaacaaggctgcagatgtggattctcaagctacattgtctaagttttcgggttcaagtgccatctccagtgctgatctttttggtgactcaagagacaacaacattgatcttactgctggtgacctcatcaatcgattatctttccaggcacaacaggatctctcttcccttaagaacattgcaggagagactggaaagaagctgagctcattggcctccacattgatgacag

SEQ ID NO: 2289 - DNA, 364 bp, Glycine max
  Clone ID: LIB3028-034-Q1-B1-D10
ggcgaacaatatagatcagactccaaaacagttaaccaacaagcttacttttatgccagagacctcgaagtccatcccaaggacacatttgtgttcagtatagatggcaccgtactctctaatattccatactacaaaaaacatggatatggggtggagaaatttaactcgaccttgtatgatgaatgggttaacaagggcaatgcaccggcactgcccgagactcttaagaattacaacaagctggtgtctcttggcttcaagattatattcttgtcaggaagaacactggacaaacaggccgtaacagaagcaaacttaaagaaggctggctaccacacatgggaaaaaattaattctcaag

SEQ ID NO: 2290 - DNA, 340 bp, Glycine max
  Clone ID: LIB3028-034-Q1-B1-D11
cagcctcactgttccaaaaccctaatccttcgtcttccaaggagatggctgaatctcccctcgcacggaattcaacgtcacgttccccatggaaagctcagtcaagatagagatctaggtcaaggtcgagatcaaagtcgaggtcgatgcctagacaaaagccatgatcccgttctataagtcgtggcaggttactgagacatgttgtttactttgagagtaatgctgcaggtgactatgccactcaaggctctagattgtgcactaagattactgacatgatgaacactgttacggccagatgtagatagtacataccatttttttgatgacaaatata

SEQ ID NO: 2291 - DNA, 358 bp, Glycine max
  Clone ID: LIB3028-034-Q1-B1-D12
catgataatatgtataattagcataagattataatgcacgagtgtgtcaaaataaagagggtgtggaacgtactgggcctgggttaccatacatattcagtgcaaaaagctattgggcctagccttatatatacccttgtgtttgctttgttcatagatgtgaatgttacttgacttcagctgacaaagcctcaaacatcttaaaggtttatgaagtactttgttcttcgctgtcgatctataatggaaaatgtttgatcaacatttcatatgttatcctacattcctacctctagagagaaagaaaaaagaaaagaaaaagtataataggatttataatgtaaaagaaagagagata

SEQ ID NO: 2292 - DNA, 384 bp, Glycine max
  Clone ID: LIB3028-034-Q1-B1-D2
gctttgagggactacaaggcacagttggcggaagacccaattgtacacaggcacctttcagccttgtacgatacccttatggagcagaatctctgcaggttgatcgagcctttctcaagggttgagattgcacatattgctgaacttagtgaacttcccacggatcatgtggagcggcagttgtctcagatgattttggacaagaagtttgctggaacattggatcaaggtgctggatgccttgtcatatttgacgatcctaagactgatgctatatatcctgctactctagagaccatttccaatgttgggaaagtcgtggacagtctttacgttacgtctgccaagataatggcatgagctctctggttattttactccgat

SEQ ID NO: 2293 - DNA, 357 bp, Glycine max
  Clone ID: LIB3028-034-Q1-B1-D3
ggctggccttcaacaatagaacttcttcccgaacgatctcttgtacccacgtccataaccccaataagcttcacctaaacggagcatgcttcccctccaaagctctaatgttcacgatcaggactcagcatgaacatccagcagggattaatgccactccttcaacttcttctgccgttgtttagacccaaaagggtcagtctattgctgccgttgacgacatgaactaaggctccaaattctcatcagatcctcgttcatggttgcattggatgcccgaagatgacgatgataattgttcggactcttcttgagatgtccttcaattctcctcatcgaaagactgcgtcaatgact

SEQ ID NO: 2294 - DNA, 377 bp, Glycine max
  unsure (1)..(377): unsure at all n locations
  Clone ID: LIB3028-034-Q1-B1-D5
tctccgtctacgcctccagcatccaacaggaccctcaccaactggttcagacagcactctccctctccctgaaccgcacccaagccagcaaaaccttcgtggctaactgcaacaaattcagaggcctgaaacccagagagcacgctgcactcaaggactgcgccgaggaaatcagcgacagcgttgaccgcctcagccggtcgctgaaggagctcaagctatgtaaggttaagggtgaggacttcacgtggcacattagcaacgtggagacatgggtcagttctgctttgaccgatgagagcacttgcggcgatggattctccgggaaggcgctgaatgggaagatcaaggactctattanggctatgatgctcaat

SEQ ID NO: 2295 - DNA, 381 bp, Glycine max
  Clone ID: LIB3028-034-Q1-B1-D6
agcaaatataatttgcagtaatggcttcaatgaataaccaaaaagaaattgagctctttgagggccaatctcttctgtacatgcagctatatgggcacctaagacctatgtgtcttaagtgggctgttcaactaggtattccagacataatacagaaccatgccaaacccatttctctttctgacttggtctctactcttcaaattccaccagctaacgctgcttttgtgcagcggttcatgcgcttcttggcacacaatggaatctttgagatccatgagagccaagaagatcatgaactaacatatgctctaacccctgcatcaaagcttcttgtcaatagtagtgatcattgtctatctccaatggttctagcgttta

SEQ ID NO: 2296 - DNA, 341 bp, Glycine max
  Clone ID: LIB3028-034-Q1-B1-D7
gtcagataatacccacatccgagaccaaatgggtttgctctgagaaccgaaatgggtgacgaggaaccgtccatcagcgccgtcaccggtctccgtcgagtcaacacacgcatctcatccgtgctctccctctccgtctcgatcagagtctacgccggaaagtggcaacttatccggagccggctggaggcactccactcggccctcgtcgccggagatccgacgtcacgcaccggcgaactcccggcgagaacaggcacggcagcggagtgcctcgagctggcgcggcagttcatggatcagtcctagagcggaaagcttcatacgcacatcgatgtgga

SEQ ID NO: 2297 - DNA, 385 bp, Glycine max
  Clone ID: LIB3028-034-Q1-B1-D8
atacattgtagtatcacttttgtctcggaatttgttcttttgagttatggcaagcttaaaggttgcatgtgtggttttgatgtgcatggctgtgatgagtgcaccaatgatggtgcaagccgtgtcatgcaatgatgtttctgtgaacctagcaccgtgcctatcttacctgatgcagggtggagatgttccagaatcgtgctgtagcggagtgaggaacattctgggttctgccagcaccacctttgacaaacaaaccgtgtgcaaatgtcttcagcaagctgctaataactatggcatcaacgacgaatacgctcaggcactccccgcccgctgcaatgtcagcgtcccttacaagatcagccgattcaacaactgcgactcc

SEQ ID NO: 2298 - DNA, 375 bp, Glycine max
  Clone ID: LIB3028-034-Q1-B1-D9
catcactctccctctctcccctctcctcaccaaacctcattcctcagactcagatccattccactctgtcaaactcgccgcttcctcttccctaacccgggcccaccacctcaaacaccgcaacaacaactccccctccgtcgccacaaccccagcataccccaaatcctacggtggatactccatagatctcaacctcggaaccccaccccaaacctcccctttcgttctggacacaggtagcagcctcgtatggttcccctgcacctcccactacctctgctcccattgcaacttccccaatatcgaccccaccaaaatccccaccttcattccgaaaaactcctccaccgccaaactcctcggttgcagaaa

SEQ ID NO: 2299 - DNA, 376 bp, Glycine max
  Clone ID: LIB3028-034-Q1-B1-E10
gcaaaattcaccattctgtggttgggctgcgatcttgcatatcagaaggtgcaattattgaagacacgttattaatgggggcagattattacgagacggaggctgataagaggtttctggctgccaaaggcagtgttccaattggtataggcaggaactctcatatcaaaagggcaattattgacaagaatgctcgaattggggaaaatgtcaagattattaacagtgacaatgtccaagaagctgcaagggaaacagatgggtatttcataaaaagtgggattgtcacagtaatcaaggatgctttaattcctagtggaacagtcatctaaacacaaccacctccccaaaaaatttcttgtaccccaaatcctaa

SEQ ID NO: 2300 - DNA, 372 bp, Glycine max
  Clone ID: LIB3028-034-Q1-B1-E11
ggaacacaacgaatgcagtgtcttgccgctttcacaagtttggtgatgaccaaaagaatctggtcttccaaggtgatgccacatcttcttccaagggcatagaactcacaaagttacacggtggaggaaagccagtgggtggcagtgtggggagagtgttatactcttctccagtgcacctttgggaaagctctacagtggtcgcaagctttgaaaccgacttcaccttttccatctcatcagactctactactccaggtgatggccttgccttcttcattgcaccatttgacactaaagtccctccaaactctggtgggagcaaccttggactcttcccatcagacaatgttgttgctgtcgagtttgaca

SEQ ID NO: 2301 - DNA, 333 bp, Glycine max
  Clone ID: LIB3028-034-Q1-B1-E12
gtaagatgattaattcaatgtcatgacacattctcatgttaggaaaatttggacatcatctggacatcaaagagaatctgacatcatcgactacagacatacccttcacttgttgaaagaatagctgagagacaatacttattatggtggagacagtctaagtttcgtcgatatagcacttgtgccaatccacacttggttcaacacccattaaacttttggtaacctcaacaaacacagtgagtgccacaactctattgcatgggctaacatgcgccatcacaccaattgcgttgccaattcccttcctgattagcaggaggtttattagtt

SEQ ID NO: 2302 - DNA, 351 bp, Glycine max
  Clone ID: LIB3028-034-Q1-B1-E3
ctcgagccgaatcggctcgagatttttcttgcgtacacccgcattgttttttccccacaagcaagtttgcaaaggcaataatctctattaccctcagtatccacaatcataacaaatggccactagaggcctcaaaatttgcttggccgtgtcctctcttttcctgatcattcttgccatcgttattgtgaccttaattttgaccatctttaaacccaagaagccagatatatttctccacccagttgacctagacaactttcaattgctttcacctaatacaactagtgcatccttaggcatagtgatcacaattgtgaaccctaattatggcaacttcacgtacgtgaa

SEQ ID NO: 2303 - DNA, 358 bp, Glycine max
  Clone ID: LIB3028-034-Q1-B1-E4
cgccacggccgaagagatcgcaaagcacataaaaaactcgacgctctaccacgaacttgccaccgacgacatgaacaaacaggccatggacatctgcaaggaagttctaggttacgctgtcgatgacatgcaccaatccgttcgcaagttggaagagtttgaactaaacaagttgaacgattacgcctatgatctcaaggtctggatcgccggtactctcgctcaccaacagacatgtttggatgggttcgagaacacgaccaacgaggctggcaagaccatggctagggttctcaacacttctttggagctcagcaacaacgcattggacatagtgaacggtgtatcgaatctcttc

SEQ ID NO: 2304 - DNA, 362 bp, Glycine max
  Clone ID: LIB3028-034-Q1-B1-E5
gtcaaacttgagttcaaacactctcatcttcttattcttctgctttcactctctgactcaatcgttctaatccacaaaaaatgaccttaaattacaacattgccctcgccttctctgcggtgctcacgctgctcctctttcccctactgaccgtaggggagctcgtggaggagcagccactagtcctcaagtaccacaacggccagctcctgaagggccgcatcaccgtcaatctcatctggtacggcaccttcaccccgatccaacggtccataatcgtggacttcataaactcgttaagcagcgcgccaaacgcgcctctcccctcgaccgccacgtggtggaaaaccacggagaagtac

SEQ ID NO: 2305 - DNA, 373 bp, Glycine max
  Clone ID: LIB3028-034-Q1-B1-E6
gttctctgctaccgcaaccgttcttcctcggaacctcgcattcgcttcctccacgaaactctccctctctcacagtcactctcttctacatcacttcctttcattccccagtcccaaatcagcaaaccctcgcaaccgggtcgcaatctctctcgaaaccccacgcgctcaatccggcgcgtccgcctccgcctccttccatggcctctgctacgtcgtcggcgacaacatcgagaccgatcagatgattcccgcggagtagctcaccctcgtcccttcgaagcccgacgagtacgagaagctcggctcctacgccctcgtcggcctccccgccacctaggccgcgcgcttcgtcgaccccggcgagacgaag

SEQ ID NO: 2306 - DNA, 371 bp, Glycine max
  Clone ID: LIB3028-034-Q1-B1-E7
tgttgttgtggctggtggtatggaaagcatgtctaatgtacccaagtacctggctgaagcaaggaaaggatcacgccttggacatgattcacttgttgatgggatgttgaaagatggtttgtgggatgtctataaggatgttggcatgggagtctgtgctgagctatgtgcagataaccatgcattaacaagagatgaccaggataactatgcagttcagagttttgaacgcggaattgctgcccaagaaagtggtgctttttcatgggaaattgctccagttgaagtctctggtggaaggggaagaccatcaacagttgttgataaggacgaaggcctaagaaagtttgatgctgccaagttacgcaaac

SEQ ID NO: 2307 - DNA, 390 bp, Glycine max
  Clone ID: LIB3028-034-Q1-B1-E8
gttcttcttcgtcgttatcttcttcttttgttgtttgtgtgtttgttttttctctcacctgaaaatgtcttgctgcggtggtaactgtggttgcggaagcgcctgcaagtgcggcaacggctgcagaggctgcaagatgtacccagacttgagctacaccgagtcaaccaccaccgagaccttggtcatgggagtggcaccagttaaggctcaattcgagagtgctgaaatgggtgttcccgctgagaacgatggctgcaaatgtggagctaactgcacctgcaacccctgcacttgcaagtgaggtgttggagagctaaagcttcaagcagaaatggcccttagaaataatgataaaaactatatgtactttcaaaactttaaaattaa

SEQ ID NO: 2308 - DNA, 367 bp, Glycine max
  Clone ID: LIB3028-034-Q1-B1-E9
cttttacttggcattgaaaagggtccagaagtactcaacgctgttagaccggctggatcggcacttgttgatgactggcactgcctgaaaaccatggtgaggacttttgagacacattgtggatccttgtctcaatacgggatgaaacacatgaggtcctttgcaaacatctgcaatgtagggataaagaatgaacaaatggctgaggcttcagcacaagcttgtgtcagtattccttccaatccctggagttctctgcaaaggggtttcagtgcataataactccctgtaatgtgcactagtaaagaccaaagtatgattattgttacattatgttacatggttgtacttgtatatacatatcttg

SEQ ID NO: 2309 - DNA, 368 bp, Glycine max
  Clone ID: LIB3028-034-Q1-B1-F1
tgataatgatataaagaaggaaatgcaagaagctgattacaccactaaggatgataatgatatagagaaggaaaaggatgttgtaatggaaaatcaagatgtcaagagtgtggaagatacagatgtcaacaaatccactcattctggagaagctaaagctggagaaaatgttgaggtacctattgaaaaggacaaaggaattgaggtctctgaagtttttctgagaaaggatgaagaaaagattgagcaaccacaggaagagacaaaagaatatcgtggatctggggagccagagaaattggaaacatgcactattgctgacaaaaaggttgaagtggaaggagtgaataaagaggaaaacatcaaaa

SEQ ID NO: 2310 - DNA, 372 bp, Glycine max
  Clone ID: LIB3028-034-Q1-B1-F10
gaatagtgctgcaatggcttcaagtcatgaggaggtgacccttttgggagctactggaagcccatttgtgtgcagggttcatattgccctcaagttgaagggagttcaatacaagtatgtcgaataaaatttgaggaacaagagtgaactgcttctcaaatccaacccagttcacaagaaggttccagtgtttattcacaatgagaagcccatagcagagtctcttgtgattgttgaatacattgatgagacatggaagaacaaccccatcttgccttctgatccttaccaaagagccttggctcgtttctggtccaaattcattgatgataacgtttttggtgctgcatggaaatccgttttcacagctga

SEQ ID NO: 2311 - DNA, 350 bp, Glycine max
  Clone ID: LIB3028-034-Q1-B1-F11
atgtattacgctgtcaggaacacattgaggtgatggcacacatatcagatatgaagaagattcatttgcgggtagaattgaaattgacggaacattttcagaatgccaatacaagtgagtcttaccggaaacgagggtcatgtttgccctacttctaaattggaaaacaggactacttaacggccattgttcaagtaatgtgcaatgctgcaaacaaatcaacgaatgaatagagaatgcacgtgggtccatggaggaagagcagcttcactgcacatgaagtggtcaagattcaatcaaagatgcaattctaatacatccttgggtacaattgcgacatagccccatgc

SEQ ID NO: 2312 - DNA, 354 bp, Glycine max
  Clone ID: LIB3028-034-Q1-B1-F12
cgcctctaagctcgcagttccatgatctcgcgactcaagatgcatatattcgtgagaactttgactggcaggaccatcacccttgaggtgaaaacttccgacacgattgaccacgtaaaagctaacattcacgacaatgaagggatcccacctgaccagcagagacttagctttgcgggtaggccacttgacgatggtcgcacccttgccgattacaacatccagaaggaatcaaccctccatctcgtgctgtcgcctcaggggtagcatgcacatctttgtctagacttgaaccgggaagaccatcacccttgaggtgcaatcctctgacattactgataacgtcaaggccaa

SEQ ID NO: 2313 - DNA, 391 bp, Glycine max
  Clone ID: LIB3028-034-Q1-B1-F3
gaagaaggtgtgttggagaatgaaaactgaaacagagccaaatgaaaccgagtcagattggagcgagttgactcgcgagtgcctcatcaacatcctctctcgactcagcgtcgaggatcgatggcgcggcaccatgctcgtttgcaagtcatggttcagcgtcttcaaggaaccctctcttcacttcgtcttcaacctcgaccctcaattcgactcgcccagcgaatcaactcgctggtggacccccgagttcgaggccaagatcgataacatgcttcgatctgtcgtcgaatgggcccaatcctctctcacccatatacgcattcgccactgttctgatcgttctctcgccctcgtcgcccaaagttgcccaaaccttgacggtgtgttt

SEQ ID NO: 2314 - DNA, 362 bp, Glycine max
  Clone ID: LIB3028-034-Q1-B1-F4
cagggctgaagaggaaagaaaaagaagagcttcatttgaattgatgagaaaggaacaacataaagctttccaagaaaagcataagttgaacccggacaagaataacgacgattttgacataacttcacttgctgacaacgatgagaaaagggtagttaataggagcaacgagtatgtggagcctaatgtgactctatcagtgttaagcaatgatgagaaatcttcttccctttcacagactccttcagcagcaagacgacttgtaccccctggttttgcaagtgcacagttggaacgcaatttggcaaccaagacatcgcttaacactcattcaacagaagttggacaacctgcgcctggtg

SEQ ID NO: 2315 - DNA, 374 bp, Glycine max
  Clone ID: LIB3028-034-Q1-B1-F5
cttatcttctttcccactgaggaaacagaggatagcgtcatagcagcaatggcttctgcaagagaacaaatttattttctggcaatcgtccttctattctctcattcgaaactaatgttatcaaatgctgctataacaggggaaccaattcccgctgaatggccccatcagttccacgcgttgatgttcatgaaccaaagcggaactcttcagaaactggacttgtggtacgactggcccaacggccgcaacttcaacataattcagaatcagctcgactacctcgtaacatacgacctcgaatggaacaacggcacctccttcgtctacactctcgacgcctccgaacccacgtgccaagtcctgcacgtgga

SEQ ID NO: 2316 - DNA, 361 bp, Glycine max
  Clone ID: LIB3028-034-Q1-B1-F6
ctcttcttcaattcatatcatatcacttagatttagagctaaacataaaattgttttcacataccatggacaacaacaatgacttttggaaattcagtgaccagttgaggcttgaatctggtttggccaatctgtctctgaatgattattccatttggagcaacagctacagctccaagaggcctgatcagaggaggaactttgatgtcaagggcagtgatttcaacaacaacaacaactcatcaaaggcttttgatgatgatttcaatgatgggtggaagatcaccaattccaatggaccccttttctctatgcctcacaacaacaacaacaacactcttgaagttggaggcttcaacaa

SEQ ID NO: 2317 - DNA, 380 bp, Glycine max
  Clone ID: LIB3028-034-Q1-B1-F7
cttcttccacaggagactatgttgcagacacccccttttgacagactaccccatcctcggcatgctgcgacaattactcttcaacctgtggcgtgcccatgattttttcactgagatcttgaaacggcatggagcaacaggtgagttcactggaccttggtttaccagcatggactatttggtcacttgtgacgccatcaacgtccaccacatgctgagcaagaatttccacaactacgtcaagggacgcgagtttcgtcacatttttcaggccttcggagatgggattttcaccgctgattttgaagcatggaagtacaacagggatctcttccattctctctttaaacagaaaagcttcgaggtgtttttactgaaaa

SEQ ID NO: 2318 - DNA, 327 bp, Glycine max
  Clone ID: LIB3028-034-Q1-B1-F8
gaacagttgcagcgtccgaagtatgaggaagaggggtgtgtggcacgtggttctttactctttatcatcaccaccgtcccttactagtttgcgaaattagcaaatatggcggaagtgagagggagggacacgtggacggaggagctggcgagtctgatagaggattcgggagtgcgctacggtcgagagtcacctccgacgtcgtttgaggtgcacgcgccgcagatcgagtcgggggagagcttgaaggaacaggccttggagttcgtaatcgcgtggtgcaagatactcatggagcttgggagagggttcagggacattctgcga

SEQ ID NO: 2319 - DNA, 355 bp, Glycine max
  Clone ID: LIB3028-034-Q1-B1-F9
cccaagcgccacttacttaccactgggtggagtgtctttgtcagttccaaaaaattagctgctggtgatgcctttatattcttaaggggtgaaaatggagagctgcgagttggggttaggagggtcatgagacagcaaagcaatgtgccttcttctgttatatctagtcacagtatgcatcttggtgttctggccactgcatctcatgccattgccactggaacactgttttctgtgttttacaagcccagaacaagccggtcagagtttattgtgagtgtcaacaagtatctggaaattcagagtcataaactctctgttgggatgagattcaaaatgcgatttgagggtgatg

SEQ ID NO: 2320 - DNA, 370 bp, Glycine max
  Clone ID: LIB3028-034-Q1-B1-G1
aaaaaaagaagtatcactcatataatactctgtatcacttcacttcgataatcatccatagctactgaagaaaatggcaaccatctctgctgctatcacaaccccatcgatctcccgcgcaactcttgtgcaaaagcgggtctcatctcccgttcttggtttgccagcaatgggtaaggtgggaagagtgagttgctccatggaggaaaaaccttattctgtgaaggaaagcagctctagcatgttggggatgggggcatctctgatggcagctgccagcgctgcagccatgtcaggcccagccatggccttggtagatgagagactgagcactgaaggaaccggacttccctttggcctcagcaacaat

SEQ ID NO: 2321 - DNA, 337 bp, Glycine max
  Clone ID: LIB3028-034-Q1-B1-G10
gaccgttattaccatcctcagcgctgggatgtcagctacggtgctgaatttgttcccggcgctgaggatggttacactgtcatagttcagatgaacaggaaaattggtcccgctgatgagaccgttattaccaacgctttcaaaattggtgaacctggcaagattgtactcaccatagataaccatacatccaagaagaagaaactcctctacaggtccaagaccaagcccatcccagagtaacttgaagctcaagaataaggattttactgttactgttatatgttcatcattattacaaccacaagaacaagaacattgtgctgttcaacttaat

SEQ ID NO: 2322 - DNA, 357 bp, Glycine max
  Clone ID: LIB3028-034-Q1-B1-G11
gtcactaactctgtgcattcttctcgcgctctcagccttcgagcacactcggcatttcctttcccaggatagtagaatatggcagacactgaggatattcaacctcttgtttgtgacaatggaacaggaatggttaaggctggatttgctggagatgatgccccacgtgctgtgtttcccagcattgtacgtcgtcctcgtcacactggtgtgatggttggcatgggccaaacagatgcatatgttggtgatgaggcacaatctaagaggggtattttgactcgcacgtaccccattgaacatggaattgtgagcaattgggatgatatggaaaagacttggcatcatagcttcgat

SEQ ID NO: 2323 - DNA, 375 bp, Glycine max
  Clone ID: LIB3028-034-Q1-B1-G2
ttctctctctctcctcctcgatcccaattccactagggattcaattccgatgcgattccgagcttgttagatccacgacaacgtttcgtttcccagattcttttgtaaaaaaaaataatcttcctttgcccaacaggtaagttggaaaaaaatggaccatgacaagactgggtgccaagctcctcctgaaggtcctatattgtgcatcaacaactgtggattttttggaagtgcagctaccatgaatatgtgttcgaaatgccacaaagacatgttgctgaaacaggagcatgccaagcttgcagcatcatccattgggaatattatgaatgggtcttcaagcagcactgaaaaggaacctgttgttgccgctgc

SEQ ID NO: 2324 - DNA, 370 bp, Glycine max
  Clone ID: LIB3028-034-Q1-B1-G3
cattttacaatgagctacgtgttgcccctgaagaacaccccgtacttcttaccgaggcaccactcaatcccaaggccaacagagagaagatgacccaaattatgtttgagactttcaatgtgcctgccatgtatgttgcaattcaagctgtcttgtctctgtatgccagtggacgtactacaggtattgtgcttgattctggtgatggtgtgagccacacggtgcccatatatgaagggtatgctcttcctcatgcaattcttcggttggaccttgctggccgtgatttaacagagtacttggtgaaaatccttaccgagagaggatactccttcagcacctctgccgaaaaggaaattgtccgtgatgt

SEQ ID NO: 2325 - DNA, 353 bp, Glycine max
  Clone ID: LIB3028-034-Q1-B1-G4
ccaagatcttcacaccatgaaatgagctgggattgttgcacagtaggtctaggcattgtggagtcattggcaaactgttccaattctaggttttctgggaaaattctccaatctacagagagcaagagagttagtctcagtctccagatgatgatgatcaaagccccaaattgccaaatccacagggattcttcgcttgagggatctaagtctttgcccaaagatttttgtaaggctcctccttactatgcccagcaaaatggctctgttgttatccacaacggtgaatgtgaatctgagtccactgttctttttgcgattggggaaagtggccttaaacttgagccgtttgg

SEQ ID NO: 2326 - DNA, 378 bp, Glycine max
  Clone ID: LIB3028-034-Q1-B1-G5
caaagtttcttcctttctctgctctttgccttctctgacacatttggtgccttgtagagcgtgttttggcaggaaggtggtatggcgaaggacgttgaggttgctgagcgtggctccttctctgggaaggactaccaggaccctccaccagcaccactcattgatgctgaggagctcacaaagtggtccttttacagggctctcattgctgaattcattgccactttgctcttcctctacattactgtgctcacagtcatagggtacaagcaccagactgacctcaaggaaaatggtgaaatctgtggtggggttggcattcttggcattgcatgggcctttggtggcatgatcttcatccttgtctactgcactgct

SEQ ID NO: 2327 - DNA, 380 bp, Glycine max
  Clone ID: LIB3028-034-Q1-B1-G6
ctgaatctgttacaatcagagatctaaaattgaattgaccagcttgaccatgaattatggaatcacgggttttgaggtagccaccatgattttaaaggtatccaaaaatgctccaggtagatcataactggtggaagtaaaatttggtcgagtactatagtctaattggtctaaagctgataaaatcagtagctgtaaaatagttgagctttttttttaaaaaaaaatgatcttttgatttattcaaaaatatttttaaataaatagatgtttatgcgtgaaatttaagcatggttttttattgtttgactattaattatggatttttcagtttgttagacatgtaagttttttaataattttatattacgtttgtcact

SEQ ID NO: 2328 - DNA, 382 bp, Glycine max
  Clone ID: LIB3028-034-Q1-B1-G7
tgcaaactcacgcgtgcagagtgatgataataaatctgctgcacctgatcagaaccctttaccagacgcatcagcggtgaaggaaaatggtgggaggaagagtttgatttctagaagcaagtaatcacttggtaaggctattcgcagacttggtggatttcgccatcaggatcgcagggataatgttgaaatgaaattggatgatgggcatggttctaaggtttctggtggtgttgagatgaggagaattgaacctgtgactgtgcctttggttgatcttccagaaatttctgaaccttcagttctcctttcagatagtatacggaacgttctcgatgtttctcttccgcctcttattcacggaaggaaatggctgttgttg

SEQ ID NO: 2329 - DNA, 372 bp, Glycine max
  Clone ID: LIB3028-034-Q1-B1-G9
gcagaaaccaaagaaccatgaagtctctgaggtccatcttagcaacttttgtggttctattatcaatttcactcactatctcacttccaattgaagaagctttcaaccattgtctaacacatcactctcagactccaaaccaatttccctcatcaatctacacttacaccaatggttccttcacttcaatccttgagtccacagctcaaaatctaaggtacttgttgccctcagtgccaaaacctgatttcatattcaccccactggatgactctcaagtccaagcagcagtggtttgtgcaaaaaagcttggtattcacatgagagtgcgaagtggagggcatgactatgaagggctctcgtatgtttccc

SEQ ID NO: 2330 - DNA, 406 bp, Glycine max
  Clone ID: LIB3028-034-Q1-B1-H1
aggaagcctaacttaactccggaattcggtccaacctttcaatggactccatttcccccttcttggcaaggaactctggtcccggtaaccggtgattttggttcgggacaatgtctcgtgtttatgttgggaatttagaccctcgagtcagtgagagggacctcgaagatgaatttcgtatatatggtgttcttaggagtgtctgggttgctcgaagaccaccgggatatgcatttattgagtttgatgataggagggatgcacttgatgcaattcaggccttggatggaaaaaatggttggcgtgtagagctttctcataattccaagggtggtggccgaggagggcgtgggcgtggaggtgaagacacaaaatgctatgaatgtggtgaacctggacactttgc

SEQ ID NO: 2331 - DNA, 344 bp, Glycine max
  Clone ID: LIB3028-034-Q1-B1-H10
atggtttcttgccattatctatttcatagcaggggttcctggaacatctgaattggggtcccgcaaatctctccatgtctctacctctccaactcacgcatcgtggggatggaaatttaagcaatagtgtggcttacattgctataaagaaatcgaggtttcagcatttcaagtcatgacatgcttcacgagaatgaatgcacagatgatgatgtggccctggatgatcatgtggaatctaagatattggcttgtagataaatcgaccatcttttctctaacaagaaattcaggacaagacacctaattgaggcaattaatggagcatgggcaattcttggtcc

SEQ ID NO: 2332 - DNA, 353 bp, Glycine max
  Clone ID: LIB3028-034-Q1-B1-H11
cgctgcaactctctaccttccctctttttccgaatctgaatagaaatggcttcggagactgagacgttcgcttttcaggccgagatcaaccagctcctcagtctaataatcaacaccttcgacagcaacaaggagatctttcttcgtgagctcatcagcaatgcctctgacgctttggacaagattcgatttgagagtcttacagacaagagcaagcttgatgctcagccagagttgttcattcacattattcctgacaagaccaacaacacattgtctatcattgacagtggtattggcatgactaaggctgatttggtgaataacctcggtactattgcaaggtctgggac

SEQ ID NO: 2333 - DNA, 367 bp, Glycine max
  Clone ID: LIB3028-034-Q1-B1-H12
cacaatttgccttcgtttgttgttgttgttgtttccgttccatctcttgttccttaaactctttgtttcaaacatccttagaaaaggtaaaaatttaaaatcaaagaaaagaaaatggtggctgtggtttcccaaaaaaatgttgcggcattggtttctcgtaccggtacggagttgcaacgttatagaaaaggtcgtcgccaagttgtgggatgcataccgtacaaatttaagattggggagaagacttccttggatgttgtttctgatgaattggcagttctggttattagttcccagaaaggaaaagggatgctatttccaaagggaggctgggaattagactaatcaaaaaaggaagcaactt

SEQ ID NO: 2334 - DNA, 327 bp, Glycine max
  Clone ID: LIB3028-034-Q1-B1-H2
ctttggcacggcaaaatgtatctcaacagcaaaaactcacgcatcaacttatagcctatagttccaaggacataagttgatgcgtgagtttgcccgaacatctaggctgaatgaaaaatcagatgtgtatagttttggaatacttctgctggagctacttactgggaagaaggccgtggacaatgagtccaatttgcatcaattgatattgtccaaggcagataacaacactgtaatggaagctgtggattcagaggtctctattacctgcactgatctggctcatgtcaagaagacctttcagcttgctttgctttgcacgaaaaa

SEQ ID NO: 2335 - DNA, 383 bp, Glycine max
  Clone ID: LIB3028-034-Q1-B1-H3
aaacacttgcaaactagttttgtttttggcacatatcgcattacattacattagattggtggcaaagcaatggcatcgtcactacaagcagcagctactttcatgcaacccaccaagtttttgcagctaaagtctactcaggccatatctaaggcttttggtttggaacctgctggagttaataaggtcacatgctcccttcaggctgatcttaaggacttggctcacaagtgtgttgatgctaccaaaattgcaggctttgcccttgccacctctgctctcgttgtttctggggcaagtgctgaaggagtaccaaagcggctaacctttgacgaaatccagagcaagacctacttggaagtgaacgggacacgaacagcaaa

SEQ ID NO: 2336 - DNA, 405 bp, Glycine max
  unsure (1)..(405): unsure at all n locations
  Clone ID: LIB3028-034-Q1-B1-H4
gttggaaatgtgatagttgagaaggttccgaggttatttgatcattagctctagaaaagaaaaaggaaattctttccatgttttgaaattctcagctcatgcttcatagattgaacaatttataccatgtttggttgagaagttgtaaaagatgaacatttcattagcgatggcaacacttgttgtctggcttttttcatgggtgaagttatgtctctggaactgcatctgccatgtggttatgcagattttgttgaatctgccatcagttctgtaacagggattggggacccatgagatantcaacagatgatatggagttttttttactctgtaaccttttccaatgtgtacttctgatgcccaattttaccaaataatactttactttgggctgacacnaac

SEQ ID NO: 2337 - DNA, 369 bp, Glycine max
  Clone ID: LIB3028-034-Q1-B1-H6
tttcaaagacactcttcctgatgatctactggctcctgttttgaaggctgtaattgagaaaaccaatgtgaacccaagtgaagttggggatattgttgtaggtagtgtattggctcctggagctcaaagagctagtgaatgccgaatggctgcattttatgctggttttcccgaaactgtgcctgttaggaccgttaataggcaatgttcatctgggctccaggctgtcgctgatgtagctgctgctataagggctgggttctatgacattggtattggtgccggtttggaatctatgaccactaatccagtgggatgggatggatcagtgaatcctaaggtaaaaatgtttgaacaagcacaaaactg

SEQ ID NO: 2338 - DNA, 368 bp, Glycine max
  Clone ID: LIB3028-034-Q1-B1-H7
tcgaaaaccaaaagcatgggtcagggaacaccgggcggtctgaaccggcagggtcttccgggggaccggaagccggacggcggcgacaagaaggagaagaagttcgagccggcggcgccgccggcccgcgtgggccgtaagcagcgtaagcagaagggcccggaggcggcggcgcggctgccgacggtgacgccgctgtcgaagtgcaagctaaggctgctgaagctggagcgcataaaggactacctcttgatggaggaggagttcgtggcgaaccaggagaggctgaagccgcaggaggagaaggccgaggaagacagatccaaggtcgatgatctccgaggttctcctatgagcgttggtaacct

SEQ ID NO: 2339 - DNA, 393 bp, Glycine max
  Clone ID: LIB3028-034-Q1-B1-H8
ttcagcttttccctcgttgaaatgaaaatgggttcttctttgtggactttgtgtctaattttggcttcactagcctcctctgcattctgtgcctttccacggaggccactggatgttccattcggcagaaactacgttcccacttgggcttttgatcacatcaaatacttcaatggaggttctgagattcaacttcatcttgacaagtacactggtactggcttccagtccaaagggtcatacttgtttggtcacttcagcatgaacataaagatggttcctggcgattcagctggcacagtcactgctttttatttatcttctcaaaatgcggagcacgatgagatagattttgagttcttggggaacagaacaggacaaccttacattttg

SEQ ID NO: 2340 - DNA, 341 bp, Glycine max
  Clone ID: LIB3028-034-Q1-B1-H9
catccacgtagctggggtttgagtaagctcttgaaagagtttgtgactgttggtggaaagttgttgcgtggtatgcttgtttgctacgactatggtccttaaatttcatctgcataaatgtcttgtcctcttcatttgctgtgttttggctcaatcaaatttactatttttattgatatgctcaaatgggttctggtagaatctttaggaggaattagtgatgacactttgctaaattcacttgggctagtgaatgatttgagttcagttgatatcgtcaacttttcccttccgaatttgccagcacctccaaatgccttcaggggaattcgcaggaagag

SEQ ID NO: 2341 - DNA, 363 bp, Glycine max
  Clone ID: LIB3028-035-Q1-B1-A1
gcgcgtggtggcctgcaagagcgcttgctccgctttcaactcccccaggtactgctgcacgggctcctatggaagcccacaggcctgcaagcccaccgtctattccaagatcttcaagaccgcatgccccaaggcctactcctatgcctatgatgaccccaccagcatcgctacttgcaccaaagctaactatttggtcaccttctgcccccatcgccgctagctcatccatccatcactttctactctctctacttaccttagctagccttattttattgtcatacctcctttatgttgatgggtactactactatatatgccagtccccattcatattatatggttcttcaactttaatag

SEQ ID NO: 2342 - DNA, 388 bp, Glycine max
  Clone ID: LIB3028-035-Q1-B1-A10
gtggatgaacatgaactgacactaaagaatgatgaaattgcattgttgaaaaccggtttggaagagaaaggtaaggagttagagtccatgagtaatgaaaaggagaatctgaagaaccaactgaatgaagcagtttcaaaagtgtctgctgctcaaaccaaggaagaaggaatgactttgcagttgaaccaactgagagaagagttggaaaccagtaaagccaatgcagacaagttggatgagaagttgaaatctgtggaagcagaaaaggaggggttggagtcagagatgaagaagctaagggtgcaaactgagcaatggagaaaagcagcagatgctgcagctgcagtgcttgctgggggtgtggatatgagtgcaaggattcctg

SEQ ID NO: 2343 - DNA, 412 bp, Glycine max
  Clone ID: LIB3028-035-Q1-B1-A11
ggagggttttgtgattttttgaagaatcgcgttttggagttagtcggagatggagctgtcgactccgaattcttcctcgaagcacttgtccattacgccgggttctagggttttgagaaaccctctctccgacgaacagatctggaagcgcctccgtgacgctggcttcgatgaggaatcgattaagcacaaagataaggctgcgcttattgcttacatcgccaagctcgaagctgagatatatgatcaccagcaccacatgggccttctcatattggagaaaaaggatttggcttcgaagtatgagcaagtaaaggccttggctgaatcatccgagttaatgcataaacatgattcaaccatgaataaatctgcgttaactgaatcaaagaaacgtgaagaaagtttgaag

SEQ ID NO: 2344 - DNA, 401 bp, Glycine max
  Clone ID: LIB3028-035-Q1-B1-A12
tgaagccaagagatggaactcatgtcagcaggttgacacgacatgctggtgccctaaactgcttcgttggcaagccttgttagagaacaacaaacattaatgttgttgttgttgttcgctttttctttttttttttggaaagaaaaaaaaaaccacattgcacagaagatttaagctactcctcttgctaggatgagtttgcgtcttctgcaaaacaagcttgttgttggccttgtaagagctagaaaaagagagaatttgttgcttgggttcaaatgagaagaaataaagttccaacttgtttgtaactttttttttgggggggtttaagttgtttgtaactttgtccccttttgtttttctttaatataatttgtgcctgttgaaaggcatgtttcgaa

SEQ ID NO: 2345 - DNA, 375 bp, Glycine max
  Clone ID: LIB3028-035-Q1-B1-A2
ttattttcttctgtttagaatagagaatcagtgatcagtccccacagtaatggaaggttaatgtcagttaagactgcattaggtacaaaggaaaagtgtaaggtcagagacaatagaacaatagaacaggagtgcataaaaaggccatgaataaaacgacatttcactaaatggaaggtgtagtgtccaaaatgaatgggttagactaatttaagcttaatgtccatatctcttttgaaggtaaccttagagcttaagattttagaattgaacatccgttatgtaactaggattgccagttgcaacaatttcactgaggtaataacattgtaaactatacttatacttgttcgtaactcattcctaatagcaaaa

SEQ ID NO: 2346 - DNA, 345 bp, Glycine max
  Clone ID: LIB3028-035-Q1-B1-A3
atagaacatacttgcctgcacgtctactctagatgatcccctcggggaattccaattccacattttcaagaaataaggaggcaaaaatgttcatatatgaattggaattatttgttttcttattaggcctatcctgaagccaaaggaaatgagatcggaattcctcggggaattccaattccacattttcaagaaataaggaggcaaaaatgttcatatatgaattggaattatttgttttcttattaggcctatcctgaagccaaaggaaatgagatcggaattcctcggggaattccaattccacattttcaagaaataacgaggcaaaaatgttcatatatg

SEQ ID NO: 2347 - DNA, 382 bp, Glycine max
  Clone ID: LIB3028-035-Q1-B1-A4
gaatattgaaggtgaatatggacggattgttcaaaatccaactgaagaaatcaaggtgctttgtgttaacactttggaggccggagtttttagcagtggatttccgacagtttctgatcctgtggaggcatacacttaccctgaatatttgaaatctggatggaacttgaataatatactttcactctcaggatcccttctttgttttgaaagctctgaagcttcacgtaattttgcccccaagattcacatgggaatgtgcttctctccactcaactggaaagttgaagagcaccacttatactcattatattacgtgcatttgggtgaaccaaaagtgtggtatggcatcccaggaaaatttgctattaactttgaaaca

SEQ ID NO: 2348 - DNA, 335 bp, Glycine max
  Clone ID: LIB3028-035-Q1-B1-A5
tttctctttctctctgtgaacacaaaccctaacaagaagaagaaagagcgatgatgcgttggtagatcgtgatctggtgcgggcgcgatcattgtaggatcggtgcgttcgaatttcgcaatgacgtttgggagttgagtgaaggaatcgctattatgtctgaattggtggcccgtacgggccggcatcagcagcggtacgagaacggttaccgtcttgtttccgggtgtgttccatttagatataaaagttctaatgattgtggagaccctagttctgagaaaattgttgaagtgcttatgattaattcaccaaacggacctggtcttttgttt

SEQ ID NO: 2349 - DNA, 394 bp, Glycine max
  Clone ID: LIB3028-035-Q1-B1-A6
cttggacgaattatccgaagaagatcgcttaaccgtagcaagagcacgaaaaattgagcgtttcttatcacaaccttttttcgtagcagaagtttttaccggttcgccggggaaatatgttagtctagcagaaacaattagagggtttaaattgattctttctggagaattagatggtcttcctgaacaagccttttatttggtaggtaatatcgatgaagctactgcgaaagctacgaacttagaaatggagagcaatttgaagaaatgactttaaatctttgtgtactgacccccaatcgaattgtttgggattcggaagtgaaggaaatcattttatctactaatagcggacaaattggagtattaccaaatcatgcgcctattgccacag

SEQ ID NO: 2350 - DNA, 360 bp, Glycine max
  Clone ID: LIB3028-035-Q1-B1-A7
gatacaccttccaagaaacccatgtggagaggagttattttggcatacataggagttgcattctgctacttacctgttgccttcattggatactatatgtttggaaactcagttgatgataacatcctcatcacactagaacgccccgcttggctcattgccgctgctaacctctttgtctttgtccacgttgttggaggctaccaggtgtttgccatgccagtgtttgatatgatcgaaacctacatggttacgaaattaaatttcccaccttctactgcactccgagtaacaactcgcactatatatgttgcattgacaatgttaattggcatatgtatcccgttctttggctctctt

SEQ ID NO: 2351 - DNA, 370 bp, Glycine max
  Clone ID: LIB3028-035-Q1-B1-A8
gtgatttcagtgagtgatcggtgttcacttgatctcatcataatcgtcagcgtcaattgaagaagatgccgatcagaaacatcgccgtcggaaggcctgaagaggcgactcaccccgacacgttgaaggcggctttggctgagttcatctcaaccttcatcttcgtgttcgccggctcaggctccggcatcgcctacaacaagctcaccgacaacggcgctgccacccctgccggcctcatctccgcctccatcgcccatgcattcgccctcttcgtcgccgtctccgtcggcgccaacatctccggcggccacgtcaaccccgccgtcaccttcggcgccttcgtcggcggcaacatcaccttcctccg

SEQ ID NO: 2352 - DNA, 413 bp, Glycine max
  Clone ID: LIB3028-035-Q1-B1-A9
caaaaatgcacaatagcaataacaacttggggaacacagacccgcacccagcgaaggagagagaaccaaaagaggagctagaaccaccagcaacttcagcaatgcagatggttgcttgcaggagattgttcgtgagaaggaagatgcatttttttgtggaatgctgtttgcaagccctattggtgatgggggctcccttttgcaacatgatttggaacaacttacatgccaagaagtacccatcaaggcagcgcttgacacttccagtccaacctggatcaaaggaaaggcctgttgtccttaattacaaaaagagtctgaaagactatacaagtggaaattcagaaaccttaactgttgtattcaaggatttgggcccacaagtttcttaccggacacttttcttctgcgag

SEQ ID NO: 2353 - DNA, 250 bp, Glycine max
  Clone ID: LIB3028-035-Q1-B1-B1
atgtgctgctgctgctgctgctgatgggtgagactgagactactctgctattgtttaggtctcagttgagtgtatcatgaataaaggatgatactggttagtatatgtttatttatttctttgttcatttaattcagacattcatcgtttttaagtatgtgatcttatggaagatttttgaagtttttgtgattagctgtattttcgtttcgaaatatattacatctcaaaagagttatgagacttgtgg

SEQ ID NO: 2354 - DNA, 169 bp, Glycine max
  Clone ID: LIB3028-035-Q1-B1-B11
ggcttttgggcaagatatcgttaagatttagttccatttgctgtaagagtcaatcattctctaattatagttgtaataacaccatcaatttagaatgaatattttctatgtagcctaactttactgataactttgaatgctttaaaataattaatttttacttttgacc

SEQ ID NO: 2355 - DNA, 400 bp, Glycine max
  Clone ID: LIB3028-035-Q1-B1-B12
gctttgattagtgtggcctagttgttgttttctcgatgagaaaggcttcttccactatgcattgcgcacttctgcgcttttgggttcccttgttgctgcttgctagcttcagctatgctccttctgtttcggccacaactgaaatttcagggaatgaagtgaacacagatgggaaggtgataaatgaagagttagcaaaaccaagtctaaaaggacatgatgaagaagcaaagttcaaaggattttttccaaaaccaattcctatagttaaaccaattccaaagccaattcctattattaaacctattccaattccagtttataagcctattccaaaaccaattcctattgttaagcctattccaaagtcaattccagttgctaagccaattcctaatga

SEQ ID NO: 2356 - DNA, 381 bp, Glycine max
  Clone ID: LIB3028-035-Q1-B1-B2
cgctctctcagtttcttttccccaaattgtttttcatctaacaatttactttgcagaaccctaaccctagccccttcgcctaccttgtaaccttcctttcgattcttcatctcgcagacaatgggtgaaactaaggacgaagcatacgaggaagagcttctcgattacgaggaggaagacgacaaggcccccgactccgccggagctaaagtcaacggcgaagctaccaagaaaggctatgttggcattcacagttcgggatttagggacttccttctgaagccagagcttcttcgggctattgtggactcgggatttgagcatccatctgaaggcaaactatctatttatctgaatcttttatttaatttgcagttgttg

SEQ ID NO: 2357 - DNA, 399 bp, Glycine max
  Clone ID: LIB3028-035-Q1-B1-B3
gcgaatccctctctctatctctcacacacactttctctctctctctctctcacccagatcttgtagcaatggcgagcgctcccactccacgcgaagagttcgtgtacatggcgaagctggcggagcaggccgagcgctacgaggagatggtggagttcatggagaaggtctccgcctccgccgagagcgaggagctgaccgtggaggagcgtaacctcctctccgtcgcctacaagaacgtgatcggcgctcgccgcgcctcctggcgcatcatctcctcaatcgagcagaaggaggagagccgcggcaaccaggaccacgtcgccgtcatccgcgactaccgctccaagatcgaggccgagctctccaacaaccggcacggaatcctcaaactcctcg

SEQ ID NO: 2358 - DNA, 393 bp, Glycine max
  Clone ID: LIB3028-035-Q1-B1-B4
caaggtgataactccagagaaagtagacaaggatctatctaatgtgattgagaagataattgaggacgaagacggagacgaagacgaagatgaagagatggaaaatgatgcagaaagtctagaactggaagagattaagtctgagactgaccaggagggagatgatgagattgaaataaatgctggtctgggaacttttgaacgtgaagaccagaatgagtttgctgtcaaaattgccattggtggtcttgttcagaaactttctggtaatctatcctctagagatttgcttcgagtccctgctatgctggagatgaaagggcgtggttcattttcctttactgttgaaaaagaagtcaatcagcaggttggtcttgacaaaggaaaatcttc

SEQ ID NO: 2359 - DNA, 372 bp, Glycine max
  Clone ID: LIB3028-035-Q1-B1-B5
ctatgccaacatggatgatatggctgtgcaaattgcattgcaaagaattcgaaccttcgtgcttcaaaacaaggaggtcatggttcctaacaagaaacattgctggcacagtaacttgaggttgagcctcaaaaccagaaggtttgatgatatcatgatgtcacctcactcccctatacctcagtcccctttggttaaagccacaatttgagttgccatatttctctgcaccatctcagaagaagtaactgatatacgatgattatttggttctttgatttgttattttggcaaggtacataagtgctggattttgttctttctaacaacaataacagacaactcctgatattgtttttgttaccaacaaca

SEQ ID NO: 2360 - DNA, 376 bp, Glycine max
  Clone ID: LIB3028-035-Q1-B1-B6
agttgatggtggtttcaatcagaatctgaattcaaagactttgtctgctcccaatctcagtgcaatggactaccctgcacttacttcaccagatggccagactgcttcagtagaatatgtggttgataatgtgcaacaaagtggcaatccttaccgatcatatgacagtgatgtgctgcttttcaaatctgtctcttcagtttcatctaggggtggtgctattgactttgcttcagctgttaggaagttggcttctcgggattctggtggtatttggaagtatgataaaaatggctctggtgatgctgctatcggctcaagtaggaattcgaatgttctggctagtggttacaatggtggacaggggagagcacac

SEQ ID NO: 2361 - DNA, 363 bp, Glycine max
  Clone ID: LIB3028-035-Q1-B1-B7
gagagagatggggctaagaagtaaattaagaatgtcagcgtcagtggtgcagcaggggatgaaggaaataagaaggagcgtgacgtacatgcctcgaccgggggacggtgcgccgcggggggtgacgctgataccgggggacggaattgggcctctggtgactcatgcggtggagcaggtgatggaggcgatgcacgcccccatatacttcgagaagtacgatgtgcacggggacatgaggcgtgtgccggaggaggtgctggattcgatacggaagaacaaggtgtgcttgaagggtggtttgaggactccggtgggtgggggtgtgagctccctcaacgttcagctcagaaaggacctcga

SEQ ID NO: 2362 - DNA, 394 bp, Glycine max
  Clone ID: LIB3028-035-Q1-B1-B8
gcagacttaacaacagcacaaagcgggttactgtctgttcaagctaccatctctctctctctttcttagtgcctccttgccagaagttaaaatggcccaagaaactttcctattcacatctgaatcagtgaacgaggggcaccctgacaagctctgtgaccagatctccgatgctgtgctcgatgcatgcttggagcaggaccctgacagcaaggttgcctgtgaaacctgcaccaagaccaacatggtgatggttttcggagagatcacaaccaaggccaacgtggactatgagaagattgtgcgtgacacatgcaggaacattggttttgtctctgatgatgttggtcttgatgctgacaactgcaaggtcctcgtcaacattgagcaacag

SEQ ID NO: 2363 - DNA, 398 bp, Glycine max
  Clone ID: LIB3028-035-Q1-B1-B9
gtgaaagtgagaaaaaataaaaatcaaagagcataatgtcagggatcattcacaagattggggagacccttcatgtgggagggcacaagaaggaggaggagcataagggtgagcaccatgctggagaatacaaaggggagcaccatggtgaacacagtagtgagttacaagggaaagcatcatggtgaacacaaagctggagagtaccatggtgagcacaagccagagcacaaagaggggttcctagacaaagtcaaggacaagatccatggtgagggcggcgccgccgagggcgagaagaagaagaaggagaagaagaagaaggagcatggccatgagcatggccatgacagcagcagcagcagtgacagtgattaaactgctgcatcacctatata

SEQ ID NO: 2364 - DNA, 364 bp, Glycine max
  Clone ID: LIB3028-035-Q1-B1-C1
ggatttggtgttgcgcagccgcaggcagatatggccatggctttggtgagcctcagcaccattctcacaccgccttcttcttcttcttcttcgttttcttctccaaaaccttcttcttcctccatcgttcggtttcgccctctcactccccttcctcgctttcggaggcacctcgttcgtatggctcccgatgaggagaagatgactcgtcgctcccctctcgatttccccatcgagtgggaaaggcctaaacctggacgaaggccggatatattccctcaatttagtcctatgaagacacctttgccgcctccgttgcccgcagatcctccagaagaggatgaagaggaggaagaaaagaaag

SEQ ID NO: 2365 - DNA, 86 bp, Glycine max
  Clone ID: LIB3028-035-Q1-B1-C10
gttttttgagaaaacaattccattcagacatgttgatatgttgtatattcaattattcatacttcactaagaacaacaattttcac

SEQ ID NO: 2366 - DNA, 410 bp, Glycine max
  Clone ID: LIB3028-035-Q1-B1-C11
gcccaagaagaagaactcaccccacccagtgaaggtagtctacatatccaaccccatgaagatcaagaccagcgcctccgagtttagggctttggtgcaagagctcaccggccaggacgccgagtccccaccagatccctctcgcttccacggccatcaccccgattcctcctcctccgtcgagaatatcgaagaggaggaggaagaggataatattcaccgtgtgaattgtgttgtccctcctatgacagcaaccgatgagatcagtcttctcatcggctgctgcaaccagaacggacaacatcagccttcctcaatggagagtaataatttccagctgctggacgacgatgacgttttcacgccccagatgattgagaacatctctgccctgctcccagcaagtgtat

SEQ ID NO: 2367 - DNA, 392 bp, Glycine max
  unsure (1)..(392): unsure at all n locations
  Clone ID: LIB3028-035-Q1-B1-C12
gaagaagatgacggtaaagatggcgaggatggttcagaagaacaagctgtgattggattatggagtggcattgcttggttggttggaatgactgtattcattgctgtgttgtctgaatatgtggtggatacaattgaggatgcatcagattcatggggtttgtctgtgagcttcctaagcataatcttgctgccgatagttggcaatgcagctgaacatgcaggagcaattatatttgccttcaagaacaagctggacatctcattgggtgttgcattaggttcagcaactcagattgccatgtttgtggtcncattatgtgtaatcgttgcttggataatgggtatcaatatggacatgaacttcaacctcttagagacaggttcccttgc

SEQ ID NO: 2368 - DNA, 372 bp, Glycine max
  Clone ID: LIB3028-035-Q1-B1-C2
ggtttatgtgaactttgggagcattatggtcatgactagtgaccaattgacagagttagcttggggacttgcaaatagtaacaaaaactttttgtgggtcattaggcccgatcttgtggcagggggaattaattgtgcgttacccaatgaatttgtgaaagagaccaaagatagaggcatgttggcaagttggtgtccccaagaggaggttttggctcacccagcggttgggggattcttgacacattgtggttggaattcaacgttggagagtgtgtgtgaaggggttccaatgttgtgttggcctttctttgcggagcaacaaaccaattgtcgattttgttgcaaggagtgggggattgggttggagat

SEQ ID NO: 2369 - DNA, 386 bp, Glycine max
  Clone ID: LIB3028-035-Q1-B1-C4
atggcctcagcatcaggggaggcaccaccaccccaacccacttcaacagaagcagctccagcatcaggctcttcagctccagccatatcagcagcagcaccacaacccggaggatcatcgccggcgcctccgagccgctacgaatcgcaaaagcgtcgagactggaacacgtttctgcagtacctacagaaccacaagcccccattaacgctggcgcggtgcagtggcgcacacgtcattgagttcttgaagtacttggaccaattcgggaaaaccaagggttaaatcacggggtgcccgtactacgggtaccccaaccctcctgcgccctgcgcttgcccactgaaacaagcgtggggaagccttgacgccctgatcgggcgact

SEQ ID NO: 2370 - DNA, 377 bp, Glycine max
  Clone ID: LIB3028-035-Q1-B1-C5
ctattgtctggacagactctcagatcatattttatgtggacaatgttcctattagagaagtgacgcgaacagaatctatgggaggagatttcccttctaagccaatgactttgtatgcaacaatatgggatgcatctgattgggctaccaatggaggcaaatacagggttaactacaagtatgcaccctatgttgctgaattctctgaccttgtcctgcacggttgtgcagtggatccaattgagcagcacgtggccacgtgtgacaatgctcaaagctctgaggcaacaattcctccttctggtgttacaccagcacaaagaatcaaaatggagaatttcaggaagaagcacatgacatactcctactgctatgac

SEQ ID NO: 2371 - DNA, 395 bp, Glycine max
  Clone ID: LIB3028-035-Q1-B1-C6
aaagcacaaagcaaagctcatccttgagttaaaaaatggcagcagcttcttccatggctctctcatccccatccttggctggcaaggccgtgaagctgggcccatcagccccagaagtgggaagggtgagcatgaggaagaccgtcaccaagcaggtctcctcaggaagcccatggtacggcccagaccgagtcaagtacttgggcccattctctggcgagcccccgtcctacctaaccggtgagttcccaggcgactacggctgggacactgctgggctttccgcagacccagaaaccttcgccaagaaccgtgaactcgaagtgatccactccaggtgggccatgctcggagccttgggctgcgtcttcccggagttgctggtccgcaacggg

SEQ ID NO: 2372 - DNA, 373 bp, Glycine max
  Clone ID: LIB3028-035-Q1-B1-C7
cactactgcagatgctgttaaatttgtagagtcttgcaaagaaggttatgtagcagcaactgttacaccacagcatcttcttctgaatcgtaatgctttgttccaaggtggcttacagcctcacaattactgtcttccagtgctcaaaagagagatccatagacaggctattgtttcggctgtcactagtggaagtaaacgatttttccttggaactgatagtgctccacatgataggcgtaaaaaggaatgttcctgtggatgtgctggcatatacaactcaccggttgctctatcactatatgccaaagtttttgaagaggctggtgcacttgataagctagaggcttttacaagctttaacggacctgac

SEQ ID NO: 2373 - DNA, 396 bp, Glycine max
  Clone ID: LIB3028-035-Q1-B1-C8
actcacactcactgcagatctcaatccatggctaccattgttagcatcaaggcccgccagatctttgacagtcgtggcaatccaaccgtcgaggtggatttgacatgctccgatggtacttttgctagagctgctgttccaagtggtgcatccactgggatttatgaggcccttgaattgagagatggaggatctgactaccttggaaagggtgtatcaaaggctgttgacaatgtgaacaccattattgcccctgctttggttggcaaggacccaactcagcagactgctattgacaacttaatggttcaacaacttgatggaactgttaacgaatggggttggtgcaagcaaaagcttggagcaaatgccatattggcagtgtctcttgcagtc

SEQ ID NO: 2374 - DNA, 407 bp, Glycine max
  Clone ID: LIB3028-035-Q1-B1-C9
ccgaagttgggaacatgagttggcggtcggtgaggggaagccgtaagaggaagatggatttcgaactggacctcaaccgtgatccgccgctggttcgagaagaggaggaggaggaggaggagggggggccctcaaggcatcagcagcaccaccaccaccaacaagaacctcaaactcccattgtcgatgtcgacgccattgacgacgatgttgttgaaagctcgcctaggtctttcgctcaggctaagagcaatgctgatgagaggaggagagttcgcaggaggacgactattgttgatttggactcagaagatgggaccggaggagttcctcaaaaccaaacaatcatcaatggcgatctttatgtaaatttggccaacaacagcagttctgcgagtgaaaatgct

SEQ ID NO: 2375 - DNA, 323 bp, Glycine max
  Clone ID: LIB3028-035-Q1-B1-D1
gctgcagcaacagctaaatgtgctaatgtcaagcccacaataacaggaaaagctcctacttgtgcagcctagaatgagcaacaacaataatgcccatttttttttaacaattttcttttactatttttcctatgtagagaagcaagccatccccattaaaagaggaggtgtctagtaattgtattctcttgtgaataaatacttcaatgtggctatggtaaaataatgatcatatatgtaatgtttcttcaataccaaaagaagtcttctttattcatcttattaattagcttgtaatatgttccaaattcatacccaagttt

SEQ ID NO: 2376 - DNA, 392 bp, Glycine max
  Clone ID: LIB3028-035-Q1-B1-D10
aagagaagaaaaaaaaaaagagagaaaagaaaaaatttgttttataactttttaacttattgttcacttcttcttcttcttcttcttcaatatcttggttctttgatattattctattgagcaaaaaatgggagttccagagagagaccctcttgcacaattgagtttgcctcctgggtttaggttttaccccacagatgaggagcttttggttcagtacctttgccgcaaggttgctggccatcatttctctcttccaatcattgctgaagttgatttgtacaagtttgatccatgggttcttccaggtaaggcagtgtttggagagaaggagtggtacttttttagcccaagagacaggaagtacccgaatggttcacgaccaaacagag

SEQ ID NO: 2377 - DNA, 393 bp, Glycine max
  unsure (1)..(393): unsure at all n locations
  Clone ID: LIB3028-035-Q1-B1-D12
agcaacaaggataagacactagtcttccaattttctgtcaagcatgaacagaagcttgactgcggtggtggctacatgaagttgctcagtggtgatgttgatcagaagaaatttggtggggatactccttacagtattatgtttggcccagatatctgtggttacagtacaaagaaagttcacgccaatcctaaccaacaatgacacaaacaacttgataaagaaggatgttccttgtgagactgaccaacttactcatgtttacacatttatcctccgtccggatgcaacctacagcatcctgattgataatgtggagaagcaaactggtagtctctactctgattgngatcntctcccttcaaagacaatcaaagatcccgaggctaaaaa

SEQ ID NO: 2378 - DNA, 373 bp, Glycine max
  Clone ID: LIB3028-035-Q1-B1-D2
caagacttggtgagtgtcactgctgaagagaagaaccacgcagaactgacgcaatgggaagcacaagtttgcttcatctaatacttggtgttgttttggctctgctgaatgtgtctcttgtggaaggagaagatgcatacaaatactacacgtggactgtgacatatggcattctttctccactaggtagtcctcagcaggtggttcttatcgatggtcagtttcctgggcctcaactagacttggtaactaatgaaaatgttgttctcaaccttgtaaacaagttagatgagccatttcttcttacttggaatggcatcaaacaaatgaaaaactcatggcaagatggggtattgggaaccaattgccccat

SEQ ID NO: 2379 - DNA, 364 bp, Glycine max
  Clone ID: LIB3028-035-Q1-B1-D4
atgcaatctatgtccctgacgctgagcaagaggctctccaattcaaagcctctcttcagaatctcttccagcctcgtcgctcacgcatcctccgccacaacctctccgccgccaccttcgccgccagtcccctctccctccgccctcaacagcctcctcaccgctccgtggtccgccactcagtcacgcggaatcacgctttccggatctgatattagagtcgggaatctcattggaaaccgaggacgcgctcacgaggttctcaaactgtatcgccctcttgaaggaacgggcaaagccactcttgaggttccgcctcaaagtgtagctggttatgccacagttgctactacagaggatggtg

SEQ ID NO: 2380 - DNA, 370 bp, Glycine max
  Clone ID: LIB3028-035-Q1-B1-D5
agcttcccaaaaaagagtgccaatggcatcttcttcagactcatgggtgaaggaatataatgaagcactgaaacttgctgatgatatcagtggcatgatttctgagcagagttcatttcctgcatctggaccagaaacccagcatcattcatctgctataaggagaaagattacaatattggggaccaggcttgatagcttgcagtcccttttgtcaaagcttcccggcaagcagcccatatctgagaaggagatgaatcggcgcaaggacatgctttcaaatttgagatcaaaagttaatcagatggcttccacgttgaacatgtcaaactttgcaaatagggatagtttgcttgggccagaaagaaaa

SEQ ID NO: 2381 - DNA, 383 bp, Glycine max
  Clone ID: LIB3028-035-Q1-B1-D6
tggagaggtggaagagctgcttcatttaacatcattcctagcagcactggagctgccaaggctgttgggaaagtcctccctgctttgaatggaaaattgactggtatggcattccgtgttcccaccgtggatgtctctgttgttgacctcacagtgaggctggagaaagaagcttcctacgatgaaattaaaaatgctatcaaggaggaatcagagggcaagttgaagggaattcttggttacactgaagatgatgtggtctccactgactttatcggcgatagcagatcaagtatttttgatgcaaaggctggaattgcattgaataagaactttgtgaagcttgtttcttggtacgacaacgagtggggatacagctcacg

SEQ ID NO: 2382 - DNA, 370 bp, Glycine max
  Clone ID: LIB3028-035-Q1-B1-D7
ccaatcagtgcaagagaatcgccctccatcttctttcttcttcaattcattccgatggcgattccgttgccctctctcgatctcactcaccactccgatttcgaacccttagtctccccagacggttacatctccatttgcggctacggttccctcctctccgagacaagtgccagaaccactttccccgacctcgtcaacttccgaatcgcccggttaactggtttccgccgtctcttcaactccgtcggacgcatctttttcactcaccgtgttgccaatatcaaaactcaggaaattgctggcctttctgttgaaccatgtgatggtgaattcgttgttgtagctgtttttgagataaagaacacag

SEQ ID NO: 2383 - DNA, 365 bp, Glycine max
  Clone ID: LIB3028-035-Q1-B1-D8
ctgcttttgactgctggcattggttctgatcatgttgatctcaaagctgcagctgctgctggtttaactgtggcagaggtcacaggaagcaacgttgtgtcggttgcggaggacgaactcatgagaatcctcattctaatgaggaatttcttgccagggtaccatcaggctgttaatggggaatggaatgttgctggcattgcacatagagcttatgatcttgaaggaaagacagtaggaaccgttggcgcgggtcgaattgggaagcttttgctccagaggttgaaaccttttagctgtaatcttctttattttgatcgacttaggatagatcctgaattggagaaagagattggagcaaaatt

SEQ ID NO: 2384 - DNA, 407 bp, Glycine max
  unsure (1)..(407): unsure at all n locations
  Clone ID: LIB3028-035-Q1-B1-D9
ctcttcagcatgggaggtcatggctccatgagtgctgaggatggcttttcattcccatcattcatgccatctcccagtataccgaactatgatgaggatcgctctcgcccaggcagagctgttgtgggatggctgaagatcaaggcagcaatgaggtggggcttctttatcaggaagatagccgctgagaagcgggcacagatagaggagttagatgaataagttgtatggacaatggttgcaggcttaacagttagccataagataatactgatattctgcagatttagttgtctttatcagtgccaaccaaattgtgcagtccatggtgttaatattcttgatctatgtatctgtgtatctgatttgacagcagcacgtttgtcncagtattctgtacagtttgt

SEQ ID NO: 2385 - DNA, 353 bp, Glycine max
  Clone ID: LIB3028-035-Q1-B1-E1
gattgacaggcgatctggtaaggagcttgagaaggagcccaaatttttgaagaatggtgatgctggtatggttaagatggttccaaccaagcccatggtggttgaaactttctctgagtatcctccccttggtcgttttgctgtgagggacatgcgtcagaccgtagctgttggagtcatcaagagtgttgagaagaaagaccccaccggagccaaggtcacaaaggctgccgccaagaagaagtgattgcattttggcaattttgctagcacatgtgatcatcaacgtggtttcaaaaaaacttgttcctttacagtagtttatctttgcagagtcttatgtgtttgtttta

SEQ ID NO: 2386 - DNA, 395 bp, Glycine max
  unsure (1)..(395): unsure at all n locations
  Clone ID: LIB3028-035-Q1-B1-E10
ggctgatggccttgggatacacaattgcagctattctgaaaagaagcagccatgtctttcatgatgataaagtgaccataaaaactgattggctagaacaacttaatcgcacatatgttcaggtgcaagggaaagacagaaactattgcaaatttttttgcagagaaactggggttggatggttcctatgttcctcgcacttacattgaacaaattcagctagaaaagcttgttaaacaatttaatggcattgccagatgatcttaagacanaactcagcatagatgatgacttggtttcaagccccaaagaagccctttccagagcttctgcagataggagaatgaagtatcttaatcgcggtatttcacaatcctattcaactcanagggaca

SEQ ID NO: 2387 - DNA, 403 bp, Glycine max
  Clone ID: LIB3028-035-Q1-B1-E11
gtaccatcttataactaggtatttattttctcatatgctcttcttaaacttctctttggtagtgtgttcacatacatatctacttattgttattattattgtcaccacatacaataatgggttccattagtaacaccgaggttcataatcatcacaatgatgatgacgacgatgatcatcgtcatcgggtgaatttctcgatccagagaggatttgggacaaaattgaaggaggcattgaaggaaacattgtttccggatgatcccttcaggcagttcaagaacgaggagaagccaatggggagggtgatgaaaggggtgcaatacttcatcccaatctttgagtggctccccacttacaattttcgcctcttttgctctgacttgatcgctggactaaccat

SEQ ID NO: 2388 - DNA, 387 bp, Glycine max
  Clone ID: LIB3028-035-Q1-B1-E2
tgaaggttgtggcgttcctggatcgttcttctctgtggcggagacatgttggacggtcgttcctgcgttgttccgaagatgttttccggcacttgccaggcagagaacgattggtcttacatgaagtgcttgctggagttggacatcaagaatggcaagcgccctatggagattgatgatgttgaggaggatgaaccccaccagccaaggaagtgtactaagaagttggattcttgccatagagttgaaatggctcgaatttcgtttcaacgtcaatctattgaggccaaggattctgttgttccccctatggatcaggagaccattgagccactgagtgtttgtcaaggagttgttgaagaagatggagctttgaccgaccagcta

SEQ ID NO: 2389 - DNA, 372 bp, Glycine max
  Clone ID: LIB3028-035-Q1-B1-E3
cttgggtttaattggtataggcttgccaaggtcttgttgattgagcgttaagtgctttaactaatcaatcccaagaccttggtttaccttgccacacaaaaaaatatataaaaaggcaaaataataataaaaaaaagagaaggcttggagccaagaaaataaacacaaagcacaagtcatggaaagaataatggttggaagtgcaacaaaggttgctttcaacctcttggtcactttcgccattgtcaatccatgccttgaggctggcattgctgagtttgatgactttctcaaagcccaagctgatgaagcacaaaaaattgctcttgaggcctatgtcccagtgccagaagatgtcaccgaccaactcaa

SEQ ID NO: 2390 - DNA, 358 bp, Glycine max
  Clone ID: LIB3028-035-Q1-B1-E4
gtgggtttggcgaaaccttctagaattttcttccatggaggttatcagagttctaacggcggcgatcacggtggcggttctcgcggcggcgcttccggcagacgccggcgacgacaaccgagtattcgcgccgtgttcggacacgcgagtgcagagatccgacggattcacgttcggaatcgcgttcgctccgaaggacaagttcttctacaacaacaacaacagcgttcagttgtcgccgtgcgatacgaggctctcgctctccaatgcgaattctcagatctccgtgttcagacccaaggtcgacgagatctcgctcctcaccgttaactcctcctcgttcgtggcggactcgtat

SEQ ID NO: 2391 - DNA, 392 bp, Glycine max
  Clone ID: LIB3028-035-Q1-B1-E5
ctgagctttgctgaggctgctagccttcctttaacacttgagactgcttatgaaggccttgaacgaaccgggttttctgctgggaaatctatccttgtgcttggaggtgctggtggagttggaacccatgttattcagcttgccaagcatgtttatggagcatccaaggtagcagctactgctagcactaggaaactggaactattaaggaatttgggagctgactggcctattgattatacaaaggagaattttgaagacctgtctgaaaagtttgatgtggtgtatgatacagtaaggcaaactgaacaggcattcaaggttttgaaagaacgacgaaaagttgtgacaatagtaccacctggatttcatccagctatccttttcatact

SEQ ID NO: 2392 - DNA, 369 bp, Glycine max
  Clone ID: LIB3028-035-Q1-B1-E6
caagtgccaaaatgaaagcccatttggtccttttcttgctcatgattcttgtcaccttcactagcaatgttaacactctctcgattaatcccaaatctaactcttcaattcctcaattgacccaacagaaaaggcctgacaatgagaccatatatagggtgtcaaagcagctatgttggggttgcattgcggagtcactagagtttttgttcaggcacaacttggtgagagcagccaagtgggaacttccactgatgtgggacttccagctggagcaatacgcgaggtggtggactggtgaaaggaaagcagattgcaagctcgaacattctttcccagaagatggtttcaagcttggagagaacattt

SEQ ID NO: 2393 - DNA, 382 bp, Glycine max
  Clone ID: LIB3028-035-Q1-B1-E8
aagacactagtcttccaattttctgtcaagcatgaacagaagcttgactgcggtggtggctacatgaagttgctcagtggtgatgttgatcagaagaaatttggtggggatactccttacagtattatgtttggcccagatatctgtggttacagtacaaagaaagtacacgctattcttacctacaatgacacaaaccacttgataaagaaggatgttccttgtgagactgaccaacttactcatgtttacacatttatcctccgtccggatgcaacctacagcatcctgattgataatgtggagaagcaaactggtagtctctactctgattgggatcttctccctccaaagacaatcaaagatcccgaggcctaaaaac

SEQ ID NO: 2394 - DNA, 406 bp, Glycine max
  Clone ID: LIB3028-035-Q1-B1-E9
attgacaacaaaatcacacaactattttgcagatgctatttttatttgatggatctaactaaactagtaagcaaaaaaattaatggcaaaaccaaagttgaggtgcgccaaagacgaaagatggtcgctccatgacagccagctctagtgacaggaggcactcgaagcataggtgagagcgcttctccatccagagatagaaaggttttttctacatcatcaaccccaaagagtccagtattggcctctgaaacggtattcttctgctacccagttcttttttccttaattattttcttggttttgttctttttcagtgaaagtgaaaagatattctttacacatagacggtattattctgcttcccacttttttcccaagacataggatggagagaagagaatat

SEQ ID NO: 2395 - DNA, 378 bp, Glycine max
  Clone ID: LIB3028-035-Q1-B1-F1
gaagtgttggatgcatttctatttctaactaattattgtgcttattattattgttgagaaagaaaagaatggcaaagttaataaaattctttgagttgaacacaggggccaagattccttctgttgggttaggcacttggcaagctgagcctggtgttgtagccaaagctgtcaccacagccattctggttggatacaggcatattgattgtgctcaagcgtataacaatcaagcagagattggttctgctcttaagaagctttttgatgatggtgtggtgaagcgtgaggacttatggatcacctccaaactctggtgttcagatcatgcttcagaagatgtgcccaaagcattggataaaacattgcaagatttgc

SEQ ID NO: 2396 - DNA, 388 bp, Glycine max
  Clone ID: LIB3028-035-Q1-B1-F10
ctttgattagtgtggcctagttgttgttttctcgatgagaaaggcttcttccactatgcattgcgcacttctgcgcttttgggttcccttgttgctgcttgctagcttcagctatgctccttctgtttcggccacaactgaaatttcagggaatgaagtgaacacagatgggaaggtgataaatgaagagttagcaaaaccaagtctaaaaggacatgatgaagaagcaaagttcaaaggattttttccaaaaccaattcctatagttaaaccaattccaaagccaattcctattattaaacctattccaattccagtttataagcctattccaaaaccaattcctattgttaagcctattccaaagtcaattccagttgctaagcca

SEQ ID NO: 2397 - DNA, 403 bp, Glycine max
  Clone ID: LIB3028-035-Q1-B1-F11
gccaagtgaaagtgagaaaaaataaaaatcaaagagcataatgtcagggatcattcacaagattggggagacccttcatgtgggagggcacaagaaggaggaggagcataagggtgagcaccatgctggagaatacaaaggggagcaccatggtgaacacagtagtgagtacaaaggagagcatcatggtgaacacaaagctggagagtaccatggtgagcacaagccagagcacaaagaggggttcctagacaaagtcaaggacaagatccatggtgagggcggcgccgccgagggcgagaagaagaagaaggagaagaagaagaaggagcatggccatgagcatggccatgacagcagcagcagcagtgacagtgattaaactgctgcatcacctatatat

SEQ ID NO: 2398 - DNA, 308 bp, Glycine max
  Clone ID: LIB3028-035-Q1-B1-F12
cgacgatatgcttatattggtgacattgttgttgctgtaatcaaacaagcagtaccaaatacgaacttagaaagatcagaagtgatcagagctgtaattgtacgtacttgtaaagaactcaaacgtagcaacggtataataattcagtatgatgaataatgctgcagttgtcattgatcaagaaggaaatccaaaaggaactcgaatcttttgtgcaatcgcccgggaattgagacagttaaatttcactaaaataatgtatccatagcacagtttcgtcttataatacctctagttctagatcgcga

SEQ ID NO: 2399 - DNA, 418 bp, Glycine max
  Clone ID: LIB3028-035-Q1-B1-F2
gagacatcttacatggctgcacgtcgactctagatgatcccctcggggaattccaattccacattttcaagaaataaggaggcaaaaatgttcatatatgaattggaattatttgttttcttattaggcctatcctgaagccaaaggaaatgagatcggaattcctcggggaattccaattccacattttcaagaaataaggaggcaaaaatgttcatatatgaattggaattatttgttttcttattaagcctatcctgaagccaaaggaaatgagatcggaattcctcggggaattccaattccacattttcaagaaataaggaggcaaaaatgttcatatatgaattggaattatttgttttcttattaggcctatcctgaagccaaaggaaatgagatcggaattcctcggggg

SEQ ID NO: 2400 - DNA, 366 bp, Glycine max
  Clone ID: LIB3028-035-Q1-B1-F3
gcctctcgcaacctcaaatctacacaatgcatttctaaggcttttggcttggaacctgctgcagctaaactcacttgctcccttcagcctgatctcaaagaatttgctcaaaaatgtgtcgacgctaccaaaattgcaggattcgcccttgccacctctgctctcgttgtttctggagcaagtgcagaaggtgttccaaaaaggctaaccttcgacgaaatccagagcaagacatacttggaagtgaagggaactggaactgctaaccagtgcccaaccattgaaggtggagtggactcattcgccttcaagccaaggaaatacaacgcccagaagttgtgcctggaaccaacttccttcacggtg

SEQ ID NO: 2401 - DNA, 398 bp, Glycine max
  Clone ID: LIB3028-035-Q1-B1-F4
ggacaaccagttcaacacgatcaccgccgacggaacatccatgaagaacatggatacaggaatcgtgatccagggttgcaacatcatcccagaagccgaactcttccctacaagattccaggtgaagtcataccttggaaggccatggaagcaattctcaaggacaattgtgatggaatccaccgtgggtgacttccttcacccggaaggatggtgcccatgggccggtgaacacttcgaagacaccctgtactatgctgaatacaacaacgatggacctggtgccaacgttaacggaaggatcaagtggaagggttaccgcggtctcattagccagcaagaagctgctcagttcacccctgcccaattccctcaaggctggttccaacggtggaact

SEQ ID NO: 2402 - DNA, 397 bp, Glycine max
  Clone ID: LIB3028-035-Q1-B1-F7
tggttatgcagggtaaatccagtgattttgctaagcatgctcttccttccacacgcaaacaacgcatactggttaccttcacaaagtcccaaccaagaaagtcactatcaagtgatgctcaacagcttgcctcggcagtagcatcttctcattggggtccaccgccaagccgatctcccaatcatgttcgtcatcacgtaggccccaagcattacgctacacttccaacaactggggtactgccagctccacccattcgaccacaaatggcagctcccgttggcatgcaaccattgtttgttgctgctccagttgtacctcccatgccattttctgcacctgtgccaatcccagctggttctaccggatggacagctgcacctcctccaaggcatcc

SEQ ID NO: 2403 - DNA, 353 bp, Glycine max
  Clone ID: LIB3028-035-Q1-B1-F8
ggaatcaatggattcttcacaagggtctaccattgctggtttcgtggacaatgcatccattaagagaaatgagtctagttttgatggcgttcccgtgtatgttaaggaactaattgccggaggctttgctggtgcgctttctaagacctctgttgcacccctcgaacgggttaagatactttggcagacaaggacaccaggatttcattctcttggggtgtatcaatctatgaataagttactaaagcatgaaggttttctaggattatataagggaaatggagctagtgttatccgcattgttccgtatgcagccttgcattttatgacatatgagcgctacaaaagttgga

SEQ ID NO: 2404 - DNA, 401 bp, Glycine max
  Clone ID: LIB3028-035-Q1-B1-F9
tgcatatttgccgaacttgtaaccaaacaagcactctttcctggtgattccgagctgcaacaactcctgcatatattcaggctattgggtactcccaatgaagatgtgtggccaggcgtgagtaaactaataaactggcacgaatatcctcaatggaaccctcaaagtctatcaacggctgttccaagtttagatgagcttggactggatttgctatctcaaatgttgaaatatgaaccttccaagaggatttctgccaagaaagcaatggaacatgtatactttgatgacctggacaagaggcacctttagaaagaacaaattgatccaatatttggacgtagaattttatgactaccaatttactctatgcttctctcgagcgtgtattctaatccgtt

SEQ ID NO: 2405 - DNA, 365 bp, Glycine max
  Clone ID: LIB3028-035-Q1-B1-G1
accacaataagatttatgggagccttcctgtggggttgaccaaagtcgaacattttcagctattcgacgtcagctataatcagttatgcggtctcataccgaagggtggagaattgcaaaagatcgataagtctttgtactctcacaacaagtgtttgtgtggctctccactatcaccttgcaaccataagcagatgactgtctaagtcgatttcatactttgataagtattcgtattttcatgtgtgtttgtgtgactttccaatttcacctttcaaccattataagcatatgcctatcaaagttggtttcatcagattaattattctgatttcaataaaatcgattacttgtttttctgtatt

SEQ ID NO: 2406 - DNA, 105 bp, Glycine max
  Clone ID: LIB3028-035-Q1-B1-G10
ttaaacttgtatttggacaactcatttaaacttgtatttggataactctatgcttaatttctaagcattaatatgatgatacttctgtggctactctgctgctgc

SEQ ID NO: 2407 - DNA, 397 bp, Glycine max
  Clone ID: LIB3028-035-Q1-B1-G12
gcttgatcaggtccaacaccctacaatcatggacaaggttgctggccagctccatctccgttctggtgtttctggtattaggagttatgaaggagcctactgccaccccacaatgtaccaaagaccctcttttgggaattactcgaatgctgcattgcagtatcctgtgatgccctcatgcaaagctactatggatttgtctgctgctgcaacaactgcctcccccgtctttgttgctgctccagcagagaaaggccattttcttatagactttctcatgggaggtgtttcagcagctgtctcaaaaactgctgctgctcccattgaacgtgttaagcttttgatccagaaccaggatgagatgatcaaaactggtagactttctgagccctacaag

SEQ ID NO: 2408 - DNA, 338 bp, Glycine max
  Clone ID: LIB3028-035-Q1-B1-G2
caactacaacattttagttgttgtaggtgatcgtgaagagttctgtgctaaagtatgagcgaatcagcagctactacactcagttacggtgacgcaaacccaatggtggggaattgcataagctcgataactctttgtactctcacaacaagtgtttgagtggctcaccactatcaccttgcaaccataagcagataactgtctaagtcgaattcatactttgataagtattcctattttcatgtgtgtttgtgtgacattccaatttcacctttcaaccattataaacatatgcctatcaaagttggtttcatcacattaattattcagatttcaat

SEQ ID NO: 2409 - DNA, 371 bp, Glycine max
  Clone ID: LIB3028-035-Q1-B1-G3
gagactttggagaccaactgagtaatggaaagtggagggaactcccttccatcagggtcagatggtgtgaagagaaaggtttcatatttctatgatccagaggttggaaactattattatgggcagggacacccaatgaaacctcataggattcgaatgacacatgctcttttagcccactatggattgcttcaacacatgcaggtcctgaagcctacggctgctaaagatagggacctttgcaagttccatgctgatgattatgtggcctttttgagaggcatcacccctgaaacgcagcaagatcaattgagacagctgaagaggtttaatgttggcgaagactgccctgtatttgatggtctttactc

SEQ ID NO: 2410 - DNA, 395 bp, Glycine max
  unsure (1)..(395): unsure at all n locations
  Clone ID: LIB3028-035-Q1-B1-G5
gctatctccaaattctcagcacacgcatttccgttctttgtccttgatgggtttagtgtttggaaagattagcgttgagacagcaaaatatgaagtgatcaaatccacaagcgagtacgaaattcgcaagtatgcaccctcagtagtggctgaagtcacatatgacccatcacagttcaaggggaacaaagatggtggctttatgattttggccaattacattggtgctgtggggaagccccagaacaccaagcctgaaaagattgccatgactgcaccggttataacaaaggacagtgttggtggggatggtgagacgattgctatgacggcccccgttgtgacgaagganggtggccgtgaaggcgaagaagggaatacagaatacaagatgg

SEQ ID NO: 2411 - DNA, 54 bp, Glycine max
  Clone ID: LIB3028-033-Q1-B1-G2
gtctgtctgtgttacgtttcgagtatctgtggaatccctaaccctaagttagtg

SEQ ID NO: 2412 - DNA, 370 bp, Glycine max
  Clone ID: LIB3028-031-Q1-B1-E2
ctccacaagcttccccgcgactccactctcctccaatctcctcttcttcaagctcaatcacacttcttcttcttcttccaaacgaacctcaaccttccatggcttcaagcgcttttcacccgtcatggagtggcaggattgcacggttaacatggagattgatgtgcccatctctgtagcctacacttgttattctgatcgcgaagccatcccaaactggatgccctttatttcttctgttaagatattgccaggcaaacctgacctgtcacggtggtccttgaagtataaagcatttggtcgtgatattgaattctcgtggcttgctcgtaatatgcagcccattccagatcagaaaattcactggcga

SEQ ID NO: 2413 - DNA, 344 bp, Glycine max
  Clone ID: LIB3028-031-Q1-B1-E3
aaagttaatctctctctctctggagcgtcctcgcttcgtcacggcacacaaccccttttcggatcggcggagcaatgcctcaccggcgagattcccgacgctgttcaatcagccatcgaacacctgcgaaaagccgcaaatatgaacgttttcgttaaaactcgcaatggcacgcacttcgaaattgaagtgaaaccctcagacacactttctgaagtgaagaataatatagaaaccgttcagggtgaacatgtctatcctgctgcacaacacatgcttagtcatcaaggaaaagttcaaaaggatggtactactttggcgcaaaatatactagctgaaaatag

SEQ ID NO: 2414 - DNA, 360 bp, Glycine max
  Clone ID: LIB3028-031-Q1-B1-E5
ctttccgattggacctttccagcttctaaacttggctggctatggagttgccgttgctacttcaaaagtatttgctgatgcattttctgatcgcatatttaaatcgccactgcttgatcttctgatcaaatctgggcgaaatggcaaaaacaatgggaaagggtactacatttatgaaaagggtggcaagccaaaacctgatccttcaatactaccaatcatcgacgagtctagaagactttgcaatattatgcccaatggaaagcctatatctattactgaccaagagattgtggagatgatactattcccagtagttaatgaggcatgccgtgttctagaagatggagttgttatacg

SEQ ID NO: 2415 - DNA, 355 bp, Glycine max
  unsure (1)..(355): unsure at all n locations
  Clone ID: LIB3028-031-Q1-B1-E6
cgccacggccgaagagatcgcaaagcaaataaaaaactcgacgctctaccacgaacttgccaccgacgacatgaacaaacaggccatggacatctgcaaggaagttctaggttacgctgtcgatgacatgcaccaatccgttcgcaagttggaagagtttgaactaaacaagttgaacgattacgcctatgatctcaaggtctggatcgccggtactctcgctcaccaacagacatgtttggatgggttcganaacacgaccaacgaggctggcaagaccatggctagggttctcaacacttctttggagctcagcgacaacgcattggacatagtggacggtgtaaccaatctc

SEQ ID NO: 2416 - DNA, 267 bp, Glycine max
  Clone ID: LIB3028-031-Q1-B1-E7
caagacggacgcaaccatcacacctcacctcgttcacgcgacgcctttctgctcttcttctacctttcacgttttaaaagtagacagatggaagagacattcctatgtacgtcagagtcggtgaacgagggacactctgacaagctctgcgaccaaatctccgatgctgtcctcgacgcttgcgtcgagcatgacccagacaggatagttgcctgccacacatgcaagagagacaagttggtcatggtcgtcggagacgatcaggag

SEQ ID NO: 2417 - DNA, 358 bp, Glycine max
  Clone ID: LIB3028-031-Q1-B1-E8
atccatttccacaccacaccatggcctcaaccaacgctctctcttcagcctccattctacgctctcccaaccgccagtctctgacccgaagagcgaaccataatggaagagtaaattaccggaaaccgaataaccgtttctccgtgaaagcctccgccaaagagattgcctttgaccagcattcccgctctgctatgcaggccggcattgacaagctcgccgacgctgttgggctcactcttgggcccagagggaggaatgttgtgttggatgagtttggaagtcctaaagtggtcaacgatggtgtcaccattgctcgcgcaatcgagcttcccgattctatggagaatgctggtgc

SEQ ID NO: 2418 - DNA, 380 bp, Glycine max
  Clone ID: LIB3028-031-Q1-B1-E9
gtttttagggtttacaccgagcagcgacacctccctcccgcagtagccatggttctcaaaactgaactatgccgattcagtggtgccaagatctaccccggaaagggcatcagatttgttcgtggtgattctcaggttttcctgtttgccaactcaaaatgtaagcggtatttccacaaccgcctgaagccctcaaagctcacctggactgctatgtacagaaagcaacacaaaacggacattgctcaagaagctgtgaagaagaggagacgcgctgccaaaaagccttactctaggtccattgttggtgccactctggaagttatccagaacaagagagctgataagccagaagttcgagatgcagctatggaagctgc

SEQ ID NO: 2419 - DNA, 374 bp, Glycine max
  Clone ID: LIB3028-031-Q1-B1-F1
cggaggatccgatttctagcttctgcaacgcattggcagctttctgcggccacctccactcctcttccgatgccctcaaacaatccatcgatcgccgacctattcctcgcgattccgcctcgtcgaccttcttgcaatgcctcaatcgccgcgtatcgaccgcgagcgccgacctccacatgctcgattccatgtccttcggtacagtctctttcgaagagctcctaggtcactgcaacgaattgtagaagaagaaccacgccgatctccttcaacttcaagatcgcctccagagctacggttatagtgctgttcctgatattgaggaggcggatgaagatgaggatatacaacgtcaagatccggaagacaaa

SEQ ID NO: 2420 - DNA, 381 bp, Glycine max
  Clone ID: LIB3028-031-Q1-B1-F10
gtggaagttacaatccaactccatcaagtcctccagttggtggaagccatgatccaactccttcaccaccctcaggtggtggtggaagttacaatccaactccatcaactcccccaggtggtggaagctatgatccaaccccatcaccacccacagatggtggaagttacaatccaaccccatcaccaccctcaggcagcaactgtggcacaccaccacatgacccctctactccaacaccctcagtcccaacaacaccatcaaccccatcaacaccatcacaacctccctcaagaagaagtgggtactataactcaccaacaacttatggaagttggtagcccccaacaacaatcactgtgaggccaccttcaaacccaa

SEQ ID NO: 2421 - DNA, 391 bp, Glycine max
  Clone ID: LIB3028-031-Q1-B1-F11
ctcgagccgctcgagccgattcggctcgagcttctagcctaaagccttgctaataaacactaacatggcctcccaatttgctagggatgtaaaatgcaagagactaatgcactgtgcagcctcttatggagaaagaggaagccattgttcactgtctcgtcgccaaaactatggataccatccaatccaacccgaagaagagaacttcaatgaacatcataatcataataataataacttgggatgtgaaaatggtgcaaaacgtggcacaaaccgaggtagacaacaagcacaaaagcttcacaggttgggcttctcgtaccttgcatcatcttttctttacttagtcataaaggttaaagctttctacaatgggttccttggagatgtt

SEQ ID NO: 2422 - DNA, 385 bp, Glycine max
  Clone ID: LIB3028-031-Q1-B1-F12
caagaaagagaagctcaaaaaggaacgactcgtcaagcagatcaagcgcgaggtgtcggtgatgaaactcgtccgccacccccacatcgttgaactcaaggaagtcatggccaccaaaggaaaaatcttcctcgtcatggaatacgtcaatggcggtgaactcttcgccaaagtcaacaatggaaaactcaccgaagatctcgccagaaagtacttccaacaactcatcagcgccgtcgatttctgtcacagccgcggcgtcacccaccgcgacctcaagccggagaatctcctcctagaccaaaacgaagaccttaaagtctccgacttcggactctccgctctgccggagcagcgccgcgccgacggcatgctcttaaccccg

SEQ ID NO: 2423 - DNA, 379 bp, Glycine max
  Clone ID: LIB3028-031-Q1-B1-F2
ggaattattaattggtgtttactgggattaatgaaacctagctagaaaggaaaatgatgggagaacaagggagtgtattttatatatatatatgtaaaaatttgtgtattgtttgtagtggttaaatttgtgaaaaaggtaaaaggttttttctttctttctgggtatacatactaaagggtttttgagagttcagtctgctttgagatttgtgttttggatgatggaggaagctcagggcagttctagttccctgccacctttcctcaccaagatttatgagatggtggatgatccttcaactaattccattgtttcatggagttccaccaataggagtttcattgtttggaacccaccagagttttcaagggatttg

SEQ ID NO: 2424 - DNA, 357 bp, Glycine max
  Clone ID: LIB3028-031-Q1-B1-F3
attttcagtttcttccgcgcttttctgcaaaatcatctaaatccgtgagtttcttctttcgctttatccgtttccaattacccgtaactgtccaatcgttcagtggaatatgttttctaccttcttgatctgcatatgaatttcttccttttttacttttgaagaaaaccattgatttttttcttcttcgtaaatgtatgtaccagaccagtatgttgtatttatgtgttacatttctgttgattcatagaccaaccaatgttgctttactatagtttagaattcaatttaataacttcgagatgcttaggttagatgatatgggttctcctgaaatacatcacctatgtgttcgca

SEQ ID NO: 2425 - DNA, 353 bp, Glycine max
  Clone ID: LIB3028-031-Q1-B1-F4
ctttctcacaacacaaaactcgatttgtaactctcacaccatttctactcatatcccataagcaccaccatgactccatctaaagaaattgtgaccatcatttaccacaatggtcacattgtatatgatccagttcaaggatagatgtacacgtctatgaccccaatatttttttacgccagttgttctactacgtttatacaattcattcgataaattaacaatcgcctccctactcaagcaactgaacaagttgctcaattgttatttcgtgtccctaattcagttcatctcggtcagacacgtgttatttcagctcaactattcgacaatgatgatcttataggtgcgat

SEQ ID NO: 2426 - DNA, 239 bp, Glycine max
  Clone ID: LIB3028-031-Q1-B1-F5
aatctgtcttctcttacattcctttctccaccacacattcaattttcaacctctgggcgtggctagcttcaacctttaacattaacatggccattccctacccccatttcatcgccaccgagaaagccgccatggacgccggcctcctccacccctcctccccctccgtcatcctcacccaagacgatttgaacgaaatcggcgcctacaaggccgtcgagtacgtggagtccggcatg

SEQ ID NO: 2427 - DNA, 353 bp, Glycine max
  Clone ID: LIB3028-031-Q1-B1-F7
gttcaccaattaggctttcaagagacaaactgttttgaaaaatgggatccaaggttgttgcatccgttgcccttctcctctccatcaacatccttttcatttccatggttagctccagcagccactacgatccaccgcccccaccttgttacgtccctgctcctttaacagcaccaccatcattgtcaccaccagcgtcattgtcaccaccaccaccgtcaggacctagttgtccggatctgagtgtttgcctcagtgttttagacgggtctcccgcggagggttgttgtgccctcatcgctgatcttgttgagcttgaagcctctgtgtgcctttgcatccaactcagggtc

SEQ ID NO: 2428 - DNA, 206 bp, Glycine max
  Clone ID: LIB3028-031-Q1-B1-F8
aaaaaaaaaaaaagaaaaaaaaaaaaaaaaaaaaaaaaaaaaaagaaaaaaaaaaaaaaaaaaaacaaaaaaaaaaaaaaagaaaaaaaaaaaaaaaaaaaaaaaaaaagagaaaaataaaaaaaaagggggtgccccccaaaaattagcctcgtcaaccggggatttatttcgggtgggaaactgtaaggggtggaaattttccc

SEQ ID NO: 2429 - DNA, 404 bp, Glycine max
  Clone ID: LIB3028-031-Q1-B1-F9
ttcaacttaagagatcaatatggccaccaccactacccagcctccctctaatatctgttttttccttctgttgttgcttctagcacactttcatttgggcataagccaacttgagctgaattactactctaaaagctgcccaaaagctgaagagatcatcaaggaacaagtcacacaactatataacaagcatggaaacactgccgtttcgtgggtcagaaatctcttccacgattgcgtggttaagtcatgcgatgcatcattactgttagcgacggtgagcgatgtagtgtcggagcagacatcggatagaagttttgggatgagaaacttcaagtacgtaaacactatcaaagcagcggttgagaaagaatgccccttcacagtgtcatgcgctgacattg

SEQ ID NO: 2430 - DNA, 358 bp, Glycine max
  Clone ID: LIB3028-031-Q1-B1-G1
atttcctagcctcccaacaaggaggccccctatgctcaacagcagaaaataaataaagggcattggggtgcaatggccattgcaaagagtgcttccattcttattattttgtgctttgcattggcctgcaatgcggataatgctggaaaaccagacccagttgctggtcctgacatgttcagcaataaaaatgtggctaaggatgtgctccttcccggggagcaaatagttaacgtccaggattttggagccaaaggtgatggcaagttcgactgcaccgagtctttcatgcaagcatgggcaaagacctgccatcaatcctctgggccagccaggctttacgttcctgctggcagat

SEQ ID NO: 2431 - DNA, 379 bp, Glycine max
  Clone ID: LIB3028-031-Q1-B1-G10
accaaccttgtgccctaccctaggatccacttcatgctttcgtcctatgctccggttatctctgccgccaaggcctaccacgagcagttgtcggtgccggagatcaccaatgccgtgttcgagcccgccagcatgatggccaagtgtgatccaaggcacggcaagtacatggcttgctgcttgatgtaccgtggtgatgttgtccctaaggatgtcaatgctgctgttgccaccatcaagactaagaggactgttcagtttgttgattggtgtccaactggattcaagtgtggtatcaactaccagccaccttctgttgttcctggtggtgaccttgctaaggttcagcgtgctgtatgcatgatcagcaacaacaccg

SEQ ID NO: 2432 - DNA, 344 bp, Glycine max
  Clone ID: LIB3028-031-Q1-B1-G11
gaatatatcaggacctaaattaaaccctttagcatatattggagttgactttgatgccattaataggagggaaaagaggatggagaagcccaccacgacaacggtaacgtcaactgtaaccatgggtaaagctatgggatctggttccggtatgggccgggctggcgtgggtgctctcagacctccatcaaacccgatgatgggtatgggcatgggaagctatggaggcgtgaacgcaccaatgggtatggggcagatgccaccaccacctagtcgatttcctcctggaaattataactccatgatgggaagaagtggttatcctcaacatccttatgggggct

SEQ ID NO: 2433 - DNA, 404 bp, Glycine max
  Clone ID: LIB3028-031-Q1-B1-G12
gaagtatggtgctggaattggccctggtgtctatgacatccactccccaagaataccaccaactgaagaaatcgctgacagaatcaataagatgcttgcagtgctcgagaagaacatcttgtgggtcaaccctgactgtggtcttaagacccgcaagtacactgaagtgaagccagccctcacaaacatggttgccgcagcaaaactcatccgtaacgaacttgccaagtgaatggtataagaaagtagaatctacaagttcattggttctgcttttataatacaccaaagaaaaattttctatattgggttgtttcaataaccgtgtgtggaatatttagatgttttagcatgctctgtgagcaattgaatcctcctcaaaccctctccccttaattttccca

SEQ ID NO: 2434 - DNA, 354 bp, Glycine max
  unsure (1)..(354): unsure at all n locations
  Clone ID: LIB3028-031-Q1-B1-G2
gaaaggtcggaacataacgcggggaagagttagtttcttctctcttcgatggaaggcggggaagaggttctcccttcggccactgccacctccgccgccaccggcaatcccaccgcttcgcctcctccgctcgctgatcttgtcggtgctcccgatctcgctgctgcctcggacgacgtcgttacccaacctgaaattcacgcgctgatttcagacgaagagcacgatcacgagcatnagcatgacgatgacctccagcacgagcacgatcagcatgatcatgaccaccaccacgaggaccgcgatgatcacgccgctgtggccgctgtctccttggaagatctcaaactcaag

SEQ ID NO: 2435 - DNA, 279 bp, Glycine max
  unsure (1)..(279): unsure at all n locations
  Clone ID: LIB3028-031-Q1-B1-G3
atatcgtggaagcatccaacggttttgttggaggtgcgtctcacgtcccacatctacagatgccctctatttcttttcagagtcgtatgccatggaggaatcgatctggtggtctctacccttggtgatggaggcaatgatcaatattaccacagtacaccttgcgaaactctaacggggcaagtgagaagacagatttgagcgtgtaagtcactcatggagtaataatactaggtagganaatgtgagacgtttgaacagttgttgcgggtgttatgt

SEQ ID NO: 2436 - DNA, 373 bp, Glycine max
  Clone ID: LIB3028-031-Q1-B1-G4
ctcttccatccctgtgatcttttcgcctctctgttcagggctcaaatataacaaaacattaaggttcaataccttaactttccttcatatcctcaaactgatgcacacatatgtgcctactctatagtattcacaatatcataataatttgcttctatctgcagtgaaaatgacgcagaatgcaatagtgtccaagacaaaatccgggatcaagggggacatagccgtggcacagaagccactggcggcgcctccgccgccggggtacattcccattccgaggaggacggttttgaagaacctcgaaatcaatggatgacaaagaattaatgcatgggttgattcgatgagagcctcctctccaaccaattcc

SEQ ID NO: 2437 - DNA, 344 bp, Glycine max
  Clone ID: LIB3028-031-Q1-B1-G5
cctcattctccgtcatgttcatcatcttcagttcaattctctctcgctgtctctgtcacggttcctcattcgcatggtgaatgacaccgccgccgccgcgcacatcacttccaccgccaccgcggctgctatcgtcagttccggtcgagtgctctctattctccatgatctagaagatgcgcattccaatttctctggcgacgagcagatggcagaacacgtgaacgcagaactcacagcagaagaggtcgttgatcgactatccgatgactgtgaaggataagaatctgtatcggccgcactcagcccgcgctgttcgtccatatcccctttcactaatctca

SEQ ID NO: 2438 - DNA, 363 bp, Glycine max
  Clone ID: LIB3028-031-Q1-B1-G6
caacaatggcaatggcaacccaagcctctctcttcatcccacccctctccggtctcaaacccagcgaccgagccaccgcgccatggaaacaatcctccaccctctccgtctccacctcgaagcccctcaagttctcgcgaacaatcagagcagcagccaccgaccagaccacagaggcaccggttgggttcaccccaccggaactggacccagacaccccttcgccgatcttcggaggcagcaccggcgggctcctgcgcagggcccaagtggaggagttttatgtcatcacatgggactcgccgaaagaacagatctttgaaatgcccactggcggcgctgccatcatgagggagggtccca

SEQ ID NO: 2439 - DNA, 311 bp, Glycine max
  Clone ID: LIB3028-031-Q1-B1-G7
gccaaggagtcgattctccgttactcactcgcgcaacaccaacttgaggcacacgtgcagctagactacaccgttgggttttacgatggtttcattcaggttcgtgcacgtgtcgataatatacgcctccacctcgcgaggttaggtttcagccacgacgacgacgtggatgatttcgttgatgagaagcactttccgtcacgggttcgggtttgggtgggcccggtgataggatccacttattgcgctgggctgagcttgggccggtccacggagaacaaagagtgcgaagtggaaacacagaggattgt

SEQ ID NO: 2440 - DNA, 375 bp, Glycine max
  Clone ID: LIB3028-031-Q1-B1-G8
aaacactcataacacaaagcacaaagcaaagctcatccttgagttaaaaaatggcagcagcttcttccatggctctctcatccccatccttggctggcaaggccgtgaagctgggcccatcagccccagaagtgggaagggtgagcatgaggaagaccgtcaccaagcaggtctcctcaggaagcccatggtacggcccagaccgagtcaagtacttgggcccattctctggggagcccccgtcgtacctaaccggtgagttcccaggcgactacggctgggacactgctgggctttccgcagacccagaaaccttgcgcaagaaccgtgaactcgaagtgattcactccaggtggggcatgctcggagccttgg

SEQ ID NO: 2441 - DNA, 249 bp, Glycine max
  unsure (1)..(249): unsure at all n locations
  Clone ID: LIB3028-031-Q1-B1-G9
ggcgaacagttcctcaagtatccaccacctaaagtgatgcacgtcgacaagtctgcatggatgactgatgaagaatttgcaagagaaacaattgctggtttgaatccaaatgtcatcacgattattgaggagttcncactaagtaacaagctaaatactcaagcctatggtgatcagacctgtataataacacatgagcatttggagcctaacttaggtggtctcactgttgatcatgctatccaaaac

SEQ ID NO: 2442 - DNA, 93 bp, Glycine max
  unsure (1)..(93): unsure at all n locations
  Clone ID: LIB3028-031-Q1-B1-H1
gtcatgacacacctgtgatgtanttaacgttaacattttgtgcgtgttacttgtttaaaatttagctaataggaggaaaataaaattgttgat

SEQ ID NO: 2443 - DNA, 380 bp, Glycine max
  Clone ID: LIB3028-031-Q1-B1-H10
gtttgaaggcatgccagcagtgttcacaggaatgttaggaggggaagaactatctcaagcctatgcaagtggagatgtctttgtgatgccgtcagagtcagagacacttggccttgttgttctggaggccatgtcatcaggaatccctgtggtgggagcgcgtgccggtggcgttccagacataattccagaagaccaagatggcaaaattggttacctctatacaccaggtgatcttgaagattgcctgagcaaactaaagccgcttttggatgacaaagagttgagagaaaccatgggagaagctgcacgtttggagatggagaagtatgattggagagcagccactcagaagattcgcaatgaaaactacaatgctg

SEQ ID NO: 2444 - DNA, 366 bp, Glycine max
  Clone ID: LIB3028-031-Q1-B1-H11
tctgtgacctgtttggagctggctgaaatatgcagagaagttggccttcctccaggggtattaaacattgttactggattaggcaatgaagctggtgctcctttgtcatctcatcctgacgtagacaagatttcctttactggaagctctgcaactggaagcaggattatgacagctgcagcacagctaacgaagcctgtttctctagagcttggtggaaaaagcccaatcattgtttttgaggatgttgaccttgataagactgctgaatggaccatctttggctgcttctttacaaatggtcagatatgcagtgcaacatctcgccttattgtgcatgaaagtatagcaacagaatttgtgaat

SEQ ID NO: 2445 - DNA, 421 bp, Glycine max
  Clone ID: LIB3028-031-Q1-B1-H12
catgcacgtctacactagatgatcacctcggtgaattccaattccacattttcaagaaataaggaggcacaaatgttcatatatgaattggaattaattgttttcttattaggcctatcctgaagccacaggaaatgagatcggaattcctcggggaattccaattccacattttcaagaaataacgaggcaaaaatgttcatatatgaattggaattatttgttttcttattatgcctatcctgaagccaaaggaaatgagatcggaattcctcggggaattccaattccacattttcaagaaataaggacgcacaaatgttcatatatgaattggaattatttgttttcttactaagcctatcctgaagccaaaggaaatgagatcggaattcctcgggggtaccgagctcgaattccc

SEQ ID NO: 2446 - DNA, 356 bp, Glycine max
  Clone ID: LIB3028-031-Q1-B1-H2
gggatataatgcacttgccttctccattccttcagggaaggaacttctgacgatatttgggcttgctgctcctgtttttataacattgatgtcaaaggttgtctcaagtagtatactagatctgtggctttgtctagagtggtataaccttttaatataatctgaagttctgatgtttaggtggctttttacgcactacttatatattttgctacatcaatgggtacacatacaatggctgctcatcaagtcatggtccagacctatttaatgtgtaccgtatggggtgaacctctctcgcaaacctctcaatcatttaggcctgaattgatatatggagtaaatcggagtttgtc

SEQ ID NO: 2447 - DNA, 374 bp, Glycine max
  unsure (1)..(374): unsure at all n locations
  Clone ID: LIB3028-031-Q1-B1-H3
caataataagttaatagctcgcgtagcgcaaggaacagcataaacgacgctgcgctgaacaacgccggtgtcagacaaacggtgccggttggtggggccgccacgctattacgcctaatcgtatccatcaccctcatcaaaacccctcctttctcttaatttagaaaccctaattcagaagataaaagttactttctccagaattagcgcgctaatggcatcttcagactcatggatgaangaatatagtgaagctgtgaaacttgctgatgatatcaatggcatgagttctgaacgtagttcgtttcctgcatctggaccagagacccagcgacatgcatctgctataagaaggaggatcacgatattaggga

SEQ ID NO: 2448 - DNA, 335 bp, Glycine max
  unsure (1)..(335): unsure at all n locations
  Clone ID: LIB3028-031-Q1-B1-H4
ctcaaaactataataaggggttcttcttctcctcgggacactagcaagagcatanacctagagcgatacaacagctacatcaggagactcaacagcaccaaactcctcaacgcctcctccaaactcctcttccgtgccactatcttagtcgcactcatcctcgtcttcctcttcagcttcaactaccctcgcctcgccccagaacttagctctcagcgccacctccactcccactcgcacttcctctcctcctcctcctccttcgcctcctggggagaagcaggtccggcactcctccagccctcgccgccccaacaggctcagcgtcctcgtca

SEQ ID NO: 2449 - DNA, 242 bp, Glycine max
  Clone ID: LIB3028-031-Q1-B1-H6
caacccccagttcttccgcctccacccacccagcatatctctctattcctatttattagcacccctcacattaccttgtgtcaccaactactttgactcctttagcgtaccattacactaattatcagacctagccagtaaaaatggtgagcgtggatgaaatcgggagcgctcagcgttcccatggggccgccaccatcttgcgcttcggcaccgccacgccgtcgaactgcgtctcccag

SEQ ID NO: 2450 - DNA, 338 bp, Glycine max
  unsure (1)..(338): unsure at all n locations
  Clone ID: LIB3028-031-Q1-B1-H7
tgtgaatcagcaccacattcacctgagctttttgtgaggattccaaagcatggcttcccttgcagcatccactgctgctgcttcccttggcatgtcagaaatgcttggaaaccccatcaacctcagtggtgccacaaggccagctccatctgcctctagccctgcctccttcaagactgtggctcttttctccaaaaagaaggctgcacctccaaaaaaagctgcagctgctgctcctgccaatgatgagcttgccaagtggtatggtcctgacagaaagatcttcttgcctganggtctcttggaccgatctgagatcgcagagtacttgaccggga

SEQ ID NO: 2451 - DNA, 188 bp, Glycine max
  Clone ID: LIB3028-031-Q1-B1-H9
gggtctccaactcattctcacatcactggatgcaggaacacgctgtctctgcagggagcaagaccggcaaacgagaaatggcacacagagattttggcgacgatttaacctcctgcacgtcagtgaaagcatcaaatcagtgcgttgtcggaatctactgacactcgactcatctgaataaacatcag

SEQ ID NO: 2452 - DNA, 354 bp, Glycine max
  Clone ID: LIB3028-032-Q1-B1-A1
cacaaccaggtccctgaatgctttttagagagagaaagagtaataataataaagtggaagaaaaagaattaggagagtgaaacaagaagaagaagaagaagaagaagaagaagaagaattgagaagatggtgtttgaggaaactgagctgaggctgggactgggactatgtctccctggaaatggaaccacggcaacaactgaagctgctgctgcggaattaggagtgaggaagagagggttctctgagactgaaactgatgaaacagccaccgttgatttgatgcttaacctctcacccaaggaagctgctgctgctgatggtgcagatccacgtgagaagccaaagacttcg

SEQ ID NO: 2453 - DNA, 411 bp, Glycine max
  Clone ID: LIB3028-032-Q1-B1-A11
acgtctcattcaaacctgaattcagctcaagattcaacctttctcttcctcctcactcaaacttcccctctctacgccgttcctcccaaatggatgcaccaatggagttttggggtgttgaggttaaggttggtcagaccgtgacagttgacccaatggatcctgtggattcatacatacacatatctcaggttgcgctcggagaggcgaaaaaggagaaacctaatgagtctgtggttttgtatttgaaagttggtgaacagaagattgtcttgggaaccctttctagggatggcattcctcatctatcgttggatttggttctggactccgattccgagctttcccacacttcaaaaagtgccagtgtctttttctgtgggtacagagtactaactggcggcaacaatg

SEQ ID NO: 2454 - DNA, 364 bp, Glycine max
  Clone ID: LIB3028-032-Q1-B1-A12
gccgaagaaggtattgacgtcgatgatgaaaatgaaattggtgaaaacattactgcttctcctttgtgtgaaactcttctgttatgcagtgattggtgctcctcaaacttgtcctgctaacaatgaggataaatgcggcgattcagatgaatggaaaggggagtttttccctgacattcccaaaattaaatatgagggtccgtcaagtaagaatgtgctttcatttaaatggtataatgcagaggaggaaattcttgggaagaagatgaaggattggttaagatttagtgttgcattttggcatacattccgtggaacaagtgctgacccatttggtgcacctaccaaatactggctatgggaa

SEQ ID NO: 2455 - DNA, 386 bp, Glycine max
  Clone ID: LIB3028-032-Q1-B1-A2
aaaataccctgttcagtgtgttacatacactttgacggaaagggttagctagcgtgacagtgcattcacctagtggaccaaacaagccactgcactatcttgtttttatatttattttcttttgcatcatttgaccggggtaataccctatgaccctcctctttattttctttaacacctcctcctctttcttttctcagcaagtatggccgtggaattcatgatggggtacaggaacgacactttcgcggaggataatgcggttcgtgaagctgcgtcagggctagagagcgtctagaaactcatcaagttgctgtcgcatactcaacaacaataccagacaacctcaaagtcttccatggaaaacatcgacaccgactacacag

SEQ ID NO: 2456 - DNA, 386 bp, Glycine max
  unsure (1)..(386): unsure at all n locations
  Clone ID: LIB3028-032-Q1-B1-A4
tccctctctaactctcttctaaaacttaccaacacaacaaaatccagtttcccaataanagagtttttgttgaaatggaaaacgttccggcggtgtgtaaggaagatgatcagatggatttgcctcccggatttcgattccacccgacggatgaagagctcataagccattacctctacaagaaggtcattgacaccaagttctgcgccagggcaattggagaagtggacctcaacaagtccgagctttgggatttgccatggaaagccaaaatgggagaaaaagagtggtactttttctgtgtgagagacagaaaataccccactggcttgagaaccaacaaggccacagaagctgggtactggaaggccacaaggaaagacaaa

SEQ ID NO: 2457 - DNA, 388 bp, Glycine max
  Clone ID: LIB3028-032-Q1-B1-A5
ccggaatcagaggctccccctaacttctggggccacaccccggaagaagaatactacacctcccaaggcgttcgcaacaccaagtcccacttcgaaacccccaacggcaaaatcttcacccagtccttcctccctctcaacctccaaccccaccaagtcaaagccaccgtctttatgacccacggctacggctccgacaccggctggctcttccagaaaatctgcatcaacttcgccacctggggctacgccgtcttcgccgccgacctcctcggccacggccgctccgacggtctccagtgctacctcggcgacatggacaaaatcgccgccacctccctctccttcttcctcaacgtccgcaatagccacccctacaaaaacctcc

SEQ ID NO: 2458 - DNA, 348 bp, Glycine max
  Clone ID: LIB3028-032-Q1-B1-A6
ttcttattggggatgcagcccacacattccaacgcctagcaggtcgcagaccttaattacgtttgggacactaaccttccacatccaaaccttgtgactttgggaggaatttcaggcaattcaataggtgatgttgttacatccgttttataccaagcgaacacatctccagttcctgaaaagcttaatgtatgattaagtccatgtccataatctaatccatagatcacatgcactttaaacatgtggctctcatcagggatgcatcccacacactcaaacctactactcgtcaaagatttcatttcggattcgtcaatggaatttcacttacccaaattcttgcaa

SEQ ID NO: 2459 - DNA, 387 bp, Glycine max
  Clone ID: LIB3028-032-Q1-B1-A7
acttctaacacatacactactctctctctctctcttattgtatggccgccaattccagtagccgagggatcaccgccttagggaagcgagtcgccaaccggatctggacttccaacgcacctcctctcacttcaaggaggggagcatacagtagcggctcagtgtacgacaagaaccctgatgatgagatccagtctgggcaggtcccagacgatgtgatccaggcggcaacacaatccggcaaatactgggccccacatccacagactggggtatttgggccccccggaggaggtgaccaaactgcttctgccattcactctgatgcgctggaggagaaggcctggtttcgccccaccagtctcgaggatttcgagaagcctcaca

SEQ ID NO: 2460 - DNA, 158 bp, Glycine max
  Clone ID: LIB3028-032-Q1-B1-A8
ctctgggactagctgagggtcaaatccattgtcaccaggaagagtgccattgatgtaagttggggaggctaacccagttaagcactctcccttcttggtgactatggatttgaaacacagctactatcagatgacggacggaatcttacgatgtaggt

SEQ ID NO: 2461 - DNA, 362 bp, Glycine max
  Clone ID: LIB3028-032-Q1-B1-A9
cagcgttctgagtcttttcttcttcgttaccctcttcacatgccttctctctgctaattcccacgatgaccatattttcctaccgagtcaactccatgacgatgactcagtgagttgcactgctaccgacccaaaccttaactacaagccggtgatcggaatcctgacccaccccggcgacggtgcctctggccggctcagcaacgccaccggggtttcttacatcgccgcctcctacgttaaattcgtggagtccggtggtgctagagttattccccttatctacaatgagtcacctgagaaccttaacaagaagctcgatttggtcaatggagtgctcttcactggtgggtgggctgttt

SEQ ID NO: 2462 - DNA, 365 bp, Glycine max
  Clone ID: LIB3028-032-Q1-B1-B1
ctcgagccgaatcggctcgagcggaaagacaatcacccttgaggtcgagagctctgacaccattgacaatgttaaggctaagattcaggacaaagaaggtatcccaccagaccaacaaaagcttatctttgcaggaaagcagctagaagatggcagaaccttggctgattacaatatccagaaggaatctaccctccacttggtgctccgtcttcgtggtgggatgcaaatctttgtcaagaccttgactggaaagacaattacccttgaggtggagagttctgacaccattgacaatgtcaaggctaagattcaagacaaagagggtatcccacccgaccaacagagactgatctttgctggaa

SEQ ID NO: 2463 - DNA, 384 bp, Glycine max
  Clone ID: LIB3028-032-Q1-B1-B10
atcaaagtttcttcctttctctgctctttgccttctctgacacatttggtgccttgtagagcgtgttttggcaggaaggtggtatggcgaaggacgttgaggttgctgagcgtggctccttctctgggaaggactaccaggaccctccaccagcaccactcattgatgctgaggagctcacaaagtggtccttttacagggctctcattgctgaattcattgccactttgctcttcctctacattactgtgctcacagtcatagggtacaagcaccagactgacctcaaggaaaatggtgaaatctgtggtggggttggcattcttggcattgcatgggcctttggtggcatgatcttcatccttgtctactgcactgctggga

SEQ ID NO: 2464 - DNA, 372 bp, Glycine max
  Clone ID: LIB3028-032-Q1-B1-B11
gaagtcttctgaaagacgcagttatggtggaccacgagttccttaccgtggtggtcgtcgtggaggtttcagcaatggtgaaactggtgaaggtgaagacggacgacctcgaagagcatttgatcgtcgcagtgggactggacgaggaaatgaattcaaacgtgaaggttcaggacgaggtaactggggaacccaaactgatgaacttgctcaggtaactgatgaggttgtgaatgaaacggaaaagaatttgggtgatgagaagcctgcagttgaagaagatgtagctgatggaaacaaggacagccctactaatgaaaccgaagaaaaagagcctgaagataaggaaatgactctggaggaatatgaaaa

SEQ ID NO: 2465 - DNA, 382 bp, Glycine max
  Clone ID: LIB3028-032-Q1-B1-B2
cttttaatacctttgctcccaataaggcagcaggagatcacagaactccaattaaactaaaagaaatttctccagatcaatcaaatcaaactgcagcagatacgtggaatccatggcagcaaccagaccagacaggaggaggaggagcctctcaaactatccatgaaacacaactcaaggcatctcgcgacgtggcaatggcaacagctgccaaagcaaaattacttcttcgggagctaaaaaccgttaaagcggatttggctttttctaaagcacgctctgctcaactagaagaggaaaacaaaatgctccgggaccgcgagggtaccgacaagggacaaaacgttacccgtgcagatgatgatttgatccggcttcaact

SEQ ID NO: 2466 - DNA, 390 bp, Glycine max
  Clone ID: LIB3028-032-Q1-B1-B3
cggatctcttcttcagtggtggaagctactagaacactagtttgttgagcactgcgatgaggaagtggacggttgcttccgctctccttcttctctctctcctctttctctttgcagatcaaggtcgaaagtttcaggcgaatgccgagggagattccgacgagcttgtagatcctccgaaggtggaggacaagatcggtgctgtgcctcatggcctttccaccgattcagatgtcgtcaagagggagtcggagtcgatctcgaagagatctctccggagcaatgcggagaagtttgagttccaagcggtagtgtcacggcttatggatattatcatcaattctctctacagtaacaaggatatcttcctcagagagttgatttccaatg

SEQ ID NO: 2467 - DNA, 384 bp, Glycine max
  Clone ID: LIB3028-032-Q1-B1-B5
ggaaggaagagaagagaagagagatagggagagcgagcgtgagaggaagatcttcgatttagggttttcaatttcgtattcagcaaggcggcgagtgtgagatttttagagagagagaggtgaggacgctgagtgctctgctgagagattccataaccccaagaggaagaggaggaggagaaggtggatagattttttttcctttttttttgtgctgtttatttatcctcagagcggtggatagggatttttcactctgcagcgttccgttccattgtgatttgttgaagtttctgatggagcagcgaaagcttgtggttttggggattccgtgggatatcgatactgagggattgagggaatatatgagcaagtttggtgagc

SEQ ID NO: 2468 - DNA, 331 bp, Glycine max
  Clone ID: LIB3028-032-Q1-B1-B6
cttacatcgccatgtctactactgtagtaattttcttgaccttaggaaccggggtttgcgcggaatctgaaattgaaattgttacttggtcttggtttggatgtgcgtatatatgaggaaaaacccagccgaggaacagtcgttggatcacggcgtcataattttgcccttttatttttacattgttctgtttgtatgtaactatttgggggtattagctgatttaaggaaagatcccctaatcctgttatggctatactcagcccgaaaggctattgatttattagctattgccttttagtataaataaatgacgagaggatttcttacc

SEQ ID NO: 2469 - DNA, 112 bp, Glycine max
  Clone ID: LIB3028-032-Q1-B1-B7
ggtatcaccattactttgtttttactatcatgttcacccgtagtatgtaagattgatatcccaaactatgattatgaaatcaaatttctctatggcaccagttgggattttc

SEQ ID NO: 2470 - DNA, 358 bp, Glycine max
  Clone ID: LIB3028-032-Q1-B1-B9
cccttctttaccttctactttccgaatccagaaaacaccacaacaccacccagaattgttgggttccattctcaaaacagagaacaagaagaagaagaaagagagagagtgaaaacgggaaaagcaaaaagttgtttctgtgattgattctctgcaaccgaatcatcatcagccacttcttcccgtttcatctctcccatttcttcttttcttccgctctggttcagtaaggcgaagagggttaacgttattcataatggttgcaacagccgctacggcgtcgtttcttcccgtgcctttgccagacgctggaaaagggaaacccaagaaactgggtggtggtggcggtggcggtggc

SEQ ID NO: 2471 - DNA, 302 bp, Glycine max
  Clone ID: LIB3028-032-Q1-B1-C1
attttgatgttgaaaactatagataccagcccttctggctgaagtggcagttttggaagaagaaattgtaagacttgaagagcaggttgtgcatttcagacaggatttgtaccaggaagctgtctacatgtcatcttctatgaggaaattggaaaattcagtttccgctcctcctaacaagtcaaatccaacaatggatagtcccaagttggataaattgaagtctcttacccaaacaactggtaattcaacagcaacatctgcaactaagcctaacacaacactccctgatgataatagac

SEQ ID NO: 2472 - DNA, 292 bp, Glycine max
  Clone ID: LIB3028-032-Q1-B1-C10
gtcagcctggtcaagctcctcgtcctgctggcacaggagcacctgttcgaacctaaaagcaaatcctaagaaaaagccttgatgttatgctctgaccaaatcctaagaacaaatttgttgcttaattttgaacatatcagttttgtgaaggggtattttgttctgattatctgctctagtcgttggatagtatcttgctggttataattttggtggctattattatgaaagtggaacttgatataagttttcattgaaattggttatttatttatttatttcagatcttatt

SEQ ID NO: 2473 - DNA, 372 bp, Glycine max
  Clone ID: LIB3028-032-Q1-B1-C11
gttgaattgagttgagaagagaagaggtcatagacacaacacaagacatgtctgttgtcgagtcaggtgaacacaacaacatcagaggagtaccaactcatggtggacgctatgttcagtacaatatctatggcaatctctttgaagtttccagaaagtatgtccctcctattcgtcctgtgggtagaggcgcttatggtattgtttgcgctgctgtaaatgcagagacaggtgaggaagttgccattaagaagattggcaatgcatttgataacagaatagatgccaaaaggaccttacgagaaattaaacttcttcggcacatggatcatgcaaatattatgtccattaaagatattatacgtcctccac

SEQ ID NO: 2474 - DNA, 356 bp, Glycine max
  Clone ID: LIB3028-032-Q1-B1-C12
accaatatagcccaagccctatacaaccaaaccctaacacacacccatttgattcagtttccatggctagcctcaaggttgcatttttggctgcagtgctctgcatggttgtggtgagtgcacccatggcacatgcagctatcacgtgcgggcaggtgacgaatagcctgatcaattgcatcggttacctccagaacggaggaacgccgccgtcgggatgctgcaacggagtgaagagcctcaatgccgccgccaagaccaccgccgaccgccagacggcgtgcaactgcctcaagtcggccgccagccaaatctccggcttcaaagccaacaacgccgcctcgctccccggcaaa

SEQ ID NO: 2475 - DNA, 386 bp, Glycine max
  Clone ID: LIB3028-032-Q1-B1-C2
cgatcacaaaaatggcggcgaaacttcaaatatttacgggattgccccccgcgccatttcaatcttcttcttcctccactctctgcgtactcaagaagcctctcactacctccttcttcggcaccgcgcgagtggaagttctgaaacttagagtgatgaggattgtgaagcctacgcgtggcggaggtgctctcggtgctcgcatgaacctctttgacaggttcgccagagttgtgaagtcgtacgcaaacgctgtcttaagttcgtttgaagatccggagaaaatattggagcaagctgtgcttgaaatgaacgacgacttgaccaaaatgcgtcaagctactgcacaagtattggcatctcaaaagcgattggaaaataaatac

SEQ ID NO: 2476 - DNA, 370 bp, Glycine max
  Clone ID: LIB3028-032-Q1-B1-C4
aagcaacattttgttgatgccctcctcacattgcaagacaaatatgaccttagtgaagacaccatcattggtctcctttgggatatgatcacagcagggatggacacaactgcaatttcagttgagtgggccatggctgagttgataagaaacccaagggtgcaacaaaaggtccaagaggagctagacagggtaattgggcttgaaagggtgatgactgaagcagacttctcaaatctcccttacctacaatgtgtgaccaaagaagcaatgaagcttcacccaccaaccccactaatgctcccacaccgtgccaatgccaatgtcaaagttggaggctatgacattcccaaagggtccaatgtgcatg

SEQ ID NO: 2477 - DNA, 384 bp, Glycine max
  Clone ID: LIB3028-032-Q1-B1-C5
ccaattcatacatgcatgcatagcatctaagagagagaagctaagcaagtacaaaaaatgaaatgggtgaagctcatcatgttgactttttaacagctttgatgagagaagaaacagcacatgacgataaatttctaagggatgctgtgttcaatctatttgtggctggaagagataccataacttcagctctcacgtggttcttttggcttgttgccacaaacccctcagttgaagccaagattcttgaagagatgaaagaaaaacttgggaccaaagaaaagacgctgggggttttaagcgtggaggaagtgaaaaggctggtttatctgcatggtgctatatgtgaagcattgaggctatttcctcctatacctttcgaga

SEQ ID NO: 2478 - DNA, 384 bp, Glycine max
  Clone ID: LIB3028-032-Q1-B1-C6
caattcacaaccgaaacagtttccatctctctcacaaaatgacaacaatatcaaattgctcccttctcttcctcttcctcttcctctccaccctccacatagcttccaccctctcaacccccaccaacttcatcaagtcctcctgcagcaccacccagtacccagccctctgcatccagtccctctccgtctacgcctccaccatccagcaagacccccacgagctcgtccagacagccctctccctctccctcaaccacaccgaggccaccaaaaccttcgtcgcaaaatgcaacaaattcagaggcctcaaaccgagagaatacgctgccttgaaggactgcgctgaagaaatcagtgacagcgtcgaccggctcagccggt

SEQ ID NO: 2479 - DNA, 383 bp, Glycine max
  Clone ID: LIB3028-032-Q1-B1-C7
atccccttcaaaatctggttttgtggaggcaaacagaggatgctgtggtaccgggactgtagagacaacatccttgttgtgtaatccaaaatcaccaggaacttgttctaatgccacacagtatgtgttttgggacagtgtccatccttcacaagctgctaaccaagttctagctgatgcattaattctacaaggcatatctcttgtcacataaagactcgtcattatttatgttgttagaaattattattgtgtacaagtacaactacacatcgtgaaagtgattcaaaagtttgctgtttttctttagtttggaaaaaaaaaactgtgctctatgtattttagatcttgagaaatttcagataaactcgtttgtaaaccat

SEQ ID NO: 2480 - DNA, 381 bp, Glycine max
  Clone ID: LIB3028-032-Q1-B1-C8
ggagaaatgagtttgttatacgcctgcaaccttcagaagctatgtacatgaagcttacagtcaagaaacctggactggagatggaaacagttcaaagtgaactagatttgtcttataggcaacgctatcaagcagtaaccattccagaggcttatgagcgtctgattcttgactcaattagaggtgatcaacaacattttgttcgcagagatgagttgaaggcatcatgggagatcttcaccccacttttgcaccgcattgataagggggagttcaagtcaaccccttaccaacctggaacaagaggtcctgtagaagcagataaattactgctggaaaaagctggttatgttcaaacacatggttatagatggatcccct

SEQ ID NO: 2481 - DNA, 368 bp, Glycine max
  Clone ID: LIB3028-032-Q1-B1-C9
tgcacattcttctttctatatattccaaatcccttttccgatttccaccaaaatctaaaccgaaattcccaattacccttcccaattttcaccaaaacctaatactcccacaccaatcttcgatcatggacgccgattcacaacctcaacaactcgaagagagaacagaggagcaagaactgaagtacctggaattcgtgcaattcgcgaccatacaggctctgatgcgctgcgccatcctctactcatacgccaaggagcgcgcgggtcctctgaagcccggtgtcgacaccgtggaggaggccgtgaagaccgtcgtggctccggtctacgataggttccaccttgtccccggcgaggtcctcaaa

SEQ ID NO: 2482 - DNA, 365 bp, Glycine max
  Clone ID: LIB3028-032-Q1-B1-D1
ctctctctctgcgatggagtttcgcgtttccgtcatttggagccttctcctcattgtctctttcttctctcctcaaatcaagggtgaggcttctggttccgtcttcttcgtcgatagctccagtaatcaattcattcgcgccagatcatccaactatgagcaaccttcactgttgctagaagaagctggtgctgttgtgtcagtcttgcttggttttgctcctccttccacccttccagctgccagctcatccaagttgaatgatgttctgattcctaacccattcaagaggcctcgtgctgtgtttttgctggaagtgaatggaatcaatggtcttgggaatattgtccaggataatccaatgt

SEQ ID NO: 2483 - DNA, 367 bp, Glycine max
  Clone ID: LIB3028-032-Q1-B1-D11
atcccagtagaaggccaaaggggcgagaaaccctactttttcccattcttatacgaaacttcagacatagatgagaacaatctctacccttttgtgcacctttccacagatggaaacctcttcatcttctctaacaatcgttcccttcttctgaaccccaccacccacaaaattgttcgcacctttcccgtcttacccggtggctcccgcaactaccctgcctctggcatgtctgcccttctccccatcaaccttaacgaccccgccaccgccaccaaggctgaggtcatggtttgtggcggcaaccttcccgatgccttccatattgccgagactaacaaaatcttcctcccagctcttcgagact

SEQ ID NO: 2484 - DNA, 380 bp, Glycine max
  Clone ID: LIB3028-032-Q1-B1-D2
tgtggttgttccaattttcctacctgattgtggggagtgtatcgattgcaaatcaagcaagagcaacctttgttcaaagtttccatttgaggtgtctccctggatgcctagatatgccacttctagattcacagatttaaaaggagagatcatacatcatttcttgtctgtttctagttttagcgagtacactgtggtcgacattgcccatctaatcaagattgatccggcaataccacccaacagggcatgcctcatcagctgtggtatatcagcagggataggtgctgcttggagagcagcaagtgtggagccagggtctacagtagctatttttgggctggggagtattggattagcagttgctgagggagctagac

SEQ ID NO: 2485 - DNA, 377 bp, Glycine max
  Clone ID: LIB3028-032-Q1-B1-D3
aacaatcacaacattcaagcgctgcatgaccaatctcctgacttcaggaactggttgagtgcaattatctcgtaccagcaatcatgcatggacggcttcaacaacgagaccaacggtgagcaggaaattaaggaacaactgcacacaggaagtttggaccaaatggggaagctcactggcatagtcctagacattgtcaccaacttatccaaaatccttcagagttttgacctcaagttggatttgaacccggcttctcgtcgtcttctcgagcttgatgctgaagggtaccctacgtggttctctgctgcagatcgcaggctacttgctaagatgaaccaaggaggtgcacccccacccaatgcaatggttgccct

SEQ ID NO: 2486 - DNA, 361 bp, Glycine max
  Clone ID: LIB3028-032-Q1-B1-D4
acgaatacctcttcatcttgttctatctgtgacgagcatcatggccacaagagcagtgttattgttggctatgtgtgtgcttccggcgatggttgtggccattcgcccagcaaagaaccctttttgcgtgaagggtcgtgtctactgtgacccttgccgtgctggttttgagacctcagctaccacctacattgctggtgctgagattatgttgcaatgcaagagcagggttagcaacgaggttgtgtacacgaagaacgggtacaccgactcaaccggagcatacacaatgtacgtggatgaggatcacgcagatcagatctgcagtgccaagcttgtaaacagccctcaccctcaatgc

SEQ ID NO: 2487 - DNA, 372 bp, Glycine max
  Clone ID: LIB3028-032-Q1-B1-D5
atggggtttgaggaaactgagttaaggcttggactgcctggaaacggaggcactgaagaagtgctcatcaggaagaggggtttctctgagactgaaactggtcatgaagatgagtctgccaccactgtggatttgatgcttaatctttcttctaaggaggccgcaaccactgctgctgctgctgcagatccaactgataagcacaagactttgcctaaggagaagacccttctgccagcagatcctgctaagcctccagccaagacgcaggtggtgggttggccacctgtgcggtccttccggaagaacatgttggctgtgcaaaagagcgttggagaagagagcgagaagaacagcagccctaatgcaagc

SEQ ID NO: 2488 - DNA, 385 bp, Glycine max
  Clone ID: LIB3028-032-Q1-B1-D6
agggatcccaccagaccagcaacgtctcatttttgctggcaagcagcttgaggatggacgtacacttgctgattacaacattcaaaaggagtccactctacacttggtgctccgtctccgtggtggaatgcaaatctttgttaagaccttgaccggaaagacaatcacccttgaggtcgagagctctgacaccattgacaatgttaaggctaagattcaggacaaagagggtatcccaccagaccaacaaaggcttatctttgcaggaaagcagctagaagatggcagaaccttggctgattacaatatccagaaggaatctaccctccacttggtgctccgtcttcgtggtgggatgcaaatctttgtcaagaccttgactggg

SEQ ID NO: 2489 - DNA, 385 bp, Glycine max
  Clone ID: LIB3028-032-Q1-B1-D7
tctagaaccaccataacatcattctgcccttccctcgcgtttcaacaccgataacccgcaaaaatctccattgatctgcgcctcctgttccatggcaaagctgcctgtggaatacaacggcgactgcgccaccaccgcctcagcatccgcctccgcagccgcggagtctcagagatccattcccacgccgtttctcaccaaaacctttcaactcgtcgacgaccaatccatcgacgatgttatttcctggaacgacgacggatcaacgtttatcgtctggaaccctaccgtcttcgccagagacttgcttcctaaatatttcaaacacaacaatttctctagcttcgttcgccagctcaacacttacggattcagaaaaattgta

SEQ ID NO: 2490 - DNA, 361 bp, Glycine max
  Clone ID: LIB3028-032-Q1-B1-D9
ctcaaatcatggatttcttgcaagcacaagaaaatcagatacttgtgggtgtggccgtggccgttgtagccattgggcttggtgcagtatatctctattcatccaagaagaccaaaggttgcttggacccagagaactttaaggcattcaaacttgttaagcgtgcacagctgagccataatgttgcaaagttcacatttgcactcccaacacctacatctgttttgggtcttccaattgggcaacacataagttgcaggggtaaagatgctcaaggtgaagaggttatcaaaccatatactcctactactttggattccgatgttggacattttgaactagttattaagatgtacccaca

SEQ ID NO: 2491 - DNA, 380 bp, Glycine max
  Clone ID: LIB3028-032-Q1-B1-E1
gcttattgcagattaattctatgttgcaatagttcttctagagttacagaagcaatccgctctcgatgtctcaatgtgcgaataaatgcaccaagtgaagaacagattgttgaagttttagaattcattggtaagaaggaaaggctgcaacttcctcctggttttgctgctcgcattgtggagaaatcaaatcgaaatttaaggagggccatattgtcatttgagacttgtcgtgtccaacagtatcctttcactaacaaacagacaattcctccaatggactgggaagagtatatttctgaaattgcatctgacataatgaaggaacagagcccaaaaaggttgtttcaagttcgaggaaagctctatgagctgctaat

SEQ ID NO: 2492 - DNA, 388 bp, Glycine max
  Clone ID: LIB3028-032-Q1-B1-E11
cagaaacaaaagtgcaagaattaggtggcatcaccgatgtgcatggagctgccaacagcgtcgagatcaacaatctcgctcgctttgctgtagaggaacaaaacaaaagagagaattcagttctggagtttgtgagggtgattagtgcaaagcagcaagtggttgctggagtgaattactacataacattggaagcaaaagatggtttgattaaaaatgagtatgaagcgaaggtttgggtgagggaatggttgaactccaaagagttgctagaattcaagccagtcaatgtttctagcacaccaataggtggcattaccgatgtgactgcgaatagcctcgagatcgacattctcgctcgttttgcggttgatcaacacaacaaaaa

SEQ ID NO: 2493 - DNA, 338 bp, Glycine max
  Clone ID: LIB3028-032-Q1-B1-E12
ttggtactcttggttgcgtgtatgcacctcagatcagcaaggccctagctggagctgacaggaaggagttaatgagaaaattgccaaagtttatatatgatgaagaaaaggctttagagaaaacccggaaagtactggctgagaagattgaacaactgaatgctgccatagatgatgtttctgctcagctaaggtcagaggaggcctcaaatggagtagctgtgaactctgatgaaattgaagctgccacatgagactgctgcagtgatgtcatggtacacaatcggctattactctgtccagtaaaaatcttgttggtacaaaatgtatttgaattt

SEQ ID NO: 2494 - DNA, 387 bp, Glycine max
  Clone ID: LIB3028-032-Q1-B1-E2
acgccccgcttggttcattgccgctgctaacctttttgcctttgtccacgttgatggaggctaccacgtgtttgccatgccagtgtttgatatgatcgaaacctgcatggttacaaaattaaattttccaccttctactgcactccgagtaacaactcgcactatttatgttgcggtgacaatgttaattggcatatgtgttccgttctttggctctcttcttggatttcttggaggctttgcgtttgccccgacatcatattttttgccctgtatcatatggcttaagcttaaaaagcccaagaaatttggcttgtcttggacaattaactggatctgcattattcttggggtagtgttgatgatattatctccaattggtgctct

SEQ ID NO: 2495 - DNA, 386 bp, Glycine max
  unsure (1)..(386): unsure at all n locations
  Clone ID: LIB3028-032-Q1-B1-E3
gcatctctctgctcttctctgttctgttctgttctgttctgtttctctctcctcnccatatattcctcttcttcttcagaactcagaactcagaagggccacttcacttttagaaacccagttttgcatctgggtttttgcctgttgaagtgccaattttgaagataataataaaaacaattatgacttggaaaagcagaggagaattgccttctagaagcgtcatctcgcagagatgggtactgtttctctgcttaggaagtttctgtgctggaatgctcttcactaccaggatatggaccatacctgaaaacaacaaaggactagcacgaccaacagcctcagaagctgaaaaattgagtttagtttctgaacgttgcaattcg

SEQ ID NO: 2496 - DNA, 366 bp, Glycine max
  Clone ID: LIB3028-032-Q1-B1-E4
gtgagttcacgaacacaaatgttgtccttaacactacctattcctctgctgaaaaccctaactcctccttctccaaacattaacaacccctctctctctccctattctcattatcaacctcgttcccgttccctaacacggggacttatagtccccaaacacagctccgccactgctcctccgagcgcgacgcttcgggacgacggaacctcactcgctggagattcaccggagccgcttccggaggagttagtggcggagctgatgccaaagcacgtggcggtgattatcgacggacatggtaggtgggccaagttgagagggctgccggcgtccgcggggcaccaagcgggtgtgcagccactg

SEQ ID NO: 2497 - DNA, 377 bp, Glycine max
  Clone ID: LIB3028-032-Q1-B1-E5
tttgatttggaacaaacaacaatagaggggttgtggtgctctgtgtgctgcaatttccttttgagcttgtgtttgattcatcaaatcatcaaagatgactgtaggggcaggaatatctgttgcagatgggaacttgatggtgttggggaacaaagtgctgagccatgtccatgacaaggttcttgttacccctgcatgtggtggtgctttgctcaatggggcattcattggggttcaatcccatcacaagggtagccgcacagtcttcccaattggcaagcttcaggggttgcgatttatgtgtgttttccggttcaagatgtggtggatgacgcagagaatgggcacttgtggacaagatatccccattgagacgc

SEQ ID NO: 2498 - DNA, 369 bp, Glycine max
  Clone ID: LIB3028-032-Q1-B1-E6
cttcttccaaaatgggtatctctcgtgattccatgcacaagaggcgcgccaccggcggcaagaagaaagcttggaggaagaagagaaagtatgagcttgggaggcagccagcaaacacaaagctatcaagcaacaagacggttaggaggattagggttcgcggtgggaacgtgaagtggcgcgctttgaggcttgatactgggaactactcttgggggagtgaggctgcaacccgcaagacaaggattcttgatgtggtgtacaatgcatccaacaatgagcttgttcggactcagacattggtcaagagtgccattgttcaagtcgatgcagcacccttcaagcagtggtatctgcagcattatggcg

SEQ ID NO: 2499 - DNA, 384 bp, Glycine max
  Clone ID: LIB3028-032-Q1-B1-E7
agaaatttaagtgaggagctagagaatgatgatgaagtctgctatgtgtgcagtggtggttgtagcacttcttcttctggcggaggtggggcccatggctgaggctgtgacatgcaccccaacagagttgagtccgtgtcttccagcaatcacttccggtgctaaaccttccaatgcttgttgcacgaagctgaagcagcaaaaaccatgcttatgtggctacctcaaaaacgctagcttgaagcagtatgttaactctcctaatgcccgaaaaaccgttgcttcttgtgggattccctttccaacttgttaattaattaagccttcttataattaaagtgtgggatatatatatatatatagataaacagtttaatttataca

SEQ ID NO: 2500 - DNA, 380 bp, Glycine max
  Clone ID: LIB3028-032-Q1-B1-E8
atcaaaatgaatctgtaccactcctccaccaccaccaccaccaccaccatcttcaccgtcatattcctcctccttgcaatattattcactctcacaccccacaaggccaacggtgccacgtgtcaccctgaggaagaagcgggcctgttgggcttcaaatccggtatccgatccgacccgtccggcctgctcagtaactggatatcgggtacggactgctgcacatggaccggagtagaatgccactataacagcacccgggtccaaagattattcttaacgggtcaaaaacccgaaaccatcttatcgggtaccatctcaaccaccctctcaaaactcaaactcctcgatggactccacctcataaacctcatcaacat

SEQ ID NO: 2501 - DNA, 381 bp, Glycine max
  Clone ID: LIB3028-032-Q1-B1-E9
gagaagaggagtgagagaagatggggttgtcgttcacgaagctgttcagcaggttgtttgcgaagaaggaaatgaggattctgatggtaggtctcgatgctgctggtaagacaaccatcttgtacaagctcaagcttggagaaatcgtcaccaccatccccaccatcggatttaatgttgagactgtggagtacaagaacatcagcttcactgtgtgggatgttggtggtcaggacaagatccgtcctctgtggaggcattatttccagaacactcagggtctcatttttgtggttgatagcaatgatagggatcgagtggttgaggcaagggatgagttgcacaggatgttgaatgaggatgaacttaaagatgctgttt

SEQ ID NO: 2502 - DNA, 386 bp, Glycine max
  Clone ID: LIB3028-032-Q1-B1-F1
aatttcctagatctcccaaacaaattgtagcataagtcccatggccaaagagactagtgttgtttatctatatcccagcaaatcacaagtttggggtgagaattttgatcataaaaaacttgtaataacaacactagctgctaatggaaagaaggaggagagtaatggagcacctaatgacacatatcctgcgtttcccgggtggtatgctgatgtttcctggccaggagaagcacacacatataaaatagaaaagattctattccacgggaaatcagaattccaagagcttcttgtatttgagtcttctagacaaggcaaggttgcaattcttgatgggcatatccagctgacagaaaacgatgaatttgctttacaagagatgc

SEQ ID NO: 2503 - DNA, 367 bp, Glycine max
  Clone ID: LIB3028-032-Q1-B1-F10
gtgcaacaacaaacgcaccagatggataggtatcagagggtagagaagcccaaggcagagactcctataaacgagaatgagatacgcgtcactactcaaggaaggatgaggaattacatcacctacgccaccactctcctccaggagaaaggatctagtgaaattgttctcaaagcaatgggacgtgcaataaataagaccgtaatgattgctgaactgatcaagagaaggattgttggtctgcatcaaaacacccaaattggatcaactgatataactgacacatgggaaccactagaagaaggccttcttcctttggagactactcgccatgtttcaatgatcacaattaccttgtcaaagaaag

SEQ ID NO: 2504 - DNA, 355 bp, Glycine max
  Clone ID: LIB3028-032-Q1-B1-F11
ggctgggattggttcttccaataataaccatgcctcctcttttccgaatttttcagatacccacatcacttatggacatcatcactgacctcgccatgttcattactccgctttggattgcggttatcgtcggcgtcgtcgtgggctgggcctggaagcccaaatgggcctttcaccccaaagacgctcttctcaagtttcgctcccctcgcccttccaatccccaaaacgacaccgctttcaccttctccaccaccagttcctccgcgcgtgaaaaagacgcgagtgcgagtgcgagtcatttagtgacggaatacgatttgctgcatctgtggaagttggttgaggaaaaaga

SEQ ID NO: 2505 - DNA, 369 bp, Glycine max
  Clone ID: LIB3028-032-Q1-B1-F12
cggctcgagcgaggaagctccaaaccagacaaccacaccaccacctcctcaagagtcagtggcgcaagtggaggaagtggtagtaaccgatgttccacagccaccagaaaaaacaacaaccactgttccagttgaagaaaccgtcactctcgagactcacctctccaaacccaataatgctgacgacaacgacaacatcatccctgaattcaaggaagaaagcaccaaactctctgaactcccagaaaacgaaaacaaggcactccaagacctcaagaagctcgttcaagacgctctcaacaaccaccacttctcttccaaagaagataataagaacccaccaccacaaactgctgctcacaaggaaaa

SEQ ID NO: 2506 - DNA, 388 bp, Glycine max
  Clone ID: LIB3028-032-Q1-B1-F2
ggacacctgcagctagctgatcaagataagatcatttctgcaattaaagaagcaggaaatgttaagaagttctatccatctgagtttggaaatgatgtggaccggactcatgcagttgaaccagccaagtctgcatttgcaacaaaggccaaagttcgccgagctattgaggctgaaggaattcccttcacttatgtgtcaagcaacttctttgctggttacttcctgcccaacttgtcacagcctggagccacagctgcccccagagacagagttattatcctaggagatggaaaccccaaagctgtttttaacaaggaagaggatattggaacttatacaatcaattctgtggatgatccaagaaccttgaacaaaattctctaca

SEQ ID NO: 2507 - DNA, 356 bp, Glycine max
  Clone ID: LIB3028-032-Q1-B1-F4
tgcatattgatgatctccggaaattcgctatgctatggctgcataaaactgaggaggtccgagctgatagagctcattatgcaagaaatataacaggagacatatatgaatctgggtggattagtgagatgtatggttactcatttggtgcagctgagttgaaattaaggcataccataaacaatgagatactgatatacccgggttatgttcctgtaccgagtgtcaactatagagtctttcattacggattgcgattcagtgttggcaattggagctttgacaaagcagactggcgcaacgttgacatggtcaacaaatgctgggccaagttcccagacccaacagattcctca

SEQ ID NO: 2508 - DNA, 382 bp, Glycine max
  Clone ID: LIB3028-032-Q1-B1-F5
tttctttcttcttctacatccactgcacaattgccacatgaatcattagttagggtttattctccaagaaaagcaatgagtgcgtccaggttcatcaagtgtgtcactgtgggtgacggtgccgttggcaagacttgcatgctcatctcctacaccagcaacacttttcctacggactacgtgccaactgtctttgacaatttcagtgcaaatgtagttgtggatggaagcactgtgaatcttgggttgtgggatactgctggccaagaagattacaatagattaagacccttaagctatcgtggagcagatgtattcctgcttgctttctctctcataagcaaggctagctatgaaaatgtttccaagaaatggattcctg

SEQ ID NO: 2509 - DNA, 384 bp, Glycine max
  Clone ID: LIB3028-032-Q1-B1-F6
gtcacagtgcttgaccttgcagcttctggagccaacatgaagaaaattgaagatgttgacactttttcacagtatactgagcctttgttgtttctattggacacaattccctcaaatgaaaaggtagttctagttggtcacagctttggagggctgaacatagcacttgccatggagaaatttccagaaaaggtagcagttggtgtttttctaacagcttttgctccagacgttgaacaccacccatcttatgtcttggaaaagtacagcgagaggaccccgttagctgcatggttagacactgaatttgctccaagtggaaacaaaacaacaatgttctttggccccaacttcttgtccgacaagctctaccaactatcccca

SEQ ID NO: 2510 - DNA, 366 bp, Glycine max
  Clone ID: LIB3028-032-Q1-B1-F7
gtctctgcctctctgcaatccacagccgaaaatgcctttcaagaggtacgttgagatcgggagggttgctcaaatcaactacggcaaggaatatggcaggctcgtcgtcatcgtcgacgtcattgaccagaacagagcacttgtcgatgcccctgatatggtgaggtcccaagtcaatttcaaaaggctttcccttaccgacatcaagattgacatcaagagggtccctaagaagaaagatcttgtcaaagccatggaggatgctgatgttaagaacaagtgggagaagagttcatggggtagaaaactcattgttagaaagagaagggcatccctcaatgattttgataggttcaagataatgtt

SEQ ID NO: 2511 - DNA, 377 bp, Glycine max
  Clone ID: LIB3028-032-Q1-B1-F8
atggcttcttctcttcctcttctcaaccttcttaccctcgctctgtcactactcttctgcattgccttaacttccgaggttggcgtgcaggcgcagatggaggagacaggcttgaacctcatgtcggaggcgttggagtggccaaccgcaatgtcgctctacgacgaagacagcgaagaagaggatgtccagaacggttacagtcggagatcgttgttctggcggaggatgaagtactacatctcctacggcgctctttccgcgaaccgaatcccgtgcccacctcgttctggtagatcttactacacccacaactgctacagggcccgaggccccgttcacccttactccagaggctgctctgtcatcacgcgctg

SEQ ID NO: 2512 - DNA, 355 bp, Glycine max
  Clone ID: LIB3028-032-Q1-B1-F9
gtgcggtctctcaccgcacgcactagcactgtctctcactgaaacttgttcgcacattttcacggatctaactaagttatcgccatgaatcgccaccacgatcccaatcccttcgaagaagaagaagtcaatcctttttcgaatggcactactgctcctgcatcaaagtcacgtattccaccattagcatctgagtcactgggctttggtcaaaggcatgatgctacagttgatattcctttggatactacaaatggctcccaggaaaaaagtcaaagagctagcagcttgggaagcagatttaaaacggagagagaaggaaataaaaagaagagaagaggctgtttctagagct

SEQ ID NO: 2513 - DNA, 372 bp, Glycine max
  Clone ID: LIB3028-032-Q1-B1-G1
ggcttccctccctcctttgaagaaacaaattagaagagtgtgttgtgttgtgttgaagtagcaagctagcaaagatgtttggcatcttaggaggcaataaggggcacaagatcaagggtactgtggtgttgatgagcaagaatgtgttggacttcaacgaaatagtgtccactactcagggtggtttggttggtgctgccaccggcatcttcggtgctgccaccggtattgttggtggagttgtcgatggtgctactgccatcttcagtcgcaacattgccatccagttgatcagtgccaccaagactgatggacttggaaatgggaaagttggaaagcaaacctatttggggaaacatcttccttcgttac

SEQ ID NO: 2514 - DNA, 369 bp, Glycine max
  Clone ID: LIB3028-032-Q1-B1-G10
gactcatataatgagtttttgaaaatcaaatgggttttgcacaggtctaaactcacaacttattggaaggatgttacagaatcctggtttttctattcacacgccaatttttcctgagaattgccatcttgcacaattggccaatctcactgttcctttacaaatggaggttgttttggtccggaggggaaaattgcttcaggacctaaaatggcattcctaacactaattaaaaaaatggttttattatccaggcctaacatgctgatcacagctagctttataacccaatcaagtcatctgtgttggttacggcatatgttgacttcttgatgaagtaggttgctatttatttcatgagtttatatc

SEQ ID NO: 2515 - DNA, 355 bp, Glycine max
  Clone ID: LIB3028-032-Q1-B1-G11
cgctctctcactcacaaacacacactgaactaaaaaacatcaaaagagacatggctgagcaaaccttcatcatgatcaagcctgatggcgtccaaagaggccttattggcgagatcattagcagatttgagaagaaaggtttctacttgaaaggtttgaaacttgttactgtggaccgtccttttgctgagaagcactatgctgatttgtctgccaagcctttctttagtggtttggtggattacattatctctggccctgttgttgccatgatctgggagggcaagaatgttgttacaactggccgaaagattatcggagccacaaacccagctcaatctgagcctggaactat

SEQ ID NO: 2516 - DNA, 357 bp, Glycine max
  Clone ID: LIB3028-032-Q1-B1-G12
attttcaagggatcaatacaatataatggttcaaacatgctaacggtgtatgctcccagagcagttctaaagtgccatttacaccaggattcagcttcttctcaacaaccatattcatatccatgcaagatcaataataatgttcatttggtgaattgtaatcctaaaccttttggcactccttgtactaatatatcgtttcatagttcctccttctctgggaaatgtgataagctacaaaagagccttcatctattccatcatgttgccacacataaatggctgtgtggattacaggattccatttcatctgatgatgagtatcgttcttcacgcaacatagccatcagcttgttc

SEQ ID NO: 2517 - DNA, 391 bp, Glycine max
  Clone ID: LIB3028-032-Q1-B1-G2
gttgaaatcgatgaactccctaagcaaattgatgatacacagtacccaaaaacattcttctataaagaagaccttcatccaggcaaaacaatgaaagtacaattcaccaagcgtccctatgcacaaccttatggtgtatatacatggttaacggatattaaagacacctctaaagaaggatatagttttgaagagatatgcatcaagaaagaagcgtttgagggagaagagaagttttgtgcaaaatccttgggaacagtaattggttttgccatttcaaagctgggaaagaacattcaagtactttcaagttcctttgtcaataagcaagagcaatacactgtggaaggagtgcagaatcttggagacaaagcagtgatgtgtcatgggc

SEQ ID NO: 2518 - DNA, 376 bp, Glycine max
  Clone ID: LIB3028-032-Q1-B1-G3
gtgattgtctttgtatcacgaaaactatacgattcgattccttgttttcaatggacaccttcttcaattctcaatcttcttcttcttcgagaagccgctggagttacgatactctcaagaatttccgtgagatctctccgctggttcagaatcacatcaaacgggtttattttacgttatgttgcgctgtggtggctgctgctgttggagcttttcttcatgttctgtggaacattgggggttttctcaccacgttggcttccattggaagcatggtttggttgctatctacaccccctgttgaagagcaaaagaggttgtctctgttgatggcttcggccttgtttcagggcgcttccattggacctctgattga

SEQ ID NO: 2519 - DNA, 386 bp, Glycine max
  Clone ID: LIB3028-032-Q1-B1-G4
gatgaacagcttcttgctctggatagcctgctcaacagtgagcccacccaagttaggttcatcttagatcaccatgactatctcattccatatttgaggaaaataaatgcaactaccacaaagacttatgctaccagaaccatatttttcttgaaaagtgatggaactttgacgccattggccattgagttaagtaagccgcatcctcaaggtgaagaatatggtcctgttagcgaagtctacgtgccttcgagcgaaggagttgaagcttatatttggttattggcaaaggcttatgttgttgtaaatgactcgtgctaccatcaactcgttagccattggctaaacactcatgcggttgttgagccattcgtcataacaacaaa

SEQ ID NO: 2520 - DNA, 379 bp, Glycine max
  Clone ID: LIB3028-032-Q1-B1-G6
gtcaagacatgcttctgatgagatctaccttgggaagagggacagtgacgattggactgatgaccaaaaggcaattcaagcctttgaaaagtttggaaccaagctgaaggaaattgaggccaaaatcaattcgaggaacaaagattcaagccttagaaaccgtaatggaccggttcagatgccttatactgtgcttcttcctaccagtgaggaaggccttactttcagaggaattcccaacagcatctctatctaaggccagagtgcgtttatgtgtggttctctttccaaacctacgttacctttctcgttgacgagtaaatatgcaagcttatgcatgcatataataattgtcttatgcattcttaagtgttgtatg

SEQ ID NO: 2521 - DNA, 383 bp, Glycine max
  Clone ID: LIB3028-032-Q1-B1-G7
tggggacactgcgagttcaggtccatgcaaactgtcgcctgagaaggatttacttctctgaccgcctctactctgaagaggaagtccctccagagttcaaattgtaccttccaatgcagattagactttagagatgccctcatttggatgactagttctttttatgtttatcttttattgtaaagtgtatgttatgagtctctctctgtttttttttttttggtaaaatctcaccttgtgcttgtcatcatgcagaaatcatgaaaaaatgggagtttggagttgtagcctggagaaattgatgtgattttatatgcttactacatatagttctactagttgactttattctaaactttgtatctatgttgtgctagattaaa

SEQ ID NO: 2522 - DNA, 383 bp, Glycine max
  Clone ID: LIB3028-032-Q1-B1-G8
gaaaccggtgccgaggaagcttgctgccgaaaaggtggatttggaggaggagaagattgagagccagctggagaccatcaatgctttccacataatttccttgtcggaggggttcaatttgtcgcccttgttcgaggacaagaggagggaggagatgaggttcgccaccgcggggacgcccagcaccgtcatttcgcggctggaggaggtggccaaggccgggaagttcgacgtcaggagtagcgagaccaaggtgaggcttcagggtcaggagcgtgggaggaaggggaagctggcgattgccgcggatatctacgccgtgacgccgtcgtttatggtggtggaggtcaagaaggacaatggggataccttggagtataacc

SEQ ID NO: 2523 - DNA, 212 bp, Glycine max
  Clone ID: LIB3028-032-Q1-B1-G9
tgacaacccgatttatgaagaaccgcaagaagcgcggtcacgtcagcgccggccacggtcgtattggtaagcaccgcaagcaccccggctgccggggaaatgcccggcgcattgcacacaacaggattctcctccgacaattccaacccggggtcctccggaaaggaaggaataagtaccttcaaaagctccgccacaaattccaatccccc

SEQ ID NO: 2524 - DNA, 358 bp, Glycine max
  Clone ID: LIB3028-032-Q1-B1-H10
caagcccctcaacagcctccttattacattccacccacccctatgccgaattcagccttgccccagcacccccagaatcagtacttaccatccgatcaacaatatcgaacaccccaacttgtggctccacaaccaacaccgtctcaagtaaccccatccccacctgtgcaacaattttctcactatcagcagccacaacaacagcagcagccgccgcagcagcagcaacagcaatggtcacagcaggtgcagccttcacagccacccccaatgcaatctcaagtaagaccctcctctccaaatgtgtaccctccgtaccagccaaatcaagcaacaaacccatcacctgcagaaacac

SEQ ID NO: 2525 - DNA, 353 bp, Glycine max
  unsure (1)..(353): unsure at all n locations
  Clone ID: LIB3028-032-Q1-B1-H12
acgtcagaccaagcttacatgaactctgcattaggtccgagatcggttcaagtgcttcgcctttgccacaccgtgtgtattgttgttggtcaaccttaggtgctcgacttgctccagctgaaacaagcaatgcaattgtaggagcaggtgcagaagcgccatccattgttttcttccctttttcattcttactctttttttttttgcctttttcttcctttggtccttcccatctcatcccccccccccacaccaattcatatgcatatttttctcatgtctccttacatactgttcaatcantttcagttttaaaggatttgaattaatgaatccaatatgatttttccttt

SEQ ID NO: 2526 - DNA, 286 bp, Glycine max
  Clone ID: LIB3028-032-Q1-B1-H2
atcaacatcaacatcatgggtgtcactcctctcctttcgtatctctactatccgaaggcttgtcttctcaaatcaaacaacagcgtgacgaaatagaccaattccttcaagcccaggaggagcaattgcggcgggcattagcggagaagagacagagacattatcggacgctgctaagggcagcggaggaatcggtgttgcggaggctgagggagaaggaagcggagttggagaaagccacgcgccataacgcggagttggaggcacgcgcgacgcaacttaacgt

SEQ ID NO: 2527 - DNA, 379 bp, Glycine max
  Clone ID: LIB3028-032-Q1-B1-H3
aagcgaccatggcggatggaagcaacgggggagttctaatgctggaagccccaccgtcttacggtaggcctaccggttctaacgcggaaataatcgacgcattgccttacattgatgacgactacgcagaccccagagtcaaacttgaggttgaccgtctcgtggaggatgagatgcgtcgcagcaccaagaagcccaccgatttcctcaaagatttccctcctcttcccaactccaatttccagaactacccaatgattgcgagagagtacgaacgtgtgagagccggaagacctcccgttgctcttgatagatcgcgctacgaatttggaatgccgccggcgaataaaaggaacgacgaaactgcttggaagcaagc

SEQ ID NO: 2528 - DNA, 405 bp, Glycine max
  Clone ID: LIB3028-032-Q1-B1-H4
tccgtaatctgctcgagctcatgatcaagaagtgtttagctttcacagtgatcattcaccttgccatggttttgaggaagttttggcttgctatcaaaaagttgttccaaatttgagactgtctggaccaacatcttatgctcctgtgattgaggctgcaatagacatagttgagaaaagtcatggccaattccatgtgttagttattgttgcagatggccaggttacaacaagtgctgcatctgaacatggagaactcagtccacaagaagcaaggacaatcaaagcaatagttgatgcaagttcatatcccctttctattattctggttggagttggtgatggaccctgggaagacatgaagaagtttgatgacaagatacccgctcgcgactttgacaattt

SEQ ID NO: 2529 - DNA, 358 bp, Glycine max
  Clone ID: LIB3028-032-Q1-B1-H6
aacctttctcattccccatctcctcaccttattcagccactgctaatttctagggttccgaaatggacgctggcggaaagatcaagaagggcgccggaggaagaaagggcggcggccctaagaagaagccggtttcaaggtccgtcaaggccggtctccaattccccgtcggaagaattggccgttatttgaagaaaggaaggtacgcccagcgtgtcggtaccggtgctcccgtttacttggccgcagttctcgagtacctagctgctgaggtgcttgagttggctgggaatgctgcacgtgacaacaagaagaacaggattattccgagacatgtgctattggctgtgaggaacga

SEQ ID NO: 2530 - DNA, 385 bp, Glycine max
  Clone ID: LIB3028-032-Q1-B1-H7
tctctctagagtaattgcggaatcagctagaattttctaataatggccaaagacgttgagcaggttacagagcaaggtgaatactccgcgaaggattaccatgacccacctccggcgccgttgatcgacccagatgagctcactaagtggtccttgtacagagccgccatagctgagttcatagcaacactccttttcctttacatcaccgtgttgaccattattggctacaagagacagagtgacaccaaaatccccggtaacaccgagtgcgacggcgttggcattttgggcatcgcttgggccttcggtggcatgatcttcatccttgtttactgcaccgccggcatctctgggggacacatcaaccctgcggtgacattcg

SEQ ID NO: 2531 - DNA, 380 bp, Glycine max
  Clone ID: LIB3028-032-Q1-B1-H8
ctttttgctataggaggagtcttcaatcttcatctacatcagttctagctataccgttccttctgctactactcaactgcaaaggatggtgctgcccaagttctctctgtgcttctggcttctcctttcttcacttgtgattctcttaataaattgtccagttaaatgtgacgatgatgaggaagacaatctctatcaaggtatcaacaagtatcgagcatcgttaaacttgaaagctctaacaaggaatgataatgcaaattgccttgccgaaaaactagctaaccaattcaagaaacaaccctgcacaaataccacaggtgctaacactgtacctggcacagaacctcagttttccaactatccagaccttttatcca

SEQ ID NO: 2532 - DNA, 379 bp, Glycine max
  Clone ID: LIB3028-033-Q1-B1-A10
gttttctcgaattctcgtcctctcactcgactctgatacacattagaaatgtataggaaattacggctggtgattcacaagcttcatctctttggatcgatgctcatctctatggcctcgcggtatctaaagagatttagggtgcatgtaatactgattcatgcaaagattcatcggctgaatcacattcaggcaatcaatgagcagaagtttctcgtttccaaattgtggactatcttgttaggaaatacgatggtggtaaagactcagtgttgcgagttagcacaggtatctatgtgaattgcagcatcgcaaactgcaaataggagtacaatgacgataccagacatgatcatcttgagcatccaaggccattcta

SEQ ID NO: 2533 - DNA, 383 bp, Glycine max
  Clone ID: LIB3028-033-Q1-B1-A11
ccgaatattacccttggacgtgggcagtgtctctttcagtttcttggtgaagttattaagggtagctattcagttggaacgtgaagagttggagagatctgaactgattaggagaataggtatgtgccttgaggaggctaaggtgtctgatttattaatttgcgccccagttggtgacacagtttttgatgttgacattgtgcaaaggctagtagaagagtttgtagcatgtgatcaacatgttcagacggatactctgttggaagatgactttcaggaggagatcagaagccccgggatggtttcagaatcttcaaaggcaaaagtggcaaaattggtggatggataccttgctgagattgcacgtgatccaaatttacctt

SEQ ID NO: 2534 - DNA, 189 bp, Glycine max
  Clone ID: LIB3028-033-Q1-B1-A3
atcacgaggaggagatttgcatagttgttgctgactcacccactgagggtcagtgggagggggggagtgggaggcaggtccgataggatcgtccgcgcgagaaacgtgggtgtggcctccatggcacgctatgtgaggcggcttgtgtgtgaggacacgaggcggagggatgcaacacaatgcaatctt

SEQ ID NO: 2535 - DNA, 129 bp, Glycine max
  Clone ID: LIB3028-033-Q1-B1-A4
agttgctccagtggccggcactaagcagcatggcggacaaggcagtcaccagcgggggcggggagtgtgggaggggcaggcttctgtccagggagcgcttcgtcggggagggccttcagccagggaggg

SEQ ID NO: 2536 - DNA, 178 bp, Glycine max
  Clone ID: LIB3028-033-Q1-B1-A5
ggggatttgaaggataagccagggtggcaaaagatgcaaactcggggagaggtggggtgaggcttcggctagcctcatagtggagtgcgtcagctcttcaggctgggggttaactttggacagtatccagagggaggtgtaagcgtgaagagggcggctattagcaggagattcatgc

SEQ ID NO: 2537 - DNA, 159 bp, Glycine max
  unsure (1)..(159): unsure at all n locations
  Clone ID: LIB3028-033-Q1-B1-A6
agcgaatgagagcatcagacttttcttcttcgatttccattgcggggcggggggtgggggtcggctttctcgtcagtttcggcgcggttggatgttcgtggggggactgctccgaatagcagcggggccactcggggggngggaggatcggaggcttac

SEQ ID NO: 2538 - DNA, 177 bp, Glycine max
  Clone ID: LIB3028-033-Q1-B1-A7
gagcacttgactgcaataagtgagcgtgactgagttcttgagagggggggggggggggagaggtttgtgagggtagacgtgaggggagggtgcgtgtgtcgggggggagcgaattgatttccttgggtggggttgatgggggggttagggagggagggatgttgaagatggtatttg

SEQ ID NO: 2539 - DNA, 160 bp, Glycine max
  Clone ID: LIB3028-033-Q1-B1-A8
attctcccttcataatagagccactgatcgcttctctttcgggggcgcggggggagtggggaggctagaaccgtcgtttaggggcggttcgagcgctgtcgggggcgatgagtgctagacaaggggtggtaaggggggggtcggggaaggggacattaat

SEQ ID NO: 2540 - DNA, 385 bp, Glycine max
  Clone ID: LIB3028-033-Q1-B1-A9
aaagcagagcagagagggaggtggaaaaagaaaaaggaagaaggaatgagtgcaacagtgactctaactctaaacctatgccgttcttccatcgtcgcttcttgtccacattatagccacaaaccaaaccctaatttcaatgccttttttagcttctctttgtctctgtctctgtctcaccacagacgcatcgttatctacaagaaaccattcccctctagacggacgtggctttatggatatatgaatagagatcgagattatgaattggagaatgggttagccttattcggttctgatgaagaactagcaacacaaattccaactcaggcccagtcacttgttgaaggatcaggctccattcgcatagcggagttcaagcctg

SEQ ID NO: 2541 - DNA, 57 bp, Glycine max
  Clone ID: LIB3028-033-Q1-B1-B1
ctcgagccgaatcggctcgagggaagatttgttcaattaatgcaaccggaagttaag

SEQ ID NO: 2542 - DNA, 369 bp, Glycine max
  unsure (1)..(369): unsure at all n locations
  Clone ID: LIB3028-033-Q1-B1-B11
caacactgagcttaaccgagcttcgcaaagatgaatcgggaaaagttaatgaagatggccggttcggttagaactggaggaaagggtactgtgagaagaaagaagaaggctgtccacaagacaacaaccacagatgacaaaaggcttcagagcaccctgaagagaataggggtgaatgccatccctgctattgaagaggtcaatatctttaaggatgacgtagttatccagtttctaaatcccaaagttcaagcatccattgctgctaatacttgggttgtcagtggttcaccgcaaacaaagaagttgcaggatatactccctagcattatccaccaattangaccagataacttggaaaacctgaag

SEQ ID NO: 2543 - DNA, 180 bp, Glycine max
  unsure (1)..(180): unsure at all n locations
  Clone ID: LIB3028-033-Q1-B1-B3
aaaaggaaaaaatatatataaatgttattacgatatgtcagtagggtaaagttaggaaaggtggggaggaggatgatatatagcatgtcaggtgtgtgtgtagtgttcctggaggagctagctaggcacaaagggaagtacatgggagtgcaggggtgatggaaancatcattgtaatat

SEQ ID NO: 2544 - DNA, 55 bp, Glycine max
  Clone ID: LIB3028-033-Q1-B1-B5
gagtgctcagctcacatggtatgggttggggaacgtacccgccaagttggggggg

SEQ ID NO: 2545 - DNA, 366 bp, Glycine max
  Clone ID: LIB3028-033-Q1-B1-B9
aatttttgctgtatggaatatagatgttcaaattagggttttaaagattgaacaccagtttcttaaagattggcccttgtttccgtgtcttttttaaacagatgaaatcaacattctacttaaattgtgcaaatcatgatggatacaaattagcataggtgctgttgcactaagtgtttttcattccaaattcttaaatttgactgtaggaatgaagcacaagataaattatacataaaaaccgctatattttgttggattgtggacacctgtcttttgaatggtgtattgtcaataaattttccaattttatttgagctatcttttgcagttattcgtggttggttggtcagaagatgctcaaga

SEQ ID NO: 2546 - DNA, 53 bp, Glycine max
  Clone ID: LIB3028-033-Q1-B1-C1
cttgctcatcaagtccaagaaccaacctagcgtttgcaatctcaattcaatgg

SEQ ID NO: 2547 - DNA, 363 bp, Glycine max
  Clone ID: LIB3028-033-Q1-B1-C10
ttcagtggtgacacagatggaagggtgcctattacatcaaccaagtattcagttaagaagatgaaccttcccattaaatctgtttggcacccttggttttcctatggagaggttggtggctatgtagaagtatacaagggaggcctaacattagctacggtgagggaagcagggcatcaagtgccaagttaccaaccagccagagccctaactttgatcaaatatttcttagacggcactcctcttcccggtcctcccaaaagaaaggactaggactagtttcttcaaatccacttttcaataattgttgtggtaattattaatttaaggaaaataaatacaattatattatagtggggtttc

SEQ ID NO: 2548 - DNA, 373 bp, Glycine max
  Clone ID: LIB3028-033-Q1-B1-C11
cttggtgtgtgttctggtttttgattttcaaccaaaagatcctgaagatatatatgtggcactagcggctctatatggtagagcagtgccaggaactgttctggtgaggcagttaaaaaagttgccaagaaacaaatgctggcttgttggatattcaaaggcagaggcggatgctatggaaatagcaagggaattcaacaaagaatgggaaacaaatttgaggattggccttcatgattgtcgcgattataccaatagtttggttaggcaactcactggcgaaaaagatgtgctgaaacgtttgagaaacgttggtagttagagggaatccgttgtctggttagaagatcactttagtgaattactttatctt

SEQ ID NO: 2549 - DNA, 361 bp, Glycine max
  Clone ID: LIB3028-033-Q1-B1-C12
gggcaaagagaaggtggtgaaggtaggcatgatggagcagatcaagagagagatctcagccatgaacatggtgaagcacccaaacatcgtgcagcttcacgaggtcatggcgagcaagtccaagatctacatcgccatggagctcgtccgcggcggcgagctcttcaacaagatcgccagaggccgtctccgggaggagatggccagactttacttccaacaactcatctctgctgtggacttctgccacagccgcggcgtctaccaccgtgacctcaagccagagaaccttctcctcgacgacgacggcaacctcaaggtcaccgacttcggcctcagcactttctccgagcacctccgg

SEQ ID NO: 2550 - DNA, 56 bp, Glycine max
  Clone ID: LIB3028-033-Q1-B1-C3
acaacatttgcgggtctgcctgcaaattttcgtcccctcaatctatattactcagg

SEQ ID NO: 2551 - DNA, 170 bp, Glycine max
  unsure (1)..(170): unsure at all n locations
  Clone ID: LIB3028-033-Q1-B1-C6
gtaagtcctatcagtttcgacgtaagtctccaaaatcagagggaggcggagggggtgcagggcggatagatgggatgggtcgcgcgggcaggtcgctggtgggggtcggtgtgcagcacatgtggggggntggtggggagggcggggagcagcgctggccaaccgcgccg

SEQ ID NO: 2552 - DNA, 53 bp, Glycine max
  Clone ID: LIB3028-033-Q1-B1-C7
ctggagccgaattcgggggggggtcgaagggaaatgcgtaggggggggggggg

SEQ ID NO: 2553 - DNA, 59 bp, Glycine max
  Clone ID: LIB3028-033-Q1-B1-C8
aggcagtagatgtaagatgcagttgtcctagtaacaagtgggtgggggggggggcaggg

SEQ ID NO: 2554 - DNA, 372 bp, Glycine max
  Clone ID: LIB3028-033-Q1-B1-C9
ctagggttatcatttctccatttccattttctctctcacttttcaagaatcgtaagctatgggaaagtcttacccaactgtgagtgctgattaccacaaggccgttgagaaggcgaagaagaagctcacaggcttcatcgctgagaagagatgcgctcctctaatgctccgtttggcatggcactctgctggaacctttgacaagggcacgaagaccggtggacccttcggaaccatcaagcaccctgccgaactggctcacagcgctaacaacggtcttgacatcgctgttaggcttttggagccactcaaggcggagttccctattttgagctacgccgacttctacgagttggctggcgttgttgccgg

SEQ ID NO: 2555 - DNA, 181 bp, Glycine max
  Clone ID: LIB3028-033-Q1-B1-D1
attcactttctccgagctcgtccttctagccgcaacctcaacctgtttctccgagaggcagggggaagggcggctgtcatggagggagttaagggtgtggagacgaaggatggaggtgtcgcagtagctgctgcgtgtgctggtggggaggagggcggggaggatagagaccacagatttt

SEQ ID NO: 2556 - DNA, 355 bp, Glycine max
  Clone ID: LIB3028-033-Q1-B1-D10
ctggcgttcccatacccagcacagggccacatcctcccactcctcgacctcatccaccacttagccctacgaggcctaaccgtcacaatcataatcacaccaaaaaacgttcctatcttaaaccctctcttatcctcgcatccaaacacggtccaaactttagttctcccattccctccccaccctaacatccccgctggcgcagagaacgtccgtgaggtcggcaacagaggaaactaccccttcatcaacgccctctccaaactccaaccagaaattatccactggttcgcaacccacagtaaccctcctgtagcactcgtctccgatttcttcctcggttggactcagcaac

SEQ ID NO: 2557 - DNA, 376 bp, Glycine max
  Clone ID: LIB3028-033-Q1-B1-D11
aattgctcaaggagacgggtagtcatgggattcagatgaagcacaaggactctagagctacaaatcctagcccaaattccaaaaccgaattcggttccattaaggtcgaacaggagattcaacgaatggggaaccatggcagcagcagcagcaacaacaacaataacaaaggtgttggaaggcatttcgttggtagtggtgggcaatggaggccagccttacagagcattgcagaaattggaacttgaacacactattattatagcccccactcccatgaataaaccatgcagagcaacaaccgaccctagcttcctttcatttcacactttccaatgcattcacattgcccttctccttaatttaatagtagttt

SEQ ID NO: 2558 - DNA, 382 bp, Glycine max
  Clone ID: LIB3028-033-Q1-B1-D12
gaagattcctattatttagtgtaacccaactgtacaaaacagacaagaagaggccttcactctgaaccaaataccatagtcttctctttgtctgagaaaatagttccccccaaaaataaaatgaacaagggtctctcctttgtgctgctgattcttctgatccactacaacaacgttgtcaacgccaacaacaaaaactgtgtcacagaggattgcctcatcggcaacaatgatttggaatcagaattctacttcggttcccatgtggccagaatgctctacgatgtgagccaatctgtgtctggccaaacaggcaattcaaacaacaaagctgttaattgtccacaaagcaatggctaccgaacctgcttgccttccaaaa

SEQ ID NO: 2559 - DNA, 55 bp, Glycine max
  Clone ID: LIB3028-033-Q1-B1-D2
cagactatctccgtccgtaacatcaagagaggaaattttgcggaggaagaagtgg

SEQ ID NO: 2560 - DNA, 74 bp, Glycine max
  Clone ID: LIB3028-033-Q1-B1-D5
cgagaggctgctcgtaagaggcgattgaggaaaaaggcctatgtgggggaggggagaggcgggtcggtttgaag

SEQ ID NO: 2561 - DNA, 51 bp, Glycine max
  Clone ID: LIB3028-033-Q1-B1-D8
gggaaaactctactggaaggaccaccatgtccaattgatcagggggaaggg

SEQ ID NO: 2562 - DNA, 361 bp, Glycine max
  Clone ID: LIB3028-033-Q1-B1-D9
ccgagcacgaaaagcagttaattgtggccaaaccgaaccctaacaccaaaagccctcgccgatcctccacctcttcctcgctcgccatcatcgacggcattttcgcgagaaaaagcttcttctacgacaggcttccctcccaaccactcagactcaccgttctcaaactcgacggttcctgcttccatattcaagtttcgaagaccgccaccgttgcggaactgaaggacgcagtggaggccgtgttcagtcacgtgcctcacaaggggcctgccaaaatttcatgggcacatgtctgggggcagttttgcttatgctatgatggacagaagctagttacagaaaaggataatcttcgaaa

SEQ ID NO: 2563 - DNA, 54 bp, Glycine max
  Clone ID: LIB3028-033-Q1-B1-E1
gtgaaagagaatcgcgaggcgaagagaagggaggaattaagatggaggggaagg

SEQ ID NO: 2564 - DNA, 376 bp, Glycine max
  Clone ID: LIB3028-033-Q1-B1-E10
agagaaacaaacaaacaaaacaaagccaagcatctcccaacacaccatcatcatcatcatcatcaaagccaagcacaacaatggcactcaaaagggcatcgtggttgctgctgctgccactgttatctgcagttgctgctgctgccaccaacaccaacagtgtgtaccatccttgttctgatgccaggattcagagatctgatggcttcacttttggcattgccttcagttccagggactctttcttctacaaccacaaccagtccctccagctctctccctgtgaccgacgcctctctctctcttcctccaacgctcagcttgctctcttccgtcccagagttgatgaaatctctctcctcaccatcaacaactc

SEQ ID NO: 2565 - DNA, 382 bp, Glycine max
  Clone ID: LIB3028-033-Q1-B1-E12
gaagcttctgagctatgacaaacagggtggatggattgttctggcaagagggtctcacattgtggtcaatggacatgccacaaccgggttgcaaaccttggtggagtatgatgctgtgtggaaagaacttgctgacagagatgggtttgaaccagcatttaagaatcactacgacaaggttcattcaattgttagtccttgctgcaggtttgagttctctcattcaatggggagaatcccagagaggctcacgtgccccgagtgtcgccgcaacatgcacgtgctcaccaccttccagtgctgccacgatgaaaaaattgatgaggacttttttgtcagcactgttactcctcctaccatttgataattcaatggtcactcc

SEQ ID NO: 2566 - DNA, 54 bp, Glycine max
  Clone ID: LIB3028-033-Q1-B1-E2
cggcaagaaagtcatcatctttggggttcagggtgccttcactcctacttggag

SEQ ID NO: 2567 - DNA, 64 bp, Glycine max
  Clone ID: LIB3028-033-Q1-B1-E3
agtgaaagagaatccgaggcgaagagaagggaaaaattaagatggaggggagggaggggggggg

SEQ ID NO: 2568 - DNA, 53 bp, Glycine max
  Clone ID: LIB3028-033-Q1-B1-E8
cgctctttaacctgtctgacgaactcgcatctagaagcaaggggggggggggg

SEQ ID NO: 2569 - DNA, 380 bp, Glycine max
  Clone ID: LIB3028-033-Q1-B1-E9
tttctttcttagttgcagcgcgattgctgcatcgtcctccaataagagctcgctgctagtgaaccctaacacggcggcaacgagaggtgttcggttgaagctcagatcagcgatggcagcagcaacccgcacttctctgcggttcctcctctcagtctccgtaaccctaactctcgctcacctcgccgcctcaaattccgaaggcgacgctctctacacgctgaaacggagcctctcggaccctgacaacgttctccagagctgggatcccactctcgttagcccctgtacttggttccacgtcacctgcaaccaggacaaccgagtcactcgagtggatcttggtaactctaacctatctggacatttggtacctgaac

SEQ ID NO: 2570 - DNA, 368 bp, Glycine max
  Clone ID: LIB3028-033-Q1-B1-F10
ctctcccatcctttcgcattctcaatacccttttgatttgtgaaaggaaagcaaacatggttgatcaggtccaacaccctacaatcatggacaaggttgctggtcagctccatctccgttctggtctttcatctggtattagaagttatgatggagcctaccgccacccagctatgtaccaaagaccctcttttgggaattactcgaatgctgcattgcagtttcctgtgatgcccacatgcaaagctaccatggatttgtctgctactgcaacatctgcctcacccgtctttgttgctgctccagcagagaaaggccattttcttttagactttctcatgggaggtgtttcagcagctgtctccaaa

SEQ ID NO: 2571 - DNA, 270 bp, Glycine max
  Clone ID: LIB3028-033-Q1-B1-F11
tccatcaccaaagcagtgtagttttccgttgtcactgccatggctttcaaaaaagtactattccaatatttcactctggctttgtgtcttgtcttcgcattttgtgcttttgagggcaatgctcgcactctcgaagatgctccaatgcgtgagaggcatgagcagtggatggctatacatggaaaagtctacacgcactcttatgagaaagagcagaaataccagacattcaaagaaaatgtgcagcgtatataagcctttaaccatgcg

SEQ ID NO: 2572 - DNA, 369 bp, Glycine max
  Clone ID: LIB3028-033-Q1-B1-F12
ctttgtttgggctgcccaaccggtttataaacacgaggaagttttagaagaacaatggaaagagatgcttaatcttactaatcgtctatgctggaagttattgaaaaaagatgggtatgtcgcaatatggcagaaaccttctgacaatagctgctatctaaaccgtgaggcaggaactcaaccaccactgtgtgacccaagtgatgacctcgacaatgtttggtatgttaatctaaaatcatgcatctctcaattgcctgagaatggatatggagcaaatgttgctcgatggccggcacgcttgcatacaccacctgataggcttcaaagcataaaatttgatgctttcatatccagaaatgagctttt

SEQ ID NO: 2573 - DNA, 130 bp, Glycine max
  Clone ID: LIB3028-033-Q1-B1-F2
gcaggacagtaaagtgattatatggaccgtggcaaaagatggggatcagtgggaaggcagggttttgagggatttcaagacacctgtttggagggtctgaggggcgttgagaggaaacatactggctgtg

SEQ ID NO: 2574 - DNA, 171 bp, Glycine max
  unsure (1)..(171): unsure at all n locations
  Clone ID: LIB3028-033-Q1-B1-F5
ctcgagccgaatctgctcgaggcacctcgctcattcaatcaaggcagggcgggggaggaggagcggttgacgtgagaggaagggtgaggagaggtggggaggcgggcagagaaatggaaatgggtgggatggtgggggagggggtggggagcgnatgatctgtcacaagtt

SEQ ID NO: 2575 - DNA, 171 bp, Glycine max
  unsure (1)..(171): unsure at all n locations
  Clone ID: LIB3028-033-Q1-B1-F7
gttgtgtttgcacccatggcactgcaaattccttgcaagtcaggagggaggagataggcggagaatctgcagtgtagcgttgcatgtgagttgcatggatgcggagctggaattataatgaaagagggccttcaggagagaggagatggngagaagttgttttggttctca

SEQ ID NO: 2576 - DNA, 341 bp, Glycine max
  Clone ID: LIB3028-033-Q1-B1-F9
cgccgaagaaaaataaaataatgatcgacggaggaagcacgtcggtcgccgtcgtgtactccgacggcagccgcgagatcaacgtcggcaccgttgcggtggaccccacgctcaatttcaagagcctcctcacgctcctcagccagcggatcgggatctcgccgcaccagttctccgtctacctcgccgccgtcggtaccgaccgcaagattccggtcacggcgaagctcaatctcgccactgtgcgccgcgacggcgccgctcactacttcttcgtgaagcgctccaagcgcaacaagaaggcgaacggaaacggaaaggacgccgcaaagaagaatcat

SEQ ID NO: 2577 - DNA, 179 bp, Glycine max
  Clone ID: LIB3028-033-Q1-B1-G1
gtttgattgtcctagctttgagcaacatcatgaagatctccattctctttatcacaatcgtttcttgtggttttcttggaaatgtggtttcagatgctagtccgcgtccagaggaagctatttttaactttggggactctaggagtggtagggggaatggtgctcataagcagccacct

SEQ ID NO: 2578 - DNA, 366 bp, Glycine max
  Clone ID: LIB3028-033-Q1-B1-G10
cgctctgtttctgtctctgtgtttgcggctgaggattccgaacgagcgaccttcttcgtttctcgcaaagtttaagtcatcatgggtaaggaaaagactcacatcaacattgtcgtcattggacatgtcgactctgggaagtcaactaccactggtcatttgatctacaagcttggaggtattgacaagcgtgtgattgagaggttcgagaaggaggctgctgagatgaacaagaggtcattcaagtatgcctgggtgcttgacaagctcaaggctgagcgcgaaagaggaattaccattgatattgctttgtggaagtttgaaaccaccaagtactactgcacagtcatcgatgcccccggacat

SEQ ID NO: 2579 - DNA, 347 bp, Glycine max
  Clone ID: LIB3028-033-Q1-B1-G11
cttgttgatgatgtcattgagcattactcaaaaatcaaagaaaatccagagttccattctcttcccagcttcctatttggacagtccatgggtggagctgttgcattaaagatacacctgaaacagcctaaggcatgggatggtgccattcttgttgcgcctatgtgtaaaattgcagatgacatggttccaccaaaattcctcactcatatcctgattgggttagccaatgttttaccgaagcataagttacttccaaacaaggatttagcaaaagcagcattcagagatttgaagaagagggaacagactgcttacaatgttgttgcttacaagggataaccacg

SEQ ID NO: 2580 - DNA, 189 bp, Glycine max
  Clone ID: LIB3028-033-Q1-B1-G12
ctcgatgcgtgattattcgtttgatccgcgaaatcatactggtctcagagaataaaatctatcgcaaattcttggtgcgtgtcaagatggtgcagcggatttcagcatggcgagagaatgcagtgcagtgatgcttcggattcaggtctacttgtttggagagcttcttcagttgggtggttggttgtg

SEQ ID NO: 2581 - DNA, 392 bp, Glycine max
  Clone ID: LIB3028-031-Q1-B1-E12
ggtttctgtgcctaaattcctcttcatatgtggatcaaatgttgtccaaaaaggccttgctagtggtgtcacaggtatggctggtcttggcagaactaaagtttctcttccttctcaatttgcctcagctttcagctttcatagaaaatttgccatttgcttgagttcttctactatgacaaatggtgtaatgttctttggtgatggcccttacaattttggttatttgaactcggatctctccaaggttctaactttcacccctctcatttcaaaccctgttagcactgctccaagttatttccaaggggagccctcagtggaatactttattggggtgaaatctattaaagtctcagacaaaaatgtaacattgaacacaaccctgttgt

SEQ ID NO: 2582 - DNA, 368 bp, Glycine max
  Clone ID: LIB3028-029-Q1-B1-E3
gtctcaagcaaccatggcaatggcaacccaagcctctctcttaaccccacccctctccggtctcaaagccagcgaccgcgcctccgtgccatggaagcaaaactccagcctctccttctccagcccgaagcccctcaagttctccagaacaatcagagcagcagccgccgacgagaccacagaggcaccagcaaaagtagaggctgcaccggtcgggttcaccccaccagaacttgacccaaacaccccttccccgatcttcgggggcagcaccggcgggctcctgcgcaaggcacaggtggaggagttttatgtcattacgtgggacccaccagtcgagtttgtctttgaaaagaaaagggcggccg

SEQ ID NO: 2583 - DNA, 357 bp, Glycine max
  Clone ID: LIB3028-029-Q1-B1-E4
gtgattgtttgttgttgtaactcgttcttcttcttttgttgttctgtgtttgtgtttgttttttctctcacctgaaaatgtcttgctgcggtggtaactgtggttgcggaagctcctgcaagtgcggcaacggctgcggaggctgcaagatgtacccagacttgagctacactgagtcaaccaccaccgagaccttggtcatgggagtggcacctgttaaggctcaatttgagggtgctgaaatgggtgtgcccgctgagaacgatggctgcaaatgtggaccaaactgctcctgcaacccctgcacttgcaagtgaagtgttgggagagcaagcttcaagcagagataccccttaa

SEQ ID NO: 2584 - DNA, 353 bp, Glycine max
  Clone ID: LIB3028-029-Q1-B1-E6
aagtagttgagaactaagaaggagaagcaaatggcttcctcaatgatctcttccccagctgttaccactgtcaaccgtgccggtgccggcatggttgctccattcactggcctcaagtccatggctggcttccccaccagaaagaccaacaatgacattacctccattgctagcaacggtggaagagtgcaatgcatgcaggtgtggccaccagttggcaagaagaagtttgagactctttcctacctgccagaccttgatgatgcacaattggcaaaggaagtagaataccttcttaggaagggatggattccttgcttggaattcgagttggagcacggtttcgtgtaccg

SEQ ID NO: 2585 - DNA, 354 bp, Glycine max
  Clone ID: LIB3028-029-Q1-B1-E8
agcaaattgaggaagcagttgagagagaccaaggtgtgagtgatttcttcgtctatggtgtcaacttgacatttctagacttacaagaaaccaatgtgtatgacttgcaattgaagggacacacaccaaagtttgtttactacacccttcaaggtgttggagatgaaggggttgttttggtgtatccattgcccaaaggttctatggagaatggtgttgatgggaagtttctgaccatgatttttccggaggatgaaatggtgaagcttaaatctgagctcaagataattggtcttttgcttgagaataattaagttttaatgagattaaaagcatgtttgactttccgttcat

SEQ ID NO: 2586 - DNA, 411 bp, Glycine max
  Clone ID: LIB3028-029-Q1-B1-E9
gcactatgctacaagcccaacaaacttgggtttaattggtataggcgtgccaaggtcttgttaattttgagcgttaagtgctgcaactaatcaaaatcccaagaccttggcctaccttgccatacagaaaaaaaaaaagcaaaaaaaaagccaaggtttggagccaacaaaaataaacacaaagcacaagtcatggaaagaataatggttggaagtgcaacaaaggttgctttcaccctcttggccactttcgccattgtcattccatgccttgaggctggcattgctgagtttgacgattttctcaaagcccaagctgatgaagcccataaaattgctcttgattcctatgtcccagagccccacgatgtcgcccatgaactcaatttccatgttcatatggcactggaa

SEQ ID NO: 2587 - DNA, 350 bp, Glycine max
  Clone ID: LIB3028-029-Q1-B1-F1
ttcaatttcaatcaacggttatacccttttctatttgagcatcatcatgtccaccgcagcgcagcccaaggccaagaaaacggcgtcgtccaagaagcccctctcccatcctaccttcgccgcgatgatagcggaggcgatagcgagtctgaaggagagaaccggttcgagccaatacgcgataaccaaattcatcgaaggcaagcacaaggagttgcctccaacctacaagaagcttgttctcgttcatctcaagaagtctgttgctgctggcaagctcgttaaggtcaaaaactctttcaagctcgcaccgactaagtctgctcctggtaaagccgctgctgctccca

SEQ ID NO: 2588 - DNA, 261 bp, Glycine max
  Clone ID: LIB3028-029-Q1-B1-F10
atcatcatgggcacctctgctattcagcaatcagcattcgcaggtcaaactgctctgaagcagctcactgagttggtccgcaagaccggtggcgccggcaaaagtcgcaccaacatgcgccgtaccgtcaagagtgctcctcagagcatttggtatggccctgatcgtcccaagtacctgggtccattctaagagcagattccgtcatacctgaccggagaaattccccggtgacaacggatgggacactgctgggctatc

SEQ ID NO: 2589 - DNA, 397 bp, Glycine max
  unsure (1)..(397): unsure at all n locations
  Clone ID: LIB3028-029-Q1-B1-F11
cttaaacgtctctctctttctttgaggcttctttccctctcttcgtcccttgctctgtgtcgccgtaacacaaaaagggaagagagagaaagaaccaccccacccaacaacagcttttgttcttcacaagacatagcttcgtgtgtgtgtttcttttcttccttccagcttggaaagactgaagtctctgtctttttcaggttttgggggtgttgttgaagatgttggtagcaaatagctttgatctatggcgaaaggacggttttttctctgcggcggaagaggtgcaggaatcagctgatataatggaatctgcatacanggcatggttgagagagaagagagaaaggtcaactcctgaggaattaaatgaactatgcagagagctgcaaactgc

SEQ ID NO: 2590 - DNA, 391 bp, Glycine max
  unsure (1)..(391): unsure at all n locations
  Clone ID: LIB3028-029-Q1-B1-F12
ttcgaaaccaaagcttctgcttttgtgatggaactagagagctgagaggcctaaacctctgtttgctctctcaccctttttggtgcagatcttgaacttgagctgcattttcatagaaaaccagcaccaagaaatggaacataccatgttacctgccattggatctgttttccctcgtggtgtctttgccgcactcttgctcatgttactgttttctttctccacattcacttctatagaagcctatgatccacttgatcctaccggaaatataacaatcaagtgggatgtcattagctggactccagatggctatgttgctgttgtcacaatgtacaactttcaacaatatcgccacattcaggcccccggatggtcattanggtggaca

SEQ ID NO: 2591 - DNA, 358 bp, Glycine max
  Clone ID: LIB3028-029-Q1-B1-F2
ccgcaaagaagacgtggaaagggtcctccgcggttccgactgcgtattccaccttgcggccttcggaatgtcaggcaaagagatgctccaatttggtcgcattgatgaagtcaacataaatgggacttgccatgttatcgatgcttgcctccacctcggcatcaaaaggcttgtctactgtagcacaaacaatgttgtctttggcggtcaacagatcatcaacgggaatgagacattgccctatttcccaattgatcaccatgtcgatccatatggccgcagtaaatcaattgctgaacagttggttcttaagaacaatgcccgtactctcaagaacgactccgggaatcgtctttac

SEQ ID NO: 2592 - DNA, 338 bp, Glycine max
  Clone ID: LIB3028-029-Q1-B1-F3
gtagggagcatgctgaagccaaacaccctaaatctgatgtttatgcttgttttcctcatctgaaaaagtgaacatattggagactgcaaatggagaaaactttatatcattatggcctcttccttaaaacctattgacagagatcttccccattttctatctatataaaaatgtgtttttctgtgtttgtgccttgggaattaagagggacaaggagaggaaaactattttattatgatttccctgataacagggcaagaaactgtgtgatgctttctctttctgtctaggtgtaactgtttaatgatggttcgtgttaataataaagtgtgtcacag

SEQ ID NO: 2593 - DNA, 354 bp, Glycine max
  Clone ID: LIB3028-029-Q1-B1-F4
cattttcattggcacaatgcctgatgccaatgtgataatcaagaagcttagagaagctgaaggattaacttttggcaacagagtctattgggtgcgttttgatgaagaattttctgataagaaatttaaatcttccagcccttttggaataaagtacacgttccatttggaggacgctgttgattgtcctgaatggattgtccccttccatgtagtcaagtcattagctgaagagaatgactttgagcttgttttcgcaaagaactcacatgaatttgtgcatgagtatatgaaaaaaccggaatttgtggagctcatgcgaagacttggtgcattgggagatggcaaccaaga

SEQ ID NO: 2594 - DNA, 353 bp, Glycine max
  Clone ID: LIB3028-029-Q1-B1-F5
gaaaatgggacagtatactcctttggatcaggtgctaatttctgtcttggccatggtgagcagcatgatgagttgcagccacgtcctatacagaaattcagaaggaaaggtattcatattgttcgtgtatctgcaggggatgagcatgcagtggcacttgactcaaatggatttgtatatacatggggcaagggatactgtggtgctttaggccatggggatgagattgagaagacaactccagagttgttgactagtctcaagaatcaattggctgttcaggtctgtgcaaggaagaggaaaacatttgttctagttaattctggttcagtctatggctttggctccatggg

SEQ ID NO: 2595 - DNA, 352 bp, Glycine max
  Clone ID: LIB3028-029-Q1-B1-F6
ggctatgtgagggagcaacacaaggccataatggcttggaaacacaactctaggcatgttggactggatagaatttcgtactaaagctgccttgttgatcatgatattatttactatcagtgtgttctgttgtcatgatgttttatattcagtaagcttttttcatgattgtcacaacttataaaaccccaaaaaacctgtctgtgggaggttcttatattttatgtgctgtcatgttcatgttgtggtgaaggatttgtagtttgtaaattgcatcatctcttatatgtttgcaactttgtgtgataaaaaacaccaagttgttatatatgtaatgcaccttcaactgttt

SEQ ID NO: 2596 - DNA, 358 bp, Glycine max
  Clone ID: LIB3028-029-Q1-B1-F7
attggaactgtgccagtgggacgtgttgagaccggtgtcttgaagcctggaatggtggtgacttttgcaccaactggactgacaactgaagtcaagtctgtggagatgcaccatgaatctcttacagaggcacatcctggtgacaatgtgggattcaatgttaagaatgttgctgttaaggatttgaagcgtggttatgttgcctcaaactcaaaggatgaccctgcaaaggaggctgctaacttcacagcccaagtcatcatcatgaaccaccctggtcagattggaaatggctatgcccctgtcctcgactgccacacttctcacattgctgtcaagtttgctgaactcatgaaca

SEQ ID NO: 2597 - DNA, 357 bp, Glycine max
  Clone ID: LIB3028-029-Q1-B1-F8
aaaaaccttcccttctcttctcacccccacactcccatctcacacacccctcgcatccaacaatgtctctcaccattccctccaacctctccaagcccgccgccctccgccccaaactaagcccaaagctaaggtccgccgccacaaccaccatcgtctgcagcaccaccaacaacaacaacaacaacaacgtgtcctccgacctgaaggcgttctccgccgcgctggccctctcctccatcctcctctccgcccctctccccgccggcgccgacatctcggggctcaccccatgcaaggagtcgaagcagttcgcgaagcgtgagaagcagtcgataaagaagctggagtcgtcgc

SEQ ID NO: 2598 - DNA, 405 bp, Glycine max
  Clone ID: LIB3028-029-Q1-B1-F9
ggaataacagacaaaggagattcagaactcatcgcgcacaatcaagtcgacaccaccaccaacaactcttactagaggacgattctcaaagctctcttccagcagaaaatggtgagggcgaggaagaggaggaggaactcacggaacctaaaataaagcttgctatgtgggattttgggcaatgcgatgccaaaaagtgcactggacgcaagctttcaagattgggcatgctaaaagagttacgtgtgagtaatggttttgggggcattgttttaagtccggctggaaatcaatgtgtctcaagagaagattactctttaatccagaagaaaggattggctgttgtggattgttcatgggcacgcttagatgacgtgcctttcgtaaggctgcgctgtactgctc

SEQ ID NO: 2599 - DNA, 303 bp, Glycine max
  Clone ID: LIB3028-029-Q1-B1-G1
cattattgatggggtcttgcagcggcgatcttgcggcaacgacggcggtgtggtatggaggggaagatgacgcggtcgagatcagatgggacgaggaaatcatcctatatgttgtcgtaatttgaaatggtggttttgttttcttcaatgtttgtgctgcttatttctgtttgaggtttgggagtggatttgccaatttgtaacttggacttggaacaatgtcctaatggccaccgaatgtggaaagctaagaaggctcttgttcaacagttttacaaacttgtttaattggatccttatctg

SEQ ID NO: 2600 - DNA, 271 bp, Glycine max
  Clone ID: LIB3028-029-Q1-B1-G12
gcgaatccggagacgctgcccgatggaaccgtgaatttgatggtgtggcattgcactattcccgggaagactgggactgattgggagggtggctacttcccacttacgctgcactttagtgatgactaccctagcaagcctccagagtgtaaattcccacaaggtttcttccaccctaatgtttatccttctgggactgtttgcttgtctatacttaacgaggatagtgtgtggaggccacccataacagttaagcaaattctcgtgggca

SEQ ID NO: 2601 - DNA, 357 bp, Glycine max
  Clone ID: LIB3028-029-Q1-B1-G2
ctttcaccctaggtgtgaagcagatgatctgttgctgtaacaagatggatgccactacccccaagtactctaaggctaggtatgatgaaatcgtgaaggaagtctcttcttacttgaagaaggttggttacaacccagacaagattccctttgttcccatctctggttttgagggtgacaacatgattgagaggtccaccaaccttgactggtacaagggaccaactctccttgaggctcttgaccaaatcaatgagcccaagaggccctccgacaagcctctaaggcttccattgcaggatgtctacaagattggtggtattggtactgtgccagtgggacgtttagagactgggg

SEQ ID NO: 2602 - DNA, 361 bp, Glycine max
  Clone ID: LIB3028-029-Q1-B1-G4
gttccccacagatcttaacacttcaaagttcaatctccccattttcatttttccatagcataagctaacagaataagaaaaatgaagttgaggtcttcaatcgcatttatttgcattctggcgagtgcgagtgtgacaatttcagaatcattaagccaacaagagcaattgtcagcatatgaagttcttgagaaatacgatctcccagtggggcttcttccaaaaggtgccacagggtatgagctaaacgaaaaaaacgggcacttcacagcgtatttgaatggaacatgctacttcagcatagagtcgtatgagctaaagtacaagtccacaatcaagggcgtgatctccaagggcaagt

SEQ ID NO: 2603 - DNA, 274 bp, Glycine max
  Clone ID: LIB3028-029-Q1-B1-G5
taacaatggagtatgaaagatggaccagggaaattactatttatacgaacactacaaaaataccatcaagtggttgaggaactttcattttcctaccctttaccattccttttatctatcttgtttttgtgttttcctttctttgatatgttgagataagagcatgaaggctagcaagatatgtaagattcatttttttttatcccgttttgttgtagaagagatgtgaattgttaccgatttggtttggttgaatcaacaaattcttttcctg

SEQ ID NO: 2604 - DNA, 355 bp, Glycine max
  Clone ID: LIB3028-029-Q1-B1-G6
gtcttgttgagtcattctcacaaagacaatctgcagttatatatgcaactccaattactataaatgatctgtcgaacagtagaaaaaaaatcagccagagggctgtagtaaagaagaaaggagtttggtggaagcaatttttggttgctccttaaaagagcatggatgcaggcttcccgtgatgcaccaacaaacaaagttcgggcaaggatgtcaattgcgtcggcaattatctttgggtcagtattttggagaatgggaaattctcagacttcaatacaagacagaatgggattacttcaggttactgcaataaacacagctatggctgctctcacaaagactgttggtgtgt

SEQ ID NO: 2605 - DNA, 360 bp, Glycine max
  Clone ID: LIB3028-029-Q1-B1-G7
gtgcaaactaaagaacctgccctatcttttaaattccttgtgggacaggtaaaccattaacgtaggcaagtcttgttcattcattgacaattcaatggcctgaggtgaaccttatcttcttgtgtattcaccaaatgagtgaatgaacgggtcgtcgacatgttgttactcttactcaactaccttttctttctgttcaatttttctataacaaaaaccgaagccattgataaccttcagtatctgaatcacagctgttcaagcaacaaaaccttcactccaaacagcacctaccaatccaacctccaaaccctcctcacctccctatcttcccatgccaacactgcacaattcttcaac

SEQ ID NO: 2606 - DNA, 349 bp, Glycine max
  Clone ID: LIB3028-029-Q1-B1-G8
gctagaaaccgttagtgggtatcctcaaaatactagattttcgattcgtttggtgaacggatttttaggtgtgattattacgttttttttttgttcaacaagctatggaggtttcggtgattggaagctcacaagcgaagctgggcgcgtctgaattggcttctagggaagttggattttgtaatctgaagaacaatttaagggttttgaatgatagagttagttttggtaggaataatatacggtgggagaaggctgggattagtttcactttgagggctcttcagactgaacctgttagagaggagaagaagccttctgggattggaacaagatccaaaacggtaga

SEQ ID NO: 2607 - DNA, 399 bp, Glycine max
  Clone ID: LIB3028-029-Q1-B1-G9
ccctcttcagcccgaacgccgaacctccccgttcggttcccgctcgtggattggtggttcgcgcagcgaaaggatccacgaaccaccgcgccctgaccggagtgatttttgaaccgttcgaagaggtgaagaaggagctcgatctcgttcccaccgttccgcaagcttctctcgcgcgccaaaaatacgttgacgaatctgagtccgccgttaacgaacaaatcaatgtggagtataacgtttcgtacgtttaccatgccatgtttgcgtacttcgatagggacaacgttgcgctgagaggacttgccaagttttttaaggaatcgagtgaagaagaaagagagcatgctgagaaattgatggagtatcagaacaaacgtggtggaaaagtgaagttgc

SEQ ID NO: 2608 - DNA, 400 bp, Glycine max
  Clone ID: LIB3028-029-Q1-B1-H10
gggctgaacaatggccggaaaacatgtcggcggcgagggcttagcggggaacctcgccggaatgtcgaagaatcagctctacgatatcatgtcgcagatgaagaatctaatcgaacagaaccagcaacaggccaggcagatcctcatacaaaatcctaaattaaccaaagcgcttttccaggcacagattatgcttgggatggtgcaagcacctcatgtgggttcaaaagttcggccaatgggttcacagagcaatcagcagtcagtacatctaatacatgaaccaaatagtcagcctgctccattattgcctgagcacggtggtgcacatgattaagcaggtgtatctcaaacccaaattcctctgaggaaacaccagaaccagccttcagtgccaatt

SEQ ID NO: 2609 - DNA, 405 bp, Glycine max
  Clone ID: LIB3028-029-Q1-B1-H11
gccatcggagtgatattctcaccggagacactggggtcaaaatcaaccacactttccacctacctcaaactcgctcacctcctctgcttctccaccggcttcggcgccgctctgtgggtaacattcatcggcggcatcatcatgtttaaaaatctgccgcggcatcagtttgggaacctgcaaagcaagatgtttccggcgtatttctcgatggtgggtgtctgctgcgccgtatcggtggcttcctttggctaccttcacccgtggaaaacttcctccaccactgagagataccaacttgggtttttgctctcttcctttgcgttcaatcttaccaacttgtttgtctttacacccatgaccattgagatgatgaagcagaggcataaagtggagagagaaaat

SEQ ID NO: 2610 - DNA, 387 bp, Glycine max
  unsure (1)..(387): unsure at all n locations
  Clone ID: LIB3028-029-Q1-B1-H12
ctgacaatgtggataagaaggacagcaaagctgaaagtgcagagccaagtgctgaaggtggccatttgaagtcatttcaactgctctcaagtagccaaaatgcctttacaggtcttgctggtactggattttctaattcctcattttcctttggttccatttcaaatgaagggtctggttctatttttggactgaaaagtgataagccttttggtcttggtttatctaacaatggaagttctcttttgggggcatctggggcctctgctatttctaagaatgagggaagtggtttagcaatgcangaggttatagttgaaaccggggaagaaaatganaanagtgtttttaatgcagactcagtattgtttgagtttgctgatggaa

SEQ ID NO: 2611 - DNA, 183 bp, Glycine max
  Clone ID: LIB3028-029-Q1-B1-H2
gttgtttatgatttgcaactcaagtacgtttagcatgtctcagttatgatggttgggtaaccgtcgtgctggttatctatacctgagttttaggggaagcttgtggccctttttgttttagaatatgttatgctgaagtttgtaatagttggttgattataagattcctgatatttttatttt

SEQ ID NO: 2612 - DNA, 303 bp, Glycine max
  Clone ID: LIB3028-029-Q1-B1-H3
cgaacatgtgcgagtacatggcgccatcgctggacgtgagacaagacgtagtggtgatggaggtgccgaagctgggaaaacaagccgcaacgaaagcgattaaggagtggggtcaaccaaagtcaaagatcacacaccttgtgttctgcaccacttcaggcgtggacatgcccggagcagattaccagctcacgaagcttctcggcctgaggccctccgtgaagcgcctcatgatgtatcagcaaggctgcttcgccggcggcaccgtactccgcctcgcgaaggacctcgccgaggaacaac

SEQ ID NO: 2613 - DNA, 128 bp, Glycine max
  Clone ID: LIB3028-029-Q1-B1-H4
tcgatttatttgcttagcattcatgtaattgggaaaaagaggataaaaaaattgttgtatattgtatatacatattgtaaatttttgcttgcataattgaaatttaaaaggagaagaaaattcgatct

SEQ ID NO: 2614 - DNA, 326 bp, Glycine max
  Clone ID: LIB3028-029-Q1-B1-H5
aaagcttcctttgccatttccatgaatagaatagagaattcttaggcatatgaacatttagcccatctctgccactgactctgctccacagcattcaattataacaaagaccattttttttttttggttttggaaaataggcagagtcatagagagataaaggggctgcttaaattttcagccttttggagaaagagacattactcacatactcactcaccaccgagatccatttttttgcgaagaaagttgaagaaaaaaatggaaacaatgttgcctccgaaccaagcagaggaagcaatagtcacaacaagccttaacgagac

SEQ ID NO: 2615 - DNA, 338 bp, Glycine max
  Clone ID: LIB3028-029-Q1-B1-H6
aactgctccactacttgcacgctctgtgagtgcaactggtcggttaggtcctgatccctcacctgctactcatagttatgttccccagtcctatagaaatgcaataatggggaatcctgtggtgtcaactgctgccagtcttcctcattccagctccagttcaggagtaaacccatctcctggctattcacatccacccatggtatcatccccactatttatctcccggagctccgacaaaatggattcaaatacttcccagtctggtgttccctttggtatgatttcacgggatgttttacagaacggacctaattggattgatagttctcaaaggg

SEQ ID NO: 2616 - DNA, 358 bp, Glycine max
  Clone ID: LIB3028-029-Q1-B1-H8
agaaagtgctagagatgtgcattggtatgcaaattccttaattttcacaaaccttttttggttattcttggttgcaggtgttggaaagagttgccttcttctacgattctctgatggttctttcacaactagtttcatcacaaccataggcattgattttaagataagaaccattgagcaggatggaaaacggatcaagctccaaatttgggatactgcaggtcaggagcggttccgaacaattacaactgcttactatcgtggtgctatgggcatattgctagtctatgacgttacagacgaatcttcatttaacaatatcaggaattggattcgtaacattgagcagcatgcttca

SEQ ID NO: 2617 - DNA, 402 bp, Glycine max
  Clone ID: LIB3028-029-Q1-B1-H9
tgatatagttgttgatgaccaggacagaccattacggacttctcagctgcatactaaagatgttcaagctaaacctctcagtggttctgctaggagttgcactaaagtaagatccttcactatttgattgaaaaatgagagctagaagtttactgggaaaattaaccacatggtatttgttttaggttcacaagaagggcattgcacttggtagatcagtggaccttacaaagtacagtggctatgatgaattagttgctgaattggatcagctgtttgaatttgggggtgaattattgtcaactaaaaaagattggcttatcgtctttactgataatgagggtgatatgatgcttgtatgcgatgatccatggcagtaaggatctgtattttaattataca

SEQ ID NO: 2618 - DNA, 416 bp, Glycine max
  Clone ID: LIB3028-030-Q1-B1-A1
caattaaggaaacatttgataaattggttgaagatgggaagatcacaccaatcaaggaaatcacacctccaccaatccctgaggaccttagtactgcaattaagagtggaaaagtccgtgctccaactcatattatttccaccatttctgatgacagaggagaggagccatgctatgctggtgtacccatgtcttccattattgaaaaaggttatggtgttggtgatgttatctctcttttgtggtttaaacgaagccttccccgttactgtactcaatttattgaggtaggctattcaacagcagagatttcattgaatactttcctttcacagtgtttgtctggagtatgtgaaaatattctacactctacagacaaacttttatgttgtcagttttccttttagatttttttt

SEQ ID NO: 2619 - DNA, 383 bp, Glycine max
  Clone ID: LIB3028-030-Q1-B1-A10
caaatgctcctgttatctctcttctgggtgccaaggtagaagttggtaaaaaagaatgtgttcctcaaaggttgtctttgcagaatggcaaggctactgaacctgcaatagaactaacaatgtcaagagcaggtagcgttttagggatgaccccaacagtacccttcaatcattcatctgtttttggctataatggagtggcgtcagcatcagtgacacccgcaatgtctttttcatcagccatgtacggatcaggtggcacaattccatacatggtggactcaagaggagctccagttgtccctcaagtgggtggatcttcatcaactgtcctttcatcttactctcagccaccaatctttatgaacatggctggtacacaa

SEQ ID NO: 2620 - DNA, 382 bp, Glycine max
  Clone ID: LIB3028-030-Q1-B1-A11
gttttcttaaaatttcttccttgccactgccagtgtgtcaccaccatggccaccgtcacaacccaagcctccgccgcgattttccggccatgtgcctcgaaatcgaggtttctgaccggctcttccggtaaactcaaccgggaagtgactatgaggccaatggggtgccctccttctgcctctttcaaggttgaagccaagaagggagagtggttacctggcttggcctccccaacttacctcaatggcactcttcctggtgacaatggatttgaccctctgggactagctgaggacccagagaacttgaggtggtacgttcaagccgagcttgtgaatggacgttgggccatgttgggtgttgcaagaatgctacttcctg

SEQ ID NO: 2621 - DNA, 306 bp, Glycine max
  Clone ID: LIB3028-030-Q1-B1-A12
gccaaggctaagattaccaaggaacccaaagctaaaaaggtttccagaccacgcaaccctcccactcatccttcctaggaagagatgattaaagacgcaattacctcgctgaaggagaaagacggttcgagccaacacgcgattgcgaagttcagcgaggataagcacaagcagcttccaccgaacttcaggaagcttcttctctaccatttgacgaaagttgtagccgctggaaaactcgtcaaagtcaaaggctccatcaagctcccacctacgcgaccttctgcatcatcttcatcttcgccg

SEQ ID NO: 2622 - DNA, 155 bp, Glycine max
  Clone ID: LIB3028-030-Q1-B1-A2
gtttaatcgcagatcatgtttagctagctagctagcatataatcacgtacgtgacgtcagtacaaattaaatgttacctatagaggtaaccactgcatattgttctttgtgcatccgtgctccaactcatattatttccaccatttctgatgaca

SEQ ID NO: 2623 - DNA, 392 bp, Glycine max
  unsure (1)..(392): unsure at all n locations
  Clone ID: LIB3028-030-Q1-B1-A3
cgagagaataatccggttgattacttgtcaagggaacattaaaaataggggatttcattgtcagccagccttttgaggatgataaagatgaccttcggcgatcacctggcactcctgttttcactgcaccagaatgtattttaggtgtgaaatatggtggtaaagctgcagacacgtgggcagtaggagttactttatactgtatgatattgggtgaatacccttttcttggagacacccttcaagatacatatgacaaaatagtcaataatcctttagtactccccaacgacatgaatccaccattgaaaaacttaatagaaggacttctttccanagacccaagtttaaggatgactttgggtgctgttgcggaagatagctgggttatt

SEQ ID NO: 2624 - DNA, 348 bp, Glycine max
  unsure (1)..(348): unsure at all n locations
  Clone ID: LIB3028-030-Q1-B1-A4
gaacatcataatcatgaccaactcgatcaacgtgaacatcatggacatagtcaacatgatcaacatcatcagaagtgtgcctcacaaacatgttcctcaacatgtccaccctgctcttcanattcaagttttggtggaattgttaaccattgtaacaccatgaaggctcatgatcaatgtaaaggaagtgatgaattccatgaacatgatcactgtcatcatggaagatgtgacaagaatcacgatgaagtccacaagcatgacaccgaagataatcatgcagttgcagaaaaaaggcatggtagttgtttgggacataagaaccatgggaaanagcactgccacaac

SEQ ID NO: 2625 - DNA, 365 bp, Glycine max
  Clone ID: LIB3028-030-Q1-B1-A5
attcaccacaatcttattagttaaactttgtccacggacatcattaggacgtttgcgcaatgttggtgtctagctatactgtcctactaatatcacggtttctcgtcactggcgtgtgtgtttggggaagatccgccatctttctgcggtaccttgaaagtcactggtcacagactcacaacaagtaaattgatcaaggcagagccatccaactcattctagactaaaactctggttgtggctttgcctccaagagtaagtacatgtttggccgtgttagcatgaagatcaagctcattccgggagactctgctgacacagtcactgcattttatatgaattctgacaccgacactgtacgtgat

SEQ ID NO: 2626 - DNA, 365 bp, Glycine max
  unsure (1)..(365): unsure at all n locations
  Clone ID: LIB3028-030-Q1-B1-A6
gtgaatcagcaccacattcacctgagctttttgtgaggattccaaagcatggcttcccttgcagcatccactgctgctgcttcccttggcatgtcagaaatgcttggaaaccccatcaacctcagtggtgccacaaggccagctccatctgcctctagccctgcctccttcaagactgtggctcttttctccaaaaagaaggctgcacctccaaaaaaagctgcagctgctgctcctgccaatgatgagcttgccaagtggtatggtcctgacagaatgatcttcttgcctgagggtctcttggaccgatctgagattccanagtacttgaccggagaatccccggagactatggttatgaccca

SEQ ID NO: 2627 - DNA, 291 bp, Glycine max
  Clone ID: LIB3028-030-Q1-B1-A7
gagcatggataccgtacacgccagtacattcagtgcggcatcaacacctcagcatcacatgcttggtccagtgagtctgagactcgaggcatgtcatacattcgatctgaacacatctgactgagtgatacaagcacgggaactcaatctgtgctctaggaataggcactgcaagtactgtggctcagcactcgcagttgcatgctacagctccaaacgccagctacattagcggagcacgtcattgctttgcttgacaagtcatatcgtcatgagcactagataaacatg

SEQ ID NO: 2628 - DNA, 394 bp, Glycine max
  Clone ID: LIB3028-030-Q1-B1-A8
aaagaagaaataatatgcgcttaagggaggagcaagatgctgcatacagggctgcacttgaagctgatcaagctagggaacgacagagaagagaagaagaagaacatcttgcatgggaagctgctgaagccgagagaaagcacaaggaagaggaggcggctcgtgaaagagcagcacaagaagctgcagagaaacaagctgcattggctaaaatacgtcaagagaaagcccaatctcttggtgaagaacctgaaaaaggacctaatgttacacaggttttggtacggtttccaactggtgaacgcaaggaaaggaggttctacagcacagcgacaattcagtctttgtatgactatgttgactcacttggatgtttaaaagccgagagttacag

SEQ ID NO: 2629 - DNA, 368 bp, Glycine max
  Clone ID: LIB3028-030-Q1-B1-A9
gggaggtactacaaacttctattctaatctcgcagttttagcaattatcacttggcaaatcttgcttgtctgtgtaccaatggtttacattacaatacgcttgcagaggtactatttttccactgcaaaagaagtgatgcgcatgaatggcacaacaaaatccatcgtagctaatcatgtagctgaaactactgctggagttgtgacaataagagcctttgaagaagaagatcgtttctttgagaagaatcttgatctaattgacatcaatgctagtcctttcttccatagttttgcctcaaatgagtggctgatccaaagattagaaataattagtgcaatacttctttccttcacagcactatgca

SEQ ID NO: 2630 - DNA, 352 bp, Glycine max
  Clone ID: LIB3028-030-Q1-B1-B1
ctgtctcgtttacacatctctccaacctttcactttcgtttctcagttttattcgaatccctctctcaatctcctttccaaatggccagcgttgaggttgcacagcaaacaccaacaacagttccagaaaatgaaacaaccgaggtaagcaagacccaggaaacaaccccagtcactgaggctcctgcaacagaacaaccagcagctgaggttcctgcaacagaacaaccagccgctgaggctcctgccccagaatcaaccaccgaagcaccaaaggaagaaaccaccgaggcaccaacagaaacagtagaaaaaacaactacagaagtagccccagaggagcctaaagaag

SEQ ID NO: 2631 - DNA, 399 bp, Glycine max
  Clone ID: LIB3028-030-Q1-B1-B10
gaagccgagaggagaaagggcatagcttcacaccaagatggtttgatttaactgaagaagtgacatcaactccttggggtgatttggaaatctatcaatataatggtaaatacagtgaacatcgagctgctgcagataactcaggaagcattgatgatgttgatgctaaatcaattgaattcaatccatggcagtatggtaatttggccacggaatgaactagtttcaattttcttttggtttttggatgctacagttagttcatgtaacttttttttattgatacatagaataaatcttttttttttctttttgtggttttgttggcttgtgtacgttgtaatatctgcagttctctttcttttctgactacgttagtattttgattccatcacacag

SEQ ID NO: 2632 - DNA, 391 bp, Glycine max
  unsure (1)..(391): unsure at all n locations
  Clone ID: LIB3028-030-Q1-B1-B11
aagccttctcatgattccttgccagcatctattgctaaagaagttgcaaaggcattgtcatagaaaggcagcatcaaactccattaggagtgagaaaacttcctcattcagtttcagaagcaatgccaatgttccttttcatgaattgcctgnggcttcctttgatcaatacatggatgacaagcacagagtgctaagagctgtgttttctgatgacaaaggaacaactaaacagctcaatgaggaagagtggaggatcaaaatgcctcccatacaatgcttatttttgagtgtcaatccaacagcagatgtcaggttaacattcaggtctaatggagaagattatccacctgaaattcctcatcatgtccccaaagttcttgagcttcac

SEQ ID NO: 2633 - DNA, 415 bp, Glycine max
  Clone ID: LIB3028-030-Q1-B1-B12
cttggatccctttcgatccgacgacttcgttcgttccttctccttccaagttctaaccatttcccactgtcttcgattttagggcattaaatctgccatggcagcagcacccgctagagctcgtgccgattacgattacctcatcaagcttcttcttatcggcgacagcggtgtggggaagagttgtctacttttgaggttttctgatggctcattcacaaccagttttatcaccaccattggtatcgattttaagataagaaccattgaactagacagcaaacggattaagttacaaatctgggatactgctggtcaggagcggttccgaactattaccacagcttattaccgtggagccatgggtaccttgctggtttatgatgttactgatgaagcatctttcaataatatt

SEQ ID NO: 2634 - DNA, 336 bp, Glycine max
  Clone ID: LIB3028-030-Q1-B1-B2
ctttttcctgtcgacagtcaatgcatagagctcgtgcagatctagagcagatgcaaactgtgtcatactgagaagcttagtgacatacagtgtcagcctgagtcacagctttagttcataactgatgcctggcgacaaataattgaatgtacaacagtgctgaaatggtcatatgcatatgggttctatttgccggatcatgagcatgcaatcaagcagttctttgagtacttaccaagtgactcagaatctggtctggcgagacttcatcaatgcgcagaagaggaactacagccattcttaactgctgatgattcatctagagaatttaatgac

SEQ ID NO: 2635 - DNA, 324 bp, Glycine max
  Clone ID: LIB3028-030-Q1-B1-B3
atctgggattgtggagagtgtaggggaaggagtgagtgaagttgaggaaggggacatagtagtgccaatattcaatggggagtgtggagagtgttcgatgtgcaagtgtgagaagaccaacttgtgtgagaggtttggggtggatgccacgaagaaggtgatggaaggagatggcacaacaagattctccactgttaatgggaaacccattttccatttcttgaacacttcaactttctcggagtacacggtggtggattcggcctgtgtggtgaagtttctggactccgatcacagtctcagccacaggaacctcaccttgct

SEQ ID NO: 2636 - DNA, 365 bp, Glycine max
  unsure (1)..(365): unsure at all n locations
  Clone ID: LIB3028-030-Q1-B1-B4
tctgctgctacaaaagtctcccttccaatgatcatctgaaattacataggatttatagggtcatcaagaactcttcagcatcacaaaaggtgatttataatcaataagcaagggacagacacacagaagttgttatcttgaatcagaaaacatgatgctaagaagctcttcaacaccagttcttggatccctcctctcttccttcacagatagccctaacaacaatattcactcagaaacctgtcatgcactgaaacactttccaccaaccactgtcccacaacattatcacaaacttactttccaccatactgggtcctctgcatgtggttcttctncaatctcttcctcaattggtgagcttg

SEQ ID NO: 2637 - DNA, 404 bp, Glycine max
  unsure (1)..(404): unsure at all n locations
  Clone ID: LIB3028-030-Q1-B1-B5
ctctcttctcgctcttggcttttcgctcttcactcactctcattcagtcatttccaccgttcatggatccagtaagcgtgtggggtaacacgcccttggcgacggtggatcccgagatccatgacctcatcgagaaggagaagcgccgtcaatgccgcggaatcgagctcatcgcctccgagaacttcacctccgtcgccgtcatcgaggccctcggcagcgctctcacgatcanatactccgagggcatgccgggcaaccgctactacggcggcaatgaatacatcgaccagatcgaaaagctctgccgctcacgcgcnctccacgccttccacctcgacgcccagtcctgcggcgtcaacgtccagccctactctggctcccgggcaacttcgcagcctaca

SEQ ID NO: 2638 - DNA, 374 bp, Glycine max
  Clone ID: LIB3028-030-Q1-B1-B6
ctcgagcagcatcttgcggctgatgatcccatggagatcccaaggaaaccatctgcgggttctttattacgaatcagacattgggggagaatcattacatttccgtgaggttattcatcaaagtcatgcattggtgggtataacgttatccatgattattcatgctcagaatgaggaataggtttcctttcccctgcagatgtttggactttgtcatactgaatgactcaaagttcatatctgccatagtgagcattctgcaagatttatgaacagctttttcatgctatgaatatgttctactggtgaagctacacgaaatacgtcactttgcgcaacgtgccatcaattggtttacattcaattcagatgct

SEQ ID NO: 2639 - DNA, 328 bp, Glycine max
  Clone ID: LIB3028-030-Q1-B1-B7
gtctgtgtgtcctttgcacactgttcaaatagagagagaaaatcaaatctattatgtttaatcatattgtttcttgctattattctttttaccatttttctcaaaggtaaaccaagacagtgtagaagaataggaaaagggaaagttattgtaagagattattttattcaaacttgtatcgtaaattgaagttcatgtgattatgatgttcatttttcttatcttttttatttgttgttggcatctttgcttcagaggcgtccgcaaaaggccacatgcaaagttatgtcactgcttccgcgcctctaatccaatacattgacaaact

SEQ ID NO: 2640 - DNA, 348 bp, Glycine max
  Clone ID: LIB3028-030-Q1-B1-B9
ggacgaagtagacgacctgaaaatggtgggaaccaaattgatagtaagaagctgtaccagcttgatcttgacaaaatcgtctgtggtgaagatacaaggactactttaatgattaaaaacattcctaacaagtatacgtcgaagatgctgcttgctgcaattgatgagaatcaccagggtacttatgacttcctctacttgccaattgacttcaagaataagtgtaatgtgggttatgcttttatcaatatggtgtctccttcacacatcatcgccttctacaaggcctttaatgggaaaaagtgggagaagttcaacagtgaaaaagttgcttcactggcatatgca

SEQ ID NO: 2641 - DNA, 366 bp, Glycine max
  Clone ID: LIB3028-030-Q1-B1-C1
tgttactagcaatataaaaatctcgagtcggagatttgagtcttcttcgattcacgctgtaaccatcatctgtgatcgattctaaaatcttcatcaagaagatgcagctacaagatggttctgttggtaaagtcattaataacctctcacaagttctggcaagggtggtgggagaccagagcatctttccccacctacacaaaaaagatcactctgcccatgttattgagaagttctctcactatgttggtaggcaaatgggattcttagagagcgaggttccagcagagctgtgtagattggcaaatgagtatttgataaaacccaaggagtgtgtggaaagcatccttgaatatcttgctcatc

SEQ ID NO: 2642 - DNA, 398 bp, Glycine max
  unsure (1)..(398): unsure at all n locations
  Clone ID: LIB3028-030-Q1-B1-C10
ggtgactgcgcgatgggtgcctacaagtatgtttcagagctatggcgcaagaagcagtctgatgtcatgcgcttcttgcagcgggtgaggtgctgggagtataggcagcaaccttccattgttcgcttgacaaggtcgacccgccctgacaaggctcgtcgcttgggcttcaaggctaagcagggctatgtgatataccgtgttcgtgttangaggggtggccgaaagaggccagttcccaaaggtattgtttatgggaagcccacaaaccagggtgttacccaactgaaatttcagcgtagcaagaggtcagttgctgaggagcgagctggacggaagctgggtggacttanggtcctcaattcttactgggtgaatgaggactctacttataaata

SEQ ID NO: 2643 - DNA, 386 bp, Glycine max
  Clone ID: LIB3028-030-Q1-B1-C11
agaaagcacatagaagagaaagaaagaaaacaaagaggagaaagaaagtagttgaggaagatacaaacaatttttgcagattgttgagaatgcctttcaagaagcctcatcacacctcagacaagaactacataacaggggacgacggaggcaagttcgagatacaacctagaggactcaacattgtgtggggaaatgattctcgatactggaaaattccagaacaaggtcctgcggagctgatccaagtttcatggttggaggtatccggcgtggtaaacttaccaggtgtcaagaaatatagggttgaattcgaagtgagagttaaagacgatgggttcggttggagtggcacggacgtgctagtgatggctaagattgggaaa

SEQ ID NO: 2644 - DNA, 306 bp, Glycine max
  Clone ID: LIB3028-030-Q1-B1-C12
gcatttaccttcttgacaaagttatgacagacgatgactttgcttgggaagatataatgagtttgaggttctacatccctgtaagccttcaaatgtcagtgcagctattacaacctatgttctgcaatgctctttttgaactttcggaaatgagtcagaagaaattaaaaactggtgaggagccaatcttcaacatagttcctgtcataggttctgggaggtctgcttcatccatggacgatgtagtaacctgtgaattaatggctcagaaatcctgagtaaatatatgctttctgaaaacactct

SEQ ID NO: 2645 - DNA, 360 bp, Glycine max
  Clone ID: LIB3028-030-Q1-B1-C2
cttgtgttgtgtgctactagtaatgaaatgaaattccacgcaaaactccacaaaagccaccttctttgattcaagaaatcaacaccgagttttcaaaatcccattttgttttcccttccttttttcctatataaaccaaccttttaatttccttctgaattaatactccttgatctggtgtgaagatggacactactgactgggaagtcctttcttatgatggcctttctgattttgatgactatgacttgtgcacctcaccaaaattcaagaaagcctctgaagcatcaaggaattttcatccaagggtgcctaaacagattcttcatattccaattcaattggaaccgagaattggga

SEQ ID NO: 2646 - DNA, 394 bp, Glycine max
  unsure (1)..(394): unsure at all n locations
  Clone ID: LIB3028-030-Q1-B1-C3
ggaangggcaatgtaatagcagagccagaagttatcatccgcagctgcctctgtcaacaactctaaactggccaagaaccacatctaagtcaaggaatgataaacgatggactggattgaccacaacacatgatacctctagacggggaaatactgtgacaaatgatacagaggatatatcatcaacactgtctgatccaggtcctatctgggatgctgaaccaaaatgggatgctgaacctagtaattgggatgtggaaaatccaattgagttgccaggaccatcagatgacacagaaataggatctgcataggangttgtgccccgttttggagataaatgggttgcgtcaaatggacaatttcttgggattctgggtttgcaacatgcatg

SEQ ID NO: 2647 - DNA, 387 bp, Glycine max
  Clone ID: LIB3028-030-Q1-B1-C4
tgataaggttattgttgaagcctttaagatggtgaatgcagatgacaccatgacagttaaagaatacgaattcaagagattgataaggttattggtgaagcctttaagatggtgaatgcagatgacaccaagacagttaaagaagacgaattcaagaaaattttaagtgaaatacgggtagtatcacgttacagttagaggcaaatcccatatctgtttcttccaattcagttgtgcatgagcctttaggctcatcttctacactcttgcagccatctagtgaaacagcataattgtctcaagtttgtgacgggtcaaaaactaagtacaataagattttttattcatggaaattgttactgacatagtttatcttttaagaaatca

SEQ ID NO: 2648 - DNA, 211 bp, Glycine max
  Clone ID: LIB3028-030-Q1-B1-C6
gtctttaaatacgtttgtggatattgaactcaatctgtatactagatttcagactggacagtgagatgacatcaataatggcggaacacagatcaatcaagttacaagtatagaatggcaaagcttactggcatcataacatgatatgatactttacctgcgtgagaaggtttttgagcattaatagtcagtcttcacttacacttctcgc

SEQ ID NO: 2649 - DNA, 261 bp, Glycine max
  Clone ID: LIB3028-030-Q1-B1-C7
gtcttaatttctctctgccttgctcatttacacacctcaccaacctttcactttcagctttagttgaatccctctctctcgtttccaaatggtcagcgttgagattgtgctagtgttgattatgtgatgtgtcacatgtgtgtctctcgcgtcaagttagctgcatctcgtgtttacacatccagctttcttaagcttggcacgatactttgttaagtgaaattaggagtctcacatgttgcacatcatacaccaatcaca

SEQ ID NO: 2650 - DNA, 426 bp, Glycine max
  Clone ID: LIB3028-030-Q1-B1-C8
ttcatgattacagtcagtgaagtgtgcatattacactctgcagatggtgacattcatcttcaattcaggctctctctctcctttccaaatggccagcgttgagattgtgctagtgttgattatgtgatgtttcacttgtgtgtctctcccgtcaagttatttgcttctcatgtttacaaatccagctttcttaagcttggcacgagactttgttagatgaaattagaaatctcccaggttgcacatcatacaccaacaacagttccagaacatgaaacatccgatgtaatcaagacacaggaaacaaccccgggaccagtaccagccactgaggctcctgcaacagatcaggcagcagctgaggttcctgctcatgaagaacaacaagcaactgaggttcctgccgcagaatcaaccaccgaagca

SEQ ID NO: 2651 - DNA, 235 bp, Glycine max
  Clone ID: LIB3028-030-Q1-B1-D1
agctcactgcttgtcatgaaggttacaagctgcatggttgcggtgttgatggttagttttggacacataattcccttggcagaagctgaaattccatgtggcagggtgcaaatcacagtggctccatgcatagggtacctaaggggtcctggtggaggtgtccctgcagcatgctgcaatggggttaggagcataaacaaggaagccaaaaccaccccagatcgtcaaggggtgt

SEQ ID NO: 2652 - DNA, 379 bp, Glycine max
  unsure (1)..(379): unsure at all n locations
  Clone ID: LIB3028-030-Q1-B1-D10
gagcaagagagacataccagttgaagcattcaggggagggttcatattgtcaaaagttgcgaacccttggtcaacaggtgagctcaagttgaaaaacaccaacgtggaggacaaccctgctgttaccttcaactacttcagccacccttatgatcttaggcgctgtgtggagggtattcgcttggcgataaaggttgtccagtcagaacacgtcacaaactacactttgtgtgagagagaaactgcagagaaaatgcttaacctcagtgtgaaggccaatatcaacctcattcccaagcgccccaatgacacaaagtcagtagaacagttttgtanagactccgtgatcactatttggcactaccatggtgggtgccat

SEQ ID NO: 2653 - DNA, 149 bp, Glycine max
  Clone ID: LIB3028-030-Q1-B1-D11
aaaatattcaatacaactgtttgtgctggtttcaacctggctggatatttaagaaacgcctattactgtaatttgtactgtataacttgtatgtacgtttgttgcatggtaatgcttggtaacttaaatgttcatttgatttgatgtgg

SEQ ID NO: 2654 - DNA, 380 bp, Glycine max
  unsure (1)..(380): unsure at all n locations
  Clone ID: LIB3028-030-Q1-B1-D12
cagcaagagacccttcagggattctctccccatacacctacaatctaagaaacacaggccctgatgatgtttacataaaagttcactactgtggaatttgccattctgatctccaccagattaaaaatgatcttggcatgtccaactatcccatggtcccaggacatgaagtggttggtgaggtactggaggtggggtcagacgttagcaggttcagagtgggagagttggtgggagttggactcctcgtaggttgctgcaaaaactgccagccatgccaacaagacattgagaattactgcagcaangaagatctggtcttacaatgatgtttatgtccattggaaaaccaagcaaggttggctttgctgaaaacatgg

SEQ ID NO: 2655 - DNA, 200 bp, Glycine max
  unsure (1)..(200): unsure at all n locations
  Clone ID: LIB3028-030-Q1-B1-D2
cacacactgctttgcagaaaagattacagccgtgaggatactctctgggaagatgttgctgctgtcacagatccctggatattgtctagacctccatattgtgacgtgtatgggagactagtgcctgtcatangatcttgcaagggtcctgcagaccatgtcacgacatgatgcagtaatttggttacggccaggagaat

SEQ ID NO: 2656 - DNA, 388 bp, Glycine max
  unsure (1)..(388): unsure at all n locations
  Clone ID: LIB3028-030-Q1-B1-D4
attcggcccaagggaatttggaacaaattgtacccatgaaatacaacccaaggaataaaatttcattaaaacctgtaatggctaaggccaatgttgtaatcaaccttattggaagggattataaaacaaaaaactacaccttttaaaaaattgcactatcacatggctaagcaactagcaaagattccagagcatngtggtatcctgagatttattcaagtttcttgtttaagtgcatctccttcatctccatctangatgctcagaactaaatcagctgctgaggaaatgattttaagggaactacctgaggccacaatcttgaaacctgctgtaatgattggtacagaggatcggattttgaatccatgggctcattttgctaaaa

SEQ ID NO: 2657 - DNA, 357 bp, Glycine max
  unsure (1)..(357): unsure at all n locations
  Clone ID: LIB3028-030-Q1-B1-D5
tttatacacgactaataatccacgagtgaatatattactgccttcaagtaatgatagttttcaaccaactcttttggagggcattcatacagttgataacgttgttgatactaggccaattgattatgaggtcatttcacagcccacgtttgattgggatacccctcaaatgtgactcacgctttgatatgcatagcttgctatcctataacgatgtaactgttcccaatcacgtatgtaacagaaaaaaaaattagtggtgagggatatggatggggacaggggtcacgctgggccagggaagatggttcctcttgtaactgatgttcanaatttgttatacacgcatttatgaca

SEQ ID NO: 2658 - DNA, 404 bp, Glycine max
  unsure (1)..(404): unsure at all n locations
  Clone ID: LIB3028-030-Q1-B1-D6
gctgttgagtggaaccatatcgagcacctgagttgacttgttttgtcccttgtccatctccatggccactccacagtcccacttccgttttctcgctttctcactctctatcatccatatctctctcttcctctccacaaccgcaacccatcaatcgctcctcgaagaacaagacactcccatcacgcacttccagcgctacctccgcattaacacagcccagccaacccctgactacacctccgcggtctccttcctcaaagcccacgcccaaagcctgggcctcagaatccaacacctcgatttcgtctaaggaaggcccgtcctcttcttcacttggccgggctcaaacccttccttcncatccctccttctcaattcccacctcgactccgtccccgccg

SEQ ID NO: 2659 - DNA, 398 bp, Glycine max
  Clone ID: LIB3028-030-Q1-B1-D7
tcggcggcaattgccagattgccatcattattcatagacaatacaggaggcaatgatgtgcatagatgaattggcattacttgttttcttaataggcctatcctgaatccaaacgaaatgagatcggaattcctcggggaattccacttccacattttcaagaaataaggaggcacaaatgtccatatatgaattggcattatttgttttcttattacgcctatcctgaagccaaaggaaatgagatcggtattcatcggggaattccaattccacattttcaagaaatacggaggcaaaaatgttcatatatgaattggaattacttgtattcatattaggcctatcctgaagccaaaggaaatgagatcggaattcctcgggggtaccgagctcga

SEQ ID NO: 2660 - DNA, 338 bp, Glycine max
  Clone ID: LIB3028-030-Q1-B1-D9
tacgacgtggcgtccaaactaagccacacggctaataaatacggccggcacactttcactgcatcaagaaaggaagaaacataccgaatgagagcatcaaactcttcttcttcgatttccattgcgaagcgttactttttcttcttctttctcttcattttcttcgctcttcgatcttcgtccggggactgctccgaataccaccaccaccactcgccgatggccacgatcggaggcttacacgactcccaaggctctcaaaacagcgtcgaaaccgaagccctcgctcgattcgccgtagacgaacacaacaagaagcagaattcgcttctggagtt

SEQ ID NO: 2661 - DNA, 414 bp, Glycine max
  Clone ID: LIB3028-030-Q1-B1-E10
ggtagatgatgggaacgctatctacgcaatttcgttccatcaaacgcccaaattcaaaccctaaactatccaaatcgtcatctcctacaaaatcagaaattaaattcaacgctaaaccaaaaccaaaatcagagtcagagtcagagtcatggtctgtttatctcatcctctccaccaaccatcctatcaaaacctacgttggaattacaaacaatttccctcgccgtttgaagcagcataacggtgaacttaaaggtggtgcaaaggcatcccgtgctggaagaccttggatttgtgcatgcataatttgtggttttacagaccgaagtgaagctagtgtatttgaatcaaaatggaaaactttctcaaggagagctccccgcaaaaatcaaaatgacaatctctccaagcaaa

SEQ ID NO: 2662 - DNA, 374 bp, Glycine max
  Clone ID: LIB3028-030-Q1-B1-E12
caaacactctcatcttcttattcttctgctttcactctctgactcaatcgttctaatccacaaagaatgaccttaaattacaacattgccctcgccttctctgcggtgctcacgctgctcctctttcccctactgaccgtaagggagctcgtggaggagcagccactagtcctcaagtaccacaacggccagctcctgaagggccgcatcaccgtcaatctcatctggtacggcaccttcagcccgattcaacggtccataatcgtggacttcataaactcgttaagcagcgcgccaaacgcgcctctcccctcgaccgccacgtggtggaaaaccacggagaagtacaaagttggaagaagatttcctgcgct

SEQ ID NO: 2663 - DNA, 307 bp, Glycine max
  Clone ID: LIB3028-030-Q1-B1-E2
gtccaagccctatacaaccaatccctaacacacactcatttgattcaatttctatggctagcctcatcgttgcatttttggctgcagtgctctgcatggttgtggtgagtgcacccatggcacatgcaactatcacgtgcgggcaagtgaccaatagcctgatcaattgcatctgttacctccagaacggaggaacgccgcacgtcaggatgctgcaacggactgaacagcctcaatgccgcagccactgacatcgcagatcgacaaacggcgtgcaaatgcctcaagtcggccgccattcaaatct

SEQ ID NO: 2664 - DNA, 141 bp, Glycine max
  Clone ID: LIB3028-030-Q1-B1-E3
gcagacttaacaacagcacaaaacggggttactgtctgttcaagctaccatctctctctctctttcttagtgcctccttgccagaagttaaaatgggccaagaaactttccaattcaaatccgaatcattgaacaagggga

SEQ ID NO: 2665 - DNA, 344 bp, Glycine max
  Clone ID: LIB3028-030-Q1-B1-E4
aaggaaaatggtaggttggtccaataaaaccccaaggaattcaacccggcaaaaacccccttcaaaaaaggatttggcaaaaaatttgccaaccctcaaggacaaggaattgaccaaggctcctttgatttggagatttttcaaacccccaacggaaaaaagtcttccccaataatatgtgctgaaacaagtttgaaaactaccccagaagatgaaactcctggtgattccttgccagacgcaacccctcacatgcaaataactcaaggtgtcttagagaaaagtaatggtgctggtccattcctaataaaagtagttaagcaaaatttgtggattgatggtgt

SEQ ID NO: 2666 - DNA, 423 bp, Glycine max
  Clone ID: LIB3028-030-Q1-B1-E5
acagttagtacaaaaaagggttacttcagcttccacatatcttgaagaattgatcaatgggcaagtctgtagttgagaagctactttggatggcaattgtgtgcttggtgctgggtgtaatttccattactcccaaggcccaagcagcagtgacatgcaaccaggtggtgagcaacctcaccccatgcatttcttatgtgctcaatggtggcaaaaccgtgcctggcccttgctgcaatgggatcaagaccctctttaacctcgctcactccacaccagaccgccaaaccgtttgcaagtgcataaagaacgctgttagtgcgttccattatggcaagtccaatgtggaccgtgctgctgctcttcctaagcagtgtggggttaacattccttaccagatcagcccttccaacgactgtacca

SEQ ID NO: 2667 - DNA, 365 bp, Glycine max
  Clone ID: LIB3028-030-Q1-B1-E6
ttgtacaatttcacccaagcggtatatatggagcaggttgccttatcacataatgatctcgtggtgaaggtggaattcttaggaatagtgagggtgagcgatttatggaacgatatgcccctactgcaaaggatcttgcatcaagagatgtagtttcaagagcaatgacgatggagattcgggaaggtcgtggtgtaggacccctgaaagatcacatctatctccacttgaatcacttgcccctagatgtgctcaaagagagacttcctggcatctctgaaactgctgctatttttgctggtgtggatgttacaaaggaaaccattcctgattttgcaaactgtacattataacatgggcggtat

SEQ ID NO: 2668 - DNA, 222 bp, Glycine max
  Clone ID: LIB3028-030-Q1-B1-E7
actaaatcagccaaagtttgtacctttcttacaagatgtggtcaaacttgaatggctttatttgggagtccttgacctactatatttttaaacgtgttggatcaatgctagaaccatattctgttaaatggtgtgaagttatattggtcactggccattaaatctatttatacgcttagaagaccttataacctttataataaatttttcttcattaaaaca

SEQ ID NO: 2669 - DNA, 183 bp, Glycine max
  Clone ID: LIB3028-030-Q1-B1-E8
atcattcctcctcttcctcagtactgtcattttcgattcgcttcactgtaactaggtttaattctaaggccttcatcgacaatgaccatcggacgtcatcgttcaaggcgcatcgtaatggctgtctaatcggatgtgactccgatcagcgccgagaacttccgcgcgctctgcacctgcgag

SEQ ID NO: 2670 - DNA, 361 bp, Glycine max
  Clone ID: LIB3028-030-Q1-B1-E9
cgagcatcctctatggataagattatgaacaagcttagattggcccagaaaaaagctcaggaaatgagaagttcagttccacacaaccaaaccgatcgggttgtaagaacttcacacaaggcttcatcatttcttagaaccagccagatgcgttctttgagtggttgtttcacttgccatgtcttttaagcattctttcatgtttgagtgatggtgggtttccgaaggattcaaatgggccacatgttaatgattgaaaggggcacaacagttgacaaaattggtgttgttgcgttttgctatccatggcaccttctttgaaagtctcagatatcataaaatctaagcccatgttccggaa

SEQ ID NO: 2671 - DNA, 379 bp, Glycine max
  Clone ID: LIB3028-030-Q1-B1-F1
ctctgattgtgtatatgatttgcatccgggcgatcacatagagattcagtggagaagaaacaaagaatttccttatggttggtggtatggtgttgtaggccacttggagttatgcgatgggaatgaaaattactgccgttgtcatagtagtgacacagtggtgctagagttcaatcagtacactcctgactcgcgttggaggaagacaactataagtagaaaagatcatagagaggaaggaaatgaagcagatggtttttatggaggaatcagaaagattaagagtgagactgagatttccatttggaaaagcatttggccttctgaagtcttggactaatcagatttaattttccacttagcattatgtcaagactag

SEQ ID NO: 2672 - DNA, 374 bp, Glycine max
  Clone ID: LIB3028-030-Q1-B1-F10
cgggagagatggcacctgcaaatttgacaaaaccaaagttgcggctactgtatctaattacagtgtggtttcccttgatgaagaacaaattgctgcaaacctagtaaagaatggccctcttgcagttgctatcaatgcagtttttatgcagacatatgttggtggcgtctcatgcccatacatctgtgggaagcatttggatcatggggttcttctagttggttatggtgaaggtgcatatgctcccattcgttttaagaacaaaccttactggatcattaagaattcatggggcgagagctggggagagaatggatattacaagatctgcagaggtcgaaatgtgtgtggagtagattccatggtctcaactg

SEQ ID NO: 2673 - DNA, 400 bp, Glycine max
  Clone ID: LIB3028-030-Q1-B1-F11
gaggtactgttccatccagacctcataacatcggtgttgagggggctgctgatctctcttcacatggcactacaaggaagctacataaagtggaagatgtagacacgagtgaaggcaactttggcactgttataatccatggagatgaattacataagaccacacaagatgcagattctgcagcttctgtatctgctctgaccagtggctcaggagacagattggctgactctgggattgagagtcagaaagttggtattatgaacactgcctcttttagaggatatagtgctactaccaatactgttcaatcgtctttaccttatgttagtaattcaactgagcagagcctcaaaactagaggtactcatcgagcacaagctggaattggtggtgatat

SEQ ID NO: 2674 - DNA, 306 bp, Glycine max
  Clone ID: LIB3028-030-Q1-B1-F12
cttctgcttcggatcagaagaaaagggacaaagatgagagggaggccatggatgcaggaattggaaatattgttatcaattcagattcaaaaccactaatgcattctccatcaaagaaagtcttccaaggcagcagcctgaagtagttcatctggcaggagctctttcccgtgtgacagttagtatgttcttagcgtgcccctgtacatttccctcattcattgatgttcttgggaattgttttgggagcatgttcgtttagcctttggttggtttccagaactgctggtttggatggggtaggac

SEQ ID NO: 2675 - DNA, 307 bp, Glycine max
  Clone ID: LIB3028-030-Q1-B1-F3
ctcttacatggatgctgttagagtttatcttggttataaaaggacatgtgtagctggcttccttcaatttttgactttgtatggtactagtattgcttatgtactaaccacagcaactagtctgagtgcaattctgagatcaaattgttatcacaagaaagggcatgaagctccttgtaaatatggtggcaatctgtatatggcactgtttggacttgttcagattgtaatgtcattcataccggatctccataacatggcatgggtttcagttgttgcagcacttatgtcctttacatactcagtc

SEQ ID NO: 2676 - DNA, 359 bp, Glycine max
  Clone ID: LIB3028-030-Q1-B1-F4
ttccaacccaaaccagactctgtcttttcttctctgtacggcactctcgcttccggcgttctgggggtcgcatcgccggcgattctccagtctgcttctcgcttcagccttcaattcaaccctctcgtcgtcgcttcactgattctctcttcgaaaatgcttccgatcgcatgctacggttttccttctcccaaatctccgtctccgaaagaagcctgtaccttttcatcctccgatgaatcaccttcctagttatggctattcgtgtaactttttccttttcgggctacgtcgcccagagcctcgcctcctcagtcggcgtgcgcgtcgccaattcgcgatgtgtccaggaatgctgg

SEQ ID NO: 2677 - DNA, 302 bp, Glycine max
  Clone ID: LIB3028-030-Q1-B1-F5
ctcgagccgctaaaatcaaacagaatacaataccctctctctctctctcttcctctttgtcatggcatttctcttctctttcctttcgttaaaacttggaactttgtgatttttgaatgacccaacaactaaggttatgatcagttggaagcgttggcaaaaaagaatacgcaatagtggtgttgtttgttcattttggtcaaagaaatagtatctgggtacccaggatattgtagttttaagatgggttatctcaattcagttttgtcatcttcaagcgatgttcaagctgcaggtgatgc

SEQ ID NO: 2678 - DNA, 311 bp, Glycine max
  Clone ID: LIB3028-030-Q1-B1-F6
gaccgtcaaaagtcgaacggcgacacgactctttctttcaccctaacacaacaccggcaatgcagaagctacttccgccggcaacacgcgccggcagcttcacggcagttcctctgtcagcctccgccgtcacctcaccgctactcgctcaaccatttctcagcccgaattccttcccctcactccttctcaatcgtggctcgttcatcttcctcttttagttcctccatcgctcgtcaaccatggaagaagcttcgcttcaccgcaagcgcgtcttcgcatgtgtctcccgcattcactccctccaacga

SEQ ID NO: 2679 - DNA, 383 bp, Glycine max
  Clone ID: LIB3028-030-Q1-B1-F8
agaccaagccccactcaaccaccacaccactctctctgctcttcttctacctttcaagtttttaaagtattaagatggcagagacattcctatttacctcagagtcagtgaacgagggacaccctgacaagctctgcgaccaaatctccgatgctgtcctcgacgcttgccttgaacaggacccagacagcaaggttgcctgcgaaacatgcaccaagaccaacttggtcatggtcttcggagagatcaccaccaaggccaacgttgactacgagaagatcgtgcgtgacacctgcaggaacatcggcttcgtctcagacgatgtgggacttgatgctgacaactgcaaagtccttgttaacattgagcagcagagccctgat

SEQ ID NO: 2680 - DNA, 324 bp, Glycine max
  Clone ID: LIB3028-030-Q1-B1-F9
aatggcatttccgtccgtaacctctgtaactgtggataacgtgacattccctcccaacgtgaaacctcgctgctcccccaacaccttcttcctcgccggcgccggcgtcaggggcctccaaattcatcacgctttcgttaaattcactgccatctgcatttaactccaatacgacgccctttccttccactccgttaagtggaaaaccaaatctgctcaccagttaacggaatccgaccaattcttctcagatatcgttacaggtccaatcgagaaatttatgcacgtgacaatgatcaaacccttgacggggcagcaatactc

SEQ ID NO: 2681 - DNA, 355 bp, Glycine max
  Clone ID: LIB3028-030-Q1-B1-G10
tggaaacataatactacaataatatatagggatcaaccacgattccataaagaagctcaaggttgtgttcttatctattgagaagaaggctacatgcagagacttgaacgctctcaagatcttggtgtatgttacatctgcgtctgctggttataatctgcttctattgtgcaaacactccatttggtctagaaaaaacttcaaagggtcttatctatgcatggcttggatttgtttcttgttggatcagatcgccgtgtacatgacatttgctgcaaacactgcagcaatgggagccgcgatgctagcaataactggatcagatgcctttcagtggctaaaggtatgtgacaaa

SEQ ID NO: 2682 - DNA, 354 bp, Glycine max
  Clone ID: LIB3028-030-Q1-B1-G11
gggaaaattaacaagtgcataacttttcctgatatgctggatatgattcctttcatgaccgggacgggtgatattccaccactttacatgctttatgctgttgttgtgcacctggacacactaaatgcatctttctctggacactatgtttcatatgtgaaagatctgcaaggcaattggttcagaatagatgatgctgacgtacagccagtgctaattaatcaggtcatgtcagaaggagcatatatcctattctacatgaggtcctgtcgccgtcctccggtagaacatactatgaatgccatgcagcaatctgtttatgattcttcaaagcacaatccaatggaaatgcag

SEQ ID NO: 2683 - DNA, 275 bp, Glycine max
  Clone ID: LIB3028-030-Q1-B1-G2
gggcgttaaggatggtgatgaattgcacaagcattcgcatcctccttttaggtctgttacacatagcagtagacagtggatggtcatcaaaagaagtaagcagcatcatatcacgattccagcggtatcagattctcaacactgcccatgccatcccgcgttaccaagaatccgcacgatttcatgatgttttaaggtaaagccctctctctggaatcccaaagcattgagtttgtgggaggcatgccacttgtccatctgagatgggaacgctc

SEQ ID NO: 2684 - DNA, 401 bp, Glycine max
  Clone ID: LIB3028-030-Q1-B1-G3
ataaaatggaagaatccaagggttttgttggtggtgagtctcaaaaaccacatccagaaatgccctctatttcttttcaaattcctatgccagggaggaatcgatctggtggtctctacccttggggatggaggcacagagcaataataccacagcacaccgtgcgaaactctaacggggcaagtgagaacacagatttgaaggtgtaagtcactcatggagtaataatactatgtatgaaaatgtgaaacgtttgaacagttgttgcggttgttatgttgtcctcctcattatcgtatattatcgtgcatgggtgtacgtagctcagttactgctttgaggataaaagctttactaggcttgaatatgaatatcttcagcagtttgtactgataaatgac

SEQ ID NO: 2685 - DNA, 378 bp, Glycine max
  unsure (1)..(378): unsure at all n locations
  Clone ID: LIB3028-030-Q1-B1-G4
atttttctttgacccttttgctccctgtatctaaaattcccctctccacccactttccctttaagtcaatttcatgcttctctgtctcagatcctagatcttgctgtcggtgggttgatcggagtagatgtcgccgtcaaacgggttgcagaacggcggcggcggcggcggtaatggggtgagttatatagagcaccaggtttcaaaacttgacactcttgctggtgtggcaatcaagtacggtgttgaggtagctgacatcaaaaggatgaatgggttagccacagatcttcaaatgtttgcactgaagacattganaattccattaccaggacgtcaaccggcatctccttctcctggtccacatgaagaacctac

SEQ ID NO: 2686 - DNA, 421 bp, Glycine max
  Clone ID: LIB3028-030-Q1-B1-G5
cactccattccagaatgcttcgttacctgttggtgttcttcttattgggcttgggaacccgggtggagtcacacgaggaatcgggtcattggagctgcgagtccgagtcggagatccgagtcgagactgagttcaaacccggtgtaatcacactggatggtcacgctgatgattggaaggacattgatgggtcctactttcccctccttcccgcccttgacccagatgctgaaaatgaattcaaagggggaaagatgagcgttaaaagtgtccatgatggccgcgatatcctctttctgctgcaggtagatggtgactatgcctactctaaaggtgaaagcaataaatgtccatctgttgctctcatgtttcaaattggagatagtgcctcttatcatgatatgggtggctgtaaagaaca

SEQ ID NO: 2687 - DNA, 394 bp, Glycine max
  Clone ID: LIB3028-030-Q1-B1-G7
gtcaaagccttctgctcttgcaaagaagaaggttgacagctctgattctgatgatagcagctctgatgaagataaggggaagatggatattgatgatgatagttctgatgaaagtgaagagccacaaaagaaaaagactgtgaaaaatccaaaagaaagcagtgatagttccgaagaagacagtgaggatgaaagtgaggaggaaccctccaaaactcctcagaaaagagacagggatgtggagatggttgatgctgcctcgtctggaaatgaagccgcctaagacccaagtttacaccaaagaagaaactggcgcttcaaagacacaatttgttgggaacttgcaatttagtgttgaacgagctgacgtggaagatttcttcaaggatgctgg

SEQ ID NO: 2688 - DNA, 330 bp, Glycine max
  Clone ID: LIB3028-030-Q1-B1-H1
tcgtcccatcctgccggtttgccgtagctggaacccggaaaacacacccggagccaccgtgaatgacgaccgttttgaggccaccgattgggttgcgcttcctccaaccaccacagctttccccttctcccacatcgtgtgtttctttctccctctcactcaagcttcccagaatcaactctaattactcctctttcgaagttagagacgttacctatcaacccccggggactcagcttagacttctgaattcagttagtttttcacttccagagaagagttttggtttaattttcgggcagagtggaagcggaaaaacaactctgttgc

SEQ ID NO: 2689 - DNA, 266 bp, Glycine max
  Clone ID: LIB3028-030-Q1-B1-H11
ccattcttgaggagacacttttcacttggatcaaagtggacccgatgcctgtccgacaatgactctgccaagaagaaaggcttttgggcaagatatcgttaagatttagttccaattgcagtcagagtcaatcattctctaattaaaattgtcataacaccatcaatttagaatgaatattttctatgtaacctaacttgtactgataactttgaatgctttaaaacaagtaatttttacttttgaccagaccactgacgaacatc

SEQ ID NO: 2690 - DNA, 289 bp, Glycine max
  Clone ID: LIB3028-030-Q1-B1-H12
caattctgtaggaaactacatctggaaggttaatcgcaacggagatgcttcgactttatcaaattcgccgaagttcaccgtacacgccgtggtacgcgacacaatgtagatcttctgccgcctaaacggcatcgtttacaacatcaagggctaactattggaggtgcaatccaatacgggaaacatgtttaaaatcgataaggacgatgggactgtgagacaagtgcttctcaacgaggatctaatgggcgctgacggagttgccttgaggggagacggagtcgttttg

SEQ ID NO: 2691 - DNA, 406 bp, Glycine max
  Clone ID: LIB3028-030-Q1-B1-H2
ccttggtcctgttgtttggaagattgctgcaagtaaaatcagcagtgttttgccagcaggacatgattttggtcctggatgggtaagtgaagatgatggttcgtcacagaggcgacacttcccagtttgtgatgagggtagaacttcagaccctcctgtaccagaggattatagaagtagattttcttctccatctggatcgctcccccttgcaaatagaccattctatcaaagtggagacatggctatagataattaccaaaatgagttgaatccagtaatcaacattcctggtgggtctgaatccataactcctatgaggattcagcaggaatccatggtgcactctgatgattttggttcatgtgatcggttaggttctaatttcccatctcaaatgaagatg

SEQ ID NO: 2692 - DNA, 322 bp, Glycine max
  Clone ID: LIB3028-030-Q1-B1-H3
cgcacctcgactcgctcgtgggacaggcactgttcggagatggcgccgcagcgttgatcatcggatcagaccccgacccagcagtggagcggccgatattcgagatgatatcggccgcccagacaatcctgcccgactctgacggtgctatagatgggcaccttcgggaggtgggactcacgttccacctcttgaaagatgtgcccgggatcatctcgaagaacattgagaagagtcttgttgaagcttttgagcccatcgggatcagcgactggaactctatcttctggatcgcacatcccggtggtcccgcgatcctcga

SEQ ID NO: 2693 - DNA, 351 bp, Glycine max
  unsure (1)..(351): unsure at all n locations
  Clone ID: LIB3028-030-Q1-B1-H4
gacgtcacatcgcaccttaatccgaattccgctccagcaagtatcaagggaacaatgatggggcttaccttgggactacatttccacaactcatcttgatgacttaaggacaactgattccacataaaccagcacacgctatgttccatgagtttttgggttcacagttcacaagccatatagctgaagttgaagctttcatgaaagtaaaaatctgcccgtgtcacatttaactcttccttatggttctctttgcaacatccggcaaatcatatgctttccaanacagtacaatctaggcatctgttttaattgttatacgagcttgttgtaaagaaatatgcagacatg

SEQ ID NO: 2694 - DNA, 381 bp, Glycine max
  Clone ID: LIB3028-030-Q1-B1-H5
aagggcttgacaattttgatgagtggacaattgatttgaggaaactgaatatgggtgagccttttgctcaaggagcttttgggaaactttaccgaggtacttacaatggtgaagatgttgcaatcaaaatcttggagaggcctgaaaatgatccagcaaaggctcaattgatggaacaacagttccagcaggaggtcacaatgttggccacactaaagcattctaacatagttcgtttcattggtgcatgccgcaagccaatggtatggtgcattgtaactgagtatgccaaaggtggttcagttcgacaatttttaatgaagcgtcaaaaccgctcagttcccctcaaattggctgtcaaacaagctttggatgttgcaa

SEQ ID NO: 2695 - DNA, 348 bp, Glycine max
  Clone ID: LIB3028-030-Q1-B1-H6
gttggcaaaaaaaatctagacaaggccatagctgcctccaaggataaatacaactttgagataatatggcatccctttcaacttagccctgatgcccctaaagaaggcattgacaagagggagtattacagaagaaaatttggatctcaatcagaacggatggaagctcggatgtcagaggtgttcaagaatgttggcttggaatatagcttgtctggactcacgagaaacactattgacagccacaggcttatatattttgctaggcagcaaggtcttgacaagcaacatgatcgagttgaagaacttaacattggctaattcacacagggaaaatacattggtgac

SEQ ID NO: 2696 - DNA, 210 bp, Glycine max
  Clone ID: LIB3028-030-Q1-B1-H7
cttgcaattcccaatggactccattttcaagctctcaacgccatctccagctgcttccttatcagaagcgcttcgccccagagattctcgcttcctctccttcaatccatcgtccaacgcgattaattacaaaattaacctcgctgcctctctccgatgcattcactcccgccctcttaagagctccttgcggattaaatgctcccaaac

SEQ ID NO: 2697 - DNA, 312 bp, Glycine max
  unsure (1)..(312): unsure at all n locations
  Clone ID: LIB3028-030-Q1-B1-H8
tcagcttttcccatcgtgaaatgagtatgggttcttcattgaggcacttgtgtctaactttggattcactagtctcttcagcattctgtgcctttccacggcagtcagtcgatgttccattctgcatanactacgttcctacctgggcctctgatcacatcacatacttcagtgcaggttctgacaatcaagttcatctgtgacagtacactggtaatggcttctagtgcaaagggtcatacgtgtatggtcacttcagcatgagcatgaagatggttcctggcgattcagctgtgcaagtcactgcatttt

SEQ ID NO: 2698 - DNA, 372 bp, Glycine max
  Clone ID: LIB3028-030-Q1-B1-H9
gacaggcaccatgtcacttcttaaccagctctttaacagaggcgttttcggcactcgatgcaaaacatgcctgaacctggcaatttcacgcattaagctgctgcaaaacaagagagatatgcaactgaaacaaatgtgcaaggagattagccaattcttgcacgctggccaagaggcaattgctagaatcagggtggagcatatcatacgggaacagaatacatgggctgcatatgaaattttggagttgttctgtgaatttgttcttgcacgtgtacctataattgagaatcagagggagtgccccacggaattgcgagaagccattgcaagtataatttttgctgctcctagatgttcagatgtaccaga

SEQ ID NO: 2699 - DNA, 375 bp, Glycine max
  Clone ID: LIB3028-031-Q1-B1-A1
gcctggttgctcccactgaatccagtgctaatcctgctgagactactactgaggtaaaatcagctggggaaaacaccgttgcagatgaatcaaaaagtaatgatacagctaaggattctgagaaagcaagagatggggaagctaagcagcctgagagcaaaactaatgaggcagaggataaacttactgaaagtaaggatgctgctgaagaaagcaatgcagacaaggagcatactgcagaaaaggaaagtactgatgatgaatcgaaggtagataaggaacagaataaggatgtcactgaaagtggaaatgaggataagaaggatgctacacacaacgaaagtgccagcaagttagataaagagaaaacttggg

SEQ ID NO: 2700 - DNA, 403 bp, Glycine max
  Clone ID: LIB3028-031-Q1-B1-A10
ataacttaggaaaagcaacccctgcttccatcttgaaaggtgctaatggaaccaatagtcctggttctatcattgttgctgccaaggaagctgttaaaaggagagtggaagctgcttcagctgccaccaaaagagctgaaaatatggatgccattgtgaaggctgctgagctggcagcagaagctgtatctcaagcaggaaaaattgtaactatgggtgatcctttgccaataagtcagttggtagaagctggcccagagggatgtttgaaagcaacccgagagtcttctcagcaagttggattattcaaagacattaccagagatatggtgaacattaatgtgagagatattcctgaaacttcttatacacataacagagacattttatctggtggcatttc

SEQ ID NO: 2701 - DNA, 392 bp, Glycine max
  Clone ID: LIB3028-031-Q1-B1-A11
agagaagctctgggatgacgttgttgctggccctcaacctgagcgtggccttggcaagctcagaaaactcaccaccctcaaaactattgatgaaggagacagtagcaagctgcagaagacgttgtcgatgccgtcgacaccgacaaccccgatgactcccacgactccaacgacaccgggatccgcgcgtaaagctgacaacgtttggaggagcgtcttccatcctgggagcaactccgccacaaagaccatcggtgctcagatgtttgacaaaccacttcccaacactcccactgtctacgactggctgtacagtggggagaccagaagcaggcaccgctgaaaggataagctaagaaaaccgtgggttgcatgtaaatattgtcgttttt

SEQ ID NO: 2702 - DNA, 358 bp, Glycine max
  Clone ID: LIB3028-031-Q1-B1-A2
gaggacatgtgccagttgtgcgaccatattgcttccaatttggtcttcttcaccctcttacggtttgcatcagattcccctaattcttgcttgattttgcgctttcgctatattttcttcaaaatgactcaagatctagagatgaaggatcgctcaacgccttcgaactccgtttcttcgcctgctccatctactctgcagcatttgatggagatagcgtctcttatcgagaccggttcgtactcgaaggaagttcgtaggattgctcgcgctgttcgccttagaattgcgttgaggcggaaattgacagcatccgctatctcttcttttctcgatcatgttctcactcctggctctg

SEQ ID NO: 2703 - DNA, 203 bp, Glycine max
  Clone ID: LIB3028-031-Q1-B1-A3
gaatacacgcaatcaggacacatccatgaagtgcaggcacatgccatgtagcagcgttggtgggctaatatgcatcacgagcttcgcagatatgtcctcgtacgtactgtgtcgtctgcatctacgtgttcgctgtggatgatcgtccggtgttgtagcatcatgtggcacagctgctggagggtcatcgtcaaatcgattgt

SEQ ID NO: 2704 - DNA, 375 bp, Glycine max
  unsure (1)..(375): unsure at all n locations
  Clone ID: LIB3028-031-Q1-B1-A4
cttcacaccattctcacacaacaactttcaaactctgagaaagaatggctgccaacacattgatgagtactgctatctcagccttcccatctctcctttcttcctcaaaatccagatttgccaccgcagttcctctttctagctttggtgtcaccaatgcctcttcttctcgcttttctatgagtgctgactggatgccaggccagcctagacctccttaccttgatggttcagcacctggtgactttggattcgaccctcttcgtcttggtgaagtaccagagaatcttgagaggttcaaagagtcagaactcattcactgcanatgggccatgcttgctgttccagggattttggttccagaggcattgggct

SEQ ID NO: 2705 - DNA, 397 bp, Glycine max
  Clone ID: LIB3028-031-Q1-B1-A6
gttaccggattggcttagagcaccgacaggttatacttatttgatgaacatgatgaaagactcggagagaaagagctatggatcgctgttgaatactttttatgagcttgagggagattatgaggagcattacaagaaggccatgggaactaaaagttggagtgttggaccagtttccttttgggtgaaccaagatgctttggataaggccgatagagggcatgccaaagaagagcaaggggaaggagaagaagggtggctcacatggcttgattccaagacagagaactctgttctctatttgagttttgggagcatgaacaagttcgctactcgtcaacttgttgaaatagctcatgcccttgaggattcagaccaagggttcatttgggtgggt

SEQ ID NO: 2706 - DNA, 299 bp, Glycine max
  Clone ID: LIB3028-031-Q1-B1-A7
aataaaggattgaaataagaacaaaaacaagttaaacataagttgataaacatgatgaaagactcggaagagaaagagctatggatcgctagttgaatactttttatggagcttgaaggaaattagggcggcccattacaagaaggccattggaccgggaagttggtttggtggaggagtttccatgtgggtgattttccatactttggataatgccgagacttggcatgccaaggtccagcatgggtaccgagaagaatggttgctcacatcgcttttctccaaaacagagaactcgg

SEQ ID NO: 2707 - DNA, 390 bp, Glycine max
  Clone ID: LIB3028-031-Q1-B1-A8
gcaaacctcatactactgctagatatgctacaaagaaattgctggaacgtagagagcagaaaccatcaagcctatcagatgctattgttgaacacacacagatattgaaaactaggtccaagtgcttgaaagaggttcttcaaaaaagtgggtgggatgtgcttgaatcgtgtgcgggtgtgtctgttgtggccaagccctctgcctatctcaacaagactattaagctgaaaatttcacttgaaggtgaagcaagccacggaagtgccactaaggaaataaagctcgatgactctaatatcaggactgtcattcgcaaagccactggattatgcatcaatagtgggtcatggactggaattcctggatactgtcggttcaagattgcac

SEQ ID NO: 2708 - DNA, 360 bp, Glycine max
  unsure (1)..(360): unsure at all n locations
  Clone ID: LIB3028-031-Q1-B1-A9
atttcaacgcaaaagtctccgattttgggttggtaaaacttgctcctgaaggggaaaaagcatctgtaatgacccggcttgcacggacgtttggatatttggcgccagaatatgcagtgacaggaaaaatcactaccaaagcagatgttttcagttttggggttgtgctaatggagttgttgactggattaatggcacttgatgaggatagacctgaggaaagccaatacttggcagcatggttctggcatataaaatcagataagaagaaactaatggctgctatcgatcctgcccttgatgtanaagaagaaacatctgagagcgtctccatcattgctgagctagcaaggcactgca

SEQ ID NO: 2709 - DNA, 379 bp, Glycine max
  Clone ID: LIB3028-031-Q1-B1-B1
agaaaaccaaagttgatagagtgctgatgtgctggtgggccttcacaggtctcacacacattattcttgagggttattttgttttctctcctgagtttttcaaggataaaactggcttctacctggctgaagtttggaaggaatatagcaaaggggattcaaggtatgcaggaagggatgcaggggtagttactgttgaaggaataacagcggttttggagggtccagctagccttctagcagtatacgctatagctactgggaagtcatatagctacatacttcagtttgccatttctttgggacagctatacggaactgctgtttattatataacagcaatcttggaaagtgataatttttctacaaactcgtttta

SEQ ID NO: 2710 - DNA, 320 bp, Glycine max
  Clone ID: LIB3028-031-Q1-B1-B11
agccaggaaaggacagcccaacttctatgaacaaagggaggtctgtacgtggggtttcagaaacagctgaaaagttgggcaatttgtctgtttccagtcgaagacaatcaatggggcaacctcgtcctcctccaccaatgaaggctggaggcaattggatttctgaatctggaaacttcatccttgggcccgcacagcagattccgactggaagaacttttgcaagaaaagttgcctgatgacaagtatgaatgagtaaaatgtgagtgatgatgattctataatgctcaatgatgtgattgtgaatgtatcctaatatc

SEQ ID NO: 2711 - DNA, 399 bp, Glycine max
  Clone ID: LIB3028-031-Q1-B1-B12
tccatggctagcctcaaggttgcatttttggctgcagtgctctgcatggttgtggtgagtgcacccatggcacatgcagctatcacgtgcgggcaggtgacgaatagcctgatcaattgcatcggttacctccagaacggaggaacgccgccgtcgggatgctgcaacggagtgaagagcctcaatgccgccgccaagaccaccgccgaccgccagacggcgtgcaactgcctcaagtcggccgccagccaaatctccggcttcaaagccaacaacgccgcctcgctccccggcaaatgccgagtctccatcccctacaagatcaagcactccaccaactgcgctaccatcaaggtttgaagagaaagtcatggacgcaggaaaccgggaactactcac

SEQ ID NO: 2712 - DNA, 369 bp, Glycine max
  unsure (1)..(369): unsure at all n locations
  Clone ID: LIB3028-031-Q1-B1-B2
ctcacanacacacactgaactaaaaaacatcaaaagagacatggctgagcaaaccttcatcatgatcaagcctgatggcgtccaaagaggccttattggcgagatcattagcagatttgagaagaaaggtttctacttgaaaggtttgaaacttgttactgtggaccgtccttttgctgagaagcactatgctgatttgtctgccaagcctttctttagtggtttggtggattacattatctctggccctgttgttgccatgatctgggagggcaagaatgttgttacaactggccgaaagattatcggagccacaaacccagctcaatctgagcctggaactatccgtggtgactttgccattgacat

SEQ ID NO: 2713 - DNA, 400 bp, Glycine max
  Clone ID: LIB3028-031-Q1-B1-B4
gcgccgtttctgtgcttttactctgctaccttgtgacaatggtgagggttagtgtgttgaatgatgctcttaagagcatgtacaatgctgagaaacggtggaagcgccaggtcatgattacgccatcctcaaaagtgattataaaattccttttggtgatgcaaaagcatgggtacattggagagtttgagtacgttgatgatcacagagctgggaaaattgttgttgaattgaatggtagactgaacaaatgtggggttattagtccgcgttttgatgttggtgtcaaagagattgaatgttggactgctaagctgctcgcctcaagacagtttgggtatattgtgttgactagctcagctggcatcatggattatgaataagctaggagaaagaatgt

SEQ ID NO: 2714 - DNA, 379 bp, Glycine max
  Clone ID: LIB3028-031-Q1-B1-B5
ccctcatcttgcaaaattctctcagctaattcgctattttcttgtagtaaacaaagcatgcaagcatatccatttcaacatggccctcaaaactggttcagttgagatgttcttcttccccttcgtaggaggaggacatcagattccaatgatagacacagcaagagtgttcgcatctcacggagccaaatcaaccattctagtcacaccctccaacgctctaaacttccaaaactcaatcaagcgcgaccaacaatccggtcttcccatcgccattcacaccttctccgccgacatacccgacacagacatgtctgccggtcccttcatcgacacctcggccctcctcgaagctcttcggcagctcctcatccaacgg

SEQ ID NO: 2715 - DNA, 370 bp, Glycine max
  Clone ID: LIB3028-031-Q1-B1-B6
aaattacatagcctcagtaatctgagagagaaacaaaaacaatgaaggtttccattgccaagttccactcccttcccctatgttttttccttctcttggacttcagcacaaaacccctcctagcagcagaaccagagccagtggttgataagcaagggaaccctttggagccaggagtagggtactacgtgtggccactttgggctgatgaaggaggcctcagactatgccaggcactgaacagtgcatgccctctttaggttatccgtgacccttcattcattggcaggccagtttcattcttagcaccaggccgtgacgaggttccaacactcactgatctaaccattgagttcgctgtagtgacagt

SEQ ID NO: 2716 - DNA, 368 bp, Glycine max
  Clone ID: LIB3028-031-Q1-B1-B7
cgggaagcttcattgggagcatgaaggagacagaggagatgttggagttctggaaagagaagggtctgagttcgatgattgaaatggtaaacatggattacattaacaaagcctttgaaaggttggagaagaatgacgtgagatacaggtttgttgtggatgtcaaaggcagcaaacttgtcgatcagtaaaagaaagaaagtatactactagcacgacacacgcaacatccatccttccatcatgaagagtctggaaaagttattaattaattgagaactaaagctgtatttgttgttcactctaaaaaagaagctgtgttttgtttattaaaaagagtgctctgttttctctgttttggttacacg

SEQ ID NO: 2717 - DNA, 277 bp, Glycine max
  Clone ID: LIB3028-031-Q1-B1-B8
tttgagtgcaatgagtttctcaactgtaatatataagactcaaaatgcatgctttgtagaacaaagacgatagtctgttgtataatgtcctgtaagtgtcaaaatggactggttgtcctgtaaaggctattaggagtacaagcaaaaatgatgggggtatacggttaaatctgattgagttattcctttgccaatccatcttttttgtccctcttgtggctacccacaatgttgaagtaacacacaaaatgacaaattcatgtaaaaaaaaaaaaga

SEQ ID NO: 2718 - DNA, 393 bp, Glycine max
  Clone ID: LIB3028-031-Q1-B1-B9
aaagaaacaggtttcgcccgttacaacatcatcaagatcaacgctcttccgtcctctcttcaccgacgttggcattgcatttgacatgatgcttctcgctcacaacgccggcggcaaagagaggacggaagagaactggaagtggctgttcaaagaaacaggtttcgcccgttacaacatcatcaagatcaacgctcgtccttccatcattgaggcgtttccaatctaacgaagaggaagccactacacttcatgtgcgtggttttatgttgcatgtgttgttattattactaacagctatgtgatcttcgtgtgatgtggttttcatccctacccgtgttatgtttgtgtattaaataaaagtatgaaacgccccaccaccaagtaatatgg

SEQ ID NO: 2719 - DNA, 369 bp, Glycine max
  unsure (1)..(369): unsure at all n locations
  Clone ID: LIB3028-031-Q1-B1-C1
ctaacactcattaattgcaagaatggcacttcgttgcttggtgatgtccctttctgttctcttcactcttggtcttgcgagagaaagccatgccagagacgaagatttttggcatgctgtttggccaaacactcccattccaagttcattgcgagatcttctaaagcctggccctgcaagtgttgaaatcgatgatcaccctatgcaaattgaagaaacacagtacccgaaaaccttcttctataaagaagaccttcatcgaggcaaaacaatgaaagtacaattcagcaagcctccctttcaacaaccatggggtgttggtacatggttaaaggaaattaaagacactactaganaaggatatagttt

SEQ ID NO: 2720 - DNA, 389 bp, Glycine max
  Clone ID: LIB3028-031-Q1-B1-C10
agcaccggtgacatgggagctgatttttatcatcgatacaagggtgacataaaaatagcgaaagaaattgggctggactctttcagattctctatctcatggtcaagaatattcccaaagggcaagggagcagttaacccccttggggttaaattctacaacaatgtcatcgatgagatcctagcaaatggtttaaaaccttttgtcactctttttcattgggactttccacaagctcttgaagatgagtatggaggattccgtagtcctaaagtagtggcggattttcgtggctacgcaaacttctgcttcaagacctttggagacagagtcaaatattgggtcactttgaatgaacccttatcatttagtctcaatggctacaatgg

SEQ ID NO: 2721 - DNA, 322 bp, Glycine max
  Clone ID: LIB3028-031-Q1-B1-C11
cgaagattaaaaaaaaaaaaaacaagcctgttcaactcaaagacctgataattgttccttttgtctgagctgaaagacttgaggacttctaaagatgttggcccttcatcctgcaaaaaagttatcatttaatcgaccaattaataatggggatttggttattgtttatgaaaggcatgacattatgaaggctgtaacagtgtctgagggatcagtcctgcaaaatcgttttggtgtttttaaacattcggaatggataggaaagccgtttgggtctaaagtagtcagcagtaagggtggctttgtgtacttgttagctccc

SEQ ID NO: 2722 - DNA, 358 bp, Glycine max
  Clone ID: LIB3028-031-Q1-B1-C12
ctttagatgctttgatgatggacaaatcacatcaaatcgcatcttctacacgctcagactaatgtctgcatcatggacttgttgacactgatacttccatggtcttggcagcttatgagtactacaggcatgacggtgttgtacggaatgtgattgacatgtatgttggagaactataaatgattagattcaagcacgttctcaaagttgatcaagcctagcttgacactgtgactccagatattatagggcgtgtcaaaatagtcatttcagcatatccatgatcatttgctacactgttgcgggtggatacattcactttttgtgctaatgtgcagattgacaatcgagcttatga

SEQ ID NO: 2723 - DNA, 349 bp, Glycine max
  unsure (1)..(349): unsure at all n locations
  Clone ID: LIB3028-031-Q1-B1-C2
ctatggcttattacagatttcttgatgtgttttcatggattcaaaatcttccaccaatcccagcatggaagacatcgtccatgtccctgagcatatgttccacaaactcagctcaaccatctcttaatctcaccatagcanaaatatcatcaccaatcctcaagaatctccttatccattgtggcagacttcaatattcccatctctctttggacctctaaacctttcaaacctagcacgacaaccatgaggttaacagatgatgaaactctttccaatctccttgtgaatttcatacaagagatccttcattatggcagcaacaggcacagtagtccctatatcaagt

SEQ ID NO: 2724 - DNA, 292 bp, Glycine max
  Clone ID: LIB3028-031-Q1-B1-C3
caatatcttactagaaatgtcccggcgagtaattatgaagtcgtgctgctccaccagtgacatcctggcagtgatcctccaagtgactgagcatatgttgcaccacatgaactcgaccatctcgtaacaccatcataatgagaacatcgatgtgagggaatcttaatctcatgaagtactgccagctccttgcttcttaccaacactctgtggtatccttcatccaacttatgtattcttctaactatgatgttgacatgtacatagacactgtacatacaccatgcaaatt

SEQ ID NO: 2725 - DNA, 366 bp, Glycine max
  Clone ID: LIB3028-031-Q1-B1-C5
ctttcaattccaaattcagtctcacaaattagaatggctagccaatcaaacactaaatcagttcacgatttcacagttaaagatgccaggggaaatgatgttaaactcgccgattacaaaggaaatgtccttctccttgtcaatgttgcctcacaatgcggcttgactaagtcaaactacacagagcttaatcaattgtatgagaaatacatagggaaaggacttgagattctggcattcccgtgcaatcagtttggggctcaggagccaggaactaatggacagattgtggagtttgcatgtactcgcttcagaactgagtttcccattttcgacaacgtggatgtgaatggtgacaatgctggt

SEQ ID NO: 2726 - DNA, 363 bp, Glycine max
  Clone ID: LIB3028-031-Q1-B1-C6
gcatcttcttctggtagtttagacacctctgcaagtgcaaactccttcaccaacttcaccttctccacacaccctttcatgaccacttctttctctgaccttcttgcttctcccacagacaacaacaaaccaccacatggtggtggtggtggtttgtctgagagaactggctctggtgtccccaaattcaagtccacaccaccaccttctctgcctctctctccccctcccatttctccttcttcctacttttctattcctcctggtttgagccctgctgagcttcttgactcacctgttctccttaactcctccaagattctgccatctccaacaactggagcatttgttgctcggagcttc

SEQ ID NO: 2727 - DNA, 377 bp, Glycine max
  Clone ID: LIB3028-031-Q1-B1-C7
ggcaaagctatttttgaaacaggcaaagcaatacgcagatgcaagaccaagctatcctccacaactcttccaattcattgcttccaagactccctctcactacctcgcttgggacgtcggcactgggagcggccaagctgccaaatctttagctgcaatatacaggaatgtgatagccacagatgctagtgacaaacaacttgaatttgcagccaagctcccaaatgtgagataccaacacaccccttcaaccatgtcgacggccgagcttgaacaaatggtggcatctgagggaaccatagaccttgtgaccatagcacaagccctgcattggtttgaccgcccaaccttctacgaacaagtgaagtgggttctca

SEQ ID NO: 2728 - DNA, 344 bp, Glycine max
  Clone ID: LIB3028-031-Q1-B1-C9
ggaaaaacacacctaggcgctgttcaaacctggccgaacccgaaacatcactctatataaataatgcaaacctaaaacagaggttcgtccctcttactaacactacggtttacagagaagcgaagaggcgcagccgtagcagtaactcgtggaattgctagcaatggcgaggatcaatgtttacgagctgaggcagaatacgaaggctgatctgttgaatcagctgaaggacctcaatgccgaacttgccatgcttcgtgttgctaaggtcaccggcggtgcacctaacaagctctctaagatcaacgtggtgaggttgaacattgcccaggttttgacggtga

SEQ ID NO: 2729 - DNA, 379 bp, Glycine max
  Clone ID: LIB3028-031-Q1-B1-D1
taaacacacccccgcctggagctactgatttgtatttccccaccaagtattctcaatccacattggggcaatttaaatcctgtttttggaagcagtggctgacatactggaggagtccagattataatctcgtcagatattttttcaccttggcttgtgccctcatgatagggacagtattttggagaattggcaaaaacagggagagctcagctgatctgacaatgattataggagcaatgtatgctgctgttatttttgttgggattaacaattgtcaaactgttcaaccaattgtagccgttgaaagaacagtgttctatcgagaaagagctgctggaatgtatgctcctttgccttatgccttagcacaggtctt

SEQ ID NO: 2730 - DNA, 412 bp, Glycine max
  Clone ID: LIB3028-031-Q1-B1-D10
gtagaacccaagccacagccagtctctgctccttcaccaaaggtgagcactaagttttctgatgtgttggcattcagtgggccagcacctgagaggatcaatggaaggttggccatgattgggtttgtggctgcaatggcagtggaagtagccaaagggcaaggtgtgttagaacaaatatccaatggtggcatcccatggttcttggggacaagtgtggtccttacccttgcttccttgattccactcttccaaggtgtcagcgtggagtctaagtccaaagggttcatgtcctcagatgcagaactgtggaatgggagatttgctatgttgggtttgattgctctggcttttactgagtatgttaagggtagtactttggtataattcagtcatgaaagcacaccacaat

SEQ ID NO: 2731 - DNA, 409 bp, Glycine max
  Clone ID: LIB3028-031-Q1-B1-D11
ggactgcacaaacttgcttactgcaataactggtgataactgctgcctcaattcttcagtttttgatcaattcattacgaatgaacctcagccaacagcaacaaagaacatgatgcacttggctcagattgttagaagtggggttctggcaaaattcaattacggaggaaaatctcctcaaatctataacctttccaatatcccccacgacctccctctcttcataagctatggtggcgaagatgcactcgctgatgtaattgatgttaggaatatgctagctgacttgaagttccacgatgaagacaaactaagtgttcagtacatcaaggaatatgctcatgtagactacattatgggagtcaatgccaaggacttagtgtacaatggtattacttcatttttcaag

SEQ ID NO: 2732 - DNA, 370 bp, Glycine max
  Clone ID: LIB3028-031-Q1-B1-D12
gcaaaaatggcacctgcaacactgtctctgtctctcctcctcctgttctcactcagcatcgccgtaaccgttagatcgagcgactacgactacgattgtgtgtacactgcatacgttagaaccggttcggtgttgaagggcggaacggactctaagatcgggctgaagctgtacgacaagtacggctactacatctacattaaaaacctcgaagcatggggcggcttgatgggcaagggctacgactacttcgagcgcggcaacctcgacatcttcagcggaaggtgaccctgtcttgacggacccgtctgtgccgttaacgttacttctgacggatcggggttctcacacggctggtaccttaactacg

SEQ ID NO: 2733 - DNA, 379 bp, Glycine max
  Clone ID: LIB3028-031-Q1-B1-D2
cacaacttattaatataatcgtggctaaaatggtgataactatatatattacttttatttatacatttaataatagaataagtatattgataaaaaataatatatatatatagatatatatatatatatatatatacatatatttataattatgtattaaataatataaacatattaaagtttagagaaatagacataatatttacaagttgaatttaattacaaaatattaacagtgtaaagaaactttacattcatctcattagtcatttttcgtgtactataatattcacatatgaaagacatgaatatagcataatattaagatattgtctaatccttttggctaattatgtgtgcgtcatttaaaatattttct

SEQ ID NO: 2734 - DNA, 369 bp, Glycine max
  Clone ID: LIB3028-031-Q1-B1-D3
attgaagcagacaccttaacaaggaaggaagacacagtagtagaaaagttaagcggtgcactggatttgttttaagagaagactgatggaagaagaagaagaaaattgagggaggatgtggctcgagattatcttcggtttggtcatttacagattgttccggcgcttcttctacgacgacgacgttttggacatcgaaggatcggattcttctgctcttttctccgtctcggataggtctctttctttcacctacttttcctttccgattatggcactaatcgatttcaatttcttttcaggcttaaaaaactttgacgagcaaatgtgtatgtgggtcttcggattcccgatgccgatactgcttct

SEQ ID NO: 2735 - DNA, 358 bp, Glycine max
  Clone ID: LIB3028-031-Q1-B1-D4
aagaacttggctttgcttccttcaaagtgaggtctctaagtttcactttctttgcataaggcaatctcctttctctgtgactctgagtatcgtatcgttttattattatttctaattctctcttatcatgtccactgaatatgtctccgtcgttggatcttcctctcaacggtggcttcaattttgatctaagccgaagatacgcaatgcttcaacacaatggcctcaaagcctcagtctttctcaatactgggaccactagtgtcagtttagttttccatgatggtgtcattcttggtgctgatactagggcatctgaaggacctatagtggctgataataactgtcagaaaattca

SEQ ID NO: 2736 - DNA, 379 bp, Glycine max
  Clone ID: LIB3028-031-Q1-B1-D6
aactcagagcacaacaagggtgatcatcaacatcatcatcaatgcgctcctccaatgagcccaagaatctctttctcaaatgatttcgtggatgtgaaacaagccatgaagcaagaacaaagaggctcatccagatcagacgcgccagtatcttcagatttcgagttttcagtggcaaactactccatgatgagtgctgatgaacttttcttcaagggcaggttgatgtccacgtataacaaggacaattgcaacaacaacaacagaaacaaccacatgatgatgatgcagcagcagagggccaccagcaccaccacgaccactctcaaggaagagctccttataaatgacgatgatcatgatcatgatttttctctca

SEQ ID NO: 2737 - DNA, 275 bp, Glycine max
  Clone ID: LIB3028-031-Q1-B1-D7
ggactccatgaggaagagggtgagtatgaacaacctcacgcagtacgagctccctcgcgacgccgccaatgccacggacgacgtcgctgccggctacgcctccgctgacgatgccgctccgatagattccggcaataaccgcgaccgcaagcgacggattccatgggctgaggaagagcacaagctattcttggtggggttgcacaaagtggggaaaggtggttggtgagggatctcaaggaacgatgtcacgacgaggacgccaacacaggttg

SEQ ID NO: 2738 - DNA, 357 bp, Glycine max
  Clone ID: LIB3028-031-Q1-B1-D8
cttgttttttgcaaattcgcaacccacacagcaagggaaggtgcgagtgagtgagtatggcgtctccattatcagctcaattggttcaatgtcagaactcacttccacctcttcagggtaattttagccaagatgtgtctaaggttcaaaggtcgcgtgtggtatgttacggtaccagatcaccgcttggttattatggtaaagcattgacatcaagatcacataacgccctgaggttttctgtcacgcgacaatctgaagcacggtcaattggatataggagaatgacatgtgtcaatgctgcagacaatgttgtagagcttcaagccaaggtgacaaccaagtgtttctttgatg

SEQ ID NO: 2739 - DNA, 352 bp, Glycine max
  Clone ID: LIB3028-031-Q1-B1-E1
attcaggtctgtcttagtcatgccccttggggccttgctgttgttgtgaagctcttgtggggttcccttccgcttcataaaatctgtcataagatagacttcgtcatgcacatagatggaataagaaggaagaacgatacgaactgtgagcttctgattctaagaaaggaactgattgatggaggacaagtatagtctaaacaggcaaaggagtggaatatggaattgcttgagagatggagactttgaagaggaataagtttgggctgttttcaaggaaaagcccgattacatttctggaattcacaagccaaggggaaaaggatcatcttctcctcttgactgtcctagg

SEQ ID NO: 2740 - DNA, 351 bp, Glycine max
  Clone ID: LIB3028-031-Q1-B1-E10
ataatttctattacttctgctgaaatcattagtaaataaacagcaagcaatcttctctaaaatttgagctaaagggttaacaccatagacgaaacttattgcgctgaatctggaattctggattctgttcccccattcaaaatattgctattcgaaatctgaatatatgagtgtgctagggatcatcttctatgcttgctgtcacaagtattctgctaattatttttgtttaaaaaacccatgcatggaggacctgggctgggattacatacttgaaatagaatgaagcatattgcttgtagttcacaattcaaattaagtttcaaatttttgtttaattcaaatactaat

SEQ ID NO: 2741 - DNA, 397 bp, Glycine max
  Clone ID: LIB3028-031-Q1-B1-E11
gatagagagagacgcttcgcaaatctcaatcgaatctcagaaaaatgagagaaatcatcagcattcacataggtcaggccgggatccaggtcggaaactcctgctgggaactctactgcctcgaacatggcatccagcccgacggcatgatgccttctgactccaccttcggtgtagcccacgacgccttcaacaccttcttcagcgaaaccggatctggcaagcacgtcccccgtgctgtcttcgtcgacctcgaacccaccgtcatcgacgaggtccgctgcggcacctaccgtcaactcttccaccccgaacaactcatctccggcaaggaagacgccgccaacaacttcgcccgcggccactacaccgttggcaaagagatcgtagatctgtg

SEQ ID NO: 2742 - DNA, 318 bp, Glycine max
  Clone ID: LIB3028-029-Q1-B1-E2
cactagtattatgaatctatcagtgaggtcatgtgaaagctatggttaggatcaataagggtagttctaagttggtctttaaaatgttacagctgctttctgtttctttctcattttattattcctggcttgaaattctatacttttaattcctcattaggcatatggttgcctccttgtttaatttctctgtctcttcataggatgattgatatcaaagttgatggatggctattacctatagtcaatgctacactacatgtctcataatttatttagtttagttgctctgcctcaactgcttaagtgggcttatat

SEQ ID NO: 2743 - DNA, 387 bp, Glycine max
  Clone ID: LIB3028-027-Q1-B2-D12
ggaggcgactatctgtttgcttttcgaatgataatggttctatttcgacgagaattctctttttgtgattcattgtacctttgggaggatgttgatgacaaatcagaggaatctaaaggaagattaaagtcattgcgccactatggaaagtacgagagagaaaatatgaaaaatggaggaaagaatggtgaagatcctccccttcccatatctgtttttcttgttgctagtgtgcttaaagacaaaagcacaatgttactccagcaagcgcgaggcttggatgatgttgtcaagatattgaatgatgtaaatggaaatcttgatgccaaaaaagcttgtgtggctgcattaaaacttcacaagaaatatttgaaaaaggccaagaat

SEQ ID NO: 2744 - DNA, 368 bp, Glycine max
  Clone ID: LIB3028-027-Q1-B2-D2
agaaaaactactcgtcgtggttcctcaaaatacatggaaaagcaactagcattcacagggttgttgagcaataaagctgaagaaaaccctgatttctttaactggaacagagttaaagtacggtactgtgatggagcatctttcagtggagatagtcaaaacgaggttgcacagcttcaatttcgaggacaaaaaatatggcaagctgcaatgcaggaattattgttcaagggaatgcagaaggccaaccaggcccttttgtctggatgctctgcaggtggtctggcatctataatacattgtgatgagttccggagcttgtttcctacatctaccaaagtgaaatgtttgagtgacgccgggttttt

SEQ ID NO: 2745 - DNA, 357 bp, Glycine max
  Clone ID: LIB3028-027-Q1-B2-D5
gcgtctggtgcactgcgagctgcgctcggcgaggcccgcggttcggccgacggaaccggccggtccggttcaggttacgatccccacacccaaacccaaagccgcggaggcggaaggcgcgaacatcgttttgcagccgcggttgtgcactctcagatcctacggttcggatcgagccggggtgcttatcaagactcgcaaggagggtgaccatgatgacgtgtcacccttcttcgccgcgctttccgactacattgagagctctaagaacagtcaagattttgagatcatcgctggtcgtcaaactatcatggtgtatgcagcgacggtgacaatggaagtggtgacagggaactc

SEQ ID NO: 2746 - DNA, 342 bp, Glycine max
  Clone ID: LIB3028-027-Q1-B2-D9
attgattccaagtggctcccgccgagcttgaagcaatgttaagtgctcaacaaggcatatccgatgctgctgttgttcgcatgagagagtaatctgcacgggaaagtcaagtttcatttgatgtaatagtcaaatggctctgatatagccgacgatcatatcatgaactacatttcacaaccaggtggttttttacgagtagaatatgtaaagttttcttcacggactctattccttagacaccctcaggtacggattcgagtatcaggtattatctgcgagacttaaggaatgtttagtagtgggtatttacgtccaagtatgatacacacgaacatcgtg

SEQ ID NO: 2747 - DNA, 379 bp, Glycine max
  Clone ID: LIB3028-027-Q1-B2-E1
cccccaccgagtcaccaaccatggacgttaagtttggcaccacattaatagttattttctccgtaatgtggctcatgagggtgaatgccattgacccttgtgcctctcaaccggataattcggacctcaacgtgattcccatctacagcaaatgctcaccgttcaaaccacccaaggcagacacatgggacaacagaattataaacatggcctcaaaagacccagtccgagtgaaatacttgtccaccttagtgagtcaaaagacagtctccacggccccaatcgcttcgggccaggccttcaacatcggcaactatgtggtgagggtcaaattgggaacacccggtcaacttttgttcatggtcctcgacaccagcac

SEQ ID NO: 2748 - DNA, 147 bp, Glycine max
  Clone ID: LIB3028-027-Q1-B2-E10
gcatgggcgatgccacgtttataggggttataaaagcaaaaactgctctcaatagctccttccagtgaacagatcatcaatgagggggagtgcgatcgctaactcatatgtctaggacgctgacagccacagagaaactgcctgtta

SEQ ID NO: 2749 - DNA, 388 bp, Glycine max
  Clone ID: LIB3028-027-Q1-B2-E11
caatatattccattctctctgtgtatttccctacctctcccttcaagatgcagatcttcgtcaagaccctcaccggcaagaccatcacccttgaggtggaaagctctgacaccatcgacaacgtcaaggccaagatccaggacaaggaaggaatccccccggaccagcaacgtctcattttcgccggaaagcaacttgaggacggccgtacccttgctgactacaacattcagaaggagagtactcttcacctcgtcctccgtctccgtggtggcatgcagatcttcgttaagacactcaccggcaagaccataaccctagaggttgaaagctccgacaccatcgataacgtcaaggccaagatccaggacaaggagggtatcccccc

SEQ ID NO: 2750 - DNA, 383 bp, Glycine max
  Clone ID: LIB3028-027-Q1-B2-E12
gctctgcgagatcttcattcgccgattttaaaagatgagtaagcttcagagtgatgctttgcgtgaagccatttcaggaagcatggccgattccaaggagaagaatcgcaaatttgtggagaccatcgaactccaaatcgggttgaaaaactacgatccacagaaggacaagcgtttcagtggcactgtcaagctgccccacatccctcgccccaagatgaaaatttgcatgcttggtgatgctcagcatgttgaagaggcggagaagataggactggactggatggatgtggaagccctgaagaagctaaacaaatctaagaagttggtgaagaaactagctacaaagtaccatgcctttttagcttctgaagcagtcatta

SEQ ID NO: 2751 - DNA, 362 bp, Glycine max
  Clone ID: LIB3028-027-Q1-B2-E2
attgaagttaaaagccttagccttccctacaactccaaacacaaagacatcatcatccatggctgcctccgtctccactgtcggagctgtcaacagagctcttttgaacctgaatggttctggagctggagcttcagctcccagttcagccttctttgggaccagcttgaagaaggttattgcctcaagggtccccaacagcaaggtttccggtggaagcttcaagattgttgctgtagaagagaagaaagagattgaagagacccatcagaccgacaaggacagatggaagggtcttgcctatgatatctcagacgatcaacaagacattacaagaggaaaaggtttgggttaaccccctt

SEQ ID NO: 2752 - DNA, 320 bp, Glycine max
  Clone ID: LIB3028-027-Q1-B2-E3
catttgtcatagcaacaaacaggcatcttagtgtgctccaccctatttataaacttttgttgcctcactatcgtgacaccatgaacatcaatggactcgcaagacaatcactcatcaatgcaggtggcattattgagcaatcatttctgcctaggccatttgctgtggagatgtcttcggcagtttacaaggggtgggttttcactgatcaagcccttcctgcggatcttatcaagagaggaatggcagtggaggattcatcctctccctatggccttcgccttgtgatagaggactagccttatgctgttgatggacta

SEQ ID NO: 2753 - DNA, 334 bp, Glycine max
  Clone ID: LIB3028-027-Q1-B2-E9
ctcgaatcgagtttaaagctgaacatgagggaaaattccactcattctacccagttgcgaccatccttagttacctgaccaaggcgcctctggttccaccgggtacaccagtggtgaacgcgttgtcaaagcaccgagctatgctggaaaacatcctgagggcttgtgttggattagctcctgagaacaacatgatcctacagtaccagtgaagttcacagtcttaagagtaacggttcgggatagtgtacttgaatctgatcaaaacttaactcacatcgcataacccgcttttctgttatatacctcaggcaactgtgaactttgacgatcg

SEQ ID NO: 2754 - DNA, 370 bp, Glycine max
  unsure (1)..(370): unsure at all n locations
  Clone ID: LIB3028-027-Q1-B2-F1
cacaacanaaaaagacaacccagagagcgcgtcttaataaacgctcttctctgaaaacccccatttcttttcttctttcttcttctctttcgcttcttcgatcttcgatcttcgtcgctgaaaatgagagagtgcatttcaatccacatcggccaggccgggattcaggttggaaacgcctgctgggagctttactgcctcgaacacggcattcagcctgatgggcagatgccaagtgacaagaccgttggtggaggtgatgatgctttcaacaccttcttcagtgaaactggggcaggaaagcacgtgccccgtgcgatttttgtagatcttgagcccactgtgattgatgaggttaggactgggacat

SEQ ID NO: 2755 - DNA, 391 bp, Glycine max
  Clone ID: LIB3028-027-Q1-B2-F10
aactcaaacgaatacgttttctctttctcttcaatttcacccttattagcatagcatattcatttccctttcttgaatcgttcttaactgcgagaggggatatcagagaagttgattggcctcccattaataacagatctgaatgatctgatggagtctaaaggtgggaagaagaagtcgtctagtagtaagtcgtttttgtacgaagctcctctcgattacatcattgacgacgttcgaccacaccgtggaatcaagaagttcagatctgctgcttactccaactgcatccgcaagccatcctgagattccctacgtcgtgtgaggacgtatcccccttagtcctgcatctgctatatttttctagtctcttctcttcccctttttcttg

SEQ ID NO: 2756 - DNA, 388 bp, Glycine max
  Clone ID: LIB3028-027-Q1-B2-F12
gtttattggacaaatagcaaaattatgtggtggtggaggaggtggaaggccaaattttgctcaggctggtgggaggaagcgtgagcatttggcaagtgcccttgataaggctcggtcagagcttatagccactctatgtgaaaaacggaattgaatttaagtacacttagcagatagatctttttatgctaaagcagcacaaaatattgattctctgttgtcgaagaattcatcacaaagacagttcacaagcaaaatgggcggaagctgctgaagttttaacgagttttcttgcaattccagggggcatgtactttaactttatgatagtatagaccatttgttcgtgtgactttattctcctgacaatctggcctgcattcacaca

SEQ ID NO: 2757 - DNA, 356 bp, Glycine max
  Clone ID: LIB3028-027-Q1-B2-F2
gcaaagctcatccttgagttaaaaaatggcagcagcttcttccatggctctctcatccccatccttggctggcaaggccgtgaagctgggcccatcagccccagaagtgggaagggtgagcatgaggaagaccgtcaccaagcaggtctcctcaggaagcccatggtacggcccagaccgagtcaagtacttgggcccattctctggcgagcccccgtcctacctaaccggtgagttcccaggcgactacggctgggacactgctgggctttccgcagacccagaaaccttcgccaagaaccgtgaactcgaagtgatccactccaggtgggccatgctcggagccttgggctgcg

SEQ ID NO: 2758 - DNA, 372 bp, Glycine max
  Clone ID: LIB3028-027-Q1-B2-F3
cagaaagtcattccctagcaaatctcctggggaagcatctacagagacacctgccaagaagcaaaaacaaacttcccaatctgggaaaaagcaaaagcagtcttctgatgatgatgaggatgataaagctgaactttcagatgcaaaaggtgtttctcaggaagatgaagatgttgcagtaccgaacaatgaaagtgatgatgaggaaagtagatcagaggaagaggaagagaaatcaaagtctcgcaagcgtacttccaaaaaagctgttaaagagagttcagttagcaaagctgatagaacctcatctgtcaagaagacccctgtgaaagatgccaagagcattgaaaaaactaaaaagaaaccaacttt

SEQ ID NO: 2759 - DNA, 362 bp, Glycine max
  Clone ID: LIB3028-027-Q1-B2-F5
gctagcaccacattcacctgaggcttccaaagcaatggcttcccttgcagcatccactgctgctgcttcccttggcatgtcacaaatgcttggaaaccccatcaacttcagtggtgccacaaggccagctccatctgcttctagtcctgcctccttcaagactgtggctcttttctccaaaaagaacgctacaccaacacctccaaaaaaagctgctgctgctgctcctgccaatgatgagcttgccaagtggtatggtcctgacagaaggatcttcttgcctgagggtctcttggaccgatccgaaatcccagagtacttgaccggagaaatccctggagactatggttatgaaccatttg

SEQ ID NO: 2760 - DNA, 392 bp, Glycine max
  Clone ID: LIB3028-027-Q1-B2-G1
cttccaacaaattatatttttcttacaaaaaaaatggcaggtgaggtggtgaagaaggaagagtctctcaacctgaaagtcactaacaagagccatgttcaatcagaggagaaaattggaagaaaagagtaccaattggtcacttttgatcttccctacttggccttttactacaaccagaagctcttgttttacaagggtgaagatttcgagggcatggtccaaaaactcaaagttggacttggagtggtgctgaaggagttccaccaacttgctggcaagttagggaaagatgaagagggggtgttcagagtggagtatgatgatgacatgcttggtgtggaggttgttgaagctgttgtagctgatgatgaaaatggggtggaagattc

SEQ ID NO: 2761 - DNA, 395 bp, Glycine max
  Clone ID: LIB3028-027-Q1-B2-G10
ctttagtgtggtctaaagaagtggaactctattcaactaatcagaattgcgtgaagatgctagttggaaataaagttgatagagattctgaaagggttgtgagcaaagaagagggtttagcacttgccgaggagttgggatgtctgttttttgaatgtagtgccaaaactcgagaaaatgtggagcggtgcttcgaggaacttgcactaaagataatggaagttcctagtcttttggaagaaggatctacagcagttaaaaggaatattctaaagcaacaacaacaaccccaagcatccgaatttggtggttgttgctcttaattgctgcaatgtgaacattgagtcataactagcgcatattggaatgttccctctgattcctgtatatgtaag

SEQ ID NO: 2762 - DNA, 390 bp, Glycine max
  Clone ID: LIB3028-027-Q1-B2-G11
gtggagagagacaattcaatggtctcgttgatgtctacaggaagacattggcatctgatggtgttgccgggctctaccgtggtttcaacatctcatgtgttggaatcatcgtgtatcgtggtctgtactttggattgtatgattctgttaaaccagttgtcctcacagggtcattgcaggatagcttttttgccagctttgccctatggatggctcatcaccaatggtgcaggtcgtgcatcatatccaatacacactgttagaataataatgatgatgacctctggtgaagctgtccagtacaagagctccttggatgcattcacacagatgctcaagaatgatggtgccaagtccatgttcaagggtgccggtgccatcatcctccgt

SEQ ID NO: 2763 - DNA, 393 bp, Glycine max
  Clone ID: LIB3028-027-Q1-B2-G12
cttcccccaaattattcattcctctttttttccccattaacaatattagtcaatccaattaatttccatgaccatgtccataacactcttactccaagccaagccctcccacttgaaatggaaccagttaccttcccttccacgtcgcacaaggcccgaccgtttcactccaatacccgactcgaaacgccgcgtttcaagcgtcaaatgtatctcctcgtcgcggaagccggataacacgtttagtttgcagtccccgtgggaggttctggcgagcacggtgtcgaacacgctgaacgcgctgaagacaccggccatagctgcggtgttggtggggctgttatcaatgtacgatccaacttgcgccttcgcggcatctggagggagaatggg

SEQ ID NO: 2764 - DNA, 356 bp, Glycine max
  Clone ID: LIB3028-027-Q1-B2-G2
tggcttgtctaggtcttcaatcgaactcgccaggaacggaactttctcagattgacacacaccatgaaggaaagtggtttcgagaataatgatacaaagcaagctgctgctgatgtgttgtttctatattcaaaatttgcaatggcatgcattggatgtaaggctcgtccatgtgatttgaggtttcatttgatgaaggagatttcaggtatgccctcttctctaaatagggagtcaccacagaatgcagcatctcctgatgcaatgggtgagtcatccagcacaggaacagcaagacttgatagaacagacagttttcgtgcactctagttgagagtggactgtgaccatgtttt

SEQ ID NO: 2765 - DNA, 374 bp, Glycine max
  Clone ID: LIB3028-027-Q1-B2-G3
agaaaatggcaagaatatcaaattggtctcttgtcttcctcctcatctctacactactccacatagagcccagcctctcaagcccaagcccaagcccaagcccaagcccgttcataaaatcctcctgcagcagcacccagtacccagccctctgcgtctcatccctctccgtctacgcctccagcatccaacaggaccctcaccaactggttcagacagcactctccctctccctgaaccgcacccaagccaccaaaaccttcgtggctaactgcaacaaattcagaggcctgaaacccagagagcacgctgcactcaaggactgcgccgaggaaatcagcgacagcgttgaccgcctcagccggtcgctgaaa

SEQ ID NO: 2766 - DNA, 377 bp, Glycine max
  Clone ID: LIB3028-027-Q1-B2-G4
cacacgagccaaaacaacccattcggagtgaaggcattgaggcgtactccggctaaaccccattggacctttgggcgtaagaacaaggtcagcagtgcttaagcagataaaggaaatgtgaacgtgcaggaaggagccaatgatgaagtacatgaaagacgaagaattaaaacaccagctgatacacttcccctttaccttcacataaatttctctgtgccattttattatgatacaaattgatactattctgtatcaaatttcagtcagatattggctgtgtacatagggttatattattgatgcactgtatttgtattcaaattccaattccaaatggcgaacatatttgattgctgttagtttcccaggttatg

SEQ ID NO: 2767 - DNA, 235 bp, Glycine max
  Clone ID: LIB3028-027-Q1-B2-G6
ctctctctctctctctctagcgtgcacacaaaataatggacatgaaaaccatgcgactcatctcatgatccagaagtgagaaagggaccatggatcatggaagaagacttgatcttgagaaactatattgcaaatcactgtgaaggtgtttggaattcgttagccaaagcttctggtcttaatcgaacgggaaagagttgtcgactccgttggctaaacgaccttcggcctgatg

SEQ ID NO: 2768 - DNA, 388 bp, Glycine max
  Clone ID: LIB3028-027-Q1-B2-G8
ctgttgtacagaaaaatcttgagatcggtgaagttctagctgttgatgtttcttccattgttgctgtgacaagtgcagtcaatatccaaataaaatataatggtcctgcaagaaggacaatgtttgggggtgacaatgctgtcacagccgttctaacaggaccaggcattgtgttcatacaaagtttaccttttcatcgattctctcaacgaattgctagggcggtgacatcacccaacatgagggaaaatcccaagtttttcatacagattgcagttttcttttttctggcgtatgttgtcattgtatcttcgttaatattaacagatgtatgaaattcagtttggtttttctttagtagtttttacttttctcttatcctaacata

SEQ ID NO: 2769 - DNA, 388 bp, Glycine max
  Clone ID: LIB3028-027-Q1-B2-G9
caggccccttttgatcctgaaggactcctaagttcagtgatggctattgtcacctgcttgattgggttgcactatggacatattattgtccattttaaggaccacagagtgagaatcatatactggatgatcccaacctcttgtcttttagtttttggccttgcgttggacttatttggaatgcatataaataaggttctctactcgctcagttacacatgtgtcactgctggtgctgcaggcgtcctctttgtcggaatatacttgatggttgatgtctgtggatgtcgtcgcatgactttggttatggaatggatgggcatgcatgcattaatgatttatatccttgctgcttgcaatgttttcccaattttccttcaaggatttt

SEQ ID NO: 2770 - DNA, 373 bp, Glycine max
  Clone ID: LIB3028-027-Q1-B2-H1
gaatgagataatattttttgtggatgatgtccccataaggaggtatcctaggaaaagtgatgccacatacccctcaaggccaatgtatgtgtatgggtcaatatgggatgcatcttcttgggcaacagaggatggaaaatacaaagctaattataattaccaacccttcgttggtaggtataaaaacttcaaacttcaaggttgcactagtgaaagctctgcctcatgcaagccaccttctttctcgccatctggctttggtagtctaagccctcagcagtttagggcaatgcaatgggtccaaaacaactacatggtctacaattattgccatgaccctaggagagaccacacatttatcccagagtgttaa

SEQ ID NO: 2771 - DNA, 392 bp, Glycine max
  Clone ID: LIB3028-027-Q1-B2-H10
aatgacttgggagtgaagttcccatttaaccaaccaatgaagatatacaacagtttgtggaatgctgatgactgggccacaaggggtggtttggagaaaacagattggtccaaagcccccttcatagcctcctacaagggcttccacattgatggttgtgaggcctcagtgaatgccaagttctgtgacacacaaggcaagaggtggtgggatcaacctgagtttcgtgatcttgatgctgctcagtggcaaaaactctcctgagttcgccagaaatacaccatctacaactactgtgctgaccgcagacgctaccctcaagtctctccagagtgtgctagagaccgtgatatttaatttgaataacgtgatattaatgcaaagtatctatc

SEQ ID NO: 2772 - DNA, 390 bp, Glycine max
  Clone ID: LIB3028-027-Q1-B2-H11
cctatgtgctatatggtggagccacggttcctgcacagtgctgcaatgggatcaggaacctctatggcatggctcagaccaaaccagatcgccaagctgtttgcaactgcatcaagaacgctgttaggaacagtggcttcacctactctcacttcaatctcaaccttgctgctaaccttcccaagaactgtggggttaacattccctaccagatcagccccgacacagactgcaccagggtgcagtgaggttggtgcatgatgtttatgttagcagtgttagaataagaggccacgtgacacgaaaagggaatggctagaaattgcttttttaaggctcttgtactagtgctcttgtattatgtctgtggttatatatatatattatata

SEQ ID NO: 2773 - DNA, 384 bp, Glycine max
  Clone ID: LIB3028-027-Q1-B2-H12
aaaaatattaagatgataaacattggagcacttgttgtactctttgcatttctcttcctcagttgtgcctatgcacaagacacaacaacccttgtgcctgcaatcataacttttggtgactcagccgtggatgtagggaataatgactatcttcccacccttttcaaggctgattaccctccttatgggagggactttgctaaccaccaacctactgggaggttctgcaatggcaaattagctactgattttactgctgacactttgggttttaagacctatgctccagcatatcttagcccacatgcatcatggaaaaacctccttattggagcaaactttgcttctgctgcatctggttatgatgaaaatgctgccactttg

SEQ ID NO: 2774 - DNA, 334 bp, Glycine max
  Clone ID: LIB3028-027-Q1-B2-H2
gatatttcccttctgagctttgattagtgtggcctagttgttgttttctcgatgagaaaggcttcttccactatgcattgcgcacttctgcgcttttgggttcccttgttgctgcttgctagcatcagctatgctccttctgtttcggccacaactgaaatttcagggaatgaagtgaacacagatcggaaggtgataaattaagagttagcaaaaccaagtctaaaaggacatgatgaagaagcagagttcaaaagattttttccaaaaccagatccgatagttaaagcaattccaaagccaattcgtactactaaacctagttcaattccag

SEQ ID NO: 2775 - DNA, 400 bp, Glycine max
  Clone ID: LIB3028-027-Q1-B2-H4
catcaatctaaacaaaattgggttccaaaggaacagacggacaatcaaaggaataggatttgcaacgatgcatgtactctagtacagaaattgtatatatatattgttgtcagtgtcaccaacaccaaactctctctctctctctctacgctaattaacgttcattgggcattggcggattctatttccttttctcaaaacccaatttgcttcttcttcatggaagcactctccttcatcatccccaaagactcttgttctcctctccttcgcactccctcttcatataccacttcgtctgtcacaaatccgcacgctgcacttgctttcttcaaaacgaccgacacgctcaaacgcctcacagtttcccgtcgtcgcagtttttgccctcccaaaggcc

SEQ ID NO: 2776 - DNA, 358 bp, Glycine max
  Clone ID: LIB3028-027-Q1-B2-H5
cctcttcttagcaaatgtttcaatattccaaggccatgttgcttaatttagttcttgtttcctttgtcctcttgagttctatcagagatgggagtgcagggatcaccagctctttcgttcggccacagtggccaggagttgacattcccgtggatcatgaagtatttgcagttccaaagggttataatgcacctcaacaagtgcacatcacgcaaggtgactatgatggaaaagcagtaatagtctcatgggtgaccccagatgaaccagggactcgccatgtgcaatatggcacatcaaaggataagtttaaaactagtgcagaaggcacagttgcaaactacactttctataacta

SEQ ID NO: 2777 - DNA, 360 bp, Glycine max
  Clone ID: LIB3028-027-Q1-B2-H6
gccccactcaaccaccacacctctcctcgttcacgctacccctttctgctcttcttctacctttcaagttttaaaagtataaagatggcagagacattccgaattacctcagagtcggtgaacgagggacaccctgacaagctctgcgacgaaatctccgatgctgtcctcgacgcttgcgtcgagcaggacccagacagcaaagttgcctgcgaaagatgcaccaaaagcaacttggtcatggtcttcggagaaatcacgaccaaggccaacgttgactacgagaagatagtgcgtgacaccggcaggaacatcggcttcgtctcaagtgatgtgggactggatgccgacaactgcaag

SEQ ID NO: 2778 - DNA, 387 bp, Glycine max
  unsure (1)..(387): unsure at all n locations
  Clone ID: LIB3028-028-Q1-B1-A1
aaaagccttagccttccctacaactccaaacacaaagacatcatcatccatggctgcctccgtctccactgtcggagctgtcaacagagctcttttgaacctgaatggttctggagctggagcttcagctcccagttcagccttctttgggaccagcttgaagaaggttattgcctcaagggtccccaacagcaaggtttccggtggaagcttcaagattgttgctgtagaagagaagaaagagattgaagagacccagcagaccgacaaggacagatggaagggtcttgcctatgatatctcagacgaacaacangacatcacaagaggaaagggttgggttgactcccttttccaggctccacaggatgctggaactcactatgc

SEQ ID NO: 2779 - DNA, 374 bp, Glycine max
  Clone ID: LIB3028-028-Q1-B1-A10
ctcgagccgcttcttcgtcgttatcttcttcttttgttgtttgtgtgtttgttttttctctcacctgaaaatgtcttgctgcggtggtaactgtggttgcggaagcgcctgcaagtgcggcaacggctgcggaggctgcaagatgtacccagacttgagctacaccgagtcaaccaccaccgagaccttggtcatgggagtggcaccagttaaggctcaattcgagagtgctgaaatgggtgttcccgctgagaacgatggctgcaaatgtggagctaactgcacctgcaacccctgcacttgcaagtgaggtgttggagagctaaagcttcaagcagaaatgggccttagaaataatgataaaaactatatgt

SEQ ID NO: 2780 - DNA, 297 bp, Glycine max
  Clone ID: LIB3028-028-Q1-B1-A11
aacaaatctataaagatcgccatgtcttgtgtttgtgtctatccattccatttctttccaacacacactttctctctctatctttgggtgtctttctttttgttcattgttgatgatgtcacgcgccgccgtgctattacacgcgccggaggaagatgcggcggcggaggagtgctgtacctcgacttcgtcgtcgtcgatcgggaggaacagcgacgtgtcgtcggagagatcaatggaggaaggagaaaacgacgtggaaagtgcttaccatggacctttgcatgccatggaaac

SEQ ID NO: 2781 - DNA, 91 bp, Glycine max
  Clone ID: LIB3028-028-Q1-B1-A12
caaggccttgtcgatggcccccgtggaattgtggcaacgggtaatatttgggccccaaatttaccccaaacaaggtggcccaaatgggggc

SEQ ID NO: 2782 - DNA, 380 bp, Glycine max
  Clone ID: LIB3028-028-Q1-B1-A2
cttttgcataagaatatgatgttgtgaaggtgaatagggacttcaaggtgacattctcagctgcctcaatatgtgtgcagggcacaaattggaatttggctgagaaggatagtgagagtggaaggaggctcattgctgcatcatgcatggatgattactttagaattactgagacaccaatcaaaggttcatattagatacgttggtgtcctacagatgtatgccccttttgtaggtttgactgtggcattgttggtggtttgcgtgagaatgggaagattttgttggccttggatggtaatgtgctcccagttgtgtttgagaaagcatactaatatgtgtagcttcaattctgtgtttgacatttctgttcttggtat

SEQ ID NO: 2783 - DNA, 368 bp, Glycine max
  Clone ID: LIB3028-028-Q1-B1-A3
aataatcacaactcaaaccctctctctctctctctctctctctctcatataacaatatttccacgtacaattaagacacgatcactattgcatctacaatggaattagcaccctcaaactccaaccaacaacatgagaacaacaacagcaacaaggttcaggggctccattgctctgtgaagaactatgagtggggcaaaccgtgccgtgactccctcgttgccaagctattttccatgaattctgggtcgttacaatcatcacagcttgatgaggatcagccatatgcggagctttggatgggcagccacgtgtctggaccctctttcattgtttttgatggctcacaacaaagagtgaccctcaag

SEQ ID NO: 2784 - DNA, 337 bp, Glycine max
  Clone ID: LIB3028-028-Q1-B1-A4
gtggtgtgaatcactgtccaatcccgttcgcgtgacccggccagccctataaactatatatcgtgaatcggattcagagagactgagagaaacgatgagggcagtgagtgcgttaatggtggctcggatgttgacgcgggaccactctctccctgtcctttgcagcgaaagcatacccttccgatcggtctggtggttcgtctatgccggcatctcatgtttcctcgtcctcttcgccggcatcatgtccggtctcaccctcggactcatgtctctgggtctcgtcgacctcgagattctcgagcggagtggttctcctgttgagaaaatgcaagct

SEQ ID NO: 2785 - DNA, 364 bp, Glycine max
  Clone ID: LIB3028-028-Q1-B1-A5
tgattttctttgtagaagttttttagtagcatgttttccagattttgtctcaacaagcagagcaggtttgcttgtgtaaattaatacatggagtaagaaccgcttccttgttgtgtattgggacaggttatgttcagtttagggctgaatttgacctggttctgtatgttcttgtactagaccattctaaccatgacaaattggaatgggctaaaggtgtggccccctcttcaaatttcagtcaagtgctgtgaaatcgatgaattcctgcggaatggggagatcgatttagcttagcctgacacatagatgctttctatgtatcttcagtatgatcaaaatttgaatggttcagaaatttatc

SEQ ID NO: 2786 - DNA, 345 bp, Glycine max
  Clone ID: LIB3028-028-Q1-B1-A7
gaacattctcatgtacggtgatggccctgctaagaccatcatcaccggtcgcaagaacttcgtcgatggtgtcaagaccatgcaaactgccactttcgccaacactgcagaagggttcattgccaaggcaatgacattccagaacactgccggtgctgagggacaccaagccgttgcattcaggaaccaaggagacatgtccgctctcgttggttgccacatcttgggttaccaagacaccttgtacgtccagaccaacaggcaattctaccgcaactgcgtcatctccggcacagtcgacttcatcttcggcacctcctccaccgtgattcagcactccgttat

SEQ ID NO: 2787 - DNA, 373 bp, Glycine max
  Clone ID: LIB3028-028-Q1-B1-A8
cccaactcaatttttctctcaaccggcccaatttagcataagcccagcatggccaccgcaacagcagcagccacctcgtccttcatggggacgcgcctcctggaggcccactccggggcggggcgggtgcaggcccggttcgggtttggcaagaagaaagccgccgccccgaagaaagtttccagggggtcgggctctagctccgataggcccctgtggtatccgggcgccaaggcgcccgagtacctggatgggagccttgtcggagactacggattcgacccatttgggctaaggaagcccgccgagtacctgcagttcgagttggactcgctggaccataatcttgcgaagaacgtggctggggacatca

SEQ ID NO: 2788 - DNA, 376 bp, Glycine max
  Clone ID: LIB3028-028-Q1-B1-B1
cgacgatgaagacaaccttctgatccgtcaagtggtgccggacgcggaggaccaccacctgctcaacgcggagcaccacttctccgccttcaagacaaagttcgccaagacctacgccacgcaggaggagcacgaccaccgcttccgtatcttcaagaacaacttgctccgcgccaagtcgcaccagaaattggacccctccgccgtccacggcgtcaccaggttctccgatctcactccgtctgagtttcgcggccagttcctcggcctgaagccgctccgccttccctccgacgctcagaaggctccgatccttccgaccagcgaccttcctaccgatttcgattggcgcgaccatggagctgttaccggcgtc

SEQ ID NO: 2789 - DNA, 394 bp, Glycine max
  unsure (1)..(394): unsure at all n locations
  Clone ID: LIB3028-028-Q1-B1-B10
gacgcggatgaggaggagacggagtcgtcgaggcggatggttgttaatggggagggccaccgggagaacggttttcgggttgcgcccgtcgagggtgacgacgtggaggacgaggatgacgaggatgattccggggaggagattgatgaggaggagggggatgacgatgatgtggtggaggttcatgagattgaagatagtgatgatgaggatggagtggaggagtacgatgacgaggacgatgacgaggatgatgatgaggaggaggaagaggtggataacgacgagggtgattttgcggaacccgagagtaccgggaggctgacgagtactgatggggagattgatgggcatgagcaaggggaggangatggggatgacgatgataatgggg

SEQ ID NO: 2790 - DNA, 388 bp, Glycine max
  Clone ID: LIB3028-028-Q1-B1-B11
gagttatagaggcattgttgctgtttggaaacagatctctgatctgaaaatgagtgcatcgaggttcattaagtgcgtcaccgtcggcgacggcgctgtcggcaaaacctgcttgttgatttcctacaccagcaacacttttcccacggactacgtgcccacggtttttgacaatttcagtgctaatgttgtggtggatggaagcaccgtaaacctggggttgtgggatactgctggtcaggaggattataataggcttagacccttgagttatcgaggagctgatgtatttatacttgccttttctctcataagcaaggctagctatgaaaatattgcaaagaagtggatccctgaactaaggcattatgcccctggtgttccaata

SEQ ID NO: 2791 - DNA, 386 bp, Glycine max
  unsure (1)..(386): unsure at all n locations
  Clone ID: LIB3028-028-Q1-B1-B12
gtggtgagtatcatacctgtgctttgacagattctggcgaagtatatacttgggggaatgatgtttgttgtgcacatttattgattgaacggagaactacaagtcagtggataccacaaaaacttggtggatccttagatggtattagtatctcaagtgttgcctgtggggaatggcatactgcaattgtctctagttgtgggaagttatttacttatggagatggtacatttggggttcttggccatggcgatcttcggagctattcaagtccaaaagaagttgaatctcttagtggtctacgggtgaagtctgctgcttgtggatcatggcatacggctgctattgttgaagtcatgtntgaccgtttcaagtacaatactgct

SEQ ID NO: 2792 - DNA, 319 bp, Glycine max
  unsure (1)..(319): unsure at all n locations
  Clone ID: LIB3028-028-Q1-B1-B2
cctgcactaaggggcattgagttccctacacgttcggatgttgatgtatgaaagctgggtagcttataggtttgaacatttttttcattaaatgatgtcatttatgcttacttcatgacagtgcagcgtanggcatgaaagtaatactctacttgattgctgatgttttaaattatagaattgtccagtagatgtatatatgtaatgttcgattcagattgttttgattattcttataatctaagaacctgtgatcttaangggactaaatgtagatttgctttcgaagaacaaaattcattccaagtgtttgacctgt

SEQ ID NO: 2793 - DNA, 390 bp, Glycine max
  Clone ID: LIB3028-028-Q1-B1-B3
gaagaaacagaacgatcaatggacataatgtggcgagtgattaatcccaaattaggttctaatgtagttgctgtcaaacctcctgcttcattaattgccaatgtggtgtctgcatggtcttttctcctctctactgtgagcaatttgaagctaaattcaaaaaactggcagaattcaatatcctatttatctagtcttctagacaaggaagataggtctgtacgaattgctgctggtgaagcactagctctaatttttgaaattggagttatagataaattttctgctgagttagacagtgcaagtgatacaacgcaagggagtaaaccacttgaaagctacatatttttacaaggattgaaaggaaaggtgataaatcaatgcaaaaat

SEQ ID NO: 2794 - DNA, 383 bp, Glycine max
  Clone ID: LIB3028-028-Q1-B1-B4
aaatgaatcaagtgtggaccgtcttatgaagcagattacaaatttcatgtctgatattgctgatgagttcaaaattgttgttgttgaagcaataagatcactatgcttgaaattccctttaaaatatagatctctgatgaatttcctaagtaacattcttagggaagaaggtggctttgattacaagaaagcaattgtagattcaattgtgattcttattagagatatccctgatgctaaggaaagtgggttgcttcatctttgtgagtttattgaagattgtgaattcacttatttgtccacacagatactgcacttcctgggagttgaaggaccaaaaacttctgaccccagcaaatatattcgttatatttataacagag

SEQ ID NO: 2795 - DNA, 360 bp, Glycine max
  Clone ID: LIB3028-028-Q1-B1-B5
cgcacgaatatcttgttgtttggagcgatccgagaaaaactctgtaaacatgttggtttaccaggacctccttacaggtgatgagcttctctctgactccttccgttacaaggaaattgagaatggaatgctgtgggaagttgaggggaagtgggttgttaaaggagcagttgatgtagacattggtgcaaacccttctgctgagggtggaggagaagatgagggagttgatgatgcagctgttaaggttgttgacattgttgacacattcagacttcaggagcaacccgcattcgataagaagcagtttgttaccttcatgaagaggtttatcaagaatttgactcccaagctcgatgc

SEQ ID NO: 2796 - DNA, 343 bp, Glycine max
  unsure (1)..(343): unsure at all n locations
  Clone ID: LIB3028-028-Q1-B1-B6
ctccaggatcatattggtggcctgcagaagcactgtgaggaaacaattatcagaatgcttctccaggatcatattggtggcctgcaggttctttaccagaacatgtggattgatataaccccagaacctggggctcttgttgttaacattggtgatcttctacagcttataacaaatgacagattcaagagcgtagaacatagagtacaggcaaatctcataggtccaagaatatctgttgcatgctttttcagcgaaggtcttaaatcatcaccaaaaccctatggacctataaaagaattattgacagaagacaatcctcgcanatacagagaaaccacag

SEQ ID NO: 2797 - DNA, 344 bp, Glycine max
  Clone ID: LIB3028-028-Q1-B1-B7
gctaatcctagttccttcaactcctcgctggcaacaacagcaatactaccaataatggcgctccacaatcatgatgttcgacaacaagctctgtgacataacatgtgaagtgatagatccccatgccctggggctcatgttggtaacattggtgatcgtctacagcttataccaaatgacaaattcaagagcgtataccatagagtacacgcaaatctcataggtccaagaatatccgtcgcatgctttttcaccgaacgtcttaaatcatcaccaataccctatgggcctataaaagaattactgacagaagacagtcatcccacatacagataatccacagt

SEQ ID NO: 2798 - DNA, 359 bp, Glycine max
  Clone ID: LIB3028-028-Q1-B1-B8
ggagtttgtaaccatgcttttcacttccattgcataagccgatggctcaagacccgtcaagtatgtcctctagataatagcgagtgggagtttcagaaatacggtcactagaactttgatgcggctgagctacttccatcttggacatttggattgtagcatttctatcaactttatagctctacatgttgtctttgcttgcctattggagttttattcaaaagagtcacttctaaatgctttcgcatatagttacgcccccagttcctaattcgatcatatccttctctaacaatgtggcaaaacggtggtgttaattcactcaatgacaagatttatggaatattatagcatgcaaa

SEQ ID NO: 2799 - DNA, 242 bp, Glycine max
  Clone ID: LIB3028-028-Q1-B1-B9
ggaagatatagacaccgctcctggcttcagtagattcaattcattcatcgagagcaaacgtatgcggtccagtcgtgtagcattgcttacatgtcattaactgcatcttctaactggtggagggagataaaacagtcttcgttcaggcaggatccgattttcgacttacttacaatcatctatggcattctctgcacggtctcgcacgctcactcactgtggatatggtgatcagtgacggc

SEQ ID NO: 2800 - DNA, 395 bp, Glycine max
  unsure (1)..(395): unsure at all n locations
  Clone ID: LIB3028-028-Q1-B1-C1
agcaaagtaatcgcaaaatctagggtttgttcgttcgctcgttcgcaacaatggcgctgaggagattctacaacgagatcaaggggaagagggtgagcgaggtccctgagcacgtgaagccgatgctgtccctgagctacatcaagaaagcgattcagagaggcttcgacaattaccatgccaagtacattgaaaccagttcccctgatcccatcttccatgtctgctacggcggcatgatcttctcctacctcgtcgctctcccccacgagcgccgccacctcctccacgcccaggagcacgctcagcagcatcactgattccatccaccttcaggatcctggttgaattggaggtggttggcttgcttgatncttgttttaaaatctgaaaaa

SEQ ID NO: 2801 - DNA, 401 bp, Glycine max
  unsure (1)..(401): unsure at all n locations
  Clone ID: LIB3028-028-Q1-B1-C10
aggggcttcaacagccacaaccttgatcttgcattgagccatgaaactacttagccacttgggttcctcactagagacacttgtctattaactcttttttgttgttgtggtgtttcatttgtgaaactaacaacaacacaaggccatcatcatggcagctgcttccccaatggcaagccaactcaagtccaccttcactaggactcttgtagctcccaagggcctctctgcctcttcaccacttcacctcgtgccttctagaaggcaatttagcttcactgttaaggccatccaatcagagaagccaacctatcaagtgattcagccaatcaacggtgacccattcattggaagcctggaaacnccagttacatccagccctttgatcgcatggtacttgt

SEQ ID NO: 2802 - DNA, 368 bp, Glycine max
  Clone ID: LIB3028-028-Q1-B1-C12
atctgtcttccgaagcaggaactaaatatggctgacttgttggaatggtcaaagcaagataagaaacgaatgcttcatgtcgtctaccgtgttggtgaccttgatcgcaccatcaaattttacacagaatgtttaagaatgaagcttttgaggcaaagagatatcccagaggagaaatatgctaatgcttttcttggatttggccctgaagaatcccattttgttgttgaattaacatataattatggggttacctcgtatgacattggcgatggctttggacattttgcaattgcaactcaagacatttataaattggttgagcacatcaaggccaagggtggaaacatcacaagggaacctggtcc

SEQ ID NO: 2803 - DNA, 347 bp, Glycine max
  Clone ID: LIB3028-028-Q1-B1-C2
agcaataacagcaacaacattaatgatcagaataataagcagcagtccaacaacatggccttgttgagggttcaagagcaagcaagggagcacttgaggatagccatggcagagaaagcatatgctgaggaagcaaggaagcaagcaaagaggcagattgagcttgcggagcaagagttcacaaacgccaagaggataagacaacaagcacaagtggaactagacaaggcctacgctttgaaagaacatgcaatgaagcaaatcaactccaccatgctccaaatcacttgccacttttgcaaacaacagttccaagctcgaaatgcaaccaccaccagccccgacga

SEQ ID NO: 2804 - DNA, 389 bp, Glycine max
  Clone ID: LIB3028-028-Q1-B1-C3
atttctaaaacagcgtttgcttttgtgtttggtcttagacgcagcacgcccccaccactgtttcaaccctcaaattgtgtcttcttcgctttctggttttgattaagttttgttccatttgaaacaatattcatcgatccatcgccaaacatgccttctagtcacttgcttcttgaggaacctattaggatggtctccatccttgaaccatccaagcctagttttttctctgcaatgacaaagattgttggtaccctggggcctaaatctagatccgtcgaaactatttctggttgtctcaaggctggcaagtccgttgctcgttttgacttttcatggcatgaccctgagttacacaggagactttggagaatttgaaggctgctatc

SEQ ID NO: 2805 - DNA, 426 bp, Glycine max
  Clone ID: LIB3028-028-Q1-B1-C4
aaacattataatttctattacatacattttgtagctaggatgagcaagttactactcattcgtgttgctgggttcgtggcaacctttgtcaccatggtgatgatgatggtgcccaaaaacgtgagtgcccaaaacataggtgatgacatcgtcacacaagacttcttcaacagcataatcagtcaggctgatgatggttgtgcagggaagaacttctactcacgagatgctttccttaatgctcacaattcctacaatgagtttggtaggcttggtaatcaggatgactccaagcgtgaggttgcagctgctttcgcccatttcacccatgaaacaggacatttttgctacatagaacagattaacggtgcatcaggggactactgtgacgagagcaacaccgagtacccatgtgcccctaacaaa

SEQ ID NO: 2806 - DNA, 342 bp, Glycine max
  Clone ID: LIB3028-028-Q1-B1-C5
gtgggtttggcgaaaccttctagaattttcttccatggaggttatcagagttctaacggcggcgatcacggtggcggttctcgcggcggcgcttccggcagacgccggcgacgacaaccgagtattcgcgccgtgttcggacacgcgagtgcagagatccgacggattcacgttcggaatcgcgttcgctccgaaggacaagttcttctacaacaacaacaacagcgttcagttgtcgccgtgcgatacgaggctctcgctctccaatgcgaattctcagatctccgtgttcagacccaaggtcgacgagatctcgctcctcaacgttaactcctcctcgtt

SEQ ID NO: 2807 - DNA, 402 bp, Glycine max
  unsure (1)..(402): unsure at all n locations
  Clone ID: LIB3028-028-Q1-B1-C6
agttgatctcagtttaagtggttggtaatgtggaataaggttaaacggctagatattgtagaaaatattcaatgttccatctgttatgatcatagtcaacaaatcatgtagagaaaatatacttttatccccaggatcagtttattttgtcaaaataattcttttttctttttgtaagcttcccaagacaagtaatgccaaatggagtatttccttaaaattgattgttacccaacatgtataaagtattgagttgctactattgctgtttatttagggctaataatttcttttttatgttgtatggtggcagatgccattttcggatcntgtaggtgccatgaacttaattttcacatgatggtggtcacggtttttccttttgatgcatttcccaccctg

SEQ ID NO: 2808 - DNA, 377 bp, Glycine max
  Clone ID: LIB3028-028-Q1-B1-C7
agatgactacccttatgctgttgatggactagagatatggagtgctatccagacatgggttaaggactacgtctccttgtactatgccacggatgatgcagttaagaaagactcagaactccaagcttggtggaaggaagctgttgagaagggtcacggtgacttgaaagacaagccatggtggcctaagttgaacactcttcaagatctgattcacatttgctgcattattatatggactgcttcagcactccatgcagctgtgaatttcggacaatacccttatggcggtttcatcctaaatcgtccaactctaaccagaagattgctcccagagccaagaaccaaagaatatggtgaactttacagtaatcatc

SEQ ID NO: 2809 - DNA, 363 bp, Glycine max
  Clone ID: LIB3028-028-Q1-B1-C8
tgaatctctcttgcaccataattcaacagaaaagagtgttgaagaataaagtattcattgcatgtgctacatttctctgacttaaatgtggaagttcaatggtgctctcggatgaaagatttgaatatgaaaatcaatttggctaaaccaacatttgatggaagatgcctttcatgtaaaagtacacttaggcaatgtaagatgtaacacactgttcaattcgctgattttttgtgtttcccagtgcaaattttctgtgatttgcacaattttgtgcaacattatgtaatatgttctagtggaactattttccgaaaaaaaaaaattgctcacaaagccagaaaacaaaaaataatgaaaaag

SEQ ID NO: 2810 - DNA, 375 bp, Glycine max
  Clone ID: LIB3028-028-Q1-B1-D1
gaagattatgttcagagagtgaggcaagttcatgaatctggtggttatgggtctagagggtatgcatatgactggaagagagaggaagcaaataaaaaccttctgcgaacccatacaactgctgtttcctccaggatgctttaccaattagcacagaaaccatttgcccccaaaaaatatttctctatagatcgtgtattcagaaatgaagcagttgatcgtacacatcttgctgagttccaccaaatagaaggccttgtatgcgatctaggactcactctctgtgacttaataggagtcctacatgatttcttctcacgcttaggcatgaccaagctgaagttcaaaccagcttacaatccatacaccgaacct

SEQ ID NO: 2811 - DNA, 388 bp, Glycine max
  Clone ID: LIB3028-028-Q1-B1-D10
tcttacttcaactgaaagagaacaacacgtttcccatagatctcaccaatgataacatcaaagcagtgctcttgaacttacttgtaggagctacaggtacaactgaagtcacaacaatctgggccatgactgaactaataaaaaatccaagcattatgaagaaagtgcaagaagaaattagaggcttaagtggtaagaaagatttcttggatgaagatgatattcaaaagttttcctacttaagggcagtgataaaagagacacttagattgcacttaccagcaccactacttataccaagagaaacaaataaaaaatgcatgttagatggctacgaaattccagccaagacattattatatgtgaatgcttgggcaattcatagaga

SEQ ID NO: 2812 - DNA, 378 bp, Glycine max
  Clone ID: LIB3028-028-Q1-B1-D11
caaacccatttatagcaccaaccctttgatcattcccacgtgtaaagtgaggccaagagtgcaatactgtggcaccatgatcaagagttctttgatagagcctgatgggggggcattggtggatcttgtggtgcctgagggtgagaggggtgctaagatcaccttggctgagtcactgcctaaggtgcagctcacaaggattgatcttgagtgggtgcatgtggtgggggaagggtgggctagtcccttgaaagggttcatgagggaggatgagtatcttcagagtttgcatttcaattcccttaaggtcaaggatggttctgtggtgaacatgtcccttcccattgttttggccattgatgatgagaccaaagagag

SEQ ID NO: 2813 - DNA, 401 bp, Glycine max
  unsure (1)..(401): unsure at all n locations
  Clone ID: LIB3028-028-Q1-B1-D12
gtgcgatcccagtgttagtgtgtatttcctctcttctcactccgggatcgatattttcaagaacagatcgaaaagccgttcatcgatttgttggatctgtgagtgagaagatggttactaagacagaggagactcaattgaacaggctcgaaaaccaggtcgataacggcggcggcggcgcgtgggagtacctctgcctcgtgcggaagctcaaagttcggcggtcggagaaagttctgaagcacggtctctccatcttgaacgacctcaaacaacgatcctctctcggctccgatgaatggaccttgtatgagcaggttgctgttgctgctatggactgccaatgtctcgacgttgccaaggactgtacaaaggttcttcggaagagattcctanagagt

SEQ ID NO: 2814 - DNA, 374 bp, Glycine max
  Clone ID: LIB3028-028-Q1-B1-D2
cataaccatcaagtttcagttccaaacataacccatcaaagtctttctccctcagtgatcatatattcattcagttctatacaaaatcctcaaaaactcttcctctctgccatgaccatggaatacagaaccttagaactcaacatcatatccgcaaaggacatcaagaatgttaatctcttctccaagatggacgtatacgccgccgtttcgctctccggtgaccctctcgaccctcagggcgccaccacccacgtccacaaagactccggcagcaaccccacgtggaactaccccgtgaaattctctgtcaacgaatcgctggcgaatgaaaatcgtttatctcatgagatcaagctcatctccgaccgcac

SEQ ID NO: 2815 - DNA, 362 bp, Glycine max
  Clone ID: LIB3028-028-Q1-B1-D3
gcaagcgcttctcctctttgtgttctggctatgcttcttggcaagagttagatcggacgaggattgcgtgtacacggtgtacgttcggacgggttcgatcatcaagggaggcaccgattcagtaattggtctgaagctatacgacaagtccggctacggcatatacatcaccaacctcgaggcatggggcgggttaatggatccgggtcacaactactacgagcggggcaacctcgacatattcagtggtagaggcccttgcttggaagcacccgtttgcgaggccaacctaacttctgacgggtcggggccccatcacggctggtacgttaattacgtcgaggtcaccaccactggggtcc

SEQ ID NO: 2816 - DNA, 406 bp, Glycine max
  Clone ID: LIB3028-028-Q1-B1-D4
ctttaagattctctaccgttcaacgcaacactctcaattccatctactcttcgttcccaatatgacggagtgcatgacggacttggctcaagctgccgcatgccgaaacggcacgacggcggcacacttaaaagtgatttccatctttatgatttttgtgaccagcgtgacaggcgtatgtgcgcctgtcacactggcacgatactttcagggaaagtccctctacaacatagccatcttgttaatcaaatgctttgctgccggcgtaattcttgcaacctcattggtccacgtgttgccagacgcctttgctgcactctccgattgccaagtggcatcccagcatccctggaaggactttccctttgctggcctggtgacccttaatggggtgctaatggccctg

SEQ ID NO: 2817 - DNA, 366 bp, Glycine max
  Clone ID: LIB3028-028-Q1-B1-D5
gcataaaatgtcaaatacaagtttgcttgatttccaatacagcctctcaaggaaaaaatacctgaggaagccatcacgtctgttctcctgggaccggcagaactcggggtcgaagaatgtatttcctcagcctaaggctgatgagatgaagcaggtgtttgacaagtttgattccaataaagatgggaaaatttctcaacaggagtacaaagccaccatgaaggctctaggcatgggggactcggttcatgaagtgccgaatattttcagggtggttgatttgaatggagatggattcatcaacttcaaggaatttatggaagctcagagtaagggtggcggggttaggatgatggatatacagag

SEQ ID NO: 2818 - DNA, 54 bp, Glycine max
  Clone ID: LIB3028-028-Q1-B1-D6
gtggttgcaagggatattatataatatatatatatgttttgccgtatctattcc

SEQ ID NO: 2819 - DNA, 297 bp, Glycine max
  Clone ID: LIB3028-028-Q1-B1-D7
cataattccctaaccggtggaccgaaaaattaagcaccgaaacgtgacccttccaatctcgcaacgcaagcgacaacactcgtcacagctcagcacagcaaaatcacaactcccctgtgggacatttttacaaacaccttctgcctacaaataaaagtgatttcagttttcaagtactcgtagtggttgggtttgaggatgagtttcagggaagagagtggcgatgcgagggatcttcagaaaccgttcctccacacggggagttggtacaagatgggttccaggcagttcagcatc

SEQ ID NO: 2820 - DNA, 304 bp, Glycine max
  Clone ID: LIB3028-028-Q1-B1-D8
caagcaaatgaagcaaaggtagaagggaataagctttttgtagaagggaagtatgaagaggcattattacaatatgaacttgctttacaagcagcaccagacatgccttcatctgtggaaatacggtcaatatgccattcaaaccgtggtgtgtgctttctgaaactgggaaaatatgataacacaattaaagaatgcacaaaagcattagaattgaatcctgtgtacattaaagctttggtaagaagacgagaagctcatgaaaagcttgagcattttgaagaggctattgctgatatgaaaa

SEQ ID NO: 2821 - DNA, 362 bp, Glycine max
  Clone ID: LIB3028-028-Q1-B1-E1
gtttctcgcaaagtttaagtcatcatgggtaaggaaaagactcacatcaacattgtcgtcattggacatgtcgactctgggaagtcaactaccactggtcatttgatctacaagcttggaggtattgacaagcgtgtgattgagaggttcgagaaggaggctgctgagatgaacaagaggtcattcaagtatgcctgggtgcttgacaagctcaaggctgagcgcgaaagaggaattaccattgatattgctttgtggaagtttgaaaccaccaagtactactgcacagtcatcgatgcccccggacatcgtgactttatcaagaacatgattactggtacctcccaagctgattgtgctgt

SEQ ID NO: 2822 - DNA, 401 bp, Glycine max
  Clone ID: LIB3028-028-Q1-B1-E10
gaaattttaaccaggttaaataaaatggctggttatgatcctgatgaagagattggactatacgaggaaattaagtttgagccaaatgttatgtgtgaacctattgataagaaagtaacatttcgagcaagccagttagaagatggagatattatatgctttcagaaagctcctgctatagacaatgaacacgtccgctatccagatgtgccttcataccttgaatatgtgcacaatcgccaggttgttcactttcgatctctagaaaaaccaaaggaagatgacttctgcctggagatgtcaaggctctatacatatgatgatgtggtggagaaagtggctcaacaacttggtttggatgatccatccataattaggcttaaccctcacaattgctactc

SEQ ID NO: 2823 - DNA, 273 bp, Glycine max
  Clone ID: LIB3028-028-Q1-B1-E11
cctactcgcatgccttgtactcctaaatccaacaatagagttagacattgaattgctttctatcaaacaaagtccattcgggactcccgtaaagatagttgaaggttaatgcaatgatttaatattcagagtgctattttgacattttaagagaagaaaatgatgtcgtcccacctaaaggcccttactttttcccatgatgttaatgaaccgaaaatttaacctgtttctagactgattccaacctattattagaaaaaaagaataagtttg

SEQ ID NO: 2824 - DNA, 325 bp, Glycine max
  Clone ID: LIB3028-028-Q1-B1-E2
atctttgtcatattccaaaattaagcttgcattattcaccagaatggctaattcatatgaaaacaacttcccccctcagaagcaagacactcagcctggcaaagagtacctcatgaatccaccaccccaatacaacagctcccaatacaagccatcaaataaacttcagggaaagatagctgtagtaaccgggggtgattctggaattggacgagccgtgtgcaacttgttttcattagaaggtgctactgtgatcttcacctacgtgaaggggcaagaggacagggacgcgagtgacacgcttgagatttataaaaaagctaag

SEQ ID NO: 2825 - DNA, 345 bp, Glycine max
  Clone ID: LIB3028-028-Q1-B1-E3
gtcagatcccgctgtctagcggaaacaaacaaaggcagaaaaccatttcctccttaaatctgttcctattttcattttcatttcaacttaacgttttcatgggtattcgcttttcgtcctcccaggcggcgccgtcggaatcgtcgccggcgtcgagtttgggcgaattgcccgagagttgtgtcgctcagatcatgacctacatggatccgccccagatttgcaagctcgcaaccctcaatcgcgcttttcgcggcgcttcctccgccgatttcgtctgggagtccaagctgccgcccaattacgacgtccttctccgccgcatcttcgccgatttcccctccc

SEQ ID NO: 2826 - DNA, 340 bp, Glycine max
  unsure (1)..(340): unsure at all n locations
  Clone ID: LIB3028-028-Q1-B1-E4
ctttgttcgacccagaggagctcacacagtggtccttctatagagccctcatcgctgagttcatagcaacccttctcttcctttatgtcactgtgctcaccattattggctacaaaaggcagactgatacaacggtaggtggcaccgactgtgatggggttggcattttgggcatcgcttgggcctttggtggcatgatcttcatccttgtttactgcaccgccggtatttcaggaggacacataaacccggcggtgacattcgggttgttcctangacgcaaggtgtcgttgataagggcgttgttgtacatggtggcacagtgtgccggtgctatctg

SEQ ID NO: 2827 - DNA, 380 bp, Glycine max
  Clone ID: LIB3028-028-Q1-B1-E5
gaaaaaaaacacacacacacgcactctgagcgaaagaaaaacgaacaagaaaaaatcggatgagctatacatttcttagcagaaacttcaccggacctgagaattgagaaagtgtagtttgagtttcacatcaaaagattgtgtgtaagaagcgttttcttcagatcgatggaatatcttgggattgatctaagctgcgccgttggatctctccgccacggccagttaccggagaaggactgcttgctccctctcatttccaaactcctcggctacgccatcgtcgcggcttccaccaccgtcaaactcccccagattatgaaaattctgaagcatcagagtgtgagaggacttagcatgatatccttcgagcttgaagt

SEQ ID NO: 2828 - DNA, 420 bp, Glycine max
  Clone ID: LIB3028-028-Q1-B1-E6
aaaagaaaaaaaatgggttcttctctgtggacctgtctgattttgttatcacttgcttctgcttccttcgccgccaacccaagagcaccaattgatgtgccatttggcagaaactatgtgcctacctgggcctttgatcacatcaaatacctcaatggtggttctgagattcagcttcatcttgataaatacacaggtactggcttccaatcaaaagggtcctacttgtttggtcacttcagcatgtacataaaattggttgctggtgattcagctggcacagtcactgctttctatttatcatccacaaactcagaacatgatgaaatagaccttgagttcctgggaaaacagacccgggcacctttaaattttgcaaacaaatgtgttcaccggtggcaagggtgacagagaacaaag

SEQ ID NO: 2829 - DNA, 348 bp, Glycine max
  Clone ID: LIB3028-028-Q1-B1-E8
agatgactggggggggtatcactatgcaatcgacgccgggaagctcaggatacttggatttgtatccagagcggaagatgtcctttttcaaaaatccttacattctcggactggctgctgtcgccggcatcggtggtctcctcttcggctacgacactggtgtgatatcaggggctcttttatacattaaggatgattttgaggaggttagaaacagcaatcttctccaggaaacaatagtcagcatggctattgccggggcaatcctgggaacagcattgggtggttggattaatgatgcctaaggtccaaagaaaggcaacctccttggcgaagttaaccttaacg

SEQ ID NO: 2830 - DNA, 391 bp, Glycine max
  Clone ID: LIB3028-028-Q1-B1-E9
agaaaatacaagccgtagaagagggctcgctctttcgtgtttttgttcgcgaaggaaactctatccttagctatcgcgatggatcggtaccagaaggtggagaagccaagagctgaaactccaatcgatgaaaacgagatccggattactagtcagggaaggatgcgcaactacattacttatgccatgagcttgcttcaggagaaaggttctaatgaaattgttttcaaagcaatggggagagctatcaacaaaaccgtgacaattgtggagttgatcaagaggagaattgtgggcctccaccagaatacagcaattggatccactgatatcactgatacttgggagcccctagaggaaggcctccttcctttggagacgacaaggcacg

SEQ ID NO: 2831 - DNA, 410 bp, Glycine max
  Clone ID: LIB3028-028-Q1-B1-F1
gcaatggcttctctggcaagcttagctgttgttcaaccatctactgtcaagggccttgctggaactaagctctctttcaagccctctcgccagagcttcagacccaagaatttcaggagtggtgccgttgtagcaaagtacggtgacaagagtgtgtactttgatttggaggatctaggcaacactactggtcagtgggacttgtacggctccgatgcaccttcaccctacaaccctcttcagagcaagttcttcgagacattcgccgctccattcacaaagaggggattgttactaaagtttttgatcctgggaggtggttccaccctggcatacttgagtgccacagcgtcaggtgacatttctacaatcaagaaggggccacaacttccaccaaagcaaggtccccg

SEQ ID NO: 2832 - DNA, 346 bp, Glycine max
  Clone ID: LIB3028-028-Q1-B1-F10
ggtcgactctagatgataccctcggggaattccaattccacattttcaagaactaatgaggcaaaaatgttcatatatgaattggtaatatttgttttcttattaaggctatcctgaagccacaggaaatgagatcggtattcctcggggaattccatttcacaatttcagaaagtatagaggcaaaaatgttcatatatcaattggcattaattgttttcctattaggcctagccggaagccatgggaaacgatatttgaaatcctcggagatttccaattccacattttcaagaaataaggaggcaaaaatgttcaaatatgaattcgaagtatttgttttcgt

SEQ ID NO: 2833 - DNA, 387 bp, Glycine max
  Clone ID: LIB3028-028-Q1-B1-F11
cacattctcatggcccaaacccttcagcaagtgatcttgagtctgcaacgaattcccattacaaattattaggctcacacttggggaaggagtggaatgcttcggggcctatgcacgtggatttgctagagggtgccttgcaacgccaaacatcagttgaactccaaactaatctctggtctccctggctttccaaggatggaagtcttgtactgagcgtccaaaaccaccttgtgagttcaaattgaatattgaatttcattttcttttacacattggacatttatttctcaagaaaacgagggctctgttatctgttggtagtgtctggtattttacatgtttctttttacttataatttcttgcagcactacctgaaaagtcat

SEQ ID NO: 2834 - DNA, 401 bp, Glycine max
  unsure (1)..(401): unsure at all n locations
  Clone ID: LIB3028-028-Q1-B1-F12
aaaagtgacacaccaaatcaaagacacctgagccattcaattcccctcctttattgctttcaagtttcaacactaattttattatctgaaaaaatggctttcaaagtttcgtttttccttgcacttgttctagtttccaatatcctcctccttgatacaacagctgctggacgcagcattggcgaaaactccaactcagaggaaaagaaagagcctgagttcttgttcaagcatgaaggtggggtgtatattccagggattggacctgttggatttccacataaatttcatctcacacctcaaaatccattacctggtggcaatggaaatggaagagcaagaaccgcaacaggatcaggatcaccaccaggtancagttatgttcctggtggtgatgacac

SEQ ID NO: 2835 - DNA, 338 bp, Glycine max
  Clone ID: LIB3028-028-Q1-B1-F2
gaagagctctcaaagattgcgaaggaaaagaagttgaaaggttttgagtttataaaagcagttcaccttgactcaattccatttgacatggaacgtgaccttatcactccaacatacaagaagaagaggccacagttgcttaaatactatcagaatgccattgacaacatgtataagagtggaagtaaacccagtgcctgagacctgatttgggagataatttattttctgtatgtgatggtgtttgtctccgttcaattgtttccttttggtgactgtatatacgctgagtagttatatatggatacgtcatttaatttgagtttttttttcacgtc

SEQ ID NO: 2836 - DNA, 368 bp, Glycine max
  Clone ID: LIB3028-028-Q1-B1-F4
ggcactcaacattttacactcttttcttcttctcgttgttgcttcgctgttgaatcatggatcagaaggtcgatttcagcgctccccattccatgggaaccactatcatcggcgttacttacaacggcggtgtcgttctcggagccgactctcgaaccagcaccggagtgtatgttgccaaccgagcatcggacaaaatcactcagctcactgataatgtatacgtgtgtcgctctggatcggctgctgattctcagattgtctctgattatgtgcgttacttcctccatcaacacacaatacaacttggacaacctgcaacagttaaagttgctgcaaaccttgtccgacttctctcatataacaat

SEQ ID NO: 2837 - DNA, 393 bp, Glycine max
  Clone ID: LIB3028-028-Q1-B1-F5
gcaacacaacaaaaaaagacaacacagagagaagcgtcttaataaacgctcttctctgaaaaacctgatttcttctcttcttctcttctctttcgtttcgatcttcgatctctgaaaatgagagagtgcatttcaatccacatcggtcaggccggtattcaggtcggaaacgcctgctgggagctctactgcctcgaacacggcattcagcctgatgggcagatgccaagtgataagactgttggtggaggtgatgatgctttcaacaccttcttcagtgaaactggggctggaaagcacgtgcctcgtgcgatttttgtagatctcgagcctactgtgattgatgaagttaggactgggacataccgccaactatttcatcctgagcagctc

SEQ ID NO: 2838 - DNA, 401 bp, Glycine max
  Clone ID: LIB3028-028-Q1-B1-F6
cactcataacacaaagcacaaagcaaagctcatccttgagttaaaaaatggcagcagcttcttccatggctctctcatccccatccttggctggcaaggccgtgaagctgggcccatcagccccagaagtgggaagggtgagcatgaggaagaccgtcaccaagcaggtctcctcaggaagcccatggtacggcccagaccgagtcaagtacttgggcccattctctggcgagcccccgtcctacctaaccggtgagttcccatgcgactacggctgggacactgctgggctttccgcagacccagaaaccttcgccaagaaccgtgaactcgaagtgatccactccaggtgggccatgctcggagccttgggctgcgtcttcccggagttgctgtcccgc

SEQ ID NO: 2839 - DNA, 417 bp, Glycine max
  Clone ID: LIB3028-028-Q1-B1-F7
tggacgtatcacatattttttaggttctgcaaaaagcaaagactcagatagatgctatccaaccagtatcttgggcggacatgattgctgtggctggagctgaagcagttgaagtatgtggaggtccacctattcaagtttcactgggcagattatatacactggtgcctgatccagaagggagacttcctgaggaatctctcaatgcttctggtttgaagaaatgtttccagagcaaaggcttttcaacacaagaacttgtggctttgtctggagcccacactattggcagtaaaggttttggaagcccaatttcttttgacaattcatattataatgttcttttggagaagccgtggacgtcttcatgtggtatgccgagtatgattgggcttccttcagatcacgctcttgttg

SEQ ID NO: 2840 - DNA, 392 bp, Glycine max
  Clone ID: LIB3028-028-Q1-B1-F9
ctcctttcttccatcttcttctcttttcacgtcattatcctaaacttgcagattttcacatcccaagcaacatgaaggggaggttcatgtttctgtcggtgctcctttgtgccacctttcatgtctccttctccattactgacggcttagtagcaaacggcaacttcgagctgggtccgaagccctccgccctgaaaggaactgtggtgattggtggcagccactcgatcccagaatgggagatctctggcttcgtggagtacataaagtccggccagaagcagggcgacatgctgctcgtggtccccgagggggcctacgcggtgcgcctcgggaacgaggcctccatcaagcagaggatcaaggtgatcaagggcatgtactactccatc

SEQ ID NO: 2841 - DNA, 416 bp, Glycine max
  Clone ID: LIB3028-028-Q1-B1-G1
caaaagcaaaagatgaagatccagtgtgatgtgtgtgacaaagtggaagcctccgtcttctgtcctgcagatgaagctgctctttgccatagctgtgatcgcaccattcaccgcgccaacaagcttgcaaccaaacacgcccgtttctctctccactaccccacctccaaagacttccctctttgtgatatatgccaagagaggcgtgcatatctattttgccaagaagacagggcgttgttatgcagggaatgcgacgttcctatccacagagccaatgagcatacccaaaagcataacaggtttcttctcacgggtgtgaagctctctggtacttgtttagattctgcttcgtcctcaacaatttacacaataataatagagtcactggctctgaaggaagaaacgacgctcga

SEQ ID NO: 2842 - DNA, 372 bp, Glycine max
  Clone ID: LIB3028-028-Q1-B1-G10
cttctggccatctgttctacagcagcctgattgtgacttgttaagtaaagagtattgttgagcttggtatctactatctaagttgataatctataatttatagttgaattgcatgtgagcaagaattatccagttaaaattatgtgactgaagggagcccacatagaataatagttttaatttgtatggatatgctagttgacttgaagcaaaatccatgttgtatgtgtttccatattttcgagctggcctaaaaacttgtatgttctttacttttctctttgctgcttaactttttctggttttgacgctatctgtaagctgtatttactattttgtaataaaatgtcatttaatgtaatagaaaaagag

SEQ ID NO: 2843 - DNA, 405 bp, Glycine max
  Clone ID: LIB3028-028-Q1-B1-G11
aggagatagtgaaagagcttcttcctctaattcgagtgtacaaggatggcagcgtggagcgtcttctaagctctgaaaacgtggcagcctcccctgaagatccccaaactggagtctcatccaaagacatagtcatcgcagacaacccctacgtctccgctcgcattttccttcccaaatcccaccacactaacaacaaactccccatcttcctctacttccacggtggcgccttttgcgtcgaatccgccttctcctttttcgtccaccgctatctcaacatcttggcctcagaagccaacataatagccatctccgtcgacttcagactcctcccacaccaccctatccctgctgcctacgaagacggttggaccaccctcaaatggattgctttccacgcca

SEQ ID NO: 2844 - DNA, 403 bp, Glycine max
  Clone ID: LIB3028-028-Q1-B1-G12
caccagtttcaccgcacgaatatcttgttgtttggagcgatccgagaaaaactctgtaaacatgttggtttaccaggacctccttacaggtgatgagcttctctctgactccttccgttacaaggaaattgagaatggaatgctgtgggaagttgaggggaagtgggttgttaaaggagcagttgatgtagacattggtgcaaacccttctgctgagggtggaggagaagatgagggagttgatgatgcagctgttaaggttgttgacattgttgactcattcagacttcaagagcaacccgcattcgataagaagcagtttgttaccttcatgaagaggtttatcaagaatttgactcccaagctcgatgcagagcaacaggagttgtttaagaagcacatc

SEQ ID NO: 2845 - DNA, 346 bp, Glycine max
  Clone ID: LIB3028-028-Q1-B1-G2
ctctctctgagtcggtcgagttgaatcggtgtgagtcagtgaccgagtcgaaccatgtcggacgaagaacaccatttcgaatccaaggccgatgctggagcctccaagacctatcctcaacaagccggaaccatccgcaaaaacggttacatcgtcatcaagggtcgtccctgcaaggttgttgaagtttctacttccaagactggtaagcacggtcatgccaagtgtcactttgttgggattgatattttcactgccaagaagcttgaagatattgtgccctcttctcacaactgtgatgttccccatgttaatcctactgaataccagttgattgacattgctg

SEQ ID NO: 2846 - DNA, 386 bp, Glycine max
  Clone ID: LIB3028-028-Q1-B1-G3
agggaaataaaacctccgaaggctccgttcaatcaagtcctggagattacaatagtaataacaaggacaactctaagcaaccaaatttgaatctatatagcttctctccacaagcattattttgcttcttaacaagcatgtaatttcacacattttttttataaaaaaatcaaagatatgcgatgaaaatatggaagattaaagggaacatgcctatatatatgtggttttgcccaataactgcgtactcccccatgcccctgcacaaatcacagttgcatatcatgtaaatcgacggatgatatgtcatccccattttgtactgtagttaatagaagagaccaataaatgaagcaaacgttggtccttttttttaaaaaaagaaa

SEQ ID NO: 2847 - DNA, 353 bp, Glycine max
  Clone ID: LIB3028-028-Q1-B1-G4
gtttcaatcccctgttattttttcagagtgatcagaagagtaaaactagtaaaaaatttgctgctgaagctgggctccctgtgctgacaaatgtattacttccgaaaacaaaggggtttcatgcttgcttggaagctctgcgaggctcattggatgcagtatacgatgtgacaattgcatacaagaatcagtgtccttcctttctggacaatgtttttggtgttgacccttcagaagtgcacctgcatgtgcggcgtattccggtggaggagattccagcttctgaaaccaaagctgcttcttggttaatcgacacattccagattaaggaccaattgctttcggatttcaag

SEQ ID NO: 2848 - DNA, 383 bp, Glycine max
  Clone ID: LIB3028-028-Q1-B1-G5
ctcgagccgaatcggctcgagaccttacctctgttactacaactcttcaatggcttctagctttcaaagttcaccaatggcttccaactacagaagccataataagaaaagccacgacaatgacatgttccatccaacccaagtggtggtggttgtggtgcctttcccagcacaagggcacctcaaccagcttctcaacctctctcgcctcatcttggcacacaacatacccgtccattttgtaggttcgcccaaccacaatcgccaagtcatagttcgttgccaaaggttggaaccaaaccttaattaacacaattcaagatcacacaactccaaggttccccctttggtttcccctgcccccaacccaaatgctgaaacaa

SEQ ID NO: 2849 - DNA, 406 bp, Glycine max
  Clone ID: LIB3028-028-Q1-B1-G6
aaaatccttgggaacagtaattggttttgccatttcaaagctgggaaagaacattcaagtactttcaagttcctttgtcaataagcaagaccaatacactgtggaaggagtgcagaatcttggagacaaagcagtgatgtgtcataggctaaatttcagaactgcagtattttactgccatgaagtccgtgaaacaacagctttcatggttccattggtggctggtgatggaaccaaaactcaggcacttgctatttgccactcaaatacttctggaatgaatcatcaaatgcttcatcaacttatgggagttgatcctggaactaaccctgtttgccatttccttggaagcaaggccattttatgggtacccaatttatctgtggacactgcctatcagaccaac

SEQ ID NO: 2850 - DNA, 383 bp, Glycine max
  Clone ID: LIB3028-028-Q1-B1-G7
atctgcttctcactgatctccattcccattccatggcttccactgaatcatcccctttcaagaaaattcagattcaaagggatgacactacatttgacgcatatgtggttggaaaagaggatgctcctggaattgttgtgattcaggagtggtggggtgtggattacgaaattaagaaccatgccgtgaagatttctcagcttggtagtgggtttaaagctcttattccagatttatacagaggaaaggttggtctggatgttgctgaagctcagcatttgatggatggtcttgattggcaaggtgctgtgaaggatattgctgcttcggttaactggcttaaagcaaatggctcaaagaaggctggtgtaactggattttgt

SEQ ID NO: 2851 - DNA, 385 bp, Glycine max
  Clone ID: LIB3028-028-Q1-B1-G8
ggctcgagctttgcacgtctcaatctgagtcttcacttcatcgtttttgggattctctctctcaataatggcagcacgctttcaatctgcagctatctgaagctgtgaggccagactctctcatttcatttccatcccgtgtttaaattggaagctggaacctagtttatgccctgcttgatttggttgctcttaacccttttcagaaatcaaaagcacttgcaagttccattctttcagttttatcatcaggtactatgctggtgttccctatagggaaagatgaaattgaagtctaagaaatgatggaaatctattgtaccacttcatttgaaaggaaaatccgcaagccgtttttctttatttcgcaaagtcaattctgctg

SEQ ID NO: 2852 - DNA, 398 bp, Glycine max
  Clone ID: LIB3028-028-Q1-B1-G9
atattgtgccctccctctttctaactatttccctctcttaacacaattaacaaagatatatcatatcatatcaactccaaatgatgaaaaatattgggttgtttcttcttgtggtggtggctacttttgtggtggcagccacagctggtagcttttaccaagactttgaaataacatggggtggtgagcgtgccaaaatctatgaaaatggaaatcttctcaccctctccctagacagagcctctggctctggctttcgttccaaaaaagaatacttgttcggaaaaattgacatgcagctcaagctcgtgcctggtaactctgctggaacagtcactgcctattatttatcttctctggggcctactcatgacgaaatagacttcgagtttttgggt

SEQ ID NO: 2853 - DNA, 389 bp, Glycine max
  Clone ID: LIB3028-028-Q1-B1-H1
gcctcgctctgtttctgtctctgtgtttgcggctgaggattccgaacgagcgaccttcttcgtttctcgcaaagtttaagtcatcatgggtaaggaaaagactcacatcaacattgtcgtcattggacatgtcgactctgggaagtcaactaccactggtcatttgatctacaagcttggaggtattgacaagcgtgtgattgagaggttcgagaaggaggctgctgagatgaacaagaggtcattcaagtatgcctgggtgcttgacaagctcaaggctgagcgcgaaagaggaattaccattgatattgctttgtggaagtttgaaaccaccaagtactactgcacagtcatcgatgcccccggacatcgtgactttatcaagaaca

SEQ ID NO: 2854 - DNA, 365 bp, Glycine max
  unsure (1)..(365): unsure at all n locations
  Clone ID: LIB3028-028-Q1-B1-H11
ctcgagccggtcttcctcctcatctctacactactccacatagagcccagcctctcaagcccaagcccaagcccaagcccaagcccgttcataaaatcctcctgcagcagcacccagtacccagccctctgcgtctcatccctctccgtctacgcctccagcatccaacaggaccctcaccaactggttcagacagcactctccctctccctgaaccgcacccaagccaccaaaaccttcgtggctaactgcaacaaattcagaggcctgaaacccagagagcacgctgcactcaaggactgcgccgaggaaatcagcgacagcgttgaccgcctcagccggtcgctgaaggagctcangctatg

SEQ ID NO: 2855 - DNA, 383 bp, Glycine max
  Clone ID: LIB3028-028-Q1-B1-H12
accacatcttcttcccaaccactactactcactcactgcagatctcaattgcatcgctgtccatggctaccatcgttagcatcaaggtccgccagatcttcgacagtcgtggcaatccaactgtcgaggtggatttgacttgctccgatggtacttttgccagagctgctgttccaagtggtgcatccactgggatttatgaggcccttgaattgagagatggaggatctgactaccttgggaagggtgtatcaaaggctgttgacaatgtgaacaccgtcattggccctgctttgattggcaaggagccaactgagcagactgctattgacaacttaatggttcaacagcttgatggaactgttaacgaatggggttggtgc

SEQ ID NO: 2856 - DNA, 352 bp, Glycine max
  Clone ID: LIB3028-028-Q1-B1-H4
cacatgaaaagcctccaaaaccaacccaacgttggcgcgatggctttcccctccaaaggcgatgacgagcaagttctggtgcagcgtaaatcgaatgcgagagttttgacactaaacaggactaaacagttgaatgccctctctttttatatggtttctcggctacttgaaattttttctgaagatgagaaagattctgatattaaattggttgtcgtgaagggaaatggaagggctttttgtgctggtggtgatgttgcagctgttgctcgtgatggaagtaaaggtgactggaagtttggtgcaaatttttttcaaagtgaatttaaattgaattacttgatggcaacat

SEQ ID NO: 2857 - DNA, 364 bp, Glycine max
  Clone ID: LIB3028-028-Q1-B1-H5
agaaattgctttgctgtaagtttctgattcctttcttcagaattccaagttttcatttcgttagggacaaaagattgtgagatagagtatggctggaaaaggcgagggtcctgctatcggaatcgatttgggaacgacgtactcttgcgtcggcgtgtggcaacacgatcgtgttgaaatcatagccaacgatcagggtaatagaactaccccatcctacgtggctttcaccgatacagaacggttgatcggcgatgcggcgaagaaccaggtcgctatgaacccaatcaacactgtttttgatgctaagcgtttgattggaagacgtttttctgatgcatcggtacaaagtgacatgaaactg

SEQ ID NO: 2858 - DNA, 412 bp, Glycine max
  Clone ID: LIB3028-028-Q1-B1-H6
aaaaattgatctgcagatcgtctctgatccgttgcttcaaaaatcgacgttttcactacatttgggacaaacaattgtgatgctacagtaacgctggaacaagggatggtcctgctatcggaaacgactagtcaactacataatcctgctacagcgtgtgtgatcaatactcgtggttgaatatcaatagccaaacgactctacaggtaagtaacatactgaccaccaatcggtactgtggcgtttcacctgaaatagaaccgttgataggttatacggtcacaaaccaggtcgctatgaacccaatcattactgtattagatgcaacacctatgattggtatacgtatttctgaagcatccgtacaaagtgacatgactcagtcgccgttcaaggttaatcctggacctgc

SEQ ID NO: 2859 - DNA, 393 bp, Glycine max
  Clone ID: LIB3028-028-Q1-B1-H7
ggccatttgccttttcaattttcatattaattcgatatttgtaatggctagcgagagaattctcaagccatcaaagtggttctcaaacaaaactctaagaattagtcttcatcgccgaagatcaagatcctcctccaataactcattatctagtaattctccaagtccaagatcccccatgtcaaacaatggagagatcactgggctaatggaggcttttcgtcactttgataatgatggagatgggaaaatctcggcctatgagctaaggtcataatttggggccaatgggggattaaaggttcaagaagaaggctgaaggggtcatcaaggaccaaaattccgatgggggaacatgtgtgggatttcagggatttcaccaagctcatgaag

SEQ ID NO: 2860 - DNA, 320 bp, Glycine max
  Clone ID: LIB3028-028-Q1-B1-H8
gtgtatctaacttaacttttcttctcaaaatccaagtattccttggctttgtggccatcatcacggtacacaagaagagatcacagaaattttgcggaggatttaccctcaccaggatgtataagaataaatcaatgctttgacggaatcaattgaaacggaactcaatgaataagcatcagcttcaaacagagtcatcatagtgaagctgctgaaaaccaaaactgtgagaagaggtttatatgctggaatgggccttcaaatcttccaagaatttgtggggattaacactgataagtactacaaccccagaagtgtgc

SEQ ID NO: 2861 - DNA, 336 bp, Glycine max
  Clone ID: LIB3028-028-Q1-B1-H9
tgaaaatcgccatcatgataaagcttgacactgtccacattgctgtcattaggggtaatgtcgtagacgttatctggctcagagggggaaatgatcctctctcagttggtaaaatactgacccgcatccatcacgccagaggtagtcacatttgccatgactatcggtacatatagatgctagacaattattgtgtcttctaagaggacatatacgggtgtcatcagtagtactcactcaacgaagatgtttgctcggtatgacatgaatactgaaagactgtattgatggcagctatgttccaattagcattattattggtctcctggatggtgt

SEQ ID NO: 2862 - DNA, 374 bp, Glycine max
  Clone ID: LIB3028-029-Q1-B1-A1
gaaagagatacatagttagagagagagcagagacaccgttcggtgctccgctgaattcggttgtggcccctgcgctccgctgcaattttacactcaaaaggacctcatgtctaacatagaggagaacaaagatctgggacagatggacgtggatgcatctgatgagtcagctaacatgccatcaccccaaaagcaggaggagtctgtaaagaaaaagtatggaggaatgctgcccaaaaagccaccactcatatctaaggaccatgaacgtgcttacttcgattctgcggattgggcacttggaaagcaaggcggagagaagcctaagggaccacttgaggctcttcggcctaaattacagccaacgcagcagc

SEQ ID NO: 2863 - DNA, 404 bp, Glycine max
  Clone ID: LIB3028-029-Q1-B1-A10
cagaacaatcgtatgcagttttaagccacctgcatcttttggtcatgcgtgcaccttatatattttcctcagactacaaacacttctattgccagtataatgagccatcatatgtcaaaaagttgaagcttgaaatgctgactgcagttgcaaatgaaagtaacacctatgagatagtgacagaattatgtgaatatgctgcaaatgttgacattcccattgcaaaggaatcaattcgagctgttgggaagatagcattgcagcagtatgatgtcaatgctattgttgatcgacttctccagtttcttgagatggaaaaggactatgttacttctgaagctctggtgcttgtgaaagatctgctaagaaaatatccacaatggagtcaggattgtattgctgtt

SEQ ID NO: 2864 - DNA, 414 bp, Glycine max
  unsure (1)..(414): unsure at all n locations
  Clone ID: LIB3028-029-Q1-B1-A11
gtggtaacaaaaggcaacctacttcgccgaagcgctcgcgaggcgaatctacagagtcttccctcagcagcactccctctcggattctctacagattcacttctacgaaacttgtccttaccttaagttcgcgcacttcaccgcaaaccaggcgattctcgaagcgtttcaagggaaaaatcgcgttcacgtgattgatttcggaatcaaccaggggatgcagtggccggcactgatgcaagcccttgcgcttcgcaacgacggccctccggttttccggctaaccggaatcggaccgccggcggcggacaactccgaccacctccaggaggtanggtggaagctcgcgcagctggcggagaggatccacgtgcagttcgagtaccgcggcttcgtcgcaaacagcctcgccga

SEQ ID NO: 2865 - DNA, 400 bp, Glycine max
  Clone ID: LIB3028-029-Q1-B1-A12
attgattgatactatactagtgagaaaagaaagggaagtcctccgcgccgccactcctctcatctctctgctctaaacgacaccgttttaagtcttctcctcaagtcatggccacactcaagagcctctgcttcagaggaactgcctttcccgtttgcccctccaatgtcaccaacaatagaaactccaagagctcatattggaggcctgcacaagcaaccgtgaagcccaatttccatctcccaatgcgcagttttgagttaagaaatacgacttctccagaggacataaatgctctgagattgataactgccattaaaactccatacctacctgatggtcgatttgatcttgaagcatatgatgacttggtgaatatgcagattggacaatgggccga

SEQ ID NO: 2866 - DNA, 331 bp, Glycine max
  Clone ID: LIB3028-029-Q1-B1-A2
gtgcattttgatagcagccatatcctagcccacttcgtcgattttacgttagaaaagaagtgacttggaatctgaatccaaatttgatgggttatcttcaatttggcagacatggtgttaagcagatcattagatttagagatgccagttatgataatgttgtggtaaacccactcctatatgcttcccaaggacttcgttacaagaggaagctccaagtcatccttacaactgacatagataagctgggaaaggcaggtgatactgtcaaagttgcccctggatattttcgcaaccacctaatggccaagctccttgccttccctaacat

SEQ ID NO: 2867 - DNA, 317 bp, Glycine max
  Clone ID: LIB3028-029-Q1-B1-A3
gggagcatgaaggagacagaggagatgttggagttctggaaagagaagggtctgagttcgatgattgaaatggtaaacatggattacattaacaaagcctttgaaaggttggagaagaatgacgtgagatacaggtttgttgtggatgtcaaaggcagcaaacttgtcgatcagtaaaagaaagaaagtatactactagcacgacacacgcaacatccatccttccatcatgaagagtctggaaaagttattaattaattgagaactaaagctgtatttgttgttcactctaaaaaagaagctgtgttttgtttatt

SEQ ID NO: 2868 - DNA, 364 bp, Glycine max
  Clone ID: LIB3028-029-Q1-B1-A4
cgttaccttacatattccatttgtctctgatcttccaacaccttattcctcagagaagagacaatttggatcaccatttcacttcagaaacctctctcattattcttctcctcatcacatccctctcctcccttgccaccgccaccaacatcaatatcctccaccatgacctccaatccgacatcaccgaattctgcaagaaaaccaccaaccccgccctctgtgccgagaccatccatccccacttcctcaagaacagaatcgagcccttcaatgcgctcgacatacaagtggacgccaccctggcgaaggcaaaaaaaaccctagccaacattcaaaccctagaatccaaaacgggcaccac

SEQ ID NO: 2869 - DNA, 364 bp, Glycine max
  Clone ID: LIB3028-029-Q1-B1-A5
cacgtctactctaaaggatcccctcggggaattccaattccacattttcaagaaataaggaggcaaaaatgttcatatatgaattggaattatttgttttcttattaggcctatcctgaagccaaaggaaatgagatcggaattcctcggggaattccaattccacattttcaagaaataaggaggcaaaaatgttcatatatgaattggaattatttgttttcttattaggcctatcctgaagccaaaggaaatgagatcggaattcctcagggaattccaattccacattttcaacaaataaggaggcaaaaatgttcatatatgaattggaattatttgttttcttaataggcctatcctg

SEQ ID NO: 2870 - DNA, 357 bp, Glycine max
  Clone ID: LIB3028-029-Q1-B1-A6
cttccaaaacccctccattatgaagaacgctaacagcaacacaaaactaatccttctccacccttatatccaaaaacaaggaagctccaatcgcctatggcttttagccttcatatccttctttacattagccttccttgccacccttatttacacaagagacacaacctcatcttcctctaccactacctcttccaccccattatctagtttcgctaacacccctttaccatccactgtaatcaacaccctcctccactatgcctccaaatccaacgacaccttccacatgccccactcagacctaaaaaccatctctgaactgctcccaaaggtgtccctcaacatgcaacttcc

SEQ ID NO: 2871 - DNA, 342 bp, Glycine max
  Clone ID: LIB3028-029-Q1-B1-A7
gatcggtgttcacttgatctcatcataatcgtcagcgtcaattgaagaagatgccgatcagaaacatcgccgtcggaaggcctgaagaggcgactcaccccgacacgttgaaggcggctttggctgagttcatctcaaccttcatcttcgtgttcgccggctcaggctccggcatcgcctacaacaagctcaccgacaacggcgctgccacccctgccggcctcatctccgcctccatcgcccatgcattcgccctcttcgtcgccgtctccgtcggcgccaacatctccggcggccacgtcaaccccgccgtcaccttcggcgccttcggcgggcgccaaa

SEQ ID NO: 2872 - DNA, 218 bp, Glycine max
  Clone ID: LIB3028-029-Q1-B1-A8
gcaagagaaggcaaactctcttaagttggtcagccattgaagtgtgaacgtcatagttagtaatgcagtgctatgtatgaagtgatttatggattaataaaaggcagtggctgtgcattttgtgctgctgtaaatgtgctttatggagtcatttatttagacgatagtgatacaatataaatgggaaattgtccgcttcaagtaaagcgttttgttac

SEQ ID NO: 2873 - DNA, 409 bp, Glycine max
  Clone ID: LIB3028-029-Q1-B1-A9
tgattgcaagcccacggggaataccaatattagagactctccacatcactctgggttttggactcaatcagacggtgatggtgtgtccatctttaattcgaagcatatttgggttgatcattgctctttgtctaattgtcgtgatggtctcattgatgccattcatggatccacggccatcaccatctccaacaattacatgacccatcatgacaaggttatgcttttggggcacaatgattcgtacactcaagacaaggacatgcaggtcactatagcattcaatcattttggagaaggccttgtccaaagaatgccaatgtgtagacacgggtatttccatgtggtgaacaacgactacacccactgggaaatgtacgccattggtgggagtgcaaaccctaccatc

SEQ ID NO: 2874 - DNA, 373 bp, Glycine max
  Clone ID: LIB3028-029-Q1-B1-B1
tgaagacacaaaagaaaaaaaatgggttcttctctgtggacctgtctgattttgttatcacttgcttctgcttccttcgccgccaacccaagagcaccaattgatgtgccatttggcagaaactatgtgcctacctgggcctttgatcacatcaaatacctcaatggtggttctgagattcagcttcatcttgataaatacacaggtactggcttccaatcaaaagggtcctacttgtttggtcacttcagcatgtacataaaattggttgctggtgattcagctggcacagtcactgctttctatttatcatccacaagctcagaacatgatgaaatagactttgagttcctgggaaacacaaccgggcaac

SEQ ID NO: 2875 - DNA, 405 bp, Glycine max
  unsure (1)..(405): unsure at all n locations
  Clone ID: LIB3028-029-Q1-B1-B10
aaaccctattgcacgttttgcaatcgaactcgacaatgggcaatagcaacctccctcgaagaatcatcaaggaaacgcagcgtttgctcagtgagccagcacctggtattagtgcctccccctctgaagagaatatgcgatatttcaatgtgatgatccttgggcctacccagtcgccttatgaaggaggcgttttcaagttagaactatttttgccagaagaatatccaatggctgctccaaaggttaggtttctaacaaaagtatatcatccgaacattgataagcttggcaggatatgtcttgatattctgaaagataagtggagtcctgcacttcagatacgcactgttctattaagcattcaagctctattgagtgcaccagnaccagatgatccacttt

SEQ ID NO: 2876 - DNA, 380 bp, Glycine max
  unsure (1)..(380): unsure at all n locations
  Clone ID: LIB3028-029-Q1-B1-B11
tagagaactggtactacaagatattgctacttatgactggccagttggagaatgccactatcgctgtcgatgccttgtctgtatgtatgaccatcaaacgggtgggaaatgatgattcccctggctttcttcgcgggtactggggtaagggtggcgaacgagttaggcgcangaaatggcaaagcagcaaaatttgcaacgcaagtatcagtggcacaatcaacaatcattgggcttatattttgcgttctgataatgatattccatgagcatatagcatacatattcaccaccagcactttcgttctacaagccgttgacaacatgtcattactcttagctatcaccattcttctcaacagtgtacaacccgttttgtc

SEQ ID NO: 2877 - DNA, 390 bp, Glycine max
  Clone ID: LIB3028-029-Q1-B1-B12
cagacttgcttcacccatagggaataccaaacttagcgaggctagctcaggtagctcagttttagaagtgtctttcaagggcagagaaattgttgcttatgatgatatcctctgactatgaaaatctgtattgttagagggtagtcttattctgtatcaatgatttgaatttgggctttagatctctttgtagttcttttttcccttttgttaagtatgtgctcaatgagatactgggaagtaacttatggagttggttgtgatgtttaatacctacatcgtagatgtaatgtaaatagttggatttacattttgttgtctcgtcaattctttggatttgaaagtgtaagatgttcttccatgattgttcacatcacaaaaccttttttt

SEQ ID NO: 2878 - DNA, 355 bp, Glycine max
  Clone ID: LIB3028-029-Q1-B1-B2
gtaacattgggttgtgatttgtgagggaagaacgggtagaaagaatcaggagaaggaaataatcatcaaccatggcagggagattgacgaacgcagcatcgaggatcttaggcggaaacggcgtcgtttaccgatccgttgcttcctctcttcgcctccgctccggcatgggcctccccgtcggcaaacactatgttcccgacaaaccccttcccatgaatgaggaactcctgtgggacaacggcactgcatttcccgaaccgtgtatagatcgtattgctgacactgtcgggaagtatgaagcattggcctggctgtgtgggggattgagttttttcgcgtcgctgggattgtt

SEQ ID NO: 2879 - DNA, 373 bp, Glycine max
  Clone ID: LIB3028-029-Q1-B1-B3
tactctccccacaagtatcactgatgcttgccctgctccaaaggaaactaaatgctcttatgagcatgtcaaagattgtgtttcaagtcattcctctactgacttggatcaacgccggtttgacacatcatcgtaccagcaacgtgcggaggcattggaggggttgctggagttcagtgctaggctcctacaacaacagaggtttgatgagcttggggtgttgctaaagccattcgggcttgagaaggtttctccaagagaaacagctatttggttgaccaagagctttaaacaaactgcagtctaaggttttctttttcatgcatgcatatgattatttgctaactgataatgtacataacgttgtacattt

SEQ ID NO: 2880 - DNA, 357 bp, Glycine max
  Clone ID: LIB3028-029-Q1-B1-B4
gtcttgccccatcaatacaggctccaggatcttggtcttcacctctggacctgctactctgggacccggaatcgttgtcgattctgatcgccgccaacccatcataactcaccatcacatcttcaacgcccaagcaacacactatgctaagtcttccgctttctagaatcaactctccaagaggctatccggtgcatctgttgttctcgatctctttgcctgttcccttgatcaagttggggcaaccgagctccgaggacccgttgagcactccggtggattcatcgttctctctgagtcttttgattccgatcagttcaagaattgtctgaggcagatgttcagatgtgatgacca

SEQ ID NO: 2881 - DNA, 314 bp, Glycine max
  Clone ID: LIB3028-029-Q1-B1-B5
aattatttgaacgacctcaatcggcacaagcaattactcatggagtgatgcattgcgtgggctatatgtgctgatgttgcctttaggggttgcatgttttccctctatatctattaaaacttatggaataatacttgtaacggtgtgtgttagtgtccacctgtgggtgaagttgacaatgtcacaagctggggtcctttattaggcatggcaaaatatcgtagggttgtaaattggcatgaacttgtactgagcataatttctcaagaagcaatcatagtttgtatggttgactaacattaaggactaaaggc

SEQ ID NO: 2882 - DNA, 348 bp, Glycine max
  Clone ID: LIB3028-029-Q1-B1-B6
gtccattgtctctactcttagaacgcgcgcttctaaagagaagagacaatggatcacttgagattcaacaaaaccacccttgtcctcatcggaaccctctcttgcctcctcctgtccatcactgccgtcccctcaactcgcgtcttggaactcgctcccagcgaagcccccaccgcggagcctatagcctccggcatcagcctcttcgacaatcttcttgccaaggaatcaagccccatgattctgaaattctgcaccggcaccgagaaccccaccctctgcgccgaaaccattgcaccatacctaaccggcacattcgacccgatccaagcgctagagaccgagatc

SEQ ID NO: 2883 - DNA, 324 bp, Glycine max
  Clone ID: LIB3028-029-Q1-B1-B7
ctctacaatctataatcctatcagaaatagtcatgcatcttaatttgcagataagatccgtgacataagttgtataattttgaagttgttatgattatccttccactttgtgctactcggtacactttttgtaattgatggatgtgttgtagaggtaggtgtcaagttaacattgtagttattttgagatttagtataacatttaatctttcagttttggagcaagcaaataaggtttatgtatgaaattctgctttgtactgattcatcaacacaaattgactatgcaattgtgaaaagaaaaatgttgatggtagacgtttt

SEQ ID NO: 2884 - DNA, 338 bp, Glycine max
  Clone ID: LIB3028-029-Q1-B1-B8
gaaatttctcctgttgttttaactgtaatttcatgcctggtcccaattcttcagcatgcggagggactcaacaagtcgcttatagaaaatagtgcaataacactggggaggcttgcatgggtctgtccggagcttgtatcaccacatatggagcatttcatgcaatcttggtgcactgctttgtcaatgatacgagatgatgttgagaaagaggatgcttttagaggtctatgtgctatggttaaagctaatccttctggagctctaagttcgctagtttgcatgtgcaaagccattgcaagttggcatgaaataaggagtgaagatttacacaatga

SEQ ID NO: 2885 - DNA, 406 bp, Glycine max
  Clone ID: LIB3028-029-Q1-B1-B9
ccgcaccagtttcaccgcacgaatatcttgttgtttggagcgatccgagaaaaactctgtaaacatgttggtttaccaggacctccttacaggtgatgagcttctctctgactccttccgttacaaggaaattgagaatggaatgctgtgggaagttgaggggaagtgggttgttaaaggagcagttgatgtagacattggtgcaaacccttctgctgagggtggaggagaagatgagggagttgatgatgcagctgttaaggttgttgacattgttgacacattcagacttcaggagcaacccgcattccataagaagcagtttgttaccttcatgaagaggtttatcaagaatttgactcccaagctcgatgcagagcaacaggagttgtttaagaagcacatc

SEQ ID NO: 2886 - DNA, 367 bp, Glycine max
  Clone ID: LIB3028-029-Q1-B1-C1
cgttaaacaaggcatttcaattatcgtgtcttcttggctctctgtttaggatcgacatggatttcttttttccattggcaatacttgtgatgatattaggcacaccatactctagtgcttctggaaagagtgaaagtaatgtgaaaacagctgtttttctgtctcctaagtttgaacttggaccgggatcggttgcaaataaatatgattatgatattgattttccaagaggtcatatagcacttaagagtttcaatgcagaggtagttgatgaagcatggaaccctgtgcctcttcatgaaacttatctccaccactgggttgtttggagatactatcaacctaaatatgtgacgacacacacaaa

SEQ ID NO: 2887 - DNA, 403 bp, Glycine max
  Clone ID: LIB3028-029-Q1-B1-C10
ccttctccttctcttctctgcttctctttgcatctccgaaaacaatgaagctcattagcagcattaaccccaaaaatctcaaactcagtcccaaacgcttctttcgcaaaaaggaacgatctttaatctcacgctccgacccaccttcattcggatccggatcttcctccgacgactccaccacaaatcacaagccttccgccggtaaccaaactccgaccagcgtcctcccgggcgtctccggagactggtccgacgtcgccgccgtcgacgtgcggtgggacctcgcccaggccttccgcctcatcgaccgcgacaacgacggcgtcgtcacacgccaggacctcgaggccctcctcacgtgcctcggcgcgtcgccgtgccccgacgacatggcggtcat

SEQ ID NO: 2888 - DNA, 399 bp, Glycine max
  Clone ID: LIB3028-029-Q1-B1-C12
cacacaaacaccgaaaagttgattgaaaaggacatgatgatgtggcaaccataccaaactatgtttggttgactgaagaggatatggtagtattatattcaggcaaacaaccttctttgggggatatgagatttaataaatcaagctgttccttttgtgataattttttatattcaacaaagaacacgagtcatatttgatttttatttataaaaccaaatggccttaacatttctatttgccattgatttcagcacaaaatggaatctgaatcactgatatggggtgacaaactcacacagacgggattgtcaatcgttggttttcatggagcactacctgaagaaaggaatctacgccagaaattcatggtagatgtagatgcatggatggatctca

SEQ ID NO: 2889 - DNA, 353 bp, Glycine max
  Clone ID: LIB3028-029-Q1-B1-C2
caatttccaacgcaaaccgccaccacccttttccttcctcctcacgcctcctctattctttgtcaacccaaccaaaacgaccgtcgttattttcctctttctttcaccaaatgatgatgggttcaaccccgcctcgatcataagaaacaccaaactaacaaagaagcagaataagccaagaaggcgatggttcatcaaaacgacaacgacaacgacggcagcagcaccgccaccttcctccatctcgcgtagtgatcgacgacgacgacgacgacgacgatcggcgattgaattcttcttccgcggggatgatgtcgaacctgtacggcgaatacaaccaacagatcgactac

SEQ ID NO: 2890 - DNA, 340 bp, Glycine max
  Clone ID: LIB3028-029-Q1-B1-C3
gttgatcaagagtcgaacaatttgaagctggaacttgaacaagtagaagaggagctccaaagacttaatgagcaagttttgtcagccagggttcttaaatcaaaattggaatcagcttcctccttactgcatggtttgaaagctgaattagcagcatatatggaatcaaaagtaaatgaggaattttataaagaacaaaaagaggaagttgaggaactaaaactgaacatagaaaaagcaacttctgatgttaacagattgagggtggcttctgtgtcactaaaatcaaaactagaagaagagaagtcggttctcgcatcccttaagcaaagtgaggaaa

SEQ ID NO: 2891 - DNA, 354 bp, Glycine max
  Clone ID: LIB3028-029-Q1-B1-C4
ccctcttcttccccaccatcacaccaaccaaacctcactctccctgccatggtcatgggagcctttcgccacttcgaaccggtttccaaatgcagcaccgaaaaccggtttaaccaaaccgtggcctcggacttggacggcaccctcctggtgtcccctagcgcctttccttactacatgctcgtcgccatcgaagccggcagcttcctccgtggccttgtcctccttggatccgtccctttcgtgtacttcacgtacatattcttctccgagaccgcggccatcaagtccctgattttcattgccttcgcgggcctgaaggttaaggacattgagatggtcgcgtcctcggtg

SEQ ID NO: 2892 - DNA, 349 bp, Glycine max
  Clone ID: LIB3028-029-Q1-B1-C5
tagcagagcagcgactcacactggtcttcgcttctcattcatcatttctcagctaaccttctcttcctctcagtctcagatcagaaacctcaggcagccatggcagcgttccagaagatcaaggtcgtcaaccccatcgtcgatatggacggagatgaaatgactagggttatctggaagtcaatcaaggacaagctcattttgcccttcttggagttggacatcaagtattatgacttaggccttccttaccgtgatgagaccgatgatgaagttacaattgaaagtgcagaagcaactctcaagtacaatgtagcaatcaagtgtgcaactatcactccagatgaag

SEQ ID NO: 2893 - DNA, 352 bp, Glycine max
  Clone ID: LIB3028-029-Q1-B1-C6
cacacacccctcgcatccaacaatgtctctcaccattccctccaacctctccaagcccgccgccctccgccccaaactaagcccaaagctaaggtccgccgccacaaccaccatcgtctgcagcaccaccaacaacaacaacaacaacaacgtgtcctccgacctgaaggcgttctccgccgcgctggccctctcctccatcctcctctccgcccctctccccgccggcgccgacatctcggggctcaccccatgcaaggagtcgaagcagttcgcgaagcgtgagaagcagtcgataaagaagctggagtcgtcgctgaagctctacgaggcgggcagcgcccccgcactg

SEQ ID NO: 2894 - DNA, 367 bp, Glycine max
  Clone ID: LIB3028-029-Q1-B1-C7
aaactcaagtcactgccatctcgcacgtttgaatccccagaaagaaaaaaaaaatgcacgaaattagagaccctgcaattaggcttttcggtcagaagatccctttccctgaagatgttgttgttgacaaagaagaaaaagaaatagaaagtggcgaggaaagagaacaagagatggaaaaatatgaagaccaaggacacaaggatgctggagttgaaaatgttactgaggaagagctagaagttgatcctcctccaaatgctgaagagactaagaattcaggctcatcccctgaggctattgtgaaccccaaaacaccttccatagaagaagaaacagaaaaatcaaaaggtgacaaaacagagaa

SEQ ID NO: 2895 - DNA, 351 bp, Glycine max
  Clone ID: LIB3028-029-Q1-B1-C8
gttgaagaggtggagatttactatgacccggcagagcttcttggaggccttctttcagggaaccacataaatcacccaattgaagaggatggcaccaaaacttcagcaccttcccaaggatgtcccttctccaaataattacaatgatgtttttaagtgaatggtgtcttgggatccagctatatttcttgaattaattaatgtggcagctgagatttgaaggcaaatatagtatttgtgtgaaattgggtccattgaataaaattggaaacatgtcaaaatgaattatttttccccccgctttatatggaaaattatggcaaataaatgtgatgtgttggaaagcaatgt

SEQ ID NO: 2896 - DNA, 360 bp, Glycine max
  Clone ID: LIB3028-029-Q1-B1-D1
ggattcttcaaactccaatggagcatcacagaggctcctggacttggctcaacggctccgcctgtacaaacccccaccattccctgaagacatcttggatcagatcatggaagagaagggagataaggttgtctcagaagtgagttacacgaaatcagccaccccaattgctcaaaacacagcaaaaatcggatacaagagagctgctgttttgatctgcatctttgaaggggatgctggggatctgagagtgatactcactaagcgctcttccaagctttccacttactctggtcaagtggccttgcctggtgggaaagccgaggaaggggataaggatgatggggacactgcaaaaag

SEQ ID NO: 2897 - DNA, 397 bp, Glycine max
  Clone ID: LIB3028-029-Q1-B1-D10
aacactcataacacaaagcacaaagcaaagctcatccttgagttaaaaaatggcagcagcttcttccatggctctctcatccccatccttggctggcaaggccgtgaagctgggcccatcagccccagaagtgggaagggtgagcatgaggaagaccgtcaccaagcaggtctcctcaggaagcccatggtacggcccagaccgagtcaagtacttgggcccattctctggcgagcccccgtcctacctaaccggtgagttcccaggcgactacggctgggacactgctgggctttccgcagacccagaaaccttcgccaagaaccgtgaactcgaagtgatccactccaggtgggccatgctcggagccttgggctgcgtcttcccggagttgctg

SEQ ID NO: 2898 - DNA, 408 bp, Glycine max
  Clone ID: LIB3028-029-Q1-B1-D11
agaataattatcttcttcaaaataaaataaaaaaaaataaaaaaaggaagcagataggaaagggttgaatccaaaaaaaaataaaaaatggcatttcttgacgtacggaaaaaaataatgggtagggtttggacttggacgatggcactgatgctttgcctgatggcagcatcggttaggagcgaggacccttatatttactacacatggaaagtgacatatggtaccattgcccctatgggtgttccccagcagggtatcctgatcaatggccagttccccggccctgaaatcaactccaccagcaacaacaatgttgtcatcaatgtcttcaacaacctcgacgagcccctcttgttcacatggcatggtgtccaacacaggaagaactcctggcaagatggtaca

SEQ ID NO: 2899 - DNA, 395 bp, Glycine max
  Clone ID: LIB3028-029-Q1-B1-D12
ctggtactggcttccagtccaaagggtcttacttgtttggtcacttcagcatgtacataaagatggttcctggagattctgctggcacagtcactgctttctatttatcttcccaaaacgcggagcatgatgagatagactttgagttcttggggaacagaacaggacaaccttacattctgcaaacaaatgtgttcaccggaggcaagggtgatagagagcaaagaatctatctctggtttgatcccacgaaagaataccacagatactccattctctggaacttgtatcagattgtgttctttgtggacgaggtgccaatcagggtgttcaagaacagcaaggacttgggagtgaaattcccattcgaccagccaatgaagatctacaacagt

SEQ ID NO: 2900 - DNA, 354 bp, Glycine max
  Clone ID: LIB3028-029-Q1-B1-D2
ggactatgcatttgagttcattatcaacaatggcggcattgattctgaagaggattacccttaccgtggtgttgatggtagatgtgacacatataggaaaaatgctaaggttgtttctattgatgactacgaagatgttcctgcctatgatgagttagctttgaaaaaggctgttgcaaatcagcccgtcagtgtagctattgaaggagggggcagggaatttcaattatatgtatctggtgtattcactgggagatgtggcacagcactagatcatggtgtcgtggctgttgggtatggtacagctaatggtcatgattattggatcgtaaggaattcatggggtcctagctg

SEQ ID NO: 2901 - DNA, 358 bp, Glycine max
  unsure (1)..(358): unsure at all n locations
  Clone ID: LIB3028-029-Q1-B1-D3
caaaagttgaaagaatgagccttgcttaagtaagggtgtcgcgataggcccaagtccatatcagtttataaaaattgttgtgctaatgagagaggatctcaacacgaattagagcaattgttcttcgagagagagtagatcattcttaggcttttagctcgctattcttatgctttgtataaattcttccaaggattgtaatcatgctatgagcaattaatctcctcatctgttgggattagaatgcctgacctaatttcatgtaattctcccttttaatataattgtttatgtgtttattaaaaaaaannnnnaaaaaaaaaaaaataataaagaaataaaaaagggcgggccccga

SEQ ID NO: 2902 - DNA, 357 bp, Glycine max
  Clone ID: LIB3028-029-Q1-B1-D4
attcttcgaaggaatttgtcaaagagtagccatcgccccaacgatcccgtttcccttcacttctctacgcaaagccccttgttttgcatagagctacttaaaatgtcggagggaaatgcggagagaggaaagagaattgccattattggtgtctcaaccttattgttggtggcgatggttgtggctgtcacagttggtgtcaatgttagtgagaatggttccaacaatgaggacacaaaaattgcttcttctgtaaaagccgtccaaaccctttgccatcccacaaattataagaaagaatgtgaggaaagcctcatagccagggctggaaataccactgatccaaaagaacttatc

SEQ ID NO: 2903 - DNA, 61 bp, Glycine max
  Clone ID: LIB3028-029-Q1-B1-D6
gttgattgtgtcgtttggatgatgattgctcccaacaaatattctaatatttttaactttc

SEQ ID NO: 2904 - DNA, 325 bp, Glycine max
  Clone ID: LIB3028-029-Q1-B1-D7
gctttgagagagagagagggaggagggagagtgttgacgctccatcaagatgggtatttctagggattccatgcacaagaggcgtgccactggtggcaagaagaaggcatggagaaagaagagaaagtatgagcttgggcgtcaggccgcaaacaccaagttatcaagcaacaaaactatccggaggattcgtgttcgaggtggcaatgttaaatggacggcattgaggttggataccggcaattactcatggggtagtgaagcagttactcgcaagactcgtattctagatgttgtttacaatgcctcaaacaatgagcttgtg

SEQ ID NO: 2905 - DNA, 352 bp, Glycine max
  Clone ID: LIB3028-029-Q1-B1-D8
gataggtggagttacatgccagtcatccatcttaatgcaattgcaattgatccaaggaacccaaatctctttgcggttgctggctctgatgagtatgctcgactttatgatattcgcaggtataaatgggatggatcaactgattttggccaaccaaccgacttcttttgccctccacacttgattggtgatcagcaagttggaataacaggcttggccttttctgaacaaagagagctgcttgtgtcatacaatgatgagcttatttacctttttacccaagatatgggtttgggaccaaatccccctgatcctgggtcccctaaatctatgaacagtgatgcaagtgaaa

SEQ ID NO: 2906 - DNA, 284 bp, Glycine max
  Clone ID: LIB3028-029-Q1-B1-D9
cttcatacattttacccgttactctctctctctccatcttcattctcttcttcttcttcactattttctcacttatcgtgaccttatcccaacccgtttctgttgctaaagtgcttctgggctgttgtcaaatcaatccacaaccctcaaatgttggtcagcttcttctccccaaaaaagcgttctttctttcttttcccttcccatttaatatttttcccactataaatttcgtgccctctttcccttcactttcatcctctatacatggatgttttgtgttt

SEQ ID NO: 2907 - DNA, 375 bp, Glycine max
  Clone ID: LIB3028-029-Q1-B1-E10
ctcttcgctcctccgtcactccaccgccgcgtcgctccgccgttggtcgcgtgtttgcggcgagatctacatccttagtgtgaatctgcgattcttcgaatcgaatcaggtgagagcgtggtgtgtgtttgagttttgagtatggcagcggcggaagataagtggtgcgtggtgaccggaggtcgtggtttcgcagctcggcatttagtggaaatgctaatccgtcacaacgagtactgcgttcgcatcgccgatttggagggcaacattgttctcgagctcgccgagcagttagggcttcccgggcaggcccctgaactcgggccggggccaatatgtctcccttgatcttcgcaacaaggcccaacttctaaa

SEQ ID NO: 2908 - DNA, 406 bp, Glycine max
  Clone ID: LIB3028-029-Q1-B1-E11
gctcctttatatattgtttccgtgtttttctctctttgtgattttgtgaggcccaaactaactttataagcaatttacgtgtttgaaattaatattttgtgagctagctagcttcttcatcatggcaaagtcttctactgaaaagaatggactgaagaagggtccatggactccagaggaagatcagaaactcatcgattacattcagaaacatggacatgggaagtggagaacccttcccaaaaatgcaggactaaaaagatgtggaaagagttgtcggcttcgctgggctaactacttgaggcccgatataaagagagggagattctcattcgaagaagaagaagccatcattcagttacacagtgttttgggaaacaagtggtctacaattgctgctaacttg

SEQ ID NO: 2909 - DNA, 218 bp, Glycine max
  unsure (1)..(218): unsure at all n locations
  Clone ID: LIB3028-029-Q1-B1-E12
agtcccatcatcaattgccatcgtccattggaattaattcactttccaaaagcaacaaataagaaacaaacttccttttcaagtcagtcccgtcaatgtcgccatcntcttcatcttcttcatcttcgtcagacaagcatttgcttttgggtggtaataactcgtaccacttttcatccggaatcgggcactggtagcttagctcgtgtaaaatgtgt

SEQ ID NO: 2910 - DNA, 370 bp, Glycine max
  Clone ID: LIB3028-027-Q1-B2-D11
gtaagtttgtgctgcgagagagaggggttccgttctgggatatggtgtagactaaaattctgaatgtgtagacttgtaaggtgtgccagcttgcagaacttggcatctgcctttttgagtgtacctagtcgcatcttcacctgatctgctcttagcaccttgtgttatcgtctcctcgtatctaggcttaggcctaggcatgcaccccagcctcagtcaccatcctgacacttaccaatagtcagcatggagtcgtcaaagatctacgcttacctcttcctctgcaagatcattctctcttccgccactcgcatccacggttgtggctgctgtggcaaaacccccttaaagcagaagcctggtaaaacac

SEQ ID NO: 2911 - DNA, 378 bp, Glycine max
  unsure (1)..(378): unsure at all n locations
  Clone ID: LIB3028-025-Q1-B1-F9
atcacagtcacgcagcaaagcaacgctctctttttctccgtcactgccacttctcttctctagggtttatcgtcatttgatctcaacctctcttcctcccaaaatgccgtctccaccgcttccacaatcggaccgctagtgcccctgctttttccgatgtgcaatgtatattttgttcgctgctgcggttctggaaatgttgaattctgaactgagataagatgagtaggattgaattatcgagggcgaagtcagcgccggttccattggggactctgattggccgtgagcttcgaaatggaaaagttgaaaaaccttttgtgaagtatggacaatctggatttggcaangaaaggagaagattactttctgatcaag

SEQ ID NO: 2912 - DNA, 343 bp, Glycine max
  Clone ID: LIB3028-025-Q1-B1-G1
tgctttcagataactgatagttgtgtgcaattatttgaattcaagaatgtctcaacccgactcgttggtggctgagattgaggtgaaaacctctgctgatcacttttacgacaccttgaagggtaagaaacagcatcgtattcatgatgttgcccctcatcatatccataaggtggaagttcatgaaggtgagtgggataaatctggcaatatcaaggtgcttacattcgctgatggggacactgttgagaccttaaaggagagagttgattttgatgatgaaaacaagaagataacctacaccatattggagggtgtcatgttgaagtactataagagctac

SEQ ID NO: 2913 - DNA, 342 bp, Glycine max
  Clone ID: LIB3028-025-Q1-B1-G11
cttccataatattacagacactcatgtagctcatcacttgttctccacaatgccacattatcatgcaatggaggcgacaaaggcaataaagcccatcttgggagagtattatcggtttgatgggactccatttgtcaaggcaatgtggagagaggcaagagagtgtatttatgtggagccagatcaaagtactcagagcaaaggtgtattttggtacaacaataagttgtgatgattaatgtagccgggggcttcttgtccgtcaggtgggatggtttgaactttcctttgtgactgtttagtatcatgcgtgcttattgggaataattttgttgaaccctg

SEQ ID NO: 2914 - DNA, 375 bp, Glycine max
  Clone ID: LIB3028-025-Q1-B1-G12
ttgtaactttgtcttttgcttgcgaatctgaatcgaataataatcaatcaatcatcatgtcgtcggcgaagaagatcacactgaagagttcggacggcgaggctttcgaggtggacgaggcggtggcgctggagtctcagacgataaagcacatgatcgaggacgactgcgccgacagcggcatccctctgccgaacgtgacgagcaagatcctggcgaaggtgatcgagtactgcaagaagcacgtcgaggccgcgaatcccgaagacaaaccctccgaggacgatctcaaagcctgggacgccgatttcgtcaaggtcgaccaggccacgctcttcgatcttaacctggctggcaacctacttgaccatcaag

SEQ ID NO: 2915 - DNA, 362 bp, Glycine max
  unsure (1)..(362): unsure at all n locations
  Clone ID: LIB3028-025-Q1-B1-G3
ttaanatatctcttccatacaagtttgttttcaaagtgtttttgtctcccaaatcctactcttgtgaccacaagccttcacttcactctctctctctctctctctctctctctctctctctctctctcttttttgaaacccttttttctcttctcaaaccaaaccaagcaagcaattatattacactactcactcactgagaccatggctcctaatatcaccaccgtcaccgacgctcaagccaaggccgccggcgggcgtggccgtgcctacgtcaccttcctcgccggaaacggtgactatgtgaaacgtgtctttggctttggcaaaagtctgatgaaggtgaaaagcatgtaccctct

SEQ ID NO: 2916 - DNA, 352 bp, Glycine max
  unsure (1)..(352): unsure at all n locations
  Clone ID: LIB3028-025-Q1-B1-G4
gaagaagacttgatcttgataaactagattgcaaatcacggtgaacgtgtttggcattctttagccaaagcttctggtcataaacgacagggaaagagttgtcgactccgttggctaaactaccttcgtcctgatgttagaagaggaaacattacacccgaagaacagcttttgatcatagaacttcatgcaaagtggggcaatatgtggtccaaaattgcaaagcatcttccaggaagaactgacaatgacattaagaacttctggagaactatgatccanaagcacattaagcaagctgagacttcacagcatcatggtaattcatcagagaatactaataatgatcatc

SEQ ID NO: 2917 - DNA, 398 bp, Glycine max
  Clone ID: LIB3028-025-Q1-B1-G5
cggctcgagctactgtaaaaccttgggcaacaggattaagtggacagcttcagaaggcatttgtaacaggtgtgccaaagctaaagagatcagagcttgaagcagcatgtgaagattttagtaatgtaattggcacttcatccattggtacagtttacaaagggactttatctagtggtgtcgaaattgctgtggcatctgttgcagcgacatcatccaaagattggtcaaagactctagaagcccaatttaggaacaagatagatacattatcaaaagtgaaccacaggaattttgtaaatcttcttggacattgtgaagaagatgagcctttcacaagaatggtggtttttgagtatgccccagatggaacactctttgagcatttacacataaaa

SEQ ID NO: 2918 - DNA, 357 bp, Glycine max
  unsure (1)..(357): unsure at all n locations
  Clone ID: LIB3028-025-Q1-B1-G6
gtttaaacctaattctcatttcttcatcgttcgattcttctcctcctaaagatgcagatcttcgtgaaaactttgaccggtaagaccatcacccttgaggtggagtcctccgacaccatcgataacgtgaaagctaagattcaagacaaggaagggatcccacctgaccagcagagacttatctttgcgggtaaacagcttgaggatggtcgaacccttgccgactacaacatccaaaaggaatccactctccacctcgtgcttcgcctcaggggtggcatgcanatctttgtcaagactttgactggcaagnacatcaccctcgaggtcgaatcctcggacaacattgataatgtc

SEQ ID NO: 2919 - DNA, 378 bp, Glycine max
  Clone ID: LIB3028-025-Q1-B1-G7
aatttttaattttgtttatataattcacagcattttaattccaataataataataataataagtaaggtttaatcattcgagttggtcagattttacttatgttttgattaaattgaattttaaattagtcaaaatctttttttaagaggattaagaaaaaaaaattctaaaaatgtgtcccttaaacatcaagccatcttgattttgcctacttttaatacatttgtcttcttgctcacataaactttttttttatgcgttttttctcataaactcaagaaattaaactggcataagaagatatagatgctaataaaacaaactagagatccccgaacgtactccagctattcaagattcatgtgtgtcaggtttat

SEQ ID NO: 2920 - DNA, 376 bp, Glycine max
  unsure (1)..(376): unsure at all n locations
  Clone ID: LIB3028-025-Q1-B1-G8
gctatactttatctcggctattccctgctcatggcaattgcaatcatgttgtcaactggaaccgttggcttccttatgtcattttactttgtgcactacttgttctcatcagtaaagatagattgaagtttgctttgctatctctcaccagctaaagcaaaaggcatgctggaagaagaatttttcttaaatagtgtaacttttgcttaattctttttgtagcttgatttgcagcatgttgagtggtgaaatagatgccttgctgattgcagtaaatagttgccactcaattttatgttgctatgcgaactacagtttgttcncctttctacctgtctctcncgtaagtttactcattcaactagtgtttggtatc

SEQ ID NO: 2921 - DNA, 379 bp, Glycine max
  Clone ID: LIB3028-025-Q1-B1-H1
gtttgctctgttgttttctcagcagttaccctagaagacactattagtattggaagtcttgcaggcatgtttctcatgttcactgggctctacttggttctttgggccaaaggaaaagaaggacacgcaggtggagatggcttagagtaatcttgaaacagctgttccctttgacgtattggtgacacagaattcccaagagcacattgtagaaagacagaggtctcttgggtttgaagcaatgactcatgagtcatgacaccgttgttgtttttctttcttctttataaaatctctaggtcatatatatataggtgcgacattttaagatgcaagtgaagcaaaatttaacccctggctaggtacaagcaaaaaaata

SEQ ID NO: 2922 - DNA, 358 bp, Glycine max
  Clone ID: LIB3028-025-Q1-B1-H11
ccaatgtcaaatttattttcatgtctttggttcaacgaagttgatcgatttacatctcgtgatcaactaagctttgcttatacctatttgaaacttaggagaatgaatccagagagaccaattcagctatatatgttcaaggattgtgaacgtagagcattactgaagctattccggcatagggaacttccatctccacgagagactgcttgatcagttccagatatataagggatgcacactacactaatggcacaggtcatcatatttgacatcccttccagcttgattagcctgacaagacatgcatgatatgttttaagctggaccaaacagagggaaactcaatccctggttc

SEQ ID NO: 2923 - DNA, 347 bp, Glycine max
  Clone ID: LIB3028-025-Q1-B1-H12
tgatgttaccatggtctatccggagccttggtgtatgccacgactttttacggctggtataactgaattctatgagggatattacgcaaataagggtgtaaatatcattaaaggaactgttgctgttggattcacttctaagtctgatggagaggtaaaagaagtcaaactaaaggatggcagggtcctggaagctgatattgttgttgttggtgttggaggaaggcctcaaacagtcttagtcaaagggcaggttgaagaagagaagggtggaatcaagaccgatgctttcttcaaaactaatctctccgatgtatatgctgttggtgatgttgctactttcccct

SEQ ID NO: 2924 - DNA, 203 bp, Glycine max
  Clone ID: LIB3028-025-Q1-B1-H2
agctcagtagttatctcaggagtaagccaatatacagatattagtagtagcagacttgcaggtatgtttctcacgttcactaggctctgtttgaatctttgggtgtctggatcagaaagacacgcatgtctctatggctcacaataatcatgaaagagcagttcccattgacgtattcgtgatacattattcacatgagcata

SEQ ID NO: 2925 - DNA, 355 bp, Glycine max
  unsure (1)..(355): unsure at all n locations
  Clone ID: LIB3028-025-Q1-B1-H4
tccttctcttctgaataatccagatctctttctgcccttttctccgtcacgcttttcgtgaccggatctgtatggatttgatccagatctacacgccgatggtggttttggccgggtctttcatagatctggtgcgtagaggctcagatctacggtaccgaggtacaacagagaatcgatgacaagaacgcagatccgacggtagatccagccgattccgcttgttcgatcgctacagacccctgtatcggatcattaagcagcgtgtctcgcgcgttctacacgtgttgccgatctcggatgttgtaaaattagtttatgatgtgaagctatggagtgngaaatatgtggatgt

SEQ ID NO: 2926 - DNA, 394 bp, Glycine max
  Clone ID: LIB3028-025-Q1-B1-H5
gatgatttgctgctgtaacaaaatggatgctactacacccaagtattccaaggccaggtatgatgaaattgtgaaggaagtctcttcctacttgaagaaagtaggatacaaccctgacaagattccttttgttcctatctctggttttgagggagacaacatgattgagaggtccacaaaccttgactggtacaagggtccaactctgcttgatgcacttgaccagattagtgagcccaagaggccctctgacaagcccctcaggcttccccttcaggatgtgtacaagattggaggtattggaactgtgccagtgggacgtgttgagaccggtgtcttgaagcctggaatggtggtgacttttgcaccaactggactgacaactgaagtcaag

SEQ ID NO: 2927 - DNA, 388 bp, Glycine max
  Clone ID: LIB3028-025-Q1-B1-H6
atcaattataagcatgggtttgtggaacacaacgaatgcagtgtcttgccgctttcacaagtttggtgatgaccaaaagaatctggtcttccaaggtgatgccacgtcttcttccaggggcatagaactcacaaagttagacggtggaggaaaaccagtgggtggcagtgtggggagagtgttatactcttctccagtgcacctttgggaaagctctacagtggtcgcaagctttgaaaccgacttcaccttttccatctcatcagactctactactccaggtgatggccttgccttcttcattgcaccatttgacactaaaatccctccaaactctggtgggagcaaccttggactcctcccatcaaacaatggtgttgctgtccaa

SEQ ID NO: 2928 - DNA, 374 bp, Glycine max
  unsure (1)..(374): unsure at all n locations
  Clone ID: LIB3028-025-Q1-B1-H8
cagaagtctgagcattctaggggttcaaaaccagctgatggtctgctgattgatgaccacgaaaaggtgttacaaacttctcagccacatctgaaagatgtacaagcaaaatctcatagtggttctgctagaagttgcactaaagttcacaagaagggtattgcacttggtaggtcagtggacctcacaaaattcagtgattatggggaattaattactgaattggatcaactattcgaatttggaggtgaattaacttctccacaaaaggattggcttattgtctacactgataatgagggagatatgatgcttgttggtgatgattcgtggcaagaatttgttgcaatggttcgcanaatttatatctaacc

SEQ ID NO: 2929 - DNA, 380 bp, Glycine max
  Clone ID: LIB3028-025-Q1-B1-H9
ctttgctattacctctttttccaaactctaaaaatttttagttccacaaaaccaaaccaaaatggcagcagcctcggcctcatccaccatgatatcaacaccagccttatctccaagcacaagcatccaaaagcaccatcatttgaagccatccaacgtgtgctttcaaggccttagacccctcacaaggttcacaaccaaagtgagcagcaccaccaaaagggttattccaaagggtggtgtcggtgttagagctgaactcaactcagcacttgtcataagcctcagcactgggctctccctcttcttggggaggtttgtgttcttcaactttcaaaagggaaaccttggcaaaccaggtgcctgagcagaacggactc

SEQ ID NO: 2930 - DNA, 384 bp, Glycine max
  Clone ID: LIB3028-026-Q1-B1-A10
atactcacactctggttcatcactcataaaccgtgccaacattgaaaccgcgattgaacagcttccggttctcggcgaacgggagagtagctgcctagctgcaggaatcgattagtgattgtgaagatgcggagagacaacggtgatagctaagaagaggacatgcttaataggttaaacagacgcttcttttgcaccgttgctccacgcccttggctttttgtggggctgggcaaccctggcgagaagttcaaaggaaccagacacaatgttggctttgagatgattgatgcatttgctgagtcacaggggattcctatggacactgtccattccaaagccatttctggaaaaggttttgttggtgaagttcctggttttcct

SEQ ID NO: 2931 - DNA, 362 bp, Glycine max
  Clone ID: LIB3028-026-Q1-B1-A11
caattactctgccctatcatcttatacattactactattttttactataacttcaataaattcaaagaagatatttttcttcctaataatataccaattcatttcaaagagtgatggattctccacaaaaaaaataatcaagttttgaagaaagaaatcttcactcactatgctcctctgctgcaatagtacggtaaaatgaatcactgtgttccagatttcgaaacccaaatggacgacgacttagaattctcaattcccgtctcaaagaaaccctccacgtaactctctcttcactattattttcaatttttttgtttttcctgaaagcgacgacaattaaaacaggcaaaacgacgaga

SEQ ID NO: 2932 - DNA, 368 bp, Glycine max
  Clone ID: LIB3028-026-Q1-B1-A12
gctcttcctccctttctcacagcaatggccgccgcagcacgccctctcgtcaccgtgcaggccctcgacggtgacatggcaaccgatgcctccgccaccgttcccatccctgacgtcatgaaggcctctatccgccccgacatcgtcaatttcgtacactcgaacatctccaagaacagccgccagccatacgccgtcagtcgtcgcgctggtcaccagacctccgccgaatcctggggtaccggccgagccgtctcccgtatcccccgtgttcccggcggcggaacccaccgcgccggccaaggagcctttggaaacatgtgccgcggcggacgcatgttcgccccgaccaagatctggcgccgctg

SEQ ID NO: 2933 - DNA, 403 bp, Glycine max
  Clone ID: LIB3028-026-Q1-B1-A2
gaactgactatggtgcatacacttatgagaatcttgagagagagccttactggccatcagagaagcttaagatttccatcactggtgctgggggttttatcgcgtcacacatagctcggcgcctcaagacagaggggcattacattattgcttctgattggaagaaaaatgagcacatgactgaggacatgttctgtgatgaattccatcttgttgatctcagggtcatgaataactgcctcaaggttacagagggggttgatcatgttttcaatcttgccgcagacatgggtgggatgggttttattcagtctaaccactctgtcattatgtacaacaacacaatgattagcttcaacatgattgaggctgccaggattaacggccattaagaggttttttt

SEQ ID NO: 2934 - DNA, 373 bp, Glycine max
  Clone ID: LIB3028-026-Q1-B1-A3
atcaactctttcaaaagggagaagaaaaggaaaggaaacaaaacgcacaaaggattattatagcaatggcagaacaaaaccaaaaccagacaactgaagctggaaggcaccaagaggttggccacaagagccttctccagagtgatgctctttaccagtatattctggagaccagtgtctacccaagagaacctgaatccatgaaagaactgagagagttgacagcaaaacacccatggaacatcatgacaacctctgcagacgaagggcaattcttgaacatgctccttaagctcatcaatgccaagaacaccatggaaattggtgtctacactggatattcacttcttgccaccgctctcgctcttcctga

SEQ ID NO: 2935 - DNA, 379 bp, Glycine max
  Clone ID: LIB3028-026-Q1-B1-A4
ggtctccagcctcagctggaatgaagttcaatattatatcaggaacttctatgtcttgtcctcacataactggaattgcaaccttggtcaaagctgtgcatccttcatggtctccgtctgctatcaaatctgccatcatgacaactggtattacatgagtgtttggtttcacatcttgctctgaatgtattacatgagaaattaataactatagcttctacatccaaacatgatttcttattttttgacaaatttccaaacatgttttacatatatatagaggcatatattacccaatgcagtttgtctgagattcttcttaacagacattaaattttatgtcacttattgcctagatatacatactgaacaccaccac

SEQ ID NO: 2936 - DNA, 364 bp, Glycine max
  Clone ID: LIB3028-026-Q1-B1-A5
tgttggtgagggtatggaagaaggagagttctctgaagctcgtgaggatcttgctgctcttgagaaggactatgaggaggttggggctgaaggagcggaagatgatgaggaaggagaggactattcataaatgaaggttttattatcaatgtaattgtttcgagtaaaaagggtatatgcttcgttacattaccctgaaccagtattgttcgttcctttttgtttttactcctgtgtgatatagttctccattattcaaactgtgaagtgatatcatcattatgcttctattttggtggtttaaaaaaaaaatttttttttttttttttttttttttgtatataagaattttgttttttttttt

SEQ ID NO: 2937 - DNA, 402 bp, Glycine max
  Clone ID: LIB3028-026-Q1-B1-A6
ctagaagcaataagatgaaaatgaaagtgcttgttttgtttgttgctacagttttggtagcatatgaatgccatggctcagactaccagaagttccctctccaaatgaaaactgggtttggtgggcaatacagcaatgaggtggcatgtgccagttggaggcttggcgtggaagcaaacaacgtagtcaagtggcaaactgttcctgcagcttgcggagagtacatagctgactacgttctaggagaccaatatagatcagattccaaaacagttaaccaacaagcttatttctatgctaaatccctcaaactcaccaacaaagatgtctttgtcttggacgttgacgacactactctctctaatctccagtattttgctaaccatgggatttggtgtggaa

SEQ ID NO: 2938 - DNA, 376 bp, Glycine max
  Clone ID: LIB3028-026-Q1-B1-A7
ccaaaccaaacctttatcatcatcccagataaaataaatacataaagcgacattttataagtgcagataataaaattacaggaagaagaagaagaaaaataaaagctagccactagtagagatggtggttttgttggtccacttgagaaccaaattggagatatggtcggtggaggaaccatttggagagagagagcacaaagaggggttcctagacaagatcaaggacaagatccacggcgaggagggtggcgccaccgccgagggcgagaagaagaagaagaagaaggagaagaagaagcatgaacatggccatgacagcagcagcagcagtgacagtgattagattatctcccactgctgcattcactatata

SEQ ID NO: 2939 - DNA, 403 bp, Glycine max
  Clone ID: LIB3028-026-Q1-B1-A8
ggcactcaaagtaacatgaatgctaacgaggttattgcaaaccgagcagcagagattcttggccataagcgtggtgagaagtttgtgcacccaaatgaccatgtcaatagatcacagtcttctaatgatacattcccaactgtaatgcacattgcagccgcaacggaaataaactcaagactgatccccagccttaaaacgttacacgatactctaaactcaaagtcagttgaatttaaagatattgtcaagattggacgcactcatactcaagatgcaacacctttgactcttggacaagagtttagtggatatactacacaagtgaagtacggtattgatagagtaattgacactttgccacgcatgtatcagcttgcccacggtggtacacctgtatgga

SEQ ID NO: 2940 - DNA, 373 bp, Glycine max
  Clone ID: LIB3028-026-Q1-B1-A9
tgataataaggcattagaagctttcaaaaggtttggaaacaaactgactggaattgaaggaaaaatcaatgcaaggaacagtgatccaagtctgagaaaccggactgggccagttcagctgccatacactttgctccatcgttcaagtgaggaagggttgactttcaaaggaattcccaacagtatctctatctaattaaaaagagtttgtggtttccctatctatgttgtacttctgaataacatagactttatgcatgtctatgcgtaattattgcctgaacttctgcactattgtatttggatgctctcggttttcatataataaagtgtgttctcactttcactttggaattagctcaacctaagttta

SEQ ID NO: 2941 - DNA, 387 bp, Glycine max
  Clone ID: LIB3028-026-Q1-B1-B1
cgaggattgaaatccaatccgtgcctcctttttatctgataacacaaaaatggcaaatgctttgagagttggtagtgttatctcactctgctcccttcggaacacgagaccccatcttccccttctctccaacgccacgcgcttccgttccaagttcccatttttcaccctctcatcgtcgccaaatccatctgggtatccaccatttcgcacactctcttcttcttctgcttccacagatgaggcagtgaccaccgaagccatcactagcaataatgcaagtggtgaagctgagaacagtattaaggatgcggcggggttgcttgacatgagggttgggtgcattctgagagcatggaaacatgatgaagctgattccccctatgt

SEQ ID NO: 2942 - DNA, 374 bp, Glycine max
  Clone ID: LIB3028-026-Q1-B1-B10
ggagtttttcaataatatctatgaactagttggagttcctgtagtcacagtgcaactcagatacaatggttgggttacagagttgcaggatctagaaaagtcaaggcgactggggaaagctgttgggttggataaccttctctatacacccgatgcagatttttcttgctttgcagaccttgcactttcatctccagaggattattacattgagggacaaggatcattgctccaatgtgttctgacgccaggagatccatacatgcccttaccaaatgacgaaattattgcaagggtagcaaaacaggttttggcactgttcccatcatctcaaggtttggaagtgacttggtcttctgttgttaaaattgggc

SEQ ID NO: 2943 - DNA, 368 bp, Glycine max
  Clone ID: LIB3028-026-Q1-B1-B11
gttctttctctcgcaatcttcactacattcaccgagcatttgcattcacattgaatatggctgagactacacaatctaatgctgagttgttggagtggcctaagaaagataagcgccgcttcctgcatgttgtgtatcgtgttggtgatcttgatcgcaccattaagttttatactgaatgttttgggatgaagcttttgaggaaaagagatattccagaggagaaatatgccaatgcttttcttggatttggccctgaacaatcccattttgttgtggaattaacatacaattatggggtgacctcatatgatattggaactggatttggacattttgctatcgcaactccagatgtttacaaattg

SEQ ID NO: 2944 - DNA, 381 bp, Glycine max
  Clone ID: LIB3028-026-Q1-B1-B12
cacagttagtacaaaaaagggttacttcagcttccacatatcttgaagaattgatcaatgggcaagtctgtagttgagaagctactttggatggcaattgtgtgcttggtgctgggtgtaatttccattactcccaaggcccaagcagcagtgacatgcaaccaggtggtgagcaacctcaccccatgcatttcttatgtgctcaatggtggcaaaaccgtgcctggcccttgctgcaatgggatcaagaccctctttaacctcgctcactccacaccagaccgccaaaccgtttgcaagtgcataaagaacgctgttagtgcgttccattatggcaagtccaatgtggaccgtgctgctgctcctcctaagcaatgtggg

SEQ ID NO: 2945 - DNA, 385 bp, Glycine max
  Clone ID: LIB3028-026-Q1-B1-B2
cagaacttttgaagtagcaaaaaaggtctgggcagaggttttcttctaccttgctgagaacaatgtcctttttgagggtattcttcttaagcctagcatggttacacctggagctgagtccaaggacaaggccagtcctcagacagttgctgattacaccctcaagctccttcacaggagaattccccctgctgtccctggaattatgtttttgtctggtggacagtctgaggttgaagctaccctcaacttgaatgccatgaaccaatctccaaacccgtggcacgtgtcgttctcgtatgccagagccctccaaaacactgccttgaagacatggggaggccgcccagagaatgtgaaggcggcacaagatgcacttcttttc

SEQ ID NO: 2946 - DNA, 396 bp, Glycine max
  Clone ID: LIB3028-026-Q1-B1-B3
gtggaagccctgcttatcttagattgagccagaaaactgtcaattcccttggtgatctagtccccttcagcaacaagttgtattctggatgtttgcaaaagagggtggggataacagctggaatctgtgtcttgatccaaaacaaagccgagaagaagggagataggtatgaggcaatctacagcttctactttggggactacggtcacatttcagtgcagggttcatacctgacctatgaggacacttatcttgctgtgactggtggatctggcatctttgaaggggcttatggtcaggtcaagctgcatcaaattgtgttcccctttaaactattctacacattttatcttaagggcatcaaggacttgcctcaagagcttctttcccagcctg

SEQ ID NO: 2947 - DNA, 379 bp, Glycine max
  Clone ID: LIB3028-026-Q1-B1-B5
ccaacgccaacgccaattccattcagatcacagtcccttcgattcctgctgcaacatactttcaaagccctaaaatggaggggactgtcttcactcctgcactgcaagaaattgagcatgtaaagtctgatcaaggagaaattctgagcaagcctttcttggatgcgtgcaaacacatattgcctgtaatagataagtttggagctgctatggcccttgttaaatctgacataggtggtaacatatcgagattggaaactatgtattcttccaatccaaccagatttaactacctgtacagtttggtacaggtagaggttgaaactaaaacagctaaatcatcatccagttgtaccaatggacttctttggctcacaag

SEQ ID NO: 2948 - DNA, 384 bp, Glycine max
  Clone ID: LIB3028-026-Q1-B1-B8
tgataataagtctgaggcgcatttgacttctgccgctgcttttgtggagggtggaattcaggatgcttgtgatgatgcttgcagcatatgccttgaagctttctgtgatagtgatccctccacggtgacaagttgcaagcatgagtttcatcttcagtgcattctggaatggtgtcaaagaagctcccagtgccccatgtgttggcaacctatcagtctcaaagatccaacaagccaagaattacttgaggcagtggaaagagagcggaactttaggttcaatccatctagaaatgccaccatatttcatcatccaacactgggggattttgagttacaacatttgccagttggagctagtgatgctgatcttgaagagcgcat

SEQ ID NO: 2949 - DNA, 367 bp, Glycine max
  Clone ID: LIB3028-026-Q1-B1-B9
ggatgagtacacttctgagatattcatgggtggaaagaacacaattgtgttgcacaacacatgtgaggattcactgttagctgctcctattatcttggacttggtccttcttgctgagctcagcactcgaatcgagtttaaagctgaaaatgagggaaaattccactcattccacccagttgcgaccatccttagttacctgaccaaggcccctctggttccaccgggtacaccagtggtgaatgcgttgtcaaagcagcgagctatgctggaaaacatcctgagggcttgtgttggattagctcctgagaacaacatgatcctagagtacaagtgaagttcaaagtcttaagagtaacggtttggg

SEQ ID NO: 2950 - DNA, 398 bp, Glycine max
  Clone ID: LIB3028-026-Q1-B1-C1
atcagattgatgaaaaggtgaagctggtggacagaaggatggggtcattgatcaacttggagcaggcaattcgcgttctcgaaattgggttgctttgcactctaaatgagaacaaaggaaggccctcaatggaacaagtggtggagtttcttctcaacatggataagcctattcctgagctgccaagaactcgccctgttgccttgttcccctataatagcgccaacacaggactttgtaatgcatattcttgcactttttaagtggagccatgcatgacgttgctgaatgattatgtgggaggtgtatgaataaatgtgaaaaaagactattcttaggcctgcaacaacggattgattttccaaatgctgcaagtgcttaaagtgctgtgtatctgt

SEQ ID NO: 2951 - DNA, 375 bp, Glycine max
  Clone ID: LIB3028-026-Q1-B1-C11
ggctctcacgtgatgcagtatggtgatgtacggcttagcagtgatgttctcttccattatttgggtacagatcctgctaatgataatttcacttttgtggacgaaaactccttatggtcaccttcaaaaccagtcaaccaacgtgatgctgatctcatccatttttgggataagttccgcaaagctcctgagggttctctcaggaaaaatgcagctcagaaacaagttttggaagcaatgtctcatagaatgcatgtagacaacagtgtaaaacttattgggaagcttttatttggtattgaaaagggtccagaagtactcaacgctgttagaccggcaggatcggcacttgttgatgattggcactgccttaaa

SEQ ID NO: 2952 - DNA, 358 bp, Glycine max
  Clone ID: LIB3028-026-Q1-B1-C12
ctcattaattgcaagaatggcacttcgttgcttggtgatgtccctttctgttctcttcactcttggtcttgcgagagaaagccatgccagagacgaagatttttggcatgctgtttggccaaacactcccattccaagttcattgcgagatcttctaaagcctggacctgcaagtgttgaaatcgatgatcaccctatgcaaattgaagaaacacagtacccgaaaaccttcttctataaagaagaccttcatccaggcaaaacaatgaaagtacaattcagcaagcctccctttcaacaaccatggggtgttggtacatggttaaaggaaattaaagacactactaaagaaagatat

SEQ ID NO: 2953 - DNA, 390 bp, Glycine max
  Clone ID: LIB3028-026-Q1-B1-C2
ccctaatccaccctttctgaacaaaaataaaaaaataaaaaaaaacccatcgatttcttggacctccatgacttctttgtctacccatcacacctatagccgaaagcaaaaatctctcggcctcctctgcaccaattttctgagtttgtacaacaaagaaggtgtgcgcctggtcggtctcgatgacgcagcttcgcggttaggtgtagaaagacgtcggatctacgacatcgttaatgttttagagagtgtcggtgtgctaaccagaaaagctaagaatcagtatacttggaaaggattttgtgcaattcctgctgccttacaagaacttaaggatgaaggtttgaaggagaatcctggatcatttgatgactccaatgacaatgcaaa

SEQ ID NO: 2954 - DNA, 373 bp, Glycine max
  unsure (1)..(373): unsure at all n locations
  Clone ID: LIB3028-026-Q1-B1-C3
aagaaacttaatcgatcatcacttcacttcactaatacatcatggcagacgagacccagaacaagtatgagagctctgaggttgaggtccaggatcgtggtgtttttgactttctcggtaagaaaaaggatgaagaagacaagcctcatcctcaggaggaggtcatcgccaccgagtttcaaaaagtcactgtctcagaccaaggagagaacaagcacagcctcttagaaaagcttcaccgatctgacagcagctctagctcttcaagtgaggaggaaggagaagatggagagaaaaggaagaagaagaagaaggaaaagaaagggctgaaagagaagatcgaggagaaaatanagggtgatcatcatcatca

SEQ ID NO: 2955 - DNA, 324 bp, Glycine max
  Clone ID: LIB3028-026-Q1-B1-C4
gttctacatagcatctcctttaccaccattctagatatcagagaactttgcagctctcttaagtttttaaaaaacaccacgcaaacagcaagatggccacttccgacagtaacatgctactaaattaagttccagtttaagtgatgctcccaatccgagttgtcaatgttgacaatggtttttgagacccaaatgggcttaaagaacagctcctgcaacttcgaactgccggtgttgacggggttaagggtgaagttttgtgggggattatagaactgaaaggggctaagcactaagaatggagaacctacaagaatttggttc

SEQ ID NO: 2956 - DNA, 396 bp, Glycine max
  Clone ID: LIB3028-026-Q1-B1-C5
cttaattttgcttcctttggtattgtaccgtcgcgttgagtccttgaaattcagttctgcagtatcaactcttcttgctgtggcatttgttacaatatgtaccgtgttggcaatagtggctattgtagaaggaagaacacaatcccctagactggttcctcgtttggaccaacatacctctttctttgatctgtttactgcagttccagtcatagtaacagcctacacatttcatttcaatgtacatccaattgggtttgagcttgccaagccatcagaaatggcaacagcagttcgaatagcattgctgctttgtggtgtcatttacttttcaataggcctatctgggtacctcttgtttggggattcaacacagtctgacattctggtcaattt

SEQ ID NO: 2957 - DNA, 383 bp, Glycine max
  Clone ID: LIB3028-026-Q1-B1-C6
cagcacttgacactggttgtggggttgccagttggggtgcatatctttggagcagaaatgttgttgccatgtcatttgcaccaagggacaatcatgaagcacaagtacagtttgctcttgaaaggggtgtccctgctattattggtgttttggggtccataaagttgccttatccttctagagcctttgatatggctcattgttctcgctgtttgattccttggggagcaaataatggaatttatatgatggaagttgatcgagttctaaggcctggtggttattgggtgctttcgggtcctccaatcaattggaaggctaactacaaatcctggctgagacctaaggaagaacttgaggaagagcaaagaaagattgaagag

SEQ ID NO: 2958 - DNA, 398 bp, Glycine max
  Clone ID: LIB3028-026-Q1-B1-C7
aacagcctgtcaaactatgaagagggtgatattgatatggatcagcgactagacaaagcatgtaatttcatcacaagggctgaatgttcagattatgttccaaattgcaactcccaaaaccctaaattccaagaaggataattttgggttaatcaccagataattgggaaggtgattgcttgaatttccggtcaagccggcaacctgggccaagttgttgccggtgccgttccgaaatatcgggtattggaatcaaggtataaatttacaattaagacgctgacacaatgtgagggcagtaaaagagattggggtttgtggtatggatttgcaatggatggtcgtatgtgtacaatagatgaacaacattatgtgggaaacatgggctcaaatcatct

SEQ ID NO: 2959 - DNA, 381 bp, Glycine max
  Clone ID: LIB3028-026-Q1-B1-C8
ggttatttgaggttaagaaaattggagatgagtactttgcatttattgttgattgcaaagaacccaaggcttgtactgttctactaaggggtgctagtaaggatctattaaatgaagttgaaagaaacctacaggatgccatgtctgttgcaaggaacattataaaaaatccaaaacttgttcctggaggtggtgctacagagttgacagtgtcagctgccttgaaacagaagagttcatctattgagggcatagagaagtggccttatgaagctgctgccctagcttttgaagccataccacgaactttggcacaaaattgtggagtaaatgtgatccggactatgactgctctacaaggaaaacatgcaaatggggaaa

SEQ ID NO: 2960 - DNA, 363 bp, Glycine max
  Clone ID: LIB3028-026-Q1-B1-C9
gattgaagtcactatttcagtaattcatgttaccccttataccaagatatttctttggttggtaagacaaggaagattcccttctggaatatggcttgaaattattggttgtcagagtaatagtactgcctctccaagtgctgatattactgatgaaatgacctcatacaaggagtcattgcatctaaaggatttcaatagagaaaaatctagtagtctagtttcagctctccacagcaactacttgagcataggaaaaattatctcacctcactacatacatgtttttttgggagtttctgggtcatccatctccacagtggctcatggaatactcattggacaaagaatgccatctatgcg

SEQ ID NO: 2961 - DNA, 376 bp, Glycine max
  Clone ID: LIB3028-026-Q1-B1-D10
attttaattacacgtaaaacaaaaacaaaactacaacgaattcttggattcagagtcaagcgaggcaacgcatcgcaacgagattctccaagctctgcatccctcggcgatgccgtccacaacctactgtcttgaaggagaacaaattaaatctccttcaattatgaaacaggatgttgcacaagataacaccaactcatattcaaagaattcaatcccaccctacatgaaggctatctctggctcacttggagggattatggaggcttcttgcctgcagcccattgatgtgatcaagaccagattgcagcttgataggtcagggaattacaagggaatactgcattgtggtgccacgatttcacgaacagaaagg

SEQ ID NO: 2962 - DNA, 159 bp, Glycine max
  Clone ID: LIB3028-026-Q1-B1-D11
agagagagaggaagagagagcactacattttgtgagccaaggaattagatatataatataaactggcctgagtgctacgctacattgttttgtttgtagcatggcactataactcaaaaaaaaaaaagtacataaaagaaaacaaattaaatcaccatc

SEQ ID NO: 2963 - DNA, 361 bp, Glycine max
  Clone ID: LIB3028-026-Q1-B1-D12
cgaccctgcatttgggttatatcatcttatggaactgaaagctctcaagcctctcctatccatacaccatatagtgaatgagattagtcctctgaatttcttcaaagataatagacatgccagaagactcttctttcttcacttatgttagtttcagggctagtgtattagttgcagtcattgaaactctacaaggatacgttaacgtctatgaaggcttaagttcatttcctgaaatattcctaccaattttgaaattattaaatgaaatagcagaacagaaaaatatgtcaaatgcattatgagataaaattaaagatgtggctgagctcattaagttgaaagtggacaagcatcacac

SEQ ID NO: 2964 - DNA, 377 bp, Glycine max
  Clone ID: LIB3028-026-Q1-B1-D2
cttttctcccttctccccatttgctcattctcctccccattctgctcagacaccgcacagcgaacaaatccaccattcattttcctttttcgcaacagcgcaatggctcgaagatccctcccgctcctgaagcacctcctctcgcggcggatcccggcccgatccgtgacgtacatgcaccggccgggcgatgggtcgccgcggccggtgacactgatcccgggcgacgggatcgggccgatggtgactggcgcggtggagcaggtcatggaggccatgcacgcgcccgtctacttcgagaagttcgaggtccacggcaacatgaaggccgtgccgccggaggtcctcgattcgattcggaagaacaaagtctgtct

SEQ ID NO: 2965 - DNA, 377 bp, Glycine max
  Clone ID: LIB3028-026-Q1-B1-D3
ctcgagtgagggacgaagtgaaagctgggaaattgcgtccgaggtcctttccaattcaaatgtaactgaaagcagaagctatgctgcatcaaaggaggtgcgccaaaaacttgggggttctttttgagatgtggggttacttagatattaaagatggaaaaggaaatggtgtttgatcagattataggaatgggaattgaattgattgaggcattaagtacaaaaacttatttgatcttttttgtggtaagcttagctcttttggaaagaatagaaatgtgtgtaattttcgagagacaaagcaatagtgtcttttttctcgtctttgtcaattttttttcctacaatcaaatatgtgcattgcatctttatgtggc

SEQ ID NO: 2966 - DNA, 377 bp, Glycine max
  Clone ID: LIB3028-026-Q1-B1-D4
gcattggcacccagcagcatgaagatcaaggttgtagcaccacctgagagaaaatacagtgtctggatcggtggttctatcttggcatctcttagcaccttccagcagatgtggattgcaaaggcagaatatgacgaatctggtccatcaattgtgcacagaaagtgcttctaaactgtttcgatagatagggttattgaagggaaagactactatcatcacgatttgtctggaagcaatgcattgcagattgtaaccctttgattctagcttttgttatcctttcattttattctcttgttggagtgatcatttatttgcagaaggtgaggagagttgttttttaaaatggtccagttcttttcttatactttgat

SEQ ID NO: 2967 - DNA, 63 bp, Glycine max
  Clone ID: LIB3028-026-Q1-B1-D5
ttttttttttttttttttttttttttttttttttttttttttttttttttttttttttttttt

SEQ ID NO: 2968 - DNA, 394 bp, Glycine max
  Clone ID: LIB3028-026-Q1-B1-D6
ccaattcttctcttttgctttctctctccaaattcatcacaacttctctcgtacctctgcagagaagtaaacatataggagtgagagggagggagagagaaggaaagcttggtagcgatggggaaggagcaagttcaggtgctgaatgccctggacgtggcaaagacacaatggtatcatttcacagcaatcatcattgctggaatgggcttcttcactgatgcttatgatctgttctgtatatcactagtcacaaagctacttggtcgcatttactaccacgttgatggggctgcaaagcctggttcattgcctcccaatgtgtcagctgcagttaatggtgtagcttttgttggaacactttcagggcaactcttctttggctggctcggcg

SEQ ID NO: 2969 - DNA, 395 bp, Glycine max
  Clone ID: LIB3028-026-Q1-B1-D7
gccaaagaagagatcagctctcttgagaaggaattttcttcatacaaagttcgtgcacatgcacttcttcaaaagaaggatgctgagctggctgctgctaaagattctgaacaactcaaagctctagaggaaactctgagagtatatttgatcagtattttgtagaagacgttgtttgagtagtgtatataaattaatcaccaattgcatccttaattttctccaggaggtggaaaatgaagtattatcaataacagaagaaagggatagagttcttcaagatcttcaatctgctatggctaatcatgagaaagagattgcagaaagagacacagcccttgaaaatgtcaagcaacagataaggagctttgaaataaagcttgactcagctaatg

SEQ ID NO: 2970 - DNA, 399 bp, Glycine max
  Clone ID: LIB3028-026-Q1-B1-D8
gtgaaagtgagaaaaaataaaaatcaaagagcataatgtcagggatcattcacaagattggggagacccttcatgtgggagggcacaagaaggaggaggagcataagggtgagcaccatgctggagaatacaaaggggagcaccatggtgaacacagtagtgagtacaaaggagagcatcatggtgaacacaaagctggagagtaccatggtgagcacaagccagagcacaaagaggggttcctagacaaagtcaaggacaagatccatggtgagggcggcgccgccgagggcgagaagaagaagaaggagaagaagaagaaggagcatggccatgagcatggccatgacagcagcagcagcagtgacagtgatttaactgctgcatcacctatatatt

SEQ ID NO: 2971 - DNA, 377 bp, Glycine max
  Clone ID: LIB3028-026-Q1-B1-D9
cggctcgagccagagccaaggtaggttaaacactcttcttcatcgtcgtcgcaatgggacgtgtgatccgtgcgcagcgtaagggagcaggctcggtcttcaagtcccacacgcaccaccgcaagggccctgcccgcttccggagcctggatttcggagagcgcaacggctacctgaagggtgtcgtcactgacgtcatccacgatcctggccgtggcgcgcctctcgctaaggtcgccttccgccacccgttccgctacaagaagcagaacgagctcttcatcgccgccgagggtctctacaccggccagttcatctactgcggcaagaaggccaccctcgttgtcggcaatgtgttgcctcctcgattcaatcct

SEQ ID NO: 2972 - DNA, 362 bp, Glycine max
  Clone ID: LIB3028-026-Q1-B1-E10
gagaaagatcatggtggctgtggatgagagccaagagagcatgcatgcactctcctggtgcatcaccaatcttatttccgaaaccaacaagcttgttctgctttatgtcaggccaccttctgctttctactccttggatgccgcagggtataacttttcctccgatgttgttgatgctatggaaaagtacagtatgcacttggctaattcagtcatggaaagagctgaagctgtttgcagagacttgaacgctactaatatcaatatggagagagtggttggtgtaggacatgccaagaatgtaatatgcagtgctgtcaagaaactagaggctgacaccttggtcatgggaactcatggct

SEQ ID NO: 2973 - DNA, 341 bp, Glycine max
  Clone ID: LIB3028-026-Q1-B1-E11
cctcccttccctttgtctcctctgggtaaaaaatcttctaaaaatgaaaatttgggagaatgcagaaatattgatgttatcttggatgatggcaattttacttttaatagtgtggaacagtcacttgatagaacttgtcaaggcattttatcagctcaggagataccaggtaaatcacagctcaatttgaacaatatgcagcaaaagtctgacctgtttactcctgacaacatgattgatatgaaagaatactggactcattctggtagctttcctcctcgggatgccaagttatgtggaactatgagtagactgccaattagaaggtccttggttggttc

SEQ ID NO: 2974 - DNA, 341 bp, Glycine max
  Clone ID: LIB3028-026-Q1-B1-E12
gcagtgcaaacctggcattgaaacatttaaggcatcatcatctgtcatcgagagtcaatctggagtgtcttctgatgccatcaaagattctccagccaaaactgaatcagaaaccatcaaggtggaccactgcaagtcaggagctgatctggctaatggcagtaccacagttgaggaaagctcattggaagtggctgagaagcaggatgctcctgaaattcaagcttccgacaatcctgagcaacatgctagtgaagatagtggtaatgcctcaaagcgtccaaggacagaggagtaagccatatgatctactgaatcagcattgaactgacaagacgata

SEQ ID NO: 2975 - DNA, 384 bp, Glycine max
  Clone ID: LIB3028-026-Q1-B1-E2
gtagcttatcctcataatagtagctctgcgggtaagaatccttcagtagaaggtttgtgtgatatataggtataggtgagttgtggatccaaaagatgctgagacttggtaaaaatcggtttatagttgggttcctgataagcaatctagtagttgtgttgtactacgtcatgcaagaatttatggtcctcttgcataaaactattcattatttgttagctaggaaatgtatgtaaggagtgtgaccagagttctcattgcacctgctctgcatgtaaacatggttcttttattagtccatttaatttccttagggttattagtttattcagtactatttgtctattgtgaattgtggcttgtattaagagtaatatataaata

SEQ ID NO: 2976 - DNA, 379 bp, Glycine max
  Clone ID: LIB3028-026-Q1-B1-E3
aaagcattgaattcaaaaacttaagttcattccttgtgttttgctttcttcctcaaaaccaaacatgtcgaacacatgcggcaactgcgactgcgctgacaagactagctgcaccaagggaaacagctatggtgttattgtagagactgagaagagttacatcgagactgttgtcatggatgttccagcagctgagcatgatgggaagtgcaagtgtggcactaactgcacttgcacggactgcacctgtggccattaaggaatatgtatgaaaatgtaattgccatgtgtttggcaatacaaatatccaaataatgtaatcttcgtatgaataaatgtgtgtgctgttatcctacttcaggtctgtgtaatcatgcag

SEQ ID NO: 2977 - DNA, 399 bp, Glycine max
  Clone ID: LIB3028-026-Q1-B1-E4
taagaattaagccaaaataattaattaattcttggcaaaatcacatggccgccgccgcagatgggctcttccggccgatctacgagggctgcatctccgcctacgacaacgacgtcgagcgccgcccctaccacaagaactgcggctgcgctctgcacagcaagtcgaggaggaacagcagagcgtgcacgcacaagttgccgaaatgcaacaacgtgtcctaccccatgaggagggcttggagtgaagggagcttgtcaatggcttcggcaacaacttccgcgcattcctctccttcttcttctcccgccgctgggttcaggcctcaacacgacgaagagggaaatagtaacacattaggagttttatttgagatgtgatcaggaaattgagaataat

SEQ ID NO: 2978 - DNA, 360 bp, Glycine max
  Clone ID: LIB3028-026-Q1-B1-E5
attaaggaatccacacgtgaacagtgtgtggatgatcatttggtgctgagaaagaatggatatatagcagatgaacactagagtccattcgatttttgaggaataaataattagttattgataacaggttctgttagacggttacaagaagttattattccgttaacagttaatcagttatgtcgaaataggtaattcttccgacagtggagtctcaccggcgacagccactgctgctgcaacatagcgagagctaccggcatgcggggacacggctcatggtggaggcggtgggcggcatctccaccgtgtgctgctgcatctcgttcggtctggacaacattatttacctggcgattt

SEQ ID NO: 2979 - DNA, 379 bp, Glycine max
  Clone ID: LIB3028-026-Q1-B1-E6
aatccatttactttgtgttgaattcaatatgagtcttaagggatttttcgagggtggtgtcgcttccatcgtcgcaggctgcaccactcacccactcgacctcatcaaagttcgaatgcaacttcaagaaacccacactctccgcccagcctttgcctttcacgctcccactccaatgcctcctccgccgccctccggccccatctccgtcggcctccgcatcgttcagtcggagggactcgccgctcttttctccggcgtctccgccaccgtcctccgccagacgctctactccaccacccgcatgggcctctacgacgtcctcaagcgccactggaccgaccccgaccgcggaaccatgcccctcacaagaaaaatc

SEQ ID NO: 2980 - DNA, 403 bp, Glycine max
  Clone ID: LIB3028-026-Q1-B1-E7
cttaaaatatagaacacactaccctcaacatagtaaagcagctggtgcaagtgaagcaatggctcaaaccatgttgctcatgtctagtgtctctagcagttattccgtggatttgaagaaagaccttttcctccaattgcagagtcaaagtttaaggcctaagttctctcaactctcattcaacccacttccaccatcaacttcttccttttcttcaccccgtacattcacaaccctggctctcttcaaatctaagacaaaagccgctcctgctaagactaaggttacaaagccaaagcaaaaggttgaagatggtatctttggcacttctggaggatttggttttactaagcagaacgagctctttgtgggtcgtgttgctatgcttggttttgcagcatca

SEQ ID NO: 2981 - DNA, 382 bp, Glycine max
  Clone ID: LIB3028-026-Q1-B1-E8
atcctctcgttttaagacacacctttgagcaggcagtcataaaaagattgatgactgatgtgccttttggtgttctactctctggaggtttggactcttcattggttgcatccgtcacttctcgctacttggccaacacaaaggctgctgagcagtggggatcaaagttacattcattctgtgtaggccttgagggctcaccagatttgaaggctgcaaaagaagttgctgactatctaggcactgtccaccatgagtttaccttcactgttcaggatggaatagatgccattgaagatgttatctaccatgttgaaacatatgatgtgactacaattagagctagcacacccatgtttctcatgtctcggaagattaaatc

SEQ ID NO: 2982 - DNA, 368 bp, Glycine max
  Clone ID: LIB3028-026-Q1-B1-E9
gccagactgagaggaagagagagggagattctttgtttgctaccttctctcggaaaaatggttacgttcaggtttcaccagtaccaggtggttgggagggctcttcccacggaagcagatcagcaccccaagatctaccgaatgaagctctgggccaccaacgaggttcgcgccaagtccaagttctggtattttctgaggaaactgaaaaaggtgaagaagagcaatggccaagtgcttgccatcaacgagatttttgagaagaacccaaccaaaattaagaactatggtatatggttgcggtatcagagtaggactggttaccacaacatgtacaaggagtaccgtgacaccactctaaacggtgc

SEQ ID NO: 2983 - DNA, 378 bp, Glycine max
  Clone ID: LIB3028-026-Q1-B1-F1
ctaatttcaaatggaaattgctctctcataacagaattcaagaggaggaagaacaagtatataaaaactatatctacatagttatatctctctcttgagatttcaaacgtagagatatggaatggaggaagtgctacttggatgtgatattggtgcccttgggatttctaacaagcattgggtaccatttctggctatggcacaaggttcgaactcagccacacacaaccatcattggcatcaatgctagtggccgtagaaattgggttaatggcatgatgaaggacaatgacaagaaaaacattctggctgttcaatcactaaggaacacaataatgggtgctactctaatggccacagcctccatcctactctgct

SEQ ID NO: 2984 - DNA, 352 bp, Glycine max
  Clone ID: LIB3028-026-Q1-B1-F10
agtttaccgtatgttattatagtttccaaaggcacgcagcgagtttaggcgcggcgggatcatcacgagattgcaaaatgaagttcaacattgcaaatcccaccactgggtgccagaagaagctggaaatcgatgacgacctgaagcttcgggcattttgggacaagaggatctcccaggaggtccttggtgacgccctgggtgaggagtttaaaggatatgttttcaaaatcactggtgggtgtgacaaacaaggattcccaatgaagcagggagtgttgacccctggtcgtgttcgactcttgctccatagaggaactccttgtttccgtggatatggaaggcgcaatgg

SEQ ID NO: 2985 - DNA, 359 bp, Glycine max
  Clone ID: LIB3028-026-Q1-B1-F11
ctcgagccgaatcggctcgaggccggaactctgttccgctctctgaacgtggaaaggtgagagtcgttcgctcgctcgctcttgcttgcatcatcggcgcatggattcactcattgcgtagtgattcggtttcggaattagggttccgatttcggatttaggtcggttttttgttccgaaggtcgtgctctccaagccttaagggttttagtgacgagcttcgttcagtttgctgctcgatccgttgctttatccctttcgattcggttttgccgttgcttttcggagattaacttgtttttgatatgatgctgatggttttgtgcattgcacggtgttgaaattcgattttggcgaaa

SEQ ID NO: 2986 - DNA, 373 bp, Glycine max
  Clone ID: LIB3028-026-Q1-B1-F12
tggtatcccccttaatgcaaccgattacaaggtggcctttctatgccttcttaggtggggccatgttctgcttgctagccagcagcacatgccacctccttacttgccactcacagcgcctttcctacatcatgctcagaattgactatgctgggattgctgcattgattgcaacttcattttaccctcctgtgtattactcatttatgtgcaacccctttttttgctacctctacttaggcttcataacattaatggggattgctactattgtcttctctcttctcccatttttccaaaagtccgagttcaggaagtaccgcgcttccctcttctttttaatgggattttctggtgtggcgcccataataca

SEQ ID NO: 2987 - DNA, 360 bp, Glycine max
  Clone ID: LIB3028-026-Q1-B1-F2
agacattgttgaaagaatatctgattaagttctagactttggtgtaaggtgcatggtttttgggtattctagctgagcatcaagtgtttttgaccttgcaaattttttcatgatgtttcattatgccaatttctatagagatgatataattatagtttgatcacacgcttgctgttaacagcaagcccgtgttatccaaaaaaaaaaaaaaaaaaaaaaaaaaaaaaaaaaaaaaaaaaaaagggaagaaaaaaaaaaaaaaaaaacatcaaaaaggaaattaattcaggaaaggaaaaattgcaagaatacaaactttggggaggcccgaatcatattacaccttggactgggaattgt

SEQ ID NO: 2988 - DNA, 398 bp, Glycine max
  Clone ID: LIB3028-026-Q1-B1-F3
cttcacttgttaatgcttcctcctgaaagttctaaactcaacgcaatggagcttagcaaagtcacgttagagatcttttcaaaattggagcagcaatggctctcgcactacgaagcatcaaccaaaacgcgcattctcagcattgacggcggaggaaccaccgccattgtcgccggcgcctccctcgtccacctcgaagaccagatccgcgcccaaacctccgatcctcacacgcaaatcgccgattacttcgacattatcgccggaaccggcattggcgcaatcctcgcctccatgatcaccgccgacgacggtttcggccggcctctgtactccgccagagacgccgtcaacttcctcgccgaaaacaaccgcgaactctaacagccgaagcgcgc

SEQ ID NO: 2989 - DNA, 403 bp, Glycine max
  unsure (1)..(403): unsure at all n locations
  Clone ID: LIB3028-026-Q1-B1-F4
cggagcttaggcccacagtatcattgtcgtcttcaagcgttcatacttcatactatcctctctctctctctctgcaactgcaagagatgatggagatggaggaagcagagacgatagatctatacgagcttcaatattcagacttatcttcaccttcaacttcatccatagtcgattccattatggaagccctaggacccactggcccaggcctcctcgccgtcaccaacgtccccaacgcttccaacctccgctcacaccttctccccctcgctcggaacctcgcccttctcgaccgcgaatcccggaaactcgttctcaaggagcataacttgggtagtgacgtcnctttaagaaatcctgataggacggtgtcctcctttgctatgcacctcaaatatgc

SEQ ID NO: 2990 - DNA, 396 bp, Glycine max
  Clone ID: LIB3028-026-Q1-B1-F5
atactctacgtggccagtgccaagcaagtttgcttggcttttgctgcaaatggtgacgatagtgatgttactatatatgggaacgtgcagcagaaaacaatagaggttgtgtatgatgttggtggtggaagaattgggtttggtgctggtggctgcaagtgattaagattaaacatatgctttgggctagttagagaaaaatcaatcttaattggctctaggctttcataattattgttgttccttttattgcaaagtgtacgtaacagtggcaatagaaaaaaaaggaaaacaaaaatgtgggaattaaatataatatagtttgtagcatgaagaagaatggaggggtgaatatatgactctcaagccgtgcgattgcttgcaattgtacatatg

SEQ ID NO: 2991 - DNA, 375 bp, Glycine max
  Clone ID: LIB3028-026-Q1-B1-F8
gcaccacgtatccctgagaaaagagaggaaccacactctctaagccaaagcaaaagcagcagcagcagcaatggttaaagacacaaagcctttagcctatgctgccaataatggataccaacaaaagggttcttcttttgattttgatcctagcgctcctccaccgtttaagattgcagaaatcagagcttcaataccaaaacattgctgggtcaagaatccatggagatccctcagttatgttctcagggatgtgcttgtaattgctgcattggtggctgcagcaattcacttcgacaactggcttctctggctaatctattgccccattcaaggcacaatgttctgggctctctttgttcttggacatgattg

SEQ ID NO: 2992 - DNA, 373 bp, Glycine max
  Clone ID: LIB3028-026-Q1-B1-F9
gttcattgctcaattgtttccctcacaactcataacctctttcccatttaacctttgaaaaaattccatactgtaacaacagatcaccatggctctatcacgtttgtcccaccgcagcatcggatccactctcacaaaacccttctccgccgccgccgcctcctcccgttcgatctccacctcggacacccccttaacaatcgagacctctgtccccttcaccgcgcacaactgcgaccccccgtcacgcgcggtcgcgacctcctcctcggagctcctcaccttcttccgcgacatggccctgatgcggcgcatggagatcgccgctgactccctctacaaggccaagctcatccgcggcttctgccaactc

SEQ ID NO: 2993 - DNA, 374 bp, Glycine max
  Clone ID: LIB3028-026-Q1-B1-G1
gccggtgatcggaatcctgacccaccccggcgacggtgcctctggccggctcagcaacgccaccggggtttcttacatcgccgcctcctacgttaaattcgtggagtccggtggtgctagagttattccccttatctacaatgagtcacctgagaaccttaacaagaagctcgatttggtcaatggagtgctcttcactggtgggtgggctgtttctggtccatatttggatactcttggaaacatttttaagaaagctttagagaaaaatgatgctggagaccatttcccagtaattgccttcaacttaggtggaaacctcgtaataaggatcgtaagcgagcaaactgatattcttgaaccatttactgcgt

SEQ ID NO: 2994 - DNA, 371 bp, Glycine max
  Clone ID: LIB3028-026-Q1-B1-G10
aatatatcatcaattataagcatgggtttgtggaacacaacgaatgcagtgtcttgccgctttcacaagtttggtgatgaccaaaagaatctggtcttccaaggtgatgccacgtcttcttccaggggcatagaactcacaaagttagacggtggaggaaaaccagtgggtggcagtgtggggagagtgttatactcttctccagtgcacctttgggaaagctctacagtggtcgcaagctttgaaaccgacttcaccttttccatctcatcagactctactactccaggtgatggccttgccttcttcattgcaccatttgacactaaaatccctccaaactctggtgggagcaaccttggactcttccc

SEQ ID NO: 2995 - DNA, 377 bp, Glycine max
  Clone ID: LIB3028-026-Q1-B1-G11
caggcatcatgcaataacaaacatgttacgtgaagatactgcttggcaccctgtttggaaggacgagtttgaatctactccacttttgaggaaagcaataatagacggatatggtccacttcgatgttggatgtctatagctcactggttgatgtggcactttgatttgaagaagttcagaccaaatgaagtaccaagggtgaagataagtttggcttgtgtttttgcctttatagcaattggatggccattaaatatttacaagactggaatcatgggatggataaaattctggttgatgccatggctgggctaacacttctggatgagtacgtttaccatggtacatcatactgcatcgcatataccattcaaat

SEQ ID NO: 2996 - DNA, 364 bp, Glycine max
  Clone ID: LIB3028-026-Q1-B1-G12
attaatgtgtgtttgtcacgagacccatagtgctgccaaattatagtaactctctttctctatctgaagaagaagaagttctgaagaagcatgtgtggaggtgctatcatctcagacttcattggtgtgaagcgtggccgcaacctcgccgcgcaggaactgtggtccgagcttgaccctttctctgacctccttggcttcgataccaccaccagcaccagcaaccaaccaccccttccagacaaaaaagtggtgtcatcatgtgagaagaagaagaagaaaagtgtgagtgcagaaaagaagagtggtgggcgagctcggaagaacgtgtatagatgaatcatgcaaaagccgtggggcaagt

SEQ ID NO: 2997 - DNA, 374 bp, Glycine max
  Clone ID: LIB3028-026-Q1-B1-G2
ctcgagccgcctttccattcctttcttccttcgtcccattctcgaattggcgtgtgcctcttgcaatcccccaaaggttttttgaagcagaagaatggacttctttactagagacataaatgaggattctatgcttagatgcccattcttgaggaacatcaatgagcctactaacttctcattctcttcacctttggctttaccaatgcctgttcgtggagctaaaggtccaatttttgaagatggtcccaattttgatttggcatttaggcttttccacgggagtgatggtgtagtacccttatctgacagatcttttcggccttcagagaagaaagtacaggcagaacctcccaaatcccaattcaatcctt

SEQ ID NO: 2998 - DNA, 391 bp, Glycine max
  Clone ID: LIB3028-026-Q1-B1-G3
agcactcaccctcattaccaacacgaaagcatagccaaaaccttttttcgaagtctctgattttcctaatggctccggcaaaggcagagaagaagccggcggagaagaagccagcggcggagaaggcaccggcggagaagaagccgaaggcggagaagaagatctcgaaggaaggagggagcgagaagaagaagaagcgcacgaagaagagcgtggagacctacaagatctacatcttcaaggtcctcaagcaggttcaccccgacattggtatttccagcaaggccatgggcatcatgaacagcttcatcaacgacatcttcgagaagctcgcccaggaagcgtcgcgtttggctcgctacaacaagaagcccaccatcacctcgaggga

SEQ ID NO: 2999 - DNA, 368 bp, Glycine max
  Clone ID: LIB3028-026-Q1-B1-G4
ggaaagcataatcaaatcaaccatggctaccctcattgctcccatcaccttttcgcctggtttagatgcagaagctcttagaaaagctttccaaggatgggggactgatgagaagaccgttatagcaatattgggtcacagaaatgttcatcagaggcaacaaatcagaaagatttatgaggaaatttaccaagaggacctcatcaaacgcctagagtctgagctctctggtgactttgagagagctgtgtaccgttggatgctggaacctgcagatcgtgatgctgttttggccaatgttgccatcaagaatggcagcaaaggttaccacgtgattgtggaaattgcttgtgtgctttcagctgaag

SEQ ID NO: 3000 - DNA, 404 bp, Glycine max
  unsure (1)..(404): unsure at all n locations
  Clone ID: LIB3028-026-Q1-B1-G5
attcttctctatgtcactcaatgaaaaggaaaaagtaggacctcccaatccatttgggtatggtagcaagaaaattggacacaatggggacgttggttggattgagtaccttcttctcaacaccaatcaagaacacaacttctctgtttatggcaaaaaccctgagaaattcaggtgtctgttgaacagttacatgtcttctgtgaggaagatggcatgtgagattcttgagttgatggcagaagggttgaagattcagcaaaaggatgtgtttagcaagcttctaatggataaacaaagtgactctattttcagggtgaatcattacgctgcttgtcctgaaatgactctgaatgatcagaacttgattgggtttggagaacacacaganccacaaatcatct

SEQ ID NO: 3001 - DNA, 373 bp, Glycine max
  Clone ID: LIB3028-026-Q1-B1-G6
aagaaaaaaggctccaccgaaatcaatttcccacagaatcaaacaaatcgttggagttggaaaacaaaacaagagaaaatgggtggacgcaagtgtttgttaacgttggtgttgagtttggtgttgatgatgagtatggcagaggcgcaatctggtactagcgcagactgcgcccaggagctaattccatgcctggactaccttaatggcacgatcaacccaccaagctcctgctgcgaccctctgaaacgaacagtccaaaacgaactcgcctgcctctgtaacatctacttctcccctggccttcttcaaagcgtcaatgtcactgtcgatgaggctctcggcctcagtcgccgctgcggcgtcactagcg

SEQ ID NO: 3002 - DNA, 387 bp, Glycine max
  Clone ID: LIB3028-026-Q1-B1-G7
gggagagggagagagaaagaaaggtgaattggattgcatctctctctgtgtgttggaagaggggaatcgtagatctgatttctttctttctttttaataattttgtgatcagaattattgagctgaacaaaagacaatgggattgtgggaagcttttctcaattggcttcgcagcctttttttcaagcaggaaatggagttatctctaataggacttcagaatgctgggaagacttcccttgtaaatgtagttgctaccggtggatatagtgaggacatgattccaactgtgggattcaatatgaggaaagtgacaaaagggaatgttacaataaagttatgggatcttggagggcaacctaagttccgcagcatgtgggaacgtta

SEQ ID NO: 3003 - DNA, 355 bp, Glycine max
  Clone ID: LIB3028-026-Q1-B1-G8
gttactgttagatgtcacagggaagaaagagcgtcgagaaggttcagttcagatcctccgtctccaccatggcaactcccaaggcatcgtcgaaatggaccgagaacatttcctcaatagcagctcgcatcttcttccttctcatcatctttcagatccctcttttcagggtgacttgcagatctggcatgtgtacaacccctttgcatgtcacgtcgtcacaattaattgcaagtgagatctttcctgttgttgttgtgaagggccttctgtacccaggggctgcagtgaacggcctcatccacaacatgactgttccaagttgggataatttgttggacttgtataacttgac

SEQ ID NO: 3004 - DNA, 365 bp, Glycine max
  Clone ID: LIB3028-026-Q1-B1-G9
ctcgagccgctcgagccgattcggctcgagatttacagcaagtctttcaaagccgattatgcattccccgaatggatttcccctgcggccaaaaacttgatctccaatttactcgttgtggacccgcaaaagaggtattccattccagacatcatgaaggacccttggtttcaaattggcttcttgaggcccattgcgttttccatgaaggagtctgcgcttgaagataacattgatttcagcggggatgatgttcctagtcctggtagtgatgatggtaatagcagcagcaacaacgaggatggggagttgacgggggctaagcctgctcgtccgtcttacaacgcttttgagataatctcgtc

SEQ ID NO: 3005 - DNA, 398 bp, Glycine max
  Clone ID: LIB3028-026-Q1-B1-H1
gaaaaaatcaggtctcaaatggatgttattgacaatggtgtccctgctccattatcaatgttcagtgagagtgattcagacatgaaatctgttaatatagatgacttgctgcccaaagaaaagctgcagaggaagttgccaaagccatcagcgggaaggcgaaaaaatggttacctacaaaatggtggttctgtgcatccttatgctgatccagagcaatgtgcagatacaaagcaatcctttggagcctcttccagtggggttacttctcttgatagcatccagaaacataagttgaacatagattctgattctttaggctgtatacagacacaaattcctatgacacgccctgactatagtcatgctccaaatcacacttccctctttccgacttt

SEQ ID NO: 3006 - DNA, 368 bp, Glycine max
  Clone ID: LIB3028-026-Q1-B1-H10
attctttctcaaaacacttgctccattattattttctcattcattcgttcatcatggttcggttcagcaacaacgtgatcggactcctgaacttcctgaccttcctcctctccatcccgatcctggtggccggagtgtggctgagcaagcagggcgccaccgagtgcgagcggtggctggagaagccggtgatcgcactcggcgtcttcctcatgctcgtctcactcgccggcctcgtcggcgcgtgctgtcgcgtgtcgtggctcctctggctctacctcctcgtcatgttcgtcctcatcgttcttctcttcgccttcaccatcttcgccttcgttgtcaccaacaagggcgctggcgaagttgtg

SEQ ID NO: 3007 - DNA, 378 bp, Glycine max
  Clone ID: LIB3028-026-Q1-B1-H11
aaaggagagtgcaataactcgttgtacattcctagtgtgtgggagagacatggctaagatgtgtgttttggtgttggttcttgctctggctgtggccacaagtgccagaaacgttcccaaccccaaggatgctggtcttaaggaccagaagaacttcatcagctatggtggagttggtggttattccgggattgggaacaatggactgccttttggaggagctggtgccggaataggtggtggttttggcggaggtggtggacttggtggtggcctcggcggtcctaccggtgggatcggagggtttggcggtaccggtagcggtgtccgtggcggtattggtggtggcgttggaactggcgttggtggtggcaaccg

SEQ ID NO: 3008 - DNA, 353 bp, Glycine max
  Clone ID: LIB3028-026-Q1-B1-H12
gtgaacaagggaagaagcttcgttaccgaatcaaggatatcaaggaggctgcggctaaagctctcgctcaacatggttcctccaccaccaacatctccaatttggctctcaagtggacccacaaattcaactagtagcttcttcctttcaattatctgcacttaacttatcaaatgtcacttggcatacatgacattaataaaataattgggtaagtgtacgtaaatttcaaatccacatcccgacgatgttcaatggctagacctctaacttgtagtatatgtttcaaaatgcctttcaaccttaaattactaagttctatggctgcctggctaattaattaacgtcaattt

SEQ ID NO: 3009 - DNA, 354 bp, Glycine max
  Clone ID: LIB3028-026-Q1-B1-H2
tggcaacaggtgcggctgtggttcaaaaataatcagatattttcagcaggtcagaagatgagatatctttacccagtcaattataagcatgggtttgtggaacacaacgaatgcagtgtcttgccgctttcacaagtttggtgatgaccaaaagaatctggtcttccaaggtgatgccacgtcttcttccaggggcatagaactcacaaagttagacggtggaggaaaaccagtgggtggcagtgtggggagagtgttatactcttctccagtgcacctttgggaaagctctacagtggtcgcaagctttgaaaccgacttcaccttttccatctcatcagactctactactcc

SEQ ID NO: 3010 - DNA, 395 bp, Glycine max
  Clone ID: LIB3028-026-Q1-B1-H3
caagtagtttcagaaagatgctagagaatcttcaggctcctccgtcaacaacggaatcggccccagtggtgaagcgctatgctccacccaaccagaggaaccgttctgctaacaggcgcaaatcatctgatcggcttgatcggacaaacagtgtcgggaatgacttagaaaagaatcaagttgcttcttcaagaagtgttcacattccagatcatgaagatgctggtagcagtaatcttcttaatgagaatcactattcaagattcatagctttagaagggtgtagttgcagtgcagctgcccagcttcttaatgatcgttggacagctgcaatacaatcctacaataatcccaaagattcatctgaaaagccagttatgtattcgagtgggact

SEQ ID NO: 3011 - DNA, 367 bp, Glycine max
  Clone ID: LIB3028-026-Q1-B1-H4
ggaggcaatggctcgcctaagctccgatcaggtcttgaaggacaacaatgccgccgacccaacttccgttaccactcttcacctcactcacaaagctctttccgacataacgtgtttggccaatttcgtaaacttggaaaagcttgacctcaagctcaacaatctcacttctcttgagggattgagatcatgtgttaatttaaagtggctatccgttgtagaaaacaaattagaaagcttggaaggaattcaaggacttacgaagctcactgtaaaaataagcttaaatctattgatcaggtcatgtcagttgttagtctccgagcactgattttgaatgaaaatgagatttcctctatttgcaaac

SEQ ID NO: 3012 - DNA, 381 bp, Glycine max
  Clone ID: LIB3028-026-Q1-B1-H5
ggtgtttcatttgtgaaactaacaacaacacaaggccatcatcatggcagctgcttccccaatggcaagccaactcaagtccaccttcactaggactcttgtagctcccaagggcctctctgcctcttcaccacttcacctcgtgccttctagaaggcaatttagcttcactgttaaggccatccaatcagagaagccaacctatcaagtgattcagccaatcaacggtgacccattcattggaagcctggaaaccccagttacatccagccctttgatcgcatggtacttgtccaacctgcccgcatacagaaccgcagtgagcccactactaagagggatcgaggtgggcctggcccacggataccttctggtgggccc

SEQ ID NO: 3013 - DNA, 65 bp, Glycine max
  Clone ID: LIB3028-026-Q1-B1-H7
aagcattgatggatacatctgcatgtgttctgcaaactaattaaaaatgctcgtacaattggttt

SEQ ID NO: 3014 - DNA, 373 bp, Glycine max
  Clone ID: LIB3028-026-Q1-B1-H9
gcaaatgcgggtctttgcaccatctccatctgggtttcggaaggtgatattggcaactaatattgctgagacatcagtaacaattcccggaatcaagtatgtaattgatcctggatttgttaaagcacgttcttatgaccctggaaaaggcatggaatccttgattataatacctacatccaagtcccaagctctgcaaagaagtgggcgtgcagggcgtgaaggacctggaaaatgcttccgtctatatcctgaaagagaatttgagaaacttgaggactcaacaatgccagagattaagcgttgcaacctttctaatgtcattttgcagcttaaggctttgggtgttgatgacatactaaggtttgatttc

SEQ ID NO: 3015 - DNA, 354 bp, Glycine max
  Clone ID: LIB3028-027-Q1-B1-A10
ccaacaacagggtttgtcctgttttctcataagtcataatgcctttctttctttggattggtagcaattttttcttacgtaataacacattgcctaatatttgtaacagtgtgactgcatactcgattcaagatgatgcactgaagactggtgaacttgactacgtaaatggagctgcacttgttcggtattccatatcaggaaacttcctaggacttcctgctgtaactgtaccggtatgattatgttttccttttacttagttactcctttaatgttacttacttacacttacaccccaatagttagcttgtgtttggtctacctatcaaatactacattactttttgagtt

SEQ ID NO: 3016 - DNA, 336 bp, Glycine max
  Clone ID: LIB3028-027-Q1-B1-A11
cttgaagatcgagattttgcatcaaggaagggtgatcccatgccattccctcctggggttggtggaggacgcatagttggagatgccaaccttgatacttttgaggtgattacggccgaaaaagcaattgacgaaaacaatgttggtaatcggatgcttcgcaacatgggctggcatgaaggattggtaccgttttgttcctcctcattacatgagtgtttacgtattacatttttttgttaatcacgttgtttggtagagcttgatatattattccaaatttcctcttttcatggatatgctagtactttgatcctagacctacataatagtttc

SEQ ID NO: 3017 - DNA, 369 bp, Glycine max
  unsure (1)..(369): unsure at all n locations
  Clone ID: LIB3028-027-Q1-B1-A12
gagatttgaagtttaaaccttcaaattaatcaaaccattttaatttgcctatagattctgagtcactgctgctatggcgctacgcgtacttcttgtgttggggatgttgctgatgttgtgccttgttaaggtttcatctgatccaaagatagaagaagaaatactggaagcagaagaagaactgcagtttcccgataacgagccacttatcgtgagagacgcgaacagaaggctaatgcaagatatggattgtggtgggttgtgcaagacgaggtgcagtgcacattcgaggcccaacttgtgcactanggcgtgtggcacgtgctgtgtgaggtgcaagtgtgtcccaacttggtacatctggaaata

SEQ ID NO: 3018 - DNA, 378 bp, Glycine max
  Clone ID: LIB3028-027-Q1-B1-B10
ttttgataggacgaccctttggtgtttggatcttcaagaaagagagacccttgggatttcgtcaccatgagtctcttcggtcttggaaacagaaaccaaaaaacatttcgtccaaaaaagagtgctccatctggaagtaagggtgctcaacttcaaaaacacatcgatgccacgttgggtagtgggaacttgagggaggctgttaaactgcctcccggtgaagatattaatgaatggctagctgtaaacaccgtggacttctttaatcaagtgaatatcctgtttggtactcttacagaattctgcacgccaagtaactgcccttcaatgactgcaagaccaaagtaatgaattaccaatgggctgatggtgttacaa

SEQ ID NO: 3019 - DNA, 342 bp, Glycine max
  Clone ID: LIB3028-027-Q1-B1-B11
gtaaaatctacaaacatcttgttggatgaaaagttacaagcaaagttatctgattttggtctatccaaaattatcccaattgatgggggaactcatgtgtcaactgttgttgctggtactccaggttatctagatcctgagtactacatatccaatagattaacacagaaaagtgacatttatggctttggagttgttcttctagaaataatcacttgtcaaccagtaatagcatggaatgaagaaaggactcacataattcaatgggttagatccctgattgggataggggatatcaagggcattgttgactcaaggttagaaggagattttgacattaac

SEQ ID NO: 3020 - DNA, 324 bp, Glycine max
  Clone ID: LIB3028-027-Q1-B1-B12
cttggtttcaatgaaccatgacactcaatcctgcatggaccccaatgtgatggaggcgaacgtggtggtgagttcttgtggccatgatggactcattggcgccacgtgggtgaagaggctcaagatcattgggttgattgatagtgtgccagggatgaaagcccttgacatgatcacggcagaggatgccattgtgaagctcactagggaggttgtgcctggcatgattgtgactgggatggatgttgctgacattgatggtgctccatcgattggtccaacatgtggagcgatgatgatgtcagggcagacatcaggccatct

SEQ ID NO: 3021 - DNA, 376 bp, Glycine max
  Clone ID: LIB3028-027-Q1-B1-B9
actctctctctctctcttattgtatggccgccaattccagtagccgagggatcaccgccttagggaagcgagtcgccaaccggatctggacttccaacgcacctcctctcacttcaaggaggggagcatacagtagcggctcagtgtacgacgagaaccctgatgatgagatccagtctgggcaggtcccagacgatgtgatccaggcggcaacacaatccggcaaatactgggccccacatccacagactggggtatttgggccccccggaggaggtgaccaaactgcttctgccattcactctgatgcgctggaggagaatgcccggtttcgccccgacagtccccgaggattccgagaagcctcacacccttc

SEQ ID NO: 3022 - DNA, 376 bp, Glycine max
  Clone ID: LIB3028-027-Q1-B1-C11
ctcgagccgattcggctcgaggggagttgttgaatcgggaagcaaaaaaaatgagaatccatcacatagcatgcctccaagacaattattcctatctgatcgtagacgagagcacgaaggaagccgcggcggtggacccggtcgaaccggagaaggttcttgaagttgccagctcgcacggcctcactctcaaattcgtcctcaccacccaccatcactgggatcatgctggtggaaacgacaagataaagcagctggtgccaggaatcaaagtctatggtggttccattgaaaacgtcaagggttgcactgacaaagttgaaaacgggtgataagtctctcttggagctgaaatcactatattggcccttcacac

SEQ ID NO: 3023 - DNA, 299 bp, Glycine max
  Clone ID: LIB3028-027-Q1-B1-C9
atccccccctatctacagagcagccaaaggggaggaataataataaccctatattctaaggccggaaaaataaaaaaggaataacaaacatgtctggaaaggtaattatctcggctgtttctctcatcctggtggttggagtggccataggtgtggtggtggccgtctacaataatgtctaggatgttacacttcaatctcatcaaaaatcagtaagggtcatctgccatcaacagtgatgtacagacgctctgccactaaactctaacccccgtgaacggcatggacaccccttatcc

SEQ ID NO: 3024 - DNA, 350 bp, Glycine max
  Clone ID: LIB3028-027-Q1-B1-D10
cagtggtactgtgggtaatgagagaattaccacctgaagaagctgctagcatacccgaagaatcaagtacaatagcttttgttgctgatagttcaattgcaatccatcatcctcaacgctgggctacagcaacaagcatgcagaatcagacatcaagagcgagtcctatatgattatgcattaacctttgcaaatatatcttggtctgctggagtttggacagcttaatggaatttcctcaggatgtttaaccctagagcgcagaagagagaaaatgataatgatggatgcaagttctcaagggacttgaggtttcccttcccactgtatttacaatctaaatctaaatg

SEQ ID NO: 3025 - DNA, 285 bp, Glycine max
  Clone ID: LIB3028-027-Q1-B1-D11
gtaagtttgtgctgctagagagaggggttccgttctgggatactgtgtacataacaattctgactgtttcaacatgtaatgtgtccgagcttgcaaatgttggcaatcacccttattgagtgtacctagccacatctccacatgatctagacttaacacctattcttatcttctcatcctttctactctgaatccaaaacatgcactgcagcagcagtcacaactcacagacataccagtaggatgcatagactcatcacgcatctaagagaacctcatcctcag

SEQ ID NO: 3026 - DNA, 355 bp, Glycine max
  Clone ID: LIB3028-027-Q1-B1-D12
ggaggcgactatctgtttgcttttcgaatgataatggttctatttcgacgagaattctctttttgtgattcattgtacctttgggaggatgttgatgacaaatcagaggaatctaaaggaagattaaagtcattgcgccactatggaaagtacgagagagaaaatatgaaaaatggaggaaagaatggtgaagatcctccccttcccatatctgtttttcttgttgctagtgtgcttaaagacaaaagcacaatgttactccagcaagcgcgaggcttggatgatgttgtcaagatattgaatgatgtaaatggaaatcttgatgccaaaaaagcttgtgtggctgcattaaaac

SEQ ID NO: 3027 - DNA, 370 bp, Glycine max
  Clone ID: LIB3028-027-Q1-B1-D9
cttccatcagatatattttcttcaaaaacaatggcaggcgaggtggtgaagaaggaagactctctcaacctgaaagtcactaacaagagtcatgttcaacctgaggagaaaattggaaggaaagagtaccagctggtcacttttgatcttccctacttggccttctactacaaccagaagctgctgttttacaagggtgaagattttgagggtatggtccaaaaactcaaagttggacttggtgtggtgctgaaggagtttcaccaacttgctggtaagttagggaaagatgaagagggggtgttcagagtggagtatgatgatgacatgcttggtgtggaagttgttgaaaccggttgttgttgatgat

SEQ ID NO: 3028 - DNA, 305 bp, Glycine max
  Clone ID: LIB3028-027-Q1-B1-E10
gtatgggcgagtccaagtttttaggggttataaaagcaaagatttctctcaattgctcttttcagtgaagagatcatcaatgagaccgagtgggatggttaacttacaggtcttcctcgctatcaaccaaagagaaagtgcctgtgactttagagtcaacgtctaatgtgtggagatctcagatcatgcacagtttatgccggtgaatctccaatacttgttgctacgatggagaatatgtggcggcttcaatgttttggtctattcctaggtggacgatccattcatagtggcactacttatga

SEQ ID NO: 3029 - DNA, 379 bp, Glycine max
  Clone ID: LIB3028-027-Q1-B1-E11
caatatattccattctctctgtgtatttccctacctctcccttcaagatgcagatcttcgtcaagaccctcaccggcaagaccatcacccttgaggtggaaagctctgacaccatcgacaacgtcaaggccaagatccaggacaaggaaggaatccccccggaccagcaacgtctcattttcgccggaaagcaacttgaggacggccgtacccttgctgactacaacattcagaaggagagtactcttcacctcgtcctccgtctccgtggtggcatgcagatcttcgttaagacactcaccggcaagaccataaccctagaggttgaaagctccgacaacaaccaataacttcaaggccaagatccaggacaaggagg

SEQ ID NO: 3030 - DNA, 362 bp, Glycine max
  Clone ID: LIB3028-027-Q1-B1-E12
gctctgcgagatcttcattcgccgattttacaagatgagtaagcttcagagtgatgctttgcgtgaagccatttcaggaagcatggccgattccagtgagaagaatcgcaaatttgtggagaccatcgaactccatatcgggttgagaaactacgatccacagaaggacaagcgtttcagtggctctgtcaagctgccccacatgcctcgccccaagatgaaaatttgcatgcttggtgatgctcagcatgttgaagaggcggataagatatgactggactggatggatgtggaagccctgaagaagctaaacaaaactaagaagttggtgaagaaactagctaaaaaataccatgcccttt

SEQ ID NO: 3031 - DNA, 343 bp, Glycine max
  Clone ID: LIB3028-027-Q1-B1-E9
ctcgaatcgagtttaaagctgaaaatgagggaaaattccactcattccacccagttgcgaccatccttagttacctgaccaaggcccctctggttccaccgggtacaccagtggtgaatgcgttgtcaaagcagcgagctatgctggaaaacatcctgagggcttgtgttggattagctcctgagaacaacatgatcctagagtacaagtgaagttcaaagtcttaagagtaacggtttgggatagtgtagttgaatgtgatcaaaacttaactcatatcccatacccctcttttctgttatatatttctggcaaatgtgaaatttgaagatcgttgaatctc

SEQ ID NO: 3032 - DNA, 363 bp, Glycine max
  Clone ID: LIB3028-027-Q1-B1-F10
aactcaaacgaatacgttttctctttctcttcaatttcacccttattagcatagcatattcatttccctttcttgaatcgttcttaactgcgagaggggatatcagagaagttgattggcctcccattaataacagatctgaatgatctgatggagtctaaaggtgggaagaagaagtcgtctagtagtaagtcctttttgtacgaagctcctctcgattacatcattgaagacgttcgaccacacggtggaatcaagaagttcagatctgctgcttactccaactgcatccgcaagccatcctgagattccctaggtcgtgtgaggacgtagcccccttagtcctgcatctgctatattttt

SEQ ID NO: 3033 - DNA, 346 bp, Glycine max
  Clone ID: LIB3028-027-Q1-B1-F12
gtttattggacaaatatcaaaattatgtcgtggtggaggacgtggaaagccaaattttgctcatgctggtgcgaggaaccctgaaaatttggcaagtgcgacttcataaagctcggtcagagcttatagccactctatgtgaaaaagggaattgacattaagtacacttaacaaatagatcttcttatgctaaatcagcagagtatattgattctctgttgtcgaacaattcatcactaaacaattcacaagcaatcggggcggaaactgctgaagttttaacgagttttcttgcaattccagggggcatgtacttgaattttcaaaatactatagagcatttgtt

SEQ ID NO: 3034 - DNA, 340 bp, Glycine max
  Clone ID: LIB3028-027-Q1-B1-G10
ctttagtgtggtctaaagaagtggaactctattcaactaatcagaattgcgtgaagatgctagttggaaataaagttgatagagattctgaaagggttgtgagcaaagaagagggtttagcacttgccgaggagttgggatgtctgttttttgaatgtagtgccaaaactcgagaaaatgtggagcggtgcttcgaggaacttgcactaaagataatggaagttcctagtcttttggaagaaggatctacagcagttaaaaggaatattctaaagcaacaacaacaaccccaagcatccgaatttggtggttgttgctcttaattgctgcaatgtgaaca

SEQ ID NO: 3035 - DNA, 322 bp, Glycine max
  Clone ID: LIB3028-027-Q1-B1-G11
gtggagagagataattcaatggtctcgttgatgtctataagaagacattggtatctgatggtgttgccgggctctaccgtggttacaatatctcaggtgttggaatcatcgtgtatcgtggtctgtactttggattgtacgattctgttaaaccagttgtcctcacagggtcattgcaggatagcttttctgccagctttgcccatggatggttcatcacctatcgtgcaggtcgtgcatcagatccactacacactgttagaagatgattgatgatgacctctggtgaagctgtccagtacaagatctccttggatgcatt

SEQ ID NO: 3036 - DNA, 343 bp, Glycine max
  Clone ID: LIB3028-027-Q1-B1-G12
cttcacccaaattattcattccgcattttttccccagtaacaatattagtcaatcgaattaatttccatgaccatgtccataacactcttactcgaagccaagccctcccacttgaaatggaaccagttaccatcccttccacgtcgcacaaggcccgaccgtttcactccaatacccgactcgaatctccgcgttgcaagcgtcaaatgtatctcctcgtcgtcggaagccggatgacacgtgtattctgcagtctccgtgggaggttccggcgagcacggtgtcgaacacgctgaacgcgcttaagaaatcggtgatagctgctgtgttggtggggccgtt

SEQ ID NO: 3037 - DNA, 344 bp, Glycine max
  Clone ID: LIB3028-027-Q1-B1-G9
caggccccttttgatcctgaaggactcctaagttcagtgatggctattgtcacctgcttgattgggttgcactatggacatattattgtccattttaaggaccacagagtgagaatcatatactggatgatcccaacctcttgtcttttagtttttggccttgcgttggacttatttggaatgcatataaataaggttctctactcgctcagttacacatgtgtcactgctggtgctgcaggcgtcctctttgtcggaatatacttgatggttgatgtctgtggatgtcgtcgcatgactttggttatggaatggatgggcatgcatgcattaatgatttatat

SEQ ID NO: 3038 - DNA, 352 bp, Glycine max
  Clone ID: LIB3028-027-Q1-B1-H10
aatgacttgggagtgaagttcccatttaaccaaccaatggaagatatacaacagtttgtggaatgctgatgactgggccacaaggggtggtttggagaaaacagattggtccaaagcccccttcatagcctcctacaagggcttccacattgatggttgtgaggcctcagtcaatgccaagttctgtgacacacaaggcaagacgtggtgggatcaacctgagtttcgtgatcatgatgctgctcagtggcaaaaactctcctgggttcgccagaaatacaccatctacaactactgtgctgaccgcaaacgctaccctcaagtctctccagagtgtgctagagaccgttat

SEQ ID NO: 3039 - DNA, 333 bp, Glycine max
  Clone ID: LIB3028-027-Q1-B1-H11
cctatgtgctatatggtggagccacggttcctgcacagtgctgcaatgggatcaggaacctctatggcatggctcagaccaaagcatatcgccaagctgtttgcaactgcatcaagaacgctgttaggaacagtggcttcacctactctcacttcaatctcaaccttgctgctaaccttcccaagaactgtggggttaacattccctaccagatcagccccgacacagactgcaccagggtgcagtgaggttggtgcatgatgtgtatgttagcagtgttagaataagaggccacgtgacacgaacagggaatggctagaaattgctttttta

SEQ ID NO: 3040 - DNA, 348 bp, Glycine max
  Clone ID: LIB3028-027-Q1-B1-H12
aaaaatatgaaaatgatgtacattggagcacttgttgtactcattgcattacgcttcctcaattgcgacgaggcagaagacacgggaagccttgtgcctgcaatcataacttttggtgactcagccgtggatgtagggaataatgactatcttcccacccttttcaaggctgattaccctccttatgggagggactttgctaaccaccaacctactgggaggttctgcaatggcaaactagctactgattttactgctgacactttgggtattaagacctatgctccagcatatcttatgccacaggcatcagggaaaaacctccttattggagcacactttgcttct

SEQ ID NO: 3041 - DNA, 389 bp, Glycine max
  Clone ID: LIB3028-027-Q1-B2-A10
ccaacaacagggtttgtcctgttttctcataagtcataatgcctttctttctttggattggtagcaattttttcttaggtaataacacattgcctaatatttgtaacagtgtgactgcatactcgattcaagatgatgcactgaagactggtgaacttgactacgtaaatggagctgcacttgttcggtattccatatcaggaaacttcctaggacttcctgctgtaactgtaccggtatgattatgttttccttttacttagttactcctttaatgttacttacttacacttacaccccaatagttagcttgtgtttggtctacctatcaaatactacattattttttgagtttaacagagtcagtacataagtttgtatgctatcaa

SEQ ID NO: 3042 - DNA, 272 bp, Glycine max
  Clone ID: LIB3028-027-Q1-B2-A11
cttgaagatcgagattttgcatcaaggaagggtgatcccatgccattccctcctggggttggtggaggacgcatagttggagatgccaaccttgatacttttgaggtgattacggccgaaaaaccaattgacgaaaacaatgttggtaatcggatccctcacaatatgcgctgacaagagagatgggtactgttgtgcccccccacatcatcagattttacacattacacatttttgtgatacaacttgttttgtggagcatcataaaatat

SEQ ID NO: 3043 - DNA, 390 bp, Glycine max
  unsure (1)..(390): unsure at all n locations
  Clone ID: LIB3028-027-Q1-B2-A12
gagatttgaagtttaaaccttcaaattaatcaaaccattttaatttgcctatagattctgagtcactgctgctatggcgctacgcgtacttcttgtgttggggatgttgctgatgttgtgccttgttaaggtttcatctgatccaaagatagaagaagaaatactggaagcagaagaagaactgcagtttcccgataacgagccacttatcgtgagagacgcgaacagaaggctaatgcaagatatggattgtggtgggttgtgcaagacgaggtgcagtgcacattcgaggcccaacttgtgcactanggcgtgtggcacgtgctgtgtgaggtgcaagtgtgtcncacctggtacatctggaaatagggaactatgtggaacctgcta

SEQ ID NO: 3044 - DNA, 360 bp, Glycine max
  Clone ID: LIB3028-027-Q1-B2-A3
tatggtcttgtcttcccccaacaaccgtttccttctcttttattcatgacacaccacactctctctcacatcttccatctcctccatctttctcacacttttctcccacatcacaatcacatcattacgttgcattaatacaatggaccaaacaaccgccgctgccaacgaggttgtccgcgagttccccggcctcctccgcgtctacaaagacggccgcgtcgagcgcctcctcggcaccgaaaccacccctcccggcaccgaccccggcaccgccgtccaatccaaagacgtcaccatcaacgccgaaaccggtgccggcgtccgcctctaactccctcgcaccgccgccgcccaaaa

SEQ ID NO: 3045 - DNA, 373 bp, Glycine max
  Clone ID: LIB3028-027-Q1-B2-A4
taataacatagacaagaacacaattaatggctggaatgcttcctggagttgaatgtgctagaaggagaaggtttcgtcgatgttcggattcaaattcaacttctttgggatcacatgcatccacaaggcgttcttctttctgtttgtatgctagtaaccatgatcaatgtcgccttttctcatcctcttccctggtttttacccaatacccctaaattgaatgcctttttgatttctatacatgtttttcatctccactgttgatgggtgtgtgctaattttcttcctggatttgaatggaaatagcaaagaagcatgttataccaggcacaccctgatgagaatatgggaggagtggccagagaagccaaac

SEQ ID NO: 3046 - DNA, 370 bp, Glycine max
  Clone ID: LIB3028-027-Q1-B2-A5
gctgagtttggaattgtgactcagcaagattcttcttcttcgatggaccataaagatcagaatttttcctcgcaggaagcagacaaagaagaaactgaggagccccaggaagaagaagaatcttgctgagtttggaattgtgactcagtgtatagctccgacaagggtcaatgaccaatatttgactaatgttctgttgaaaatcaatgctaagcttggtggtctgaactcaatgttaggcgttgagcattcgccttctattcctattgtgtctagagcgcgaaccatcattattggcatggatgtgtctcatggttcgccagggcaaacagatattccttcaattgctgcggtggtcagctctagagaa

SEQ ID NO: 3047 - DNA, 357 bp, Glycine max
  Clone ID: LIB3028-027-Q1-B2-A6
ggaaaatgtttcttattcaaaggaaaggaaaacacctaacaagcttggttggtaagttatctacaatctgcatcatggaaggtgttattctgagaagggtcattccttcggataacagttgcctcttcaatgctgttggctatgttatggatcatgacaaaaagaaagctgctgagttgagacaggttatagcagcatcagtagcaagtgatccacagaaatattgtgaagcatttcttgggaagccaaacacagagtattgtaactggattcttgactcatagaagtggggaggtgcaattgaactttcaatattagcagattattatggacgttaaattgcagcatatgatattc

SEQ ID NO: 3048 - DNA, 361 bp, Glycine max
  Clone ID: LIB3028-027-Q1-B2-A7
tgcaacatgtactgcttggattgtatgaacggtgctctctgctctctctgcctcgcttaccataaagatcatcgtgctattcagataaggaggtcctcataccatgatgtgattagggtgaatgagattcagaaggtgttggacatcacaggggtccaaacctacattatcaacagcgcgagggttgttttcttgaatgagaggccgcagccaaggcctggtaaaggtgtcaccaacacttgtgaagtctgcgagcgtagccttcttgattcctaccgattctgttctctaggttgtaagattgttgggacttcaaggaacttcctgaagaaaaagtcagcggcaatggtatcagactcag

SEQ ID NO: 3049 - DNA, 376 bp, Glycine max
  Clone ID: LIB3028-027-Q1-B2-A8
gtcttttcatatagatatcccttcaacacaacataggtcatcgaaaggatctcgaagacccaccaacgcacgaaagccgggatctttcagaaaatggattcctattcgaagggtgcataaccgcatggataagctcacactaacccgtcaatttgggatccaattcggttccttaggaggtatcgggaaggaattttggaatgtaataatatcgattcatacagatacagaagaaagggttctctattgattcaaacgctctacctacgagatagggatagagaaagaggaaaaaaccgaggatttcacatagtacttttggtcgaaaaatcgatctgatttttttcgtacttttcgctcaatgatgaaatgggtc

SEQ ID NO: 3050 - DNA, 379 bp, Glycine max
  Clone ID: LIB3028-027-Q1-B2-B1
aggaagttgagtagttcttcatcatagtcttaaacattaaaccttagcaaaactcaacaatgctagacatcaaaggctacctcgtactcttcttcctatggttcatatcaaccattctgatacgttccatcttcaagaaaccacagcgtctaagactcccaccgggtcctccaatttcaatacccttgctgggacacgcgccatatctccgttcactgctccaccaagcattgtacaagctatcactgcgctatggacccttgatccacgtcatgatcggttcgaagcacgtggtggtggcgtcgtcggcggagacggccaagcagatcctcaaaacctcggaggaggcattctgcaaccgtcccttaatgataaccaa

SEQ ID NO: 3051 - DNA, 391 bp, Glycine max
  Clone ID: LIB3028-027-Q1-B2-B10
ttttgataggacgaccctttggtgtttggatcttcaagaaagagagacccttgggatttcgtcaccatgagtctcttcggtcttggaaacagaaaccaaaaaacatttcgtccaaaaaagagtgctccatctggaagtaagggtgctcaacttcaaaaacacatcgatgccacgttgggtagtgggaacttgagggaggctgttaaactgcctcccggtgaagatattaatgaatggctagctgtaaacaccgtggacttctttaatcaagtgaatatcctgtttggtactcttacagaattctgcacgccaagtaactgcccttcaatgactgcaggaccaaagtatgagtatcgatgggctgatggtgttactataaagaaaccaatag

SEQ ID NO: 3052 - DNA, 387 bp, Glycine max
  Clone ID: LIB3028-027-Q1-B2-B11
gtaaaatctacaaacatcttgttggatgaaaagttacaagcaaagttatctgattttggtctatccaaaattatcccaattgatgggggaactcatgtgtcaactgttgttgctggtactccaggttatctagatcctgagtactacatatccaatagattaacacagaaaagtgacatttatggctttggagttgttcttctagaaataatcacttgtcaaccagtaatagcatggaatgaagaaaggactcacataattcaatgggttagatccctgattgggataggggatatcaagggcattgttgactcaaggttagaaggagattttgacattaactcagcttggaaagccgtagaaatagcaatggcgtgtgtttcccta

SEQ ID NO: 3053 - DNA, 386 bp, Glycine max
  Clone ID: LIB3028-027-Q1-B2-B12
cttggtttcagtgaaccatgacactcaatcctgcatggaccccaatgtgatggaggctaaggtggtggtgagttcttgtggccatgatggaccctttggcgccactggggtgaagatgctcaagagcattgggttgattgatactgtgccagggatgaaagcccttgacatgatcatggcagaggatgccattgtgaagctcactagggaggttgtgcctggcatgattgttactgggatggaagttgctgacattgattgtgctccaacgatgggtccaacatttggagcgatgacgatgtcagggcagacatcagcccatctggctttgagatcattgtgacttccccatgctttggattctgtacgataccttcatcttgagc

SEQ ID NO: 3054 - DNA, 340 bp, Glycine max
  Clone ID: LIB3028-027-Q1-B2-B2
ggcgatttgcgtaattgtccaccacctcaccaaccaagccgtcgttctgtttagtcactgaaaaaaaaaaaaaacttccaccgtcggcggccatggcagcgctgtcctccgccgtcactcttgccgccaaaccgctctcactaccccaaaatcaccgcgccagagtagcggcggcgttgcactctcccaagcgccacctcaagagaacggaattcaagttcttcgccaatggctcatctgcctctctccgctcccttccccgcctctacgtttcatccaacgacgcccgcttcaattccggtcccgaggagagccagcaacaacagtcgtcgagttttgc

SEQ ID NO: 3055 - DNA, 360 bp, Glycine max
  Clone ID: LIB3028-027-Q1-B2-B5
aatcaatccttgttcactctatttcttagctccaacaacatcactaaaaaaaatggcctctctccgttttctcttctttgtttctttcttcattgttttgtcactttccatcaacattggtgaggtccaaggtgcaaatagaaaacttttggcaccaacatttcctgatataggcaacattcctggcgtgcaatatcctcctttccccccagtaaccgattggccagagtacaggttgccatcattcttaagacctaattaccccgcaattcctgcaaattattaccgctacactccccctgccaaaacaaccacaaccacagcttccaagccttgatatgagcacgatatgcatgcaac

SEQ ID NO: 3056 - DNA, 375 bp, Glycine max
  Clone ID: LIB3028-027-Q1-B2-B6
ctcatcctcttctttctctctctaccattgccatggatccctacaagcaccggccatccagcgccttcaattctcccttctggactacaaattctggtgctcctatttggaacaacaactcctctttaaccgttggagctagaggtccaattctgctggaggattatcatcttgtggagaagcttgcaaattttgatagggaacgtatcccagaacgtgttgtccatgccaggggcgctagtgcaaagggtttctttgaggtcacccatgacatttctcacctgacatgtgcagatttccttcgagcccctggagttcagacgcctgtaattgttcgtttctcaactgtcattcatgagcgtggtagccctgaaa

SEQ ID NO: 3057 - DNA, 365 bp, Glycine max
  Clone ID: LIB3028-027-Q1-B2-B7
tactggtactgttgtcggatcgaaaaccctaaattgaattcgaatacacaacatgcagcaggggggaggatctgagacggaagtaacatgggaagaccagcagaacatcaacaaattcggaaggttgaataatcgctttcacgagcttgaggatgagatcaaaatcgcaaaggaaacaaatgataatttggaggatgcaagcaacgagttgattctcacagatgaagaggtcattcggtttcaaatacgagaggtttttgctcatgtgccaaacgatgaagttgagaacaggatagaacagataaaagaggtgacaagccagaaattagcaaaacttgaagaggagaaagaatctattcttgctc

SEQ ID NO: 3058 - DNA, 365 bp, Glycine max
  Clone ID: LIB3028-027-Q1-B2-B8
ctcgagccgattcggctcgagctagaaaggagtgcatctgctcaacaacctggatttggtgaacaagtgatgcatcaactttaccatgtaaaaaatgctactcagttgcgcatggatgatattccaaaacttttggcagagtacaaacagctacctatatgaatgcttgtttgatgaaaatgatccccccctcgcccctcccccaaaaaaaaacccataagaattccatggtgagttgtctcaaaaacatggttccccaacaatacatgattcacagtgcatcgaccttgtttaatatcctgaaatgtagcttttctattttcaacattttttatgccatgtttgaacctacgatttcatgattt

SEQ ID NO: 3059 - DNA, 318 bp, Glycine max
  Clone ID: LIB3028-027-Q1-B2-B9
actctctctcgctcgcttatggtatggccgccaattccactacccgacggatcaccgccttagggaagcgagtcgccatccggatctggacttccaacgctcctcctcccacttcaacgacgggagcacacagtagcggctcaatgtacgacatgaaccctgatgatgagatccagtccgggcatgtcccagacgatgtgatcgaggcggcaacacactccggcaaatactgggccacacatacacactactggggtacttgggctccccggaagaagtgacttcactgcctcagccgactcactctgatccgctgga

SEQ ID NO: 3060 - DNA, 369 bp, Glycine max
  Clone ID: LIB3028-027-Q1-B2-C1
ctcgagccgattcggctcgaggtctgctgttagatctgtacccgcctagccattgatttggaaaagtccaacttcaaggatgagtaagcttcagagtgatgctctaagagaagctatctcaggaatcatggctgattccaaggaaaagaacaggaaatttgtggagaccattgaactccaaattgggttgaaaaattatgatccccagaaggacaagcgtttcagtggctctgttaagttgcctcatattcctcgccccaagatgaagatttgtatgcttggagatgcccagcacgttgaggaggctgagaagataggattggactacatggatgttgaggccttgaagaagcttaacacaaacaaaaa

SEQ ID NO: 3061 - DNA, 388 bp, Glycine max
  Clone ID: LIB3028-027-Q1-B2-C11
ctcgagccgattcggctcgaggggagttgttgaatcgggaagcaaaaaaaatgagaatccatcacatagcatgcctccaagacaattattcctatctgatcgtagacgagagcacgaaggaagccgcggcggtggacccggtcgaaccggagaaggttcttgaagttgccagctcgcacggcctcactctcaaattcgtcctcaccacccaccatcactgggatcatgctggtggaaacgacaagataaagcagctggtgccaggaatcaaagtctatggtggttccattgaaaacgtcaagggttgcactgacaaagttgaaaacggtgataaggtctctcttggagctgaaatcactatattggcccttcacactccttgccacac

SEQ ID NO: 3062 - DNA, 157 bp, Glycine max
  Clone ID: LIB3028-027-Q1-B2-C12
tcatgtgacgggagactcttatacaacatgccagtatcacaggcatcacattcagcacgctggaatctacactctgcaggactctattcttccagactccaatcggttcactcccattctattcttctcaacgtacactcatcatcgacatcccgct

SEQ ID NO: 3063 - DNA, 372 bp, Glycine max
  Clone ID: LIB3028-027-Q1-B2-C3
ctcgagccgattcggctcgaggctgaatcgttcggtgcccgttgatgcactgcaaaggataatgatgcgagcacctcaactatcggatttgggtattggatcacttgtccatgatccagaatcggaggcctacataaagcttaagaataccattctcaagtgcaagtccataaccagtttgtctgggtttttggaagttgctcctcattgtcttgcagctatatatcctatttgcccgaacttaacatctttgaacttgagctatgcagcaggcattcagggaagtgctctggtaaaactaattcatcactgtgttaaacttcagcgcttatggataatggattgcattggagacaaaggactaggtgttgt

SEQ ID NO: 3064 - DNA, 367 bp, Glycine max
  Clone ID: LIB3028-027-Q1-B2-C5
tgcaattcttggaagaggtgaggcttggtatagcaaaaagctttagaaggctaaagagaagatcactaaactgaaggagagggtacaagaactggagacattaactgaagcaaaagagaacgaatatctgaggtctgtgaaactttctaaaataacaaagacttcaaagaatctcgaagaaagcatcaaatctgattctgatacattgacagcttgcaaactttcatcaaaagaacaaagcaaccgaattttgacacccaaatctggaattgacctgactgcaaacgacaacagtaaatattttcaatctttgaagatatagaactccaatgttactaaaaataaggctgtgaatgtcagtaatgga

SEQ ID NO: 3065 - DNA, 372 bp, Glycine max
  Clone ID: LIB3028-027-Q1-B2-C7
agaaagataaagcattccatagcctcccataaaaatgaagaatactatcttctctgctctctttctactttgtgccttcaccacctcatacctaccttcaaccaccgcggtggtcgataccgacggtgatattcttcagaatcctggcacatactttatcttgtccgtttttcgacccggcggcggagtagaattcgccgccactggaaacgaaacttgccctctcactgtcgtgcatactctcttcgggaggggctttccagcaatattatcgtcccggttacgaatccctttcatcggcgaacgacaactcttcagcatcctgttccgtattgtgccatggtgcgccaccactccttctaagtggaccat

SEQ ID NO: 3066 - DNA, 340 bp, Glycine max
  Clone ID: LIB3028-027-Q1-B2-C8
aaaacatctcaatgggttcttcttctattacaacatcgcccgcaaccatgaccatggctgcgatcgtgctcctgttcacggtctttgccgtttcctccgccctagacatgtcgataatctcgtacgacagcgcccacgcggacaaggccgccacgttgcgcaccgaggaggagctgatgtccatgtacgagcagtggctcgtgaagcacgggaaggtgtacaacgcgctcggcgagaaggagaagcgcttccagatcttcaaggacaacctgcgattcatctacgaccacaactccgcggaggaccgaacctacaagctcggactgaaccggttcgctga

SEQ ID NO: 3067 - DNA, 376 bp, Glycine max
  Clone ID: LIB3028-027-Q1-B2-D1
caggaagaaaggtccttgtttggccacttgagtcgtcgcagtcgtcttccactggcaattaacaaattttctctgaactttcctctctctctttcccgtgctttctttcctagcaactactccaggataacctatgaccatgataaataataagtcttcatactttcactgactattagagttgtagtttttcaccataagccatgaggctccttagcatcatcaccacctccttaacactattcttccttcttctctttctctccatatagctccaagcgtacaccccagaagacaacttcaccatcagttgtggcaccaccgggatagtcttcgacggccaaaggacatggacgggggacgcagacacaaagta

SEQ ID NO: 3068 - DNA, 390 bp, Glycine max
  Clone ID: LIB3028-027-Q1-B2-D10
cagtggtactgtgggtaatgagagaattaccacctgaagaagctgctagcatacccgaagaatcaagtacaatagcttttgttgctgatagttcaattgcaatccatcatcctcaacgctgggctacagcaacaagcatgcagaatcagacatcaagagcgagtcctatatgattatgcattaacctttgcaaatatatcttggtctgctggagtttggacagcttaatggaatttcctcaggatgtttaaccctagagcgcagaagagagaaaatgataatgatggatgcaagttctcaagggacttgaggtttcccttcccactgtatttacaatctaaatctaaatgtatatagcagcaatttgatatatgaaaagttcttttcctt

SEQ ID NO: 3069 - DNA, 401 bp, Glycine max
  Clone ID: LIB3028-025-Q1-B1-F7
caaaagtcctaggagtgtaaaacacagacgcaaaatgaagacgatcttgtcgtctgagaccatgagtattcccgacggcgtgagcatcatggttcacgctaaggttatcgaggttgagggccctcgtggaaaactcgtgcgagacttccaccatctgaacttggacttccaacttattaccgacgatggcggtaaaaggaagctcacgattgattcttggtttggttctcgtaaaacctccgccgccatctgcaccgccctcagccacgttgagaatttgatcaccggcgtcaccaatggataccgatacaaaatgagattcgtgtacgcacattttccgatcaacgctagcattggcaacaacagcaagtccatcgagattagaaatttcctcggcgaga

SEQ ID NO: 3070 - DNA, 369 bp, Glycine max
  unsure (1)..(369): unsure at all n locations
  Clone ID: LIB3028-023-Q1-B1-F7
cttgtgcaatttggccactatgaacacagggcttgctgcaggtgcagccttgcttgcactcttggctatcaccttctccttgttgagccctcaaaccctgttttctccgcctgagattccgggctcgaaggaccaccttcacgctgctcggttactccatgtcaccggagccgtcgggccggagagtcttgtcttcgacgctgacggcggagggccctacaccggcgtcgccgatggccggattctcaagtgggaaggggaagagcgaggttggactgaatttgctgtcaccagttccaataggtcggactgtgtacgcccatttgcaccagagttggagcacatttgtgggaggccattangactaag

SEQ ID NO: 3071 - DNA, 364 bp, Glycine max
  Clone ID: LIB3028-023-Q1-B1-F8
taattttgcacttatattcctgcctttacttggattctgtcgcaaaaggcaaatacatagcatcttgagcagttgagcaattgagctatcatacaaaagcaagcgaaggtacgtaagattttatcatcctaatggattatgtgttgtgtgcaaaaatattctgtaaaactaaattttcaatctaaattttaatgtgcacacatactttttgaaagtaatcaaatgttatcacaaaatcaagtagacttataaattgagtttgaaagttgaaacagctttgagcccatcaacctaaataattcaacccacttatctaatggatcaataacgggttgggttggattaatcaactagattgagtttt

SEQ ID NO: 3072 - DNA, 379 bp, Glycine max
  Clone ID: LIB3028-023-Q1-B1-F9
agaccagcgagcaccaccaccgcgaccggcgagcccagccaccgtgttcgacttcgaattgagtccgagaaggctgttagataggcttttatattgaaaactgagacttgaagggaagcggttataattggtctggctttggacgtttaaacaattccgatcaagatccaattttgccttcccattttctcgtcgtttttttgtaacggtctttccatggcatatcccttctctgatttcaagtactcagatggcctcagtgtagtgggtatctccttctgcacagctattgtctgtgaggctatctcatgggttcttatctatcggaccaattcttacaaaaaccttaagtcctccattgacaaagcctccaagaaac

SEQ ID NO: 3073 - DNA, 365 bp, Glycine max
  Clone ID: LIB3028-023-Q1-B1-G1
aaaacactcataacacaaagcacaaagcaaagctcatccttgagttaaaaaatggcagcagcttcttccatggctctctcatccccatccttggctggcaaggccgtgaagctgggcccatcagccccagaagtgggaagggtgagcatgaggaagaccgtcaccaagcaggtctcctcaggaagcccatggtacggcccagaccgagtcaagtacttgggcccattctctggcgagcccccgtcctacctaaccggtgagttcccaggcgactacggctgggacactgctgggctttccgcagacccagaaaccttcgccaagaaccgtgaactcgaagtgatccactccaggtgggccatgct

SEQ ID NO: 3074 - DNA, 393 bp, Glycine max
  Clone ID: LIB3028-023-Q1-B1-G10
gcccgaggacgagaggaagtcgccggacatagaaattccccttgacgcgccgacgatgacgcacgacttcgcgatcacggagaatttcgtggtgatcccggaccagcaggtggtgttcaagctcggcgaaatgatcaaaggaggatcgccggtgatctacgacggcgagaagaaatcgcggttcggaatactgccaaagtacgcttccgacgcgtccagcatcgtgtgggtggactcgccagacacgttcttcttccacttctggaacgcgtgggaggaacgcgacaaagacgaagtggtggtaataggttcgtgcatgacaccaccagattcaatattcaatgacagagaagagagactgaagagcgttttaacagaagtaaggctgaacat

SEQ ID NO: 3075 - DNA, 387 bp, Glycine max
  Clone ID: LIB3028-023-Q1-B1-G11
agaacttatcaaaattttcttcaacatcaccattacaaaaattggtgataaactcaaagaaactaatattttgcatgaggttgaggaggaacccagagccaagatggcacttgaaacatgcaagcaactcatggatctttctattggggaattaacaaggtcacttgatggaataggtgagtttaacctcataaatgttgacaaaatcctcatgaatttaaaagtttggcttagtggcgcggttacataccaagatacttgcttggatgggtttgagaacaccactagtgatgctggcaaaaagatgaaggatttgttgacgataggcatgcatatgagcagcaacgcccttgccattgtaacagatttagctgacactgttaatga

SEQ ID NO: 3076 - DNA, 392 bp, Glycine max
  Clone ID: LIB3028-023-Q1-B1-G12
atcaccttgcgaactccgccttctacaactctctcttctgctgcatcttccattcacagaacaagatccaccaccttctccttctcgctttgttccccaccaactcttcgcttcaattcccacagctccctctctcttactcgcgcttccgcttcctctatcactaccgcttcgaccactgagctggacgctgtgtcctccttcagcgagatcgttcccgacaccgtcgttttcgatgatttcgaaaagtttcctccaactgctgctactgtcagttcctcgctcctcttgggaatatgtggccttccagacaccatttttaggaatgccgtggaaatggctttagctgattctgagtgttatggacttgaaaatcctaacgcgcgattgtc

SEQ ID NO: 3077 - DNA, 370 bp, Glycine max
  Clone ID: LIB3028-023-Q1-B1-G3
gaaggaatttgtcaaagagtagccatcgccccaacgatcccgtttcccttcacttctctacgcaaagccccttgttttgcatagagctacttaaaatgtcggagggaaatgcggagagaggaaagagaattgccattattggtgtctcaaccttattgttggtggcgatggttgtggctgtcacagttggtgtcaatgttagtgagaatggttccaacaatgaggacacaaaaattgcttcttctgtaaaagccgtccaaaccctttgccatcccacaaattattagaaagaatgtgaggaaagcctcatagccaaggctgggaataccactggatcaaaagaacttatcaaaattgtcttcaacatcaa

SEQ ID NO: 3078 - DNA, 362 bp, Glycine max
  Clone ID: LIB3028-023-Q1-B1-G4
atctattcaagtgagtcacttgagcatgaccttcctggtcacctgctccgatatcctattggggtttccaacgaaggagttgtcactgagcttccaggatttgaattcttccctgacaccaaggctcgtgttcttggcgacaaagttgattaccttccaccgatccttactacttaagtttcattttataagcttgttaataaaatatagtacttatgttgttagagtgagcaacaattgtaatggttctgtagagatggtttcattctgaagattgccttccagattttaacaatctgatgatgagaaggcaatcagcttgtatgactctatctgcattatgatacatgtttatcgggttt

SEQ ID NO: 3079 - DNA, 359 bp, Glycine max
  Clone ID: LIB3028-023-Q1-B1-G5
ccaagatattggatctcagagggggaagctatcagttgaggatttcctctatttgattcgcaaggtactcttttgttaaaaaattgcaaataattattatgaaggttaaaagttattggggaaccttgaaatattttagcaaatttttatcttagtctccctaaatccttttgttaattgtttaaatctattagaagggtaatgcaaaactgaacaaatgaattaaacaggaatccagcagaaactaaaggaaaaatcctctataacacccttctatatattgataacaccctatttaattgacccatctttttataagtttttgtttcctaatttattcggaatcaaaactttacaac

SEQ ID NO: 3080 - DNA, 368 bp, Glycine max
  Clone ID: LIB3028-023-Q1-B1-G6
ctcgagccgaatcggctcgagcgaccatctattccctatatccgcttccaatttgttaattttcattctgatacgattctgggtatcgccaaatttctcgattttccgcatattttggatttggaggggtttgaagaaataaccgaactttggaaggaaaaacacaaccccatatgatgcaacgcttggttgatcatgttcttgctgttactaaagagtcattgaaggcaattacttatgagtccttaaataatattgtgaggctaatcaacggagtatcagcccttttgttggcactactacctgggaaagctaatatactagaaggtatccatggttgggaactcaagccaactttcaggggaccg

SEQ ID NO: 3081 - DNA, 331 bp, Glycine max
  Clone ID: LIB3028-023-Q1-B1-G7
gtgagtgggatcaagaagaagcaagcccctggagctgctccttcaaaacccaatgttgagaccgaggcagatgctgacagtgagcaaatccttcctgactgagaatctcggttcaacagacattgttttttggtagagttgatgatgtgcaaggttctttatcttccttaaatcttatcactattcttaggagttttgagtcctttattgggatgctgttttttgtgccttctctactgtttgcaagagcagattgtgtactttgttgatgttaaagacttaattaactggcgtatgctttaaaacaaagtacactccctcaatgcctcag

SEQ ID NO: 3082 - DNA, 283 bp, Glycine max
  Clone ID: LIB3028-023-Q1-B1-G8
attctctctatgtatttccctaagtctcccttcactattcatttcttcctcaagattctcaccggtacataccactcaaccttgatgtggtcatctctgacagcatcctcaacgtaaaagccaatagtcatgtcaaagaatgaatcaccccggacgatcattgtctcattttcgccttaacgcaacttgttagacggtcgttcttcttgctagttacaagattcataatgtgagtactcttcagctcgtcctccgtctccgtggagtgattcacatcttcgtt

SEQ ID NO: 3083 - DNA, 388 bp, Glycine max
  Clone ID: LIB3028-023-Q1-B1-G9
aatttttcttgcgtacacccgcattgttttttccccacaagcaagtttgcaaaggcaataatctctattaccctcattatccaaaatcagaaaaaatggccactagaggcctcaaaatttgcttggccgtgtcctctcttttcttgatcattcttgccatcgttattgtgaccttaattttgaccatctttaaacccaagaacccagatatatttctccacccagttgacctagaaaactttcaattgctttcacctaatacaactagtgcacccttaggcatagtgatcacaattgtgaaccctaattatggaaacttcaagtacgtgaattccagtggctatcttaaatatcgtgacaccattatagccgaagttccattggggat

SEQ ID NO: 3084 - DNA, 386 bp, Glycine max
  Clone ID: LIB3028-023-Q1-B1-H10
tctcgatacaaaaatacatagaaatggcctcttctcttgcatcctcatcaactgttctctggatcctttttctaaccattgcaactcttcatttgagttcagccaggaagttgtccgggtcagacccgcagttgcagtttcaataccacagaggccctctcctcacaggcaaaatctcagtaaacctcatttggtacggtaaattcaagccttctcaaaaagccatcgttgctgatttcatcacctcgctctcctctcccaaagccgtcaccgcccaaccatccgttgccacgtggtggaaagccagcgataaatactacaacaactcgtcacccaaactcgctctttccctcggcaccatccaaatcctggacgagaattactcc

SEQ ID NO: 3085 - DNA, 398 bp, Glycine max
  unsure (1)..(398): unsure at all n locations
  Clone ID: LIB3028-023-Q1-B1-H12
ctttcttcctcttcctcagtagtgcgattttcgattctcttctctgcaactatgcctaaccctaaggtcttcttcgacatgaccatcggcggtcaacctgccggccgcatcgtgatggagctctacgccgacgtgactccgagcaccgccgagaacttccgcgcgctctgcaccggcgagaagggcgccgggcggagcggcaagcccctccactacaaaggctcgtccttccaccgcgtgatcccgaacttcatgtgccagggcggcgacttcaccgccggaaacggcaccggaggcgagtcgatctacggcgccaagttcgccgacgagaacttcgtgaagaagcacactggtcncggcatcctctccatggcgaacgccggtcccggaaccaacgg

SEQ ID NO: 3086 - DNA, 125 bp, Glycine max
  Clone ID: LIB3028-023-Q1-B1-H2
tctagccgctcttcctcagtcacagtcgtccaaacaacacacaaccttggaaccacagaacctcatgcaagcctacaattgagcagtcctcctcatgggaattacaaatgtcacccacttatggt

SEQ ID NO: 3087 - DNA, 360 bp, Glycine max
  unsure (1)..(360): unsure at all n locations
  Clone ID: LIB3028-023-Q1-B1-H3
caaaaacacaaacaatatgaagttcactataatcacaatatttttttctttatttcaagtcgactttggttttgcacaacaaggggatcttgacatatcaagatttggaggaaaaccgaattcagatataagccaggctttcttaagtgcctggactcaagcatgtgcatcaacaactgctgtcaaaattgtgattccagctggcacatatcaaatgggtgcagttgatgtaaaaggtccttgcaaggctcctattgaggttcaagttgatggaacaattcaagcacctacanacgtagttaaccttaagggggcagaccaatggttaaaggttcaacatgttaactctttcaccctgtc

SEQ ID NO: 3088 - DNA, 363 bp, Glycine max
  Clone ID: LIB3028-023-Q1-B1-H5
ggaggaggaaaacacagatgcttcagctgctgccggtctcctcaagaaactaactgttggcgaggataactcggaggacatagagccgccggaaaaggccacggataccaatgtgaaacgtgagcaggatgtatagacaagaagccaagcctgaggatcataagatgaatcagctccaccagcatagaatatgatgtggctggtgaatgatttattctctcataggttgctggcatgtttataaaagattggtaacctagattggtacctcaggatatagaatggctggcatgaagtgatatgaagatgtgatggtctgtgtatctgttgagtcctgtttttgtactggtttttgcaagtatg

SEQ ID NO: 3089 - DNA, 365 bp, Glycine max
  Clone ID: LIB3028-023-Q1-B1-H6
gaaaaagagagaggtagagaaaagcgaagagtctctctcttcctatctctctctttcaatgtcagggcacaaatcttccacctctacttcttcttcttcttccttctaacctatatcagaaggaaacgcgaaaaaagaaaaaaaaaaaagaggcagaaggttctagaagccgccaatttttatttcttttaatttgtctgagtcagagacgttcgtgattgtaaccatggattcttcgtgtgtcccaaacggcgacgtttctgggttcaaagataaggagtcaatggttgaccctttcttggtcgaggctcttgagaaccctcggcaccgtgtcaccattttgcggatggagctggatatccaga

SEQ ID NO: 3090 - DNA, 279 bp, Glycine max
  Clone ID: LIB3028-023-Q1-B1-H7
aaaaaaaaaaacccttagccaacacaaccatcatggccacctctgctattcagcaatcagcattcactggtcaaactgctctgaagcagctcaatgagttcgtccgcaagaccggtggcgccggcaaaggtcgcactaacatgcgccgcaccgtcaagagtgctcctcagagcatttggtatggccctgaccgtcccaagtacttgggtccattctcggagcagattccatcatacctgaccggagaattcactgctgaccaaggatgggacactgctg

SEQ ID NO: 3091 - DNA, 365 bp, Glycine max
  Clone ID: LIB3028-023-Q1-B1-H8
gcacattgcacagaaacaggtaaaaagactatcattgaagtggtgttgtcttcaaatattgagcttctcatgcttcctagttacagtttccgcggcagttggttccattcgtggaattagcaagaatataaaaaaatacaaacttttcatgtataaacaatagggcatttggttgcacattcttgtgtctcacatttgagatatgtgaatatagctatagctaggcagaaaaataagtgagacaagttaatttcaacaaggcagtgagaattatctgaaagtaaaattatttgtcagctacattattccaacttacagtgtgagcaaacattatttcaactagtcaaaacatttctgcctcagtt

SEQ ID NO: 3092 - DNA, 307 bp, Glycine max
  Clone ID: LIB3028-023-Q1-B1-H9
ttccaaccccacattgtacctacctcagcaatgtcacctccaccattttccccccctctctctatttcccttctctttgtcttcctgttagcaccattactcttagctcaatctccaccttcaccgtctccttcttcttcttcttcgtcttctgtagcctgcacttgtacactatagccatcaactctgccgttccattctctcagtcattcgttcatcaccttcagacccttatggctatggcaggttctccatatctcaaagcctcagtcaggcacgagtgttaaccaaagtctttgaggacttt

SEQ ID NO: 3093 - DNA, 338 bp, Glycine max
  Clone ID: LIB3028-024-Q1-B1-A1
aattagttcattctctttgcgcagttccctacctctcctttcaagatgcagatcttcgtcaagaccctcaccggaaagaccatcacccttgaggtggaaagctctgacaccatcgacaacgtcaaggccaggatccaggacaaggaaggaattcccccggatcagcaacgtctcatcttcgccggaaagcagctcgaagacggccgtaccctcgccgactacaacatccagaaggagtcaacccttcaccttgtccttcgtctccgtggtggcatgcagatcttcgtcaagactctcactggaaaaaccataaccctagaagtcgaaagctctgacac

SEQ ID NO: 3094 - DNA, 401 bp, Glycine max
  Clone ID: LIB3028-024-Q1-B1-A10
cttccatcagattcaccctttcgtttaacgcaaactcataacttgaaggttaatggctgctccaccggcaagggctcgtgccgattacgattatctcataaagcttctcttgatcggtgacagcggtgttgggaaaagttgcctccttctgcgtttctccgatggttctttcaccactagtttcatcacaactataggcattgattttaagataagaaccattgatcttgatggcaaacggatcaagctccaaatttgggatactgcatggcaagagcggtttcggacaattacaactgcttactaccgtggtgctatgggcatattgctagtctatgatgttacagatgaagcatcatttaacaatatcaggaattggattcgcaatattgagcaacatg

SEQ ID NO: 3095 - DNA, 400 bp, Glycine max
  Clone ID: LIB3028-024-Q1-B1-A11
ttcacattttagaagaataccccctcttttgctgcatcagaggagttgtaaattaagagcatggctgcacaagctcttgtatcatcatcttctcttaacttctcagcggaggctgcaagacaaagtcttggaccaagatcactccaatctccatttggcttctccataaaagcctcctttcttgttaaggcagctgctaacccccctgtcaagcaaggatcagacagacctttgtggtttgcatcaaagcaaagtctttcttacttggatggcagccttccgggtgactatggatttgaccctctgggactttcagaccctgaatgaacatgatggttcattgagccgatatggcataccatatggtgagataagcaatggtcgttatgcaatgttgggt

SEQ ID NO: 3096 - DNA, 387 bp, Glycine max
  Clone ID: LIB3028-024-Q1-B1-A12
gccttttaagcagcaagaaaggaggacacagaaagcaacaatcttcatcaatatactcatcttgttcacctcagctcactccttccttcatcttcttgcagctcttctaccagaggtcccaaaacatcagcatcattagtagtggtacacacacatgggccatgctcccaactaaatgatcatgatggcagagctaagtctacaacatgacacagtgagattctgaaccaagacatagaaagggtgaagtacattaactcaaggctctctaagaacttgggccaagatagtagtgttgaggaattggactcagctaccctaccagccaaatctggtagccttattgggtctggaaattactttgtggttgttggtcctgggacaccc

SEQ ID NO: 3097 - DNA, 281 bp, Glycine max
  Clone ID: LIB3028-024-Q1-B1-A3
ggttgcagcaacaatggcagccatggctgcgcttcagagctcaatggtcggtctctccctctcctccaactctttcttaggccaacgcctttctcccatcaccctcccctctcttcttccgggtaagtcaacagagaagcaatgtcctattgtaatgaggcttaaacgatgggaacggaaggagtgtaaaccaaacagccttcctatcttgcacaaaatgcatgttaaacttggagatacggtgcaagtcataactgggacttaaaagggttaaatttggg

SEQ ID NO: 3098 - DNA, 318 bp, Glycine max
  Clone ID: LIB3028-024-Q1-B1-A4
ataaaactactcctgtgtagatgttctacttcctcatcaacgttaatttttctctcattctctggattcgtttgaagaattatattttatttttttaaaaagactgaattggtacgaagatattttgctacaactaccttttagtgtgctatagcttagtaaatataccttataaaacccattattccatcaactggcattttcaaaagctgataaaaattttggttaacctagtttgaaaaaaagggtgataaattaaaattggttaaaacaagtttagaaaactataaggtttacaaacctaaatttaaaaatttg

SEQ ID NO: 3099 - DNA, 116 bp, Glycine max
  Clone ID: LIB3028-024-Q1-B1-A5
cgaagcttcaacgtctcttcactctcatccgtttttcactagttgtagcctctttgggtcaacaggccttcagatccagagccctcggggtttcggtgcgtacagaggcttccaca

SEQ ID NO: 3100 - DNA, 383 bp, Glycine max
  unsure (1)..(383): unsure at all n locations
  Clone ID: LIB3028-024-Q1-B1-A6
aagctgttcaagctacactctcttctctgccagacgaggttgtagatactgtgggggtgacaactttgccatctgaagattctgtttcagaaaggaagaggaagttggaatatcttgaaatgcaagaggagctgatcaaggaggaggaaaagaaagaggaggcagagcaggccaaaatggtagaatctgttggtagtgaaggggatttgggtattatgaaagagagggcttctgtggcgccgtttgaggtgtgcttcagtanggagaacgtgctcgccacgcggttgggggcggcggtgccaactattgagcttgtgctgcagaaccagaagacggtttggaggatttttggagcgaactcgatggttagtgtgagcgatgat

SEQ ID NO: 3101 - DNA, 381 bp, Glycine max
  Clone ID: LIB3028-024-Q1-B1-A7
ggaggttttgatgatgacatggactccttagttcatgatgatgagaataatcatgcagcgcctgtaagcaagaatgatggtcaagctggttctggaaatttaaaaaaccaaagcagctctcaccgtaaacggaaacataatttgaaggatattatgcatgaaacaaagaaggaaagaagcttgtcagaactaatgggtgggactccagactctcctgatggtgattattggtctgaggagaaggtaattgataatctggtttcacctggccgttccaagaaaaggaggactgttgatcactatgctgatgactttgggaagccagatggaagaaaaacaatttctgttgcaaaagtttctaattacacaaagccgtcattt

SEQ ID NO: 3102 - DNA, 389 bp, Glycine max
  Clone ID: LIB3028-024-Q1-B1-A8
ctatcttttgttctgctcagctcgatctacctaccttggttcttctctgttctgttatttcagtgcagcagcagagaatgaccatcctcattgagcaacctgcccttgagttacaagttgaaggcaacaatgtgcatgctgaagaagccaatgagcttgtattggatggtggatttccattgccaaaggatggatatatggccccagaaatcaattcatttggccactccttcagagaatatgatgctgaaagtgagaggcaaaaaggtgtggcggaattttataggttgcaacacatcaaccagacatatgactttgtgaagagaatgcgggaggaatatgggaaattggacaaagctgaaatgggcatttgggaatgttgtgagctg

SEQ ID NO: 3103 - DNA, 373 bp, Glycine max
  Clone ID: LIB3028-024-Q1-B1-A9
cttcttcctcctgagaattgtatatcaaagctcattactcgatcagatgatactgaagcagtggtcaaagaaaggcttcgaatatacaatgaaatgactcagcctgtggaggaattttaccgttcaagaggaaaattattggagtttaacctgcctggaggaatcccggagtcttggcctaagttgctacatgctcttaatcttgatgattatgaggacaaacgatctgctgcagcataacgatataataatgtatcataacagtaagtatttcattctttgcgtgcatatattgcatgcttggcaattttgcaggacagagagccaaagaaagggaacttccctgctagtattaatttggaccaataatgat

SEQ ID NO: 3104 - DNA, 375 bp, Glycine max
  unsure (1)..(375): unsure at all n locations
  Clone ID: LIB3028-024-Q1-B1-B1
gctttcttcaagattagtggagttgttctgcttcagcttggtacgggtgctttacttcatgatgctggctggctgaagatatttttagtagcatacttttttggttcttttctcaaccacaatctctttttggctatccacgagttgagtcacaacctggccttctcaaccccagtctacaaccgttggttggggatttttgctaacctccctatangtgtgcccatgtctgttaccttccaaaagtatcacttggagcaccaccgcttccaaggtgtaaatggcattgatatggatgtccctagcctcactgaagtccgtcttgtgaaaaatattattgcaaaaaccatttgggtccttttacagctccttttt

SEQ ID NO: 3105 - DNA, 323 bp, Glycine max
  Clone ID: LIB3028-024-Q1-B1-B10
ctcgcgctgcatataacatgtccaagatcgatcaaataatgttacgctttcgccttatcgcccccaaacccctcccctccgccgccgccctttccgacgctttctcctcggaaaacaccggggtctccatgcggaaggataacactggcaacaagcggtgcagtcgagggatgcgcaggaggagaaactctgctcatccacgtcctcctccgcttcaggcggtgacactcccgctgctaccgaagactccacatctgatgaaaaccaccttcgtcctaatgacccgtcaagtaccggtgtgcctgagcttacgattaagcttc

SEQ ID NO: 3106 - DNA, 385 bp, Glycine max
  Clone ID: LIB3028-024-Q1-B1-B11
aaatgcatgaatgatggcctctgggaatacatctgtgggactgatattgtcagaggcgctttcttattcgttttatgatactgatgcattggtggtgaacgacgttggtggaatatctgtaattgatatattcaagcactatggagagcctttttttcgtaataaagagattgacgtgttgcaaaacgtgtcaataatgcatagacatcttatttctactggtggaggtgctgtcgtgaggcccatcaatttgaaatatatgcagcatgggattagtgtttggttggatgtacctgtagaagtcttgactcagagaataacagctgaaggaactgattctcgcccacttcgatattatgaacgaggagatgcatacaccaagact

SEQ ID NO: 3107 - DNA, 380 bp, Glycine max
  unsure (1)..(380): unsure at all n locations
  Clone ID: LIB3028-024-Q1-B1-B12
aaaggatctcaatcgaccttgggaagaccctatgccagagtcaggtgaaaggcatcttgcccaggagcttaggggtgttggtttatcagcctatgatatgccggaatggaagaaggatgcctatgggaaaaccattacctttgggcaaaggtcaaagctttctattcaggagcagaggcagagtttgccaatttacaagttaaaaaaggaattgattcaggctgtgcatgataatcaggtcttggtggttattggagaaactggttcaggtaagactactcaagtcacacagtatcttgctgaagcgggctacaccacaagaggcaaaattggatgtactcaaccccgtanggtggctgcaatgtcagttgcaaagagag

SEQ ID NO: 3108 - DNA, 395 bp, Glycine max
  Clone ID: LIB3028-024-Q1-B1-B2
tttacagagaggaatcactgccttaaggtggaggaaggtatccatgcgatcatcaactcatttgtcaccagcattttgcctgtacatacagaacttttttttatagaaggaaacactggcaaataaagaacagctttaaccttgaagcatcttgttggaaaatcaagggcctcacttgaatggatgttcatagagtagagacatgtaaggcaactcatctgcattttcataaatatcagttacttacattaaattgcaatactttctgaattttgatactaatttactactacaggacagaggtttctttaagaagctgtcattcaattgctgtgatgtacttgacgaatggtctgtactatatttggtttgcacgattttctcttgggtaattt

SEQ ID NO: 3109 - DNA, 393 bp, Glycine max
  Clone ID: LIB3028-024-Q1-B1-B3
ctcgttacaagataagcatggtgaagatgtatcaaatatcaatattcaagcagaaaaaagcctggttaaagattacttggttgaccagaatgcaagatctcagaaaagaattataccagttcccagcccagcatccattgaggatatgaggacactgatcacagaaaataataagtccacagaaaacccattgaaattgatccaaacagagagcaaaatcccacgtctggctgcatctccaaatagaactcctttcgcggacgtgaattcagtcaattgactattacatcagtttgggtatgagtatgaaactacacaaagctgctcatcacttgatgagcaaaccttacgttttccttcctagtgtaaaataactactatatgagttttcca

SEQ ID NO: 3110 - DNA, 388 bp, Glycine max
  Clone ID: LIB3028-024-Q1-B1-B4
gctcaacttcttaaatatggtcgtaaaggaaagcccaagttttgtccatttagactttcccatgatgaatcatccttaatctggattacaagtagtggagaaagaaatctgaagctatcttctgtctctagaattattcctggacaaagaactgctgttttccaacgttacttgcgtcctgagaaggactatttgtcgttttcacttatttacagtaacggaaagcgatcgcttgatttgatttgcagagataaagttgaggcagaagtgtggattgctggcctcaaagcactgatagcttctggtcaaggtggtcggtccaaaattgatggatggagtgatgggggtctcattcttaatgatagcagagacttaacatcaaataatc

SEQ ID NO: 3111 - DNA, 391 bp, Glycine max
  Clone ID: LIB3028-024-Q1-B1-B5
caaaaccctcttttttctctctcttgcaaaacctaattttcatttcttccctcaaatttcaaaatgcgtgagatccttcacatccagggtggccaatgcggcaaccagatcggcgccaagttctgggaggtggtttgcgcggagcacgggatcgaccctaccggaaggtacggtggggactcggagttgcagctcgagaggatcaatgtctactacaacgaggccagttgcggtcggttcgtgccgcgcgcggttctcatggacctcgaaccgggcaccatggacagcgtccggtccgggccgtacgggcagatcttcaggcccgacaactttgtgtttgggcagtccggggcaaggaacaactgggccaaggggcattacactgaaggtg

SEQ ID NO: 3112 - DNA, 243 bp, Glycine max
  Clone ID: LIB3028-024-Q1-B1-B7
aaagaaagcactttgactcacgctgagaacggtgtgattgctaatggcgttgctaatggccactgatgttgagcatgtacaatcagcagtcagcttcgcctatactgaggaatggtattgttatttgcgaagttctgttggtaaactgcttctggggtggcaagtgttatcgatgcacacaattcactgtattcttttaagatgtagctacttactctagtctaagtcttgtacacacaattt

SEQ ID NO: 3113 - DNA, 360 bp, Glycine max
  Clone ID: LIB3028-024-Q1-B1-B8
atttcagtgagtgatcggtgttcacttgatctcatcataatcgtcagcgtcaattgaagaagatgccgatcagaaacatcgccgtcggaaggcctgaagaggcgactcaccccgacacgttgaaggcggctttggctgagttcatctcaaccttcatcttcgtgttcgccggctcaggctccggcatcgcctacaacaagctcaccgacaacggcgctgccacccctgccggcctcatctccgcctccatcgcccatgcattcgccctcttcgtcgccgtctccgtcggcgccaacatctccggcggccacgtcaaccccgccgtcaccttcggcgccttcgtcggcggcaacatcacct

SEQ ID NO: 3114 - DNA, 406 bp, Glycine max
  Clone ID: LIB3028-024-Q1-B1-B9
gccgcaaggggattacatagagcgtcacagaagagactatggctaccgtctcgatcacttcgagcggaagcgcaagaaagaggcgcgtcaagttcacaaacgctctgcaattgcccagaaggctctgggtattaagggcaaaatgattgccaagaaaaattatgctgaaaaggcacagatgaagaagactttggctatgcatgaagaatcaacttctaggcgcaagactgatgataatgttcaggatggagctgttcctgcttatctccttgatcgtgataacacgaccagagcaaaggttcttagcaacaccattaagcaaaagaggaaggagaaggcgggaaaatgggatgttcctctacctaaggtacgtccggtggctgaagatgaaatgttcaaaatgggc

SEQ ID NO: 3115 - DNA, 356 bp, Glycine max
  Clone ID: LIB3028-024-Q1-B1-C1
attgaacattggctttcaattgtcaatcacagttggtatcctcgtggccaatgtgttgaactacttctttgctaaaatccatggtggctggggatggagattgagtttgggaggtgctatggtccctgcccttataatcacaataggatcactagtccttccggacactcccaattccatgattgaaaggggtgatcgtgaaaaggccaaggctcagcttcggagagttcgcggcatcgacgatgtggaagaagagttcaatgaccttgttgcagctagtgaatcctccataaaagtggagcacccgtggaggaacttgttgcaaagaaagtacagaccccacctcaccatggctg

SEQ ID NO: 3116 - DNA, 400 bp, Glycine max
  Clone ID: LIB3028-024-Q1-B1-C10
ctcgaaacccggccacttcgccatgtccgagcaaccatgcttgccatcgggaaggccacctccgtcgacatctgccgcttcttctccaaacctggcccctacgtgtcctgcgacacgatggagtttctattagcgcgctacgacggcgagctagacgtggatgcggtggactccgaggggaggacgacgatccacgtggtggtgagggaggggcacacgagggttatccggttctgcgtcacgatggggggaaaccctaatcgcgtggattcgaatgggtggaccccactctactacgcagcgtggaatgggcacgtgaaggctgcggagtgtttgttggaatgctccaacgtgaagtgcgtgagggacagggaatggataagaacattttctgttgtcc

SEQ ID NO: 3117 - DNA, 297 bp, Glycine max
  Clone ID: LIB3028-024-Q1-B1-C2
gcaagtttctagggttcataactgcacaaagcagaaactgtccacatgaaacaactggttatgtattcctatggtgtgtgaccatgtctagtatttacaacctcatcttcccacttatcattgtaatttagtcattgtaagctcttcaactcctaagcatcacgttttccatacacaatgaggtttgagttttaacttctagacattaattaaggaggggggagtgactctttgtttttgcgattttcaaggcagaatttgaacaaataatactatttttgccttattttttttcac

SEQ ID NO: 3118 - DNA, 376 bp, Glycine max
  Clone ID: LIB3028-024-Q1-B1-C3
ggcttctccctatccttcaggcaaataacgttcacttttacatgaacgggcatgattattgccttgagcacaatagtgacaccgagagcccattcagttcctggactaccggggcagggtcaaaaggctggagaggagacatttgaaggaatgaaccgaagaagggtaaatttcttctatgatggacaaggcttcatgtcagtgaaattgactcagacggatgccaccattgagttctatgatgtttttggcaacgttttgcacagattgacttcttcaaaacagctacattcttccatgtaaagtttagagctagatactagacattgagattaaatagaccaatccaaattggttgaataaatttcaaaccaat

SEQ ID NO: 3119 - DNA, 392 bp, Glycine max
  Clone ID: LIB3028-024-Q1-B1-C4
tagtaacccttcttttctctctctctctctcgtgttctgagctgctagaagcaatggagaggaaaagaagccatgcttctttcaccatgtttgcaatgcttgttggattgctctctcagagccttgtcattcctgtaatatccaccactgttgcagatcagaagaactactacaccccagatccacatgctggaagtccccccacaggctcacacaatagtaatcctccatctcatggccatgggagctctccaccctcacatcacaatagtccaagtactccatcaacaccctcaggtggaaactgtggatcatcacccccacaacatcatgatccaacaccctcaactccatcaacaccatcaaaccctccctcacgtggatactatgga

SEQ ID NO: 3120 - DNA, 396 bp, Glycine max
  Clone ID: LIB3028-024-Q1-B1-C5
gggggttccaagtttcagtgttcaattttaaatgcctgacagaaagatcactggtctagatacactaacaaacaataaatagtggaacataattttgtaaattgaaatccgtaacacagggctgtttcaactgccaaaagggaagctttatatgtacagataaaagtgcagccttattgagtttgatattttttcctaacaagtaaacaccttactctatttctctaaatttatttttacattaccaattaaattcattacttttagattcataaaaaaaattgtcatactttaaaaatttaaatgttgtttttgtacctgcattgcgggtgcctcttctagtctagttaaaaggaaaaagattgatctatttttcaaagtgatgcacaaaattta

SEQ ID NO: 3121 - DNA, 385 bp, Glycine max
  Clone ID: LIB3028-024-Q1-B1-C6
ctcgagtgcacagaagacggcgcaaaacggcgtggttccgagcaacgagcacactcaatacagcaacggttcctcttcttcttcttcgtcccagctggaggacgttctggaatctctgccatcgattgatgaaaggtgtttcgcgatgccacgcgtcaacacgctgcaacaacaacagcaccacgaggagaaggtcaatgttcagaacttgggtgcagggggtttaatggattggaccaacccttcggttctgaattcggtcgccgatttcgcttcggggaataatcaagtggtacaggaccagactcaggggatggtgaactacaactgcaatgacctttatgtccctacgttatgccacttggactcatcggttccgttaaag

SEQ ID NO: 3122 - DNA, 376 bp, Glycine max
  Clone ID: LIB3028-024-Q1-B1-C7
acagtacactagcctctgcgcacaaccctccactctccaaggagattacaatccattctttctttctcccttcttccattctctttctcattcagagactgcacacaaatttctattattccgagaacgacaaatggatccggcggcgataatgaacggcgctgccaacacgacgtcgtttcacctgtcagagatctggcagttcccgcctcccaactcgccagatgcactggggctcaggaggccccacttcgcccacggcagctttgcggactttgccccgggtccgacccgagacgctgacccggccagcattgcccacaagaagccccgccacgctgccggggaggatgaggaatccgctaagggcgcctcc

SEQ ID NO: 3123 - DNA, 395 bp, Glycine max
  Clone ID: LIB3028-024-Q1-B1-C8
cccagttcaaaggtaaggtaggttaacactcttcttcatcgtcgtcgcaatgggacgtgtgatccgtgcgcagcgtaagggagcaggctcggtcttcaagtcccacacgcaccaccgcaagggccctgcacgcttccggagcctggacttcggggagcgcaacggctacctcaagggcgtggtcaccgacgtcatccatgaccctggccgcggcgcgccgctcgccaaggtcgccttccgccaccctttcagatacaagaagcagaacgagctcttcattgccgccgagggcctctacaccggtcagttcatctactgcggcaagaaggccacccttgttgtcgggaacgttctacccctgaggtccatcccccaaggagccgtcatctgcaacg

SEQ ID NO: 3124 - DNA, 404 bp, Glycine max
  unsure (1)..(404): unsure at all n locations
  Clone ID: LIB3028-024-Q1-B1-D1
gaatttcttaacatgcgtcgtcaggctgttaaaattcaagctgcattccggtgctttcaagttcggaagcattatcgcaaaattctttggtctgttggtgtggttgagaaagcagtgctgcgttggcgtttgaagagaaggggcttccgtggtctccaggtcaaaactgtcgatgcgggaaccggagatcaggatcagcaaagtgatgtagaggaggaattcttccggactggtangaagcaagccgaagaacgtgttgagagatctgtagtacgtgtgcaggctatgttccgttcgaagaaagcacaagaagagtacaagaggatgaaattggcccttaatcaagcaaagctggagcgggaatacgaacaacttcttagtactgaagtggacatgcaactgta

SEQ ID NO: 3125 - DNA, 377 bp, Glycine max
  Clone ID: LIB3028-024-Q1-B1-D10
tccaaaaccccttcttcagggtcaccgctgtcagggttagggtttttccaccttctttatttaccaatcttcttctactaccacttttccctcgttccctctcttagtctcttcaattgtaagctttttgcgctagggtttcctctgcaatctcttgtacttgaagctcgttccttcttccggatctcgatctatggatacccgcaagaggggaagacccgaacccggcttcagcttaaatggcggattcaagaaatccaagcaagaaatggagtccttatcaactggtgtaggaagcaaatcgaagccatgtaccaagtttttcagcactgctggttgcccatttggtgagggctgccacttcttgcactatgttc

SEQ ID NO: 3126 - DNA, 217 bp, Glycine max
  Clone ID: LIB3028-024-Q1-B1-D11
ctcgagccgttcgttttcttttccctcctactcgttagcagttttcgtttcccaaacacgttccttcgccatgtccgatcttggctccgatcttcccgctgccgccgccgctctcagtgctgaggatcgtgctggtctcgtgaatgcactcaaggacaagctccagctcttggctgggcaacatgtggacatcctggagacactgccaaccaaagtc

SEQ ID NO: 3127 - DNA, 396 bp, Glycine max
  Clone ID: LIB3028-024-Q1-B1-D12
ctaagagcacttatggcacaggtgctttcatactactaaatactggtgaagggataattcaatcgaagcacggtcttttatccactatagctttcaggcttggcccaaaagctccaaccaattatgcattggaaggatcagttgctattgctggagctgcagtgcagtggcttagagacggtcttggcatcatttctagtgctgcagagatagaggagatggcattacaggttgaatccactggtggggtttactttgttcctgcttttaatggattgtttgccccatggtggcgtgaagatgctcgccgcgtttgtattgggataacaaggtttacaagcacaggtcacattggccgagctgtgcctgagaacatgtgtttccacgtgaaagatg

SEQ ID NO: 3128 - DNA, 294 bp, Glycine max
  Clone ID: LIB3028-024-Q1-B1-D2
gaagccagtgctaggatttgttagtgaagcaatggctcaaaccatgttgctcatgtctagtgtctctagcagttattccgtggatttgaagaaagaccttttcctccaattgcagagtcaaagtttaaggcctaagttctctcagctctcattcaacccacttccatcatcaacttcttccttttcttcaccccgtacattcacaactctggccctcttcaaatctaagaccaaagccgctcctgctaagactaaggttacaaagccaaagcaaaaggttgaaaatggtatctt

SEQ ID NO: 3129 - DNA, 375 bp, Glycine max
  Clone ID: LIB3028-024-Q1-B1-D3
tggatggtgatgaaccaccatcaagatatgtagttaatggaaatagctttggatctaaagattcttctgtacagtttccaatacccatcattgatgtgcgtctcctctcatcagaagatgagctagagaagcttagatctgctctaagttcagctggatgcttccaggcaattggtcatggaatgtcaagttcatatcttgacaatatacgagaaactgcaaaacaattttttgcactcccagaagaggaaaagcagaagtatgctcgagctgttaatgaatctgaaaggtatggaaatgacagagtagtttcagacaaacaggtccttgactggtcctatcgccctaaacttcgagttttttcagaaacaaaac

SEQ ID NO: 3130 - DNA, 398 bp, Glycine max
  Clone ID: LIB3028-024-Q1-B1-D4
gccgtcgtcgtcgatttcgcacgccccgaggacttttataaatcagttacctgactggagcatgcttctggccgccatcaccaccgtgttcctcgcggcggagaagcagtggatgatgctggattggaagccgcgccgccccgacatgctcattgacccctttgggattgggaagatcgtgcatgacgggctcgtgttcaggcagaacttccccataaggtcttacgaaattggcgcagacaaaactgcgtcaatagagaccttaatgaatcatttgcaggagactgctcttaatcatgttaagaccgctgggcttctacgtgatggatttggttccacgcctgaaatgtgtaagaagaacctgatatgggtggtgacaaagatccccgttgtgggtg

SEQ ID NO: 3131 - DNA, 389 bp, Glycine max
  Clone ID: LIB3028-024-Q1-B1-D5
gccaaaaccctagcagccggcgagaatggcagacgttgaggttgatgcggcggcagcggcaggggcagcgcagccgaagaagagaacgttcaagaaattcagcttcaggggcgtggatctggacgcgcttctggacatgtccaccgacgaactggtgaagatgttcagtgcgcgtgcacgtagaaggttccagagaggtctgacgaggaagcccatggccttgattaagaagctccgcaaagctaaaagggaagcaccagcaggtgagaagccagaaccagtgcgcacccatctccgcaacatgattattgtgcctgagatgattggtagcatcattggagtctacaacggcaagactttcaatcaggttgaaatcaaacccgagatga

SEQ ID NO: 3132 - DNA, 391 bp, Glycine max
  Clone ID: LIB3028-024-Q1-B1-D6
gcacaattctctcttatcatctttgttattacctctttccaaagtccaaattttctagttccaccaaaccaaaccaaaccaaaatggcagcagcctcagcctcatccatgatatcaacaccagccttatctccaaccatccaaaagcaccatcatttgaagccatccaacgtgtgcttccaaggtcttagacccctcgcaaggttcaccagagcctcatcaaccaaagtgagcaccaccaccaaaagggttattccaaagggtggtgttagagctgaactcaactcattctttgtgataagcctcagcactggcctctcgctcttcttgggaaggtttgtgttcttcaacttccagaaggagaacgtggcagagcaagtgcctgagcagaa

SEQ ID NO: 3133 - DNA, 134 bp, Glycine max
  Clone ID: LIB3028-024-Q1-B1-D7
gtttctcctgttttgttctcaatgtttgttgtctatgtgcaaaaattagtccaaataaaacataattttttaattgtctcttgttttgatcatcttgcttgggtgaaatgttctatgcaatggtggtttttccc

SEQ ID NO: 3134 - DNA, 331 bp, Glycine max
  Clone ID: LIB3028-024-Q1-B1-D8
caactgatccaccatgtctttacataactttaacttatatttaaaaggatacaaagtacagagggaaagatagaggaacaagggttttacggcagggtctagtgcttatacataccctgcattagccactacatttcacaaactgaggcacacacaaaacatgggttcttcttcttctatgtggacggtgtgtgtgattttggcatcactggcctctgcagcactctgtgccaacccacgcaggccagtggatgtacaatttggccgtaactacgtggccacatgggcctttgatcacatcaaatatttcaatggtggttccgacattcag

SEQ ID NO: 3135 - DNA, 385 bp, Glycine max
  unsure (1)..(385): unsure at all n locations
  Clone ID: LIB3028-024-Q1-B1-E1
ggctctctcacgcagtcgcagtgagtgaaaaggaaaaccctaattgcggtattctcagtgccttcgagagaaagaaaaaatggcagataatcttgttctccgtggcaccatgcgcgcccacaccgacgttgtgacggcgattgccactcccatcgacaactccgacatgatcgtcaccgcctcacgcgacaaatccatcatcctctggcatcttaccaaggaggacaagacttacggtgtctcccgccgccgcctcaccggccattctcattttgtccaggacgtcgtcctctcttctgacggccagtttgccctatccggctcctgggacngcgagctccgcctctgggaacttgctgctggcacctccgctcgccgcttttgt

SEQ ID NO: 3136 - DNA, 387 bp, Glycine max
  Clone ID: LIB3028-024-Q1-B1-E10
gggcaatctcagagctattgagaaggccagagattttcaagaaggcaacagaggagctagacagggtgataggtagagagagatgggttgaagagaaggacattgtgaatttgccttatgttaatgccattgtcaaggaagcaatgaggctgcacccagtggcaccaatgttggttccaacactatccatagaggactgcaatcttggagggtatgacatccccaaagggacacatgtgcttgtgaatgtgtggactattgggagagacccttcagtttgggacaaccctaatgagttccaaccagagaggtttcttaataatgagattgatgtgaatgggcatgactatgagctagtgccatttggtgctgggagaaggatgtgcc

SEQ ID NO: 3137 - DNA, 363 bp, Glycine max
  Clone ID: LIB3028-024-Q1-B1-E11
ctcccggattaaacatccttgcagcatggtctccagcctcagctggaatgaagttcaatattatatcaagaacttcgatgtcttgtcctcacataactggaattgcaaccttggtcaaagctgtgcatccttcatggtctccgtctgctatcaaatctgccatcatgacaactgcaacacttttggataagcaccaccaacccattagagcggatcctgatagaagacgggctaatgcttttgcttatggatcagggtttgtgaacccttcaagagttctggatcctggtcccgtctacgaatcacatccagactattttgttgcattcctaagttcacttggctatgactagaggtcactcc

SEQ ID NO: 3138 - DNA, 389 bp, Glycine max
  Clone ID: LIB3028-024-Q1-B1-E12
atcgccgaagaaggtattgacgtcgatgatgaaaatgaaattggtgaaaacattactgcttctcctttgtgtgaaactcttctgttatgcagtgattggtgctcctcaaacttgtcctgctaacaatgaggataaatgcggcgattcagatgaatggaaaggggagtttttccctgacattcccaaaattaaatatgagggtccgtcaagtaagaatgtgctttcatttaaatggtataatgcagaggaggaaattcttgggaagaagatgaaggattggttaagatttagtgttgcattttggcatacattccgtggaacaggtgctgacccatttggtgcacctaccaaatactggctatgggaagatggtaccaattcattaaaca

SEQ ID NO: 3139 - DNA, 367 bp, Glycine max
  unsure (1)..(367): unsure at all n locations
  Clone ID: LIB3028-024-Q1-B1-E2
atcagttgaagaaaccttctcatcctattcgtggagtcccgactgctatcaattgcctagcaacactacttaaggaacctgtggttaggtcttcctttgttcgggctgatggggtcaagttacttgtacccttgatttcgccagcatccactcaacagtctattcagcttctttatgaaacatgtctctgcatatggctcttatcctattatgagccagcaattgaatatttggctacttctagaacccttccgcgacttattgatgttgtcaagagttctacaaaagataaggtggttagagtanttgtcttgactcttaagaacttgatgtcaaaagggacattgggtgctcagatggttgacct

SEQ ID NO: 3140 - DNA, 364 bp, Glycine max
  Clone ID: LIB3028-024-Q1-B1-E4
aacaacgttgatgatttaccagttcttggccacgactttgaccttcccgaatgggttgatgatcgcgttggtgttcgcaaactcctacgtatgactggacggaaacgcatggcgcatgtggttgttgcaaaggatggcagtggaaatttctcgaccatcaatgaagctttgaaatatgtgcccaagaaaaacctaaggccattcgttatctatgtcaaggaaggagtttacaacgagtacgtcgaggtttccaaaaatatgacccatgttgttatgattggtgatggtggtaagaagtcaaggatcactggtagcaaaaacttcatcgatggggttgggacctacagaaccgccagtgctgcca

SEQ ID NO: 3141 - DNA, 398 bp, Glycine max
  unsure (1)..(398): unsure at all n locations
  Clone ID: LIB3028-024-Q1-B1-E5
ctatactctatttttcgcgtcacataaacaaataaaataaactggggagaagcatgttgttgatgttgggactatgcttcctattgttctctgcatttccacttgcgttctctgagagatgccacccacaagacaagaaagcgttgctccaactccagaaggacctcggcaacccttatcacatcatatcctggaacgcaaaggaggattgctgcgagtggttctgctgcgttaagtgtgacgagaaaacaaaccgcgtcattagcgttgccttatcatccccttttccagacaccaatctctcggcccaaatacctccctctgtgggtgacctcccttacctcgagtcnctcgtcttccacaaattccccaaactcgtgggcccaatccagcccgca

SEQ ID NO: 3142 - DNA, 372 bp, Glycine max
  Clone ID: LIB3028-024-Q1-B1-E6
gtggtcaatgtctcagcatatcagtgttacagttgtggattttgcatctcactgaaacatgtatgcgagtggggaattccaatatctatggagtccttgagccacagtccattcagaggtttgggcaatcgcagtttgagtctgaaagttacataaagagttggatgcaaagttcacaacgcgatgtctatcttggagcctagctaaatggcggacactggcacatggtggtcatcttgccgaatgaacacctagttgtctggttttgttcattgcataacatgttatacaactacccttacggggattattaatagtgctttaaaaggtcttgatgatactccatatcctaaatcaaaggcttctgctacg

SEQ ID NO: 3143 - DNA, 244 bp, Glycine max
  Clone ID: LIB3028-024-Q1-B1-E7
ggttgatataactatactgtctgtaattggcacgagctcatttcctaatcctgcatcacactgcatgactgcatccccttcccatatagtgtaacgaagtctaagttaattcctgttaagtctggatagtgaatagctagctattggcgttgctgcaccctattgtgcttattgatgccaatagtgttagtgttcgaggcattagttggtgacactttaacaaagctaaatgacgttgtaccgt

SEQ ID NO: 3144 - DNA, 290 bp, Glycine max
  Clone ID: LIB3028-024-Q1-B1-E8
ggttgatataactatactgtctgtaattggcacgagctcattttcttattctgcatcacactgcatgactgcatccccttcccatatagtgtaacgaagtctaagttaattcctgttaagtctggatagtgaatagctagctattggcgttgctgcaccctattgtgcttattgatgccaatagtgttagtgttcgaggcattagttggtgacactttaacaaagctaaatgacgttgtaccgtaaaaaacaagtccagataggaagaatcaaaaaaagggctgtttttt

SEQ ID NO: 3145 - DNA, 175 bp, Glycine max
  unsure (1)..(175): unsure at all n locations
  Clone ID: LIB3028-024-Q1-B1-F1
gctcatgttattgtgaatgactctggttatcatcagctcgtgagccattggttaaatactcatgcagtgatggaaccatttgccatagcaaccaataggcatctcagtgtgctccaccctatttataaacttctttatcctcactaccgcgacaccatanatatcaatggacttg

SEQ ID NO: 3146 - DNA, 398 bp, Glycine max
  Clone ID: LIB3028-024-Q1-B1-F10
gttcgggctcgctacctccgcgccatcgctgccaagatcaccgagaaaaagcctgaactagcaaaactcgaagctattgactgtggaaaaccgctcgatgaagccgcctgggacatcgacgatgttgctggttgctttgagttctatgctgaccttgctgaaaaattggacgcacagcaaaaggctcatgtgtctcttcccatggacacattcaagagttatgttcttaaggagccgattggagtcgttgctttaataactccttggaattatcctctgttgatggctacgtggaaggttgctcctgctctggcggccggctgtgctgcaatattgaagccctctgagttggcatctgtgacatgtttggagctcgctgaaatttgcaaagaagtcgg

SEQ ID NO: 3147 - DNA, 402 bp, Glycine max
  Clone ID: LIB3028-024-Q1-B1-F11
gatcaggcactcaaacaccgcgacatcggagagtagttaaacaagaaaaaacgagaacaagatggtgttctgaggaaactgaccgttaggcttgcgactcgaaacaagcgactctgctgaaactggaaccgttccaggatgcgatgctgccgcggcattacgagtgaggaagatagggttctctgaaactgatcacgtttcaccacccaccgttgatttcatgcttaacctccctcccgaggaaacttctgccgctgctacaactgatcgatcagatccacctcagaatccagctacttcgacggttgacaatactcttcctcttctcgattgctcaaagcctcatgccatcgcacttgtcatctgatagacatctgtaacgtccttccggatgaacatgtt

SEQ ID NO: 3148 - DNA, 357 bp, Glycine max
  Clone ID: LIB3028-024-Q1-B1-F2
atcagcctggcggaacatcttggtacccgaatatctgatcatattccagatacaccaaataggctttctgaggatatggtcaaatgtatatcagctatatattgcaaactcgcggatccatctatgacaaatccaggcctttcatctcccagttcatccttgtcttcaactagtgccttttctattggagatcaaggagacatgtggagtccaggtttgaggaataattcctcattcgatgtacggttagacaatcctttccatgtggaaggactcaaggagtttagtggaccatacagcaccatggttgaggtatcatggatttacagagaaaatcagaaattgggtgatactgag

SEQ ID NO: 3149 - DNA, 340 bp, Glycine max
  Clone ID: LIB3028-024-Q1-B1-F3
ggagattcatatatcatcaatgggacaaaatggtggacaagtggtgctatggatccaagatgtagaattctgatagtcatggggaaaactgacttcaatgcagtgaagcataaacagcaatctatgatcttagtggatgtccagactcctggcgttcacataaagagaccattgacagtgtttggctttgatgatgcaccgcatgggcatgcagaagtaacatttgaaaatgtttgtgtgcccgcaaaaaacatcatacttggcgaaggaagtggatttgagattgcccattgtatgcttgggcctggaaagctccaccattgttatagactgataagtg

SEQ ID NO: 3150 - DNA, 295 bp, Glycine max
  Clone ID: LIB3028-024-Q1-B1-F4
attcactgtctccctcttcctcctccgacggcgtcggcttcgagacggaggagccgcggacgccgttggccgtgcgccgcgcgctgcagctcctcaactccggcgatcccgacctgcgcctccaagctgctcgcgacatccggcgcctcacgaagacgtcacaacgttgtcggcgccagttatcccaggctgtcggtccactcgtttccatgctccgagtcgactcgcccgagtcacacgaacccgctctcctcgccttgctcaacctcgccgtcaaagacgaaaagaataaaat

SEQ ID NO: 3151 - DNA, 393 bp, Glycine max
  Clone ID: LIB3028-024-Q1-B1-F5
gatggatctaagtccctcgccgatacactggcgaaatggaaagaatataatgcttggctggagtctaacaatgaagctgagaagccggctaggaaggtccctgccaagggatcaaagaaagggtgtatgaaaggaaaaggagggcccgagaactcacgctgtaactacagaggagttaggcaaaggacttggggaaaatgggttgctgaaatccgagagccaaacagaggaagtaggctctggttgggtacttttcccactgccattagcgctgctctcgcttatgatgaagcagcaagggcaatgtatggttcctgtgcgcgcctcaactttcccaacgttcaagtttcaactttgtctgaggaaacgtcgagagattctccagctgctgct

SEQ ID NO: 3152 - DNA, 392 bp, Glycine max
  Clone ID: LIB3028-024-Q1-B1-F6
cactcgaagacgatggtgagttcgatccgcgatggaaccaagccagattctatcattgcggaccaccacaactgatcctgatcatgtgaaggtcattcagtgggacgacttccagcacgatcttgcaaggttggccagtctctcttccgcgctccacgaagccaacgagaagaagcggaatcttcagtacaagctcgagcccctaattcaggtcaatgctgaatcattgggtcggttgaatgaacttgaggagatgcgtcaaaaattggaatcaaagaaaatggtgatggagaatatgtctatacgttctaggctggctaaggaggaagctagcaagcaggaggagcagcttagtggtgcagtgcaatcacttttggtggcaaggggtgctc

SEQ ID NO: 3153 - DNA, 374 bp, Glycine max
  Clone ID: LIB3028-024-Q1-B1-F7
cgaggttctgtcatcttcgaacagcacagacccaaaggagtacatcgcaaccgtggtgagaacctcgatggacagcgtgatcaaagcgttcaacatgagcgacaggctgacggtggaacacggcaacagcagcgccggaatgaagatggctctggaggattgttaggacttgttgcaatccgccatccaacgactaaaaggctcaggcctgttgggcaaagagaacaacctacaagacgtgcaacaacgcaacggcgagctcaagaactggttgggaaccgttgttgcctaccaacaatcctgcctggaccgcttcgacaccgacggcgagaagaaggttcaggaacaactgcaatctgggaacctggacaacg

SEQ ID NO: 3154 - DNA, 399 bp, Glycine max
  Clone ID: LIB3028-024-Q1-B1-F8
caattttcaaccttaacctctaagaatgtcttacgcttatctcttcaaatacatcatcatcggtgacaccggagttggaaagtcttgtcttctacttcaattcacggacaagcgctttcagcccgtccatgacttgaccatcggtgttgaatttggtgccaggatgatcacaattgataacaagccaatcaagttgcaaatatgggatacggctggtcaagaatcattcagatctattacaaggtcttattacagaggggctgcaggtgcattgcttgtttatgatataaccaggagggagacatttaatcatttggctagctggttggaagatgcaagacagcatgcaaatgcaaatatgactattatgctgattggcaacaagtgtgatcttgctca

SEQ ID NO: 3155 - DNA, 395 bp, Glycine max
  Clone ID: LIB3028-024-Q1-B1-F9
tgcttcctacccaaaggataacaaaggtagatacattatctacgttaaggctggtgtctatgacgagtacatcaccgttcccaagagttcaaagaacattctcatgtacggtgatggccctgctaagaccatcatcaccggtcgcaagaacttcgtcgatggtgtcaagaccatgcaaactgccactttcgccaacactgcagaagggttcattgccaaggcaatgacattccagaacactgccggtgctgagggacaccaagccgttgcattcaggaaccaaggagacatgtccgctctcgttggttgccacatcttgggttaccaagacaccttgtacgtccagaccaacaggcaattctaccgcaactgcgtcatctccggcacagtcgact

SEQ ID NO: 3156 - DNA, 253 bp, Glycine max
  Clone ID: LIB3028-024-Q1-B1-G1
atttgctttgcgagatgatagtattgttgaaatacaaggggaatctgctggtgttcacaaggcagttgaacttattgcagttcatttacgcaagttcttggttgaccgcagcatatttggagtttttgaaacacagatgcaaaggccaaatgttagagttaaccagaatgtgccaccacatcaaaattggggtcctcctcctcaagggtttcctgctcctgctggtggtggtggtggaggacctgcttttgca

SEQ ID NO: 3157 - DNA, 323 bp, Glycine max
  Clone ID: LIB3028-024-Q1-B1-G10
cagtgcttttccgccgccgtcgcggttcaaacttgaatagttcaaaaggtgtgaaagcaaataagatgcagcatagaaatttgacttctggaaggccttctggaactgatggctccgattactcctactgtatggtagtcgattcacggtagcaactggttgcaaaggggaagaaacgcctgtctctctacgttatcactgaggctgtgttgctgtgattacgagtgacacgtacatatttaccacgaagagaagcagacgctccaaatacagttgcctattcatctgttattgtaagtgttgtctcactaataattgggaat

SEQ ID NO: 3158 - DNA, 395 bp, Glycine max
  Clone ID: LIB3028-024-Q1-B1-G11
ctcaatcatagtttatggaagctgtagaggcaaaagcttcatctgggtatggcaagcctccatgggtatttaaaaggaattcctggtaacaactccaacctgttaaaggaaaaaaagctccaacctaaaatccaaaagaatttcaattgggttaaacctttgggtaaaatccttgggggttcctttcaaccaatttataaggacattcaatttggtgtctttgatgaccttgttgtaattgcaggatgtgtatgaacgcgcacaatatcgtgcatatggacagagagtgtgtatgtgaacagctatgaggcctgttatcacggaagaagagatgtgagatttccatctcagatggctatgttttccaagacatttacagcaatctcaagacaaca

SEQ ID NO: 3159 - DNA, 390 bp, Glycine max
  Clone ID: LIB3028-024-Q1-B1-G12
acttcgttttggagtgaaaccaagtgttgctatcaacggaggagcgcccacactggaaaaaaaaatctccggcgattgttccaccgaacctcttccgttctccgccccgatcctggattcaatcgtcgattccagtttctcattctagttgatcgagttcgtaggtttttatggtgcttcgttggacacacggtggcgatttgcattactcagtgggtggtggtggcaccgtgaattattgagtctgattacactcgctttgaaaaatcgaagagagaaatgtcttatcagcataaaagcttttggatgccacgagatgctggctgcatggctgaagaaaatgtgggatatgaaaattcttccagagtagaatccaagcgcagtcataag

SEQ ID NO: 3160 - DNA, 65 bp, Glycine max
  Clone ID: LIB3028-024-Q1-B1-G4
gttgcatgctacccctgaaagggtcacaactgttcatggttctagtactagtactttcagtcatg

SEQ ID NO: 3161 - DNA, 390 bp, Glycine max
  unsure (1)..(390): unsure at all n locations
  Clone ID: LIB3028-024-Q1-B1-G6
cttaagagtttgagaactgagaagagatgggtggtgttgcatggacagaagaagaagatcacttgctcaagaaatgcatacaacaatatggagaaggaaagtggcatcgtgttcctttactggctggtttaaacaggtgccggaagagttgtaggctaagatggctgaactatctccgtcctaacatcaagagaggaaattttgcggaggaagaagtggaaatgataatcaaactccataaattactaggcaacagatggtcgttgattgcacgaaggctaccaggaaggactgccaatgatgtgaaaaactattggaactgtcatctgagcanaaaactaaatgtaatagaagctgaagatagaccaataacaagagatgttcaagtca

SEQ ID NO: 3162 - DNA, 268 bp, Glycine max
  Clone ID: LIB3028-024-Q1-B1-G8
attctctctgtgtatttccctacctctcccttcaagatgcagatcttcgtcaagaccctcaccggcaagaccatcacccttgaagtggaaagctctgacaccatcgacaacgtcaaggccaagatccaggacaaggaaggaatccccccggaccagcaacgtctcattttcgccggaaagcaacttgaggacggccgtacccttgctgactacaacattcagaaggagagtactcttcaactcgtcctccgtctccgtggtggcatgc

SEQ ID NO: 3163 - DNA, 403 bp, Glycine max
  Clone ID: LIB3028-024-Q1-B1-G9
cctacctctttttcttctctctcaacaacttcaccttcttcctcctcgatcatgtctcacttcaagggcaagtaccatgatgagcttatcgccaatgctgcgtacattggcactcctggaaagggtattcttgctgctgatgagtcaacagggacaattggcaagcgtttggccagcatcagtgtagagaacattgaatccaacaggcgagctcttagggagctgcttttcactgctcctggtgttcttcaatatctcagtggtgtcatcctctttgaggaaaccctctaccagagcacagctgcaggcaagccctttgtgaatgtcttgaaggaagctggtgtgcttcctggcatcaaggttgacaagggcacagtcgagcttgctggaactaatggagaaa

SEQ ID NO: 3164 - DNA, 337 bp, Glycine max
  Clone ID: LIB3028-024-Q1-B1-H10
gcttgggataatcttttggagaacaagactgccttcactacaaagaaagactatggcaaagaagagagagaagcacagtgggcaactgctcagaggactcttcatggtcttcagccacctgaaacaaccaaccttttcaatgacaagaacagttacagggagctttcagagattgctgagcaagctaagagacgtgccgaggttgcaaggctcaaggagcttcatactctgaaaggacatgttgaatcagtagtgaagctgaagggacttgacattgatacaatccaacagcattatacagtttaaggaatttggacaaacttcaagcagaacacac

SEQ ID NO: 3165 - DNA, 366 bp, Glycine max
  Clone ID: LIB3028-024-Q1-B1-H11
ggcactaatgctttgcaaggatgttcaaaagacaactacaaagatcaagactgggatgatattgcttttaacaaaccttctcttgtgaagctagagcctgtgtctggcataaaggctgatacatcattgcaaggaaaatgtactttggctgagtctcccagagttgatattgacattgacatggctaacatttcagctagtgctatggatgaagatataaccttacacgccaacattatacaacccatggtgaacattaggaaggagtcaccattaacactttcaaattcagctccagggagcatctgcttttctggtggattgcttggtcctgatggaactcatcgatacttgggtaaatggtgc

SEQ ID NO: 3166 - DNA, 406 bp, Glycine max
  Clone ID: LIB3028-024-Q1-B1-H12
cacaccctcaccctccctacgtttacccctccccaccacctcctcctaagaagccatacaagtacccatctccgccacctcctgtccatcactaccctcagcctcaccctcccttcgtccattactctcctccaccatctcctaagaagccatacaagtacccatcacctccaccaccagtacaccctccttacactccccacccagtttatcactctcctccaccacctcctaccaacaagccttacatctatgcgtcacctccccctccttaccactattagctagcatagctctatggatatgaagaatatgtgcaacgaataaaagaaagcgatagaaaaggaagaagaagcgcttcgcgatgcacgatagagaagaattggaagcaaagtttcggcgtttt

SEQ ID NO: 3167 - DNA, 145 bp, Glycine max
  Clone ID: LIB3028-024-Q1-B1-H2
tttcaacccttgtattttatgacacctaaactagtttttgtattatgagtagttttgtaatttcacatgcattaagtgaatatttgatgtgtgtgttgtgaaataaatttaattgaattgggagaagcccaatccaattaaattt

SEQ ID NO: 3168 - DNA, 112 bp, Glycine max
  Clone ID: LIB3028-024-Q1-B1-H3
cttagccgctaaaggcagaaaatatcaaagagaaacactattctcccttgaaaaatgtcagacattctcaacaaaaatgaagccccagaaaaccagaaatttgaagtcacat

SEQ ID NO: 3169 - DNA, 290 bp, Glycine max
  Clone ID: LIB3028-024-Q1-B1-H4
attcagctcgagggatattcggcaagacgaccctttggtgtttggatcttcaaaaaaaaatacccttgggatttcgtcacaagaagtctcatcggcactgtggaagcaggtgaccgactaatcatttcggtcaaagcaagaattggccctccaggaattaagggtgctcaacttcaaaaacacatcgatgccacgttgggtactgggaacttgagggaggctgttaaactgcctcccggtgagaatattaatgaatggctaccggtaaaaacgttggactccttaaacca

SEQ ID NO: 3170 - DNA, 375 bp, Glycine max
  Clone ID: LIB3028-024-Q1-B1-H5
ccacaagttgctttcacagtagttccagggtttaagaatggtaaaactggtttacaatgccaagtgtacctcacaacacagcacaaacaacaaagcaagggtaaattttttttcacttcaacaaagcaaaagtgactcatgactgaccccacacaactcaagtgattgaactgggaaggaattccttaattttcctaatggaaaaaaaaccttttggaaggaaattgaaggcctgttggttttgggaacggaccccgggcttggttaacccaccggggaacctttgcccatttgaattttggccattttgaaaagaaaaaccattggaccgcgttgcattggaaacaagccttttttttaaaaaccttttttttt

SEQ ID NO: 3171 - DNA, 367 bp, Glycine max
  Clone ID: LIB3028-024-Q1-B1-H6
tttgatcgaaacatgaacattaaacttcacgcggagctcatgctaacggataataagaccatagatgcacgtggtgccaatgtgcacattagtgagggtgcccaaataacgttgcaatatgtgaaaaacatcatcattcacggtctgcacattcatgacattaagaaatgtagtggtggcctcatcagagactccatggatcactatggattccgtgccatgagtgatggggatgccatttcggtgtttggatccacatatgtttggatagatcatgtttcctttaccaactgcgatgacggcctcatcgatgtcgttagcgcttcaactgctgttaccatctccaactgccatcttaccaaacata

SEQ ID NO: 3172 - DNA, 317 bp, Glycine max
  Clone ID: LIB3028-024-Q1-B1-H8
tttttgtgatattgagaggacgaccctttggcgtatggatcatcaagaaagagagacccttgggatttcggcgcatgaatcgcttcgttcatggccacaaggtgaggactacattacatctcaagccctatgcaccatctagatgtaacggtgatccatctcaggcacacatcgagtctagggtaaggtaatgcgaacttgaaggacgtggtcagattggtacatcgctagggtaccccaaggctagcataagcacgtttgtgtcgttagtgagcaattggaattacctgggacgggttctttcagggtttgtatct

SEQ ID NO: 3173 - DNA, 398 bp, Glycine max
  Clone ID: LIB3028-024-Q1-B1-H9
atttctcacctaaccttctcttcctctcagtctcagatcagaaacctcagccagccatggcagcgttccagaagatcaaggtcgtcaaccccatcgtcgagatggacggagatgaaatgactagggttatctggaagtcaatcaaggacaagctcattttgcccttcttggagttggacatcaagtattatgacttaggccttccttaccgtgatgagaccgatgataaagttacaattgaaagtgcagaagcaactctcaagtacaatgtagcaatcaagtgtgcaactatcactccagatgaagctcgtgtgaaggagtttggcctgaagtcaatgtggaagagtccaaatgggactattaggaacattttgaatggaactgtcttcagagaacca

SEQ ID NO: 3174 - DNA, 325 bp, Glycine max
  Clone ID: LIB3028-025-Q1-B1-A10
ccaagttcactttggtggcagttgaacgagtttgcaaccccacacacaaaaaccaaacccttaaaaatgtcatccccctcgccggtggccacggtggtctccgccgccgcgctgtacgaccgcgccaaagccgtgaaagaattcgacgaaaccaaggtcggagtcaaaggtttgatcgattcgggaatcagaaccatcccccctttcttcgtccacccgcccgaaaccctagcggacctcaagcgcggaaccaaacccgggtccgcgccggagatccccacggtggacctcgccgccgaggagagctcccgcgccgccgtggtgg

SEQ ID NO: 3175 - DNA, 227 bp, Glycine max
  Clone ID: LIB3028-025-Q1-B1-A12
gctttgggttgtaattaaacattttctacatagctggattagtagtacttgtgaaaaacttgtaacgtgaaattggagaggctaagcagaaatgcttctgcttgatgttaagtgttctcctgtgaatgttaattatgcacgaaatcgagagggaaggacgacggtaaaaaatactgatgaggttaagatcactatgaaaggtaatggcaggaaattggattgaggcc

SEQ ID NO: 3176 - DNA, 386 bp, Glycine max
  Clone ID: LIB3028-025-Q1-B1-A2
ttccaattcatcctctctctcccatagataacaacaaaaaagtcccagtcacgaattagtcaccaccatcagtacatacacttcctcaaaaaatggaaatggaagcaagcccaagcccaagcccaagcccgaagcaagtagtggcaaggaagctatggaacatagtacgcatcgtgttcctgatgttgagaaagggcatatcaaagagcaaactcgccgctgacttcaacttgaacttgtcgttcaaacgtggcaagctggcagccacaaaggccatagccaacactatcctccaccgctcccaaaacgacgacgccgtttacccgcgcgactacgagttcagctgcagcaacagccccgggctcttcacgtcatcaagcgcagca

SEQ ID NO: 3177 - DNA, 365 bp, Glycine max
  unsure (1)..(365): unsure at all n locations
  Clone ID: LIB3028-025-Q1-B1-A3
atcacaacgcgccgccgcagcattcacctccccggagatccaccctttgcatggcagtgagctttctggcgcgcgatgtatcggacctctgccttgggaagccaccgctgaggtcgctctccgctgccgccaccgtcgccgacgccttagacgcgctcaagagctccgacggcgagatccacgtcagcgtgtggagcttcgagaatgaagtgggtcgatgcgtanggaaactgtgcatggtcgatgttatttgctacctttgcagagaggacaatctcttgtctccttctaaatctctcaaagaaccactttcctcaattctccctaaggatcataatctcgttgtgcatcttcaaccttcttct

SEQ ID NO: 3178 - DNA, 218 bp, Glycine max
  Clone ID: LIB3028-025-Q1-B1-A4
ggcccagtatctaattactaggcaacaatatatctctggtttaaagtacatctaaaccatcatatatactgtacgatatgtttgtcaatttacgtattcatgcacgtgcttgtcttcctaaatttgtatgaggaatatgtgaatgcatttttgttattacctataacccattcggataaatttaaatcaatctttcttgatgagttaatggtttggct

SEQ ID NO: 3179 - DNA, 390 bp, Glycine max
  unsure (1)..(390): unsure at all n locations
  Clone ID: LIB3028-025-Q1-B1-A5
gttagcggcggcgggaagatcaccgatgagttcaccgggaagggctcgatcgggcaggtctgccaggtcatcggtgccgtcgtcgatgtcagattcgacgagggtttgcctccgatcatgaccgcgctggaggttctggatcactcctcgaggctcgtgttggaggtggctcagcatttgggtgagggcgttgtccgaaccattgccatggatgccaccgaaggggtcgttagagggtggcgcgtcctcaacactggctcccctattaccgttccagttggtanggctacccttggccgtatcataaatgtcattggagagcctattgatgacaagggagaaatcaataccgagcattatttgcccattcatagagaagctcctgctttt

SEQ ID NO: 3180 - DNA, 380 bp, Glycine max
  Clone ID: LIB3028-025-Q1-B1-A6
ctataaagtagcaaaaataattagtaaccttgaacattacaagtaataagtgtgaagagattgataatcaacggttctggattaaagtctccatcatgctctctcctttctttgtattggtggatgaagttgtctcaaacttaattttgttctcactgggggattttgtttctccgttaagaatatggtcaacagattgtaacctcgtagtatatttggtgttcactgttaagggaatcagcggagcacaattgatagcgctctcctccttatcacttgagccaaagacgagaattttttgcaacgtattgtcatctatatctatatgttacatagtttttgccatcaacgaacaatatttaaaaaaggcagccgccgac

SEQ ID NO: 3181 - DNA, 345 bp, Glycine max
  Clone ID: LIB3028-025-Q1-B1-A7
atggaaagatattgctttttgtttttctctctgccttctttctactttttgtgttcgtcctcatgattccatggctgaagaatcatgcaaggggttctcatgattcatgaacagaataagattcgattgagttccagaataacactgcgtcacaaaactggttcagaagaagaaggaaagaagatgatgccaacaccatgcaacaacagtagcaaattctattctccttttatagtgtgaggaattgcatatttttggagcaagaagttaagtgcatgaatttccgtgtgaatatgatgtagctacagtttaattacatatctgattctgtgtgcagaaacttgt

SEQ ID NO: 3182 - DNA, 238 bp, Glycine max
  Clone ID: LIB3028-025-Q1-B1-A8
caatgtcaatgataccatcaggaggagacactacattcggtggtcttgattggtcaccacacgatggctatcaccctaggcataggaaggatagcattgactatactcagttaacatagcaagtcacaggtcatccagatgttgtcatcgatggaacaatgagatcatttggcagagatgtgaccgaggcacactcctctaaaattgagatagctgactttcgtggacccatcaaagg

SEQ ID NO: 3183 - DNA, 220 bp, Glycine max
  Clone ID: LIB3028-025-Q1-B1-A9
attgaagtctaaagaaaacatagaacgaagaagaagaacagatcagaaaaatggcgtccaaagttccaaagaaggccaatctcctggatcaccactccatcaagcacatccttgacgagtctgtctccgaggtcgtaacgagtcgtgggtatttggaagacgtgagattgagcattgcaaggcttttcattggggcattcatcatcgtcattgctttatt

SEQ ID NO: 3184 - DNA, 379 bp, Glycine max
  Clone ID: LIB3028-025-Q1-B1-B10
cacacaccttgtgttctgcaccacttcaggcgtggacatgcccggagcagattaccagctcacgaagcttctcggcctgaggccctccgtgaagcgcctcatgatgtatcagcagggctgcttcgccggcggcaccgtactccgcctcgcgaaggacctcgccgagaacaacaagggtgcgagggtgctcgttgtctgctccgagataaccgccgtgacgttccgcggcccctcggacacgcacctcgactcgctcgtgggacaggcactgttcggagatggcgccgcagcgttgatcatcggatcagaccccgacccagacaatcctgcccgactctgacggtggtattagatgggcaccttcgggaggtgggactca

SEQ ID NO: 3185 - DNA, 343 bp, Glycine max
  Clone ID: LIB3028-025-Q1-B1-B12
ctcgagccgctcgagccgcaggtatttcatctaaagaaatcgatgattctattgataggattgtggctggaatggaaggaacagttatgacagatgggaagagcaaaagcttagtggcatatcatgaagttgggcatgctatttgtggaactttgactcctggtcatgatgctgtgcaaaaggtaacactagttcctcgtggtcaagctcggggtcttacatggttcattcctaatgatgatccaactctgatctccaaacaacaactctttgcaagaattgttggaggactacgtggaagggctgcagaagaaattatttttggtgagcctgaagttacaac

SEQ ID NO: 3186 - DNA, 362 bp, Glycine max
  Clone ID: LIB3028-025-Q1-B1-B2
cagacttaacaacagcacaaagcgggttactgtctgttcaagctaccatctctctctctctttcttagtgcctccttgccagaagttaaaatggcccaagaaactttcctattcacatctgaatcagtgaacgaggggcaccctgacaagctctgtgaccagatctccgatgctgtgctcgatgcatgcttggagcaggaccctgacagcaaggttgcctgtgaaacctgcaccaagaccaacatggtgatggttttcggagagatcacaaccaaggccaacgtggactatgagaagattgtgcgtgacacatgcaggaacattggttttgtctctgatgatgttggtcttgatgctgacaa

SEQ ID NO: 3187 - DNA, 347 bp, Glycine max
  Clone ID: LIB3028-025-Q1-B1-B3
gttcttttggagtgtgtgtgcacccattgatgacaagcaaacccattgcatggaagcctaagaagaagaaaaaaacaaacaggacaagggtaactgaatcgccgcttctgaagcatcgttcttccgtttttgttcaagctttttgccttcagagggtaaataaaaaatggaggttttggtgggtcccgctttcaccatcgacgttccctcgtctccgccgcatcatgccggttccgatgatcggatctttcttaacgtgtcacccgaagaaagtgatgggtcgaactttcgtatttcgggcccacccaagttcttcgccggcggcgagtcggagagttcgtcgtcga

SEQ ID NO: 3188 - DNA, 392 bp, Glycine max
  Clone ID: LIB3028-025-Q1-B1-B5
tttaacttcctcatgagttggagttcagcaggaactttcttaatgttctctagcatatgtggcttcactgtgctattcgtagcaaaactagtaccagagaccaaggggcgtacactagaagaaattcaagcttctttgaactcattttcttctaagagatagagattctgaatcaagaaaattacattcagcaatcatcacacaagtttttatcgagactcgtgatgtacacatattcttacaattaattgtctatattatagatagatacttaatatgtagatttactttgtatatttttttgagtgtcattatgtagagttgaatatttgattttaaactcaaatgtcataaccatgggacatgtttcgctccgtaaatgaaattgcaag

SEQ ID NO: 3189 - DNA, 391 bp, Glycine max
  unsure (1)..(391): unsure at all n locations
  Clone ID: LIB3028-025-Q1-B1-B6
cagcaccttagtaccttgaatcattatcattcgggtaatggacacatcactagtgtttactgtgaggaggagtgaggcagagctgatagctccggcgaagcccacccctcgtgaagtgaagctactctcagacatagatgaccaagatgggttacgtttccaaattccggtgatacagttctatcgccacgacccatcaatggcagggaaagaccctgtcgatgtgataagaaaggctgtggccaaaacgcttgtgttttactatccttttgcaggtaggcttanggaaggacttggtcggaaactgatggtggattgtactggggaaggtgttttgttcattgaggctgatgcagatgtcactcttaagcaatttggtgatgctcttcaa

SEQ ID NO: 3190 - DNA, 386 bp, Glycine max
  Clone ID: LIB3028-025-Q1-B1-B7
gtcggaggattcttacgcctgaacgagtcctctccttgcgtagttggtgctcaattaaaaagaatggggggagatgcacagaataagagaattgccataattggcgtgtctaccttcttgctggtggccatggtggtggcagtgacagttagcatcaacctcaataacaagggatcaagctatgattcaaaggaagaaagcaaatccagtgtagcttcctcgatcaaggccgtgaaaaccctttgcgcacccaccgattacaagaaggaatgcgaggacagtcttattgaacatagcaacaacatcaccgacccacgagaactcataaaaatcgcgttccacgttaccatctcaaaaatcggagaacgacttgagaaaacagaact

SEQ ID NO: 3191 - DNA, 362 bp, Glycine max
  Clone ID: LIB3028-025-Q1-B1-B8
gttgtgaaagcagagaagtgagatacactaagttatcctcataaatacactctaattaggtggcaagataagtgtctaaccttagtaacattgccacatattgtgttcattttggaattgtgccactaaaattctattcaattcatctatggctgcctcttcttatgctatgcaatcaatcctggcaaaccctttgatccgcatttccagcgggtctagggtgaaccaatttggcgttcctgctttgcacatgagaaggaatgttggcctgagagttaggtccatggctaaggaagaacaaccaagtgagcctgcaaccccagttacaccgccaccatcagtagaacccaagccacagccag

SEQ ID NO: 3192 - DNA, 379 bp, Glycine max
  Clone ID: LIB3028-025-Q1-B1-B9
atccagagaatatgtaaaaatttggatgggtaagactaacttttaaatctacaagtgaattattaagctggtgtcttaagacacatgcaatatgattctatcggtgggtgaaattgcaggatatgggcagacaggtatagggttgagccaaaagccaggaattgtcgatctgtatggagtcttagcttgtgagaaagccaatttgccacagccgctgctaaaatcccaaaggtattgatttcattccttacctcttatctcctagaatttaagtttctttcggtgtagatattctttgctcttaattttctcggctaaatttaagcgaaaataatttcttttttgctgaaaaaggtaaccacaaccacttttaggatat

SEQ ID NO: 3193 - DNA, 326 bp, Glycine max
  Clone ID: LIB3028-025-Q1-B1-C10
agaaagagcagcttcaacaaaacgcgtttgtggttggatcctatttgaaagaaaggctcactgccctcaaggacaaatatgaattaattggtgatgtgaggggaagaggcctaatgctaggagttgaacttgtcactgatcgtgaacttaaaactccagcaaaaggtgaaacgctgcatgtaatggaccaaatgaaagaattaggagtacttattggtaagggtggttactatggaaatgtcttcagaattacacccccgttgtgtttcaccaaagaagatgcagactttgtagcagacgcaatggacttgaccttgtctagaatg

SEQ ID NO: 3194 - DNA, 337 bp, Glycine max
  Clone ID: LIB3028-025-Q1-B1-C2
gaaaatcctcaattttctgagcagccaaacactctctctctgtctctcgaaaattctcagtttgcagagaaaatctgaatcatgtcgtggcaagcgtatgtcgacgatcaccttctgtgtgacatcgaaggtaaccacctcactcacgctgctatcatcggccaagacggcagcgtttgggctcagagtaccgacttccctcagttcaaacctgaggagataactgccatcatgaatgactttaatgagcctggatcacttgctccaactggattgtatctcggtggcaccaaatatatggtcatccagggtgaacccggtgctgtcaatccaaggg

SEQ ID NO: 3195 - DNA, 409 bp, Glycine max
  Clone ID: LIB3028-025-Q1-B1-C4
gccatctcctccgtcatgaggcgtttcagaggaactttaggatgcgccgtggatggatttggggaggatcgatgattgaaagtacggtttgggtgcgaaggtgctcgagtgccgcggcggcggtcaagcatcttatcttcctggtgcctcgcaagttctgtagcttgcacgagggaaagaggacggagagcttggacctcacggaggagctccggactcaaccctgatataaagcagctcagcaaacacgaaggggaaagacctaatgttcggttcgcgatatgctcaaaatctgtgacgtaatcactcacagtgccggtctgctggagcttacacaatgctccttgcggatcttcgtaaaatgaacgcgcgaatcatgattcgaatgcctgcaacatccacagacacg

SEQ ID NO: 3196 - DNA, 382 bp, Glycine max
  unsure (1)..(382): unsure at all n locations
  Clone ID: LIB3028-025-Q1-B1-C5
aactaactaaattaaggagagtccaagtgtgtgggagacaaagagagacatggctaagtggtgtatgttggtgttggttcttgctctggctgtggctacaagtgccagagatgttcccaatcccaaggatgctggtctcaatgaccagaagaacttcatcagctatggtggagttggtggctattctggaattggaagcaatggactaccttttggaggtgtcggaataggtggtggtattggcggtggtggacttggtggcggcctcggcggcaccaccgggataggtgggttgggaggattcggaggtcncattggtggcggtggtgttggtggtggtagcatacctcatcctaccccttgatatgaacatgcatgcata

SEQ ID NO: 3197 - DNA, 350 bp, Glycine max
  Clone ID: LIB3028-025-Q1-B1-C6
attcaacttaagagatgaatatggacatcaccactacacagcctcactctaatatctgttttttccttctgttgttgcttctaccacacttgcagttgggcataagccaacttgagctgaactactagtcgaaaagctgaccaaaagctgaagagatcatcactgaacaggtcacacagctatatcacaagcatggaaacactgccgtttcgtgggtcagaactctcttcgacgattgcgtggttaagtcatgcgatgcatcattactgttagcgacggtgagcaatgtagtgttcggacaaacatcgggtcacagttttgggatgagaaacttcaagtacatcaacact

SEQ ID NO: 3198 - DNA, 368 bp, Glycine max
  Clone ID: LIB3028-025-Q1-B1-C7
ggaactctatcttcaggatcgcacatcccggtggtcccgcgatcctcgatcaagtcgatgagaagctccggctcaagccggagaaactccagtccacccggcatgtgctgagtgagtacggcaacatgtcaagcgcgtgtgttttgttcattctggatgaaatgaggaagaagtctaaggaggaagggaagagtaccactggagaagggttatagtggggggtgctattcggattcgggccgggtctaaccgttgagaccgttgttctgcacagtgttcccttggagggataaatcatgctgatgcggtgactagtgatttaagagtgatcaataaggaaccctcggaaataccagggaaagtttgtt

SEQ ID NO: 3199 - DNA, 385 bp, Glycine max
  Clone ID: LIB3028-025-Q1-B1-C8
ctcgagccgactcgggtctagcctcagtagtgtcatttacgcttctcttctctgtagcagctatgcctaagcctaaggtcttcttcgacatgaccatcggcggtcaatctgctggccgcatcgtgatggagctctacgccgacgtcactccccgcaccgccgagaagttccgcgcgctttgcaccggcgagaagggcgtacggcggagcggcaagcccctcgagtacaacggctcgtccttcgatcgcgtgatcccgagtttcatgtgtcagggtggcgacttcaccgccggaaacggaaccagcggcgagtcgatttatggcgccaagttcgccgacgagaacttcgtgaagaagcagacgtgtccgagcatcctctccatggc

SEQ ID NO: 3200 - DNA, 313 bp, Glycine max
  Clone ID: LIB3028-025-Q1-B1-C9
aaggaactcaagaacggtcgcttggctatgttctccatgtttggtttctttgttcaggctattgtcactggcaagggccctattcagaacctttacgaccacgttgctgatcctgttgccaacaatgcttgggcttatgccactaactttgtccctggacaatgaggatgcctacatgcaatgcaatcttctgctcccttttgcagttcccttgtgtttaactccattttcactaatgtaactacacctgtgtagcagaaaaatctgtatgagaaccattatatttttatatattagaaatttgggtccccag

SEQ ID NO: 3201 - DNA, 323 bp, Glycine max
  Clone ID: LIB3028-025-Q1-B1-D10
cgcgcgcttcactcctcttataaaaaaccccaagctcgacaccttctactacctcgagctcctcgggatcagcgtcggcggctcgccggtgcgcggcctctccgcctcgctcttccgcctcgacgcagcgggaaacggcggcgtcatcatcgactcgggcacctccgtgacccggctcacccgacccgcctacattgccctccgagacgccttccgcgtcggggcctcgcatctgaagcgtgcagcggagttctcgctcttcgacacgtgtttcgacctgtccgggctcacggaggtgaaggtgcccacggtggtgctgcatt

SEQ ID NO: 3202 - DNA, 381 bp, Glycine max
  Clone ID: LIB3028-025-Q1-B1-D11
ttgggccacaaggggtgggcttgtgaaaacggattggagcaaggccccattcacagcctcatacagaaacttcaatgccctaacctcttcctccactggccaatcactggacgccacggggctggccaagatccattgggtgcaaaagaattacatgatttacaactattgcactgatattagacgtttcccacaaggcctccctccagaatgttccattgcttgagaatgttcattattcaattcaatgttgcatattattatatatataaaaaaaatggtccccatatacgtgacacgtgtatgcctattacgttgatttactttcttgtataaactaatggtactaaaacctatgattattgttggttggtttgtgct

SEQ ID NO: 3203 - DNA, 352 bp, Glycine max
  Clone ID: LIB3028-025-Q1-B1-D12
gccacatcaatattatgacagtgatgatgaatatgctcctgacagggtgccactcttgaagaatgctccacctcattatgttgttgatccaggatatgcacatggaaatgatacatggaggagacaaggtataaaagattggcattctttaattgatcatagttttcttattctagctatcttggatttcctttatcatttattttcactagtctgtttcaaatacctattatcatgcatcagccttattcttaaatggtttgaagaggcaagtagaccgtacttcgatttatactacaatttatgaatttgaaaatggttatgtattagataaatctatatcatttttttt

SEQ ID NO: 3204 - DNA, 379 bp, Glycine max
  Clone ID: LIB3028-025-Q1-B1-D2
ggcactcaaagtaacatgaatgctaacgaggttattgcaaaccgagcagcagagattcttggccataagcgtggtgagaagtttgtgcacccaaatgaccatgtcaatagatcacagtcttctaatgatacattcccaactgtaatgcacattgcagccgcaacggaaataaactcaagactgatccccagccttaaaacgttacacgatactctaaactcaaagtcagttgaatttaaagatattgtcaagattggacgcactcatactcaagatgcaacacctttgactcttggacaagagtttagtggatatactacacaagtgaagtacggtattgatagagtaattgacactttgccacgcatgtatcagcttg

SEQ ID NO: 3205 - DNA, 353 bp, Glycine max
  Clone ID: LIB3028-025-Q1-B1-D3
cttgttttctaaagatgtttgcttcctgcggacttcattaacctcggacctcaaaacagcattgtccctgagtagatgatccaactgcatggaagcaaacatctttagaaaacaagggtgtgctagtgttcttagtgtgttgtattttttcattgttagttatattacggctgtctctagatatggctacgagcgtctatagagtagtactgagtgttaatagaacagattgctccaggaaattttgtgccgttagctcatcctggtttctcctactattgaattgtatcattgttatttttatattaactttgtgatagtccattttttaaatatgttgttaacttgtgtga

SEQ ID NO: 3206 - DNA, 351 bp, Glycine max
  unsure (1)..(351): unsure at all n locations
  Clone ID: LIB3028-025-Q1-B1-D5
ctcgagccgattcggctcgaggaacagttgaagtgaatggcataaaaatgcatgttgcagagaaaggagagggtccagtggtgttgttcctccacggcttccctgagctctggtactcatggcgccatcagattctctctctcagctccctcggctaccgcgccgtcgctcccgatctccgtggctacggtgacaccgaagcaccaccttcaatcagcagctacaactgcttccacatagtgggtgatctcgttgcgcttattgactctctgggtgtccaacaagtgttccttgtggctcatgactggggagccatcatangttggtatctatgcatgtttcgccctgaca

SEQ ID NO: 3207 - DNA, 392 bp, Glycine max
  Clone ID: LIB3028-025-Q1-B1-D6
ttcaactcaaggagatggctctgggaataggcattgcagtggttctactactttgcttcttgctgcgtcactctcaaatggctcgtgctgccaactacatagttggagattctgggggttggacctttaacactgttgcctgacccaaatgaaagctctttcgggctggtgacatacttgctttcaattatagccctgggactcacaatgtggtggccgtgaacaatgctggatatgatagctgcatgactccacgaggagccaaagtgtataagtcagggacggatcagattagacttgccaatggacagaactacttcatctgcaattaagttggtcactgcgagtctgggatgaaaattgccatcaacgctgcctgagtttaataatat

SEQ ID NO: 3208 - DNA, 367 bp, Glycine max
  unsure (1)..(367): unsure at all n locations
  Clone ID: LIB3028-025-Q1-B1-D7
ggcctcaaaggggaagacttaggtctgtctagtggaagttctggacagtggaattcacaatctaccttccctaagaaccaaccattgatttggtacaagacaacctttgctgctccatccggcagtgatccagttgcaattgacttcacggggatgggaaaaggtgaggcttgggtgaatgggcaaagcatcggacgatactggcctacatatgtggcttcagatgctggttgcacggactcatgcaattatagaggaccttacagtgcatccaaatgtcgcaggaattgtggaaagccatcacagacactataccatgtaccgcgatcgtggttaaaaccaagtggcaacattcttgtantgtttg

SEQ ID NO: 3209 - DNA, 353 bp, Glycine max
  Clone ID: LIB3028-025-Q1-B1-D8
taagagttgctgcatcttcaaccactccgcacctcgcagcctctgtgccctcaacaaccatggatgatatcgaaactaccgttccagatcccacccaaatcgacgtcaaactcttcaatcgctggtgcttcaatgatgttgaggttaatgatatgtctctggctgattacattggtgtgtccccatcaaagcatgctacatatgttcctcacactgctggcaggtactcagtgaacaggttcatgaaagcgcagtggcccattgatgagaggctcatcaactctctgatgatgcacgggaggaacaatggcaagaagctcatggctgtcatgattatcaagcatgccatggag

SEQ ID NO: 3210 - DNA, 373 bp, Glycine max
  unsure (1)..(373): unsure at all n locations
  Clone ID: LIB3028-025-Q1-B1-E1
atctcgtgggaatgaatgggaggttgtatctctcacagcatcaacatatgcagctgctcctggtcctgatgaagttgagatgaaggatgatgggaaagaagatgtatatgggcaggatgaaggagaaacgtcacatgctttattcatgtctagacactttgtctttccacccagtcagcatgaaaacttgcccgtggaacctgactatggtgagattcatgatgattttggagacaaagatgttgcctctgaagagactcctgaagaagtgaccatacctagtggaaaggatgaagaaaacttgacattaccaggattagaagttgcagangagtttganggcatgcggtattttgacgagaaaatcaacaga

SEQ ID NO: 3211 - DNA, 360 bp, Glycine max
  Clone ID: LIB3028-025-Q1-B1-E10
gatgtccctagaaaggcttctgcttatcctagaccttctgcttctctcctccgcggttgagagaattttgtgacgcagcaagtggtaaagcagataacaaacgattcacaggtttaggtggggctggcatgaaccatgtttatgtaagcagtgtatagtttgctttatttccatgttacattttgtgctatatataattttttttttcgtgttgtggtcctgattgttagacattcaagagtctaatgtgggtccttaaggtgttcattaattttgaaccctgtaaacaactgcaacactacccatgtggttgatgctctacatttttatcttttgctttttaatatgtaagaaagtcct

SEQ ID NO: 3212 - DNA, 379 bp, Glycine max
  Clone ID: LIB3028-025-Q1-B1-E12
ctcaatttttctctcaaccggcccaatttagcataagcccagcatggccaccgcaacagcagcagccacctcgtccttcatggggacgcgcctcctggaggcccactccggggcggggcgggtgcaggcccggttcgggtttggcaagaagaaagccgccgccccgaagaaagtttccagggggtcgggctctagctccgataggcccctgtggtatccgggcgccaaggcgcccgagtacctggatgggagccttgtcggagactacggattcgacccatttgggctagggaagcccgccgagtacctgcagttcgagttggactcgctggaccagaacctttccaagaaccttgcctggggacatcattgggaccag

SEQ ID NO: 3213 - DNA, 402 bp, Glycine max
  Clone ID: LIB3028-025-Q1-B1-E2
gcacaaagggcgtaggagaagagggtttcgttccgtttcaatggggagcgaagagcagaacggcgaattctacctgcgttactacgtcggtcacaagggcaagtttggtcacgagttcctggagttcgagttccgcccagacggcaagctccgctacgccaacaactccaactacaaaaacgacaccatcatccgcaaggaggtttacctaacccccgccgttctccgcgagtgccgtcgcatcatcgccgagagcgagattatgaaggaagatgataacaactggcccgaaccggatcgggtggggcggcaggagctcgagattgttatggggaacgagcacatttcgttcaacacgtcgaagattgggtctcctgttgatgttcagagcaatgctgaccc

SEQ ID NO: 3214 - DNA, 364 bp, Glycine max
  Clone ID: LIB3028-025-Q1-B1-E3
agaagccatcagtcatggataggcgtctatcatcgtcttcacgcccttcgtttacatttctcactcgattcgaatctgcaactgcaagattcaatttctctccgtcaacacgttctcactctcacttgaagcggctctcctcagtttgttgccagcatgcaaatccatctcctttttcctcttccactcactttctcgcttcttccaatcaccccattaattttccatccttttcctcttcttcagatcactccacactcgaatcgcattctctcaatcaaatcaaaaccgggggctttccaaaaccaaaggtaataccagctcggacgcttgtaatacatcctgctcttgctatgatcttaat

SEQ ID NO: 3215 - DNA, 402 bp, Glycine max
  Clone ID: LIB3028-025-Q1-B1-E4
ataggctactaaattgctgatgttgattttgtttgtttaatgcagtttcaacgacgaaaccggatttacaaggaggagcagcgcaaactaagggctgctaccaggaaaggccacgaggatggggttaatgaacatcatcattagaacctggagttaattttcaatctaagcttctgaacaattattttgataaaatgtttgtgatttgcttggatcggtattcctgcatgttctgtgagcccatattttatacttttgatgttgcgggcttcttttccctgtgcaataaattcagaagtcaacttaggactgcaaatttcactataagtttgctgagtgaatttggaaaatgtctttgagatgtaaacatgggttaaaaggattgaaattccctaaatgaaa

SEQ ID NO: 3216 - DNA, 384 bp, Glycine max
  unsure (1)..(384): unsure at all n locations
  Clone ID: LIB3028-025-Q1-B1-E5
cttttcttcaagcttggtttcggaaaaaaaaaacgtaaaagaaacaaaaaaaaaaacccctagaagcgaagaagctgaaaaaaggctccaaagatggatttcaaaaactcttctcttctatgcctagctcttttccttgcatgctcttcggctattcgtgcatttgacatcacacaattgctaggtcaatatccagagttttccacattcaacanatacctaaccgaaaccaagcttgcagaccaaataaacagccgcaacaccatcactgtcctcgccgttgaagactcagccatgcattccattgctgccaagtccccagaagccattaaggccatcattggcacccatgtcatccttgacttccttgatgagaagaaactc

SEQ ID NO: 3217 - DNA, 359 bp, Glycine max
  Clone ID: LIB3028-025-Q1-B1-E6
catacaaaccctgcagcgatttgtttttatctccgccgtaccatgtcggaagcaccaccgtctcagccatcgcctccaaccgccaacgcgtcaccaccgccgtactggcgctaccactgcgagaagcgcgtctccatcgaaacgctcgcgaatctccccgacgtcgtctgcggtgagtgcaagaacggcttcgtggaatccatccacacgccgtcgcgctctcgctccccctccgcctcctccgacgacccctacttcggctcgcagttcctccacgtccttcgcctaatcgctcagtcggcgcgtgacgacgactcgtcgcctccgccgccgccaagccgctctccggagaacgattt

SEQ ID NO: 3218 - DNA, 401 bp, Glycine max
  Clone ID: LIB3028-025-Q1-B1-E7
aaactttctctgagtatcctccccttggtcgttttgctgtgagggacatgcgtcagaccgtagctgttggagtcatcaagagtgttgagaagaaagaccccaccggagccaaggtcacaaaggctgccgccaagaagaagtgattgcattttggcaattttgctagcacatgtgatcatcaacgtggtttcaaaaaaacttgttcctttacagtagtttatctttgcagagtcttaggtgtttgttttaccagttatattttgaagtgtccgccgatttcatgtagcccgtagcttcaaaacggggttcttgatcggcggtaacattttcgttgctgtttgtttttgatgagtactgttttttgttttgatggtaaaagtctgagatttcaaattcacaag

SEQ ID NO: 3219 - DNA, 375 bp, Glycine max
  Clone ID: LIB3028-025-Q1-B1-E8
gcagtgcaacatctcgccttattgtgcatgaaagtatagcaacagaatttgtgaatagacttgtgcaatgggccaaaaacatcaaaatttcagatccctttgaagaaggttgtaggctaggtcctattgttagtgaaggacagtataaaaaagtgttgaattgtatctcaactgctaagagtgagggtgcaacaattttgattggagggtctcgcccagagcatttgaaaaaggggtactttgttgaaccaaccatcataactgatgtgactacctcgatgcaaatttggagagaagaagtttgtggacctgtgctatgtgtgaaaacattcagtaccgaagaagaagctattgaactagcaaatgacacacact

SEQ ID NO: 3220 - DNA, 378 bp, Glycine max
  Clone ID: LIB3028-025-Q1-B1-E9
gtcaaatatcccagttttggcttccattccagttccaaaattcggcagagacatacctgaagttgcaaggttgcggaatcatgcaggggcaacttgttttacattgagcgttagtaacagagatgctgttagagaacagatacgctcacaattggaagatatgctgacaaaacactagtcattgcaagtttgtggtctgaattcataccgtgtaatgtagaataaattatgaatttatgatgggctaatactatttagtgagagaaaaaaaagtgcaaatcttaatcgagccttaaataagttgataagctagttgagctttgaataccattagtaatatacatgactttaccgcatgatagtccttttgtaatgact

SEQ ID NO: 3221 - DNA, 376 bp, Glycine max
  Clone ID: LIB3028-025-Q1-B1-F1
attgaatttgtctacgaatcggttgacaggaaacatgcctgattctatgatgaactgcaccaagctcttggctcttgacataagccacaatcacttggcaggccatgttccttcatggatttttaagatgggtgtgcaaagtatctctctttctggggatggcttcagcaagggcaattatccttcactgaagcccacacctgcatcttatcatggtcttgaggttttggatttgtcatccaatgcattttctggtgtgcttccatctggcattgggggacttggtagcctccaagtcttgaatttttccaccaacaatatctctggttctattcctgtgggtataggagaactcaagtctttgtacattgttgac

SEQ ID NO: 3222 - DNA, 348 bp, Glycine max
  Clone ID: LIB3028-025-Q1-B1-F10
cctcacgcatttcctcgtttttttcttcccttttctctttctccggcgacgatctcagattccggccactcctctcgccggcgagcccttactcttccctcctccgtcgagccctctccgattcgaatcgttcccagcctcgcaccaccatgaatcccgaatacgattatttgttcaagcttttgctgattggagattctggtgtacgcaagtcatgtcttctcctgaggtttgctgatgattcataccttgacagctatatcagtaccattggagtggactttaaaatccgcactgtggagcaggatgggaagactattaaacttcaaatttgggacactgcgggtc

SEQ ID NO: 3223 - DNA, 332 bp, Glycine max
  Clone ID: LIB3028-025-Q1-B1-F12
ctctggggctgatttcatcaaggaaaactcatgaggctattgagatcctcaagctcatgtcctccactttcctggtcgccctttgccaagccattgacttgaggcatttggaggagaatttgaagaacacggtcaagaacgttgtgagtcaagttgctaagaggactctcaccacaggtgtcaatggagagcttcacccttcaaggttttgtgagaaggacttgctcaaggttgttgatacggagtacacatttgcatacattgatgacccctgcagtggaacataccctttgatgcaaaagctaaggcaagtgcttgtggactatgcattg

SEQ ID NO: 3224 - DNA, 342 bp, Glycine max
  Clone ID: LIB3028-025-Q1-B1-F2
gattcaattttggatttggtgctagcatcccttcccgaagaaacacgaagcaacgggacagacacacaactgcagttaaagcagaagtttgatgccttaaaaggtagtgtaagacacttcagcttcttcccaccatgagggggaggtatgttggcacattctttggcacatctagcatcctggttgaaggttagggaagacgatcaatcaagtgatgggatcgaatctgtgatcaataaagttgaagtttatttggcataaggaaaacttgctgaagcagcagattgtctacaagaaagtgtgagatgcacacaagctgcagaaattgttgcaagttgggtg

SEQ ID NO: 3225 - DNA, 347 bp, Glycine max
  Clone ID: LIB3028-025-Q1-B1-F3
gagaaagaaacatttgagcaaaaatggttcaagcacagcctctacaacatgttggtaatggtgcagggaaagaagatcaagcttattttgatccaagtgctccaccacccttcaagattgcaaatatcagagcagcaattccaaaacattgctgggagaagaacacattgagatctctgagttatgttctgagggatgtgttggtagtgactgcattggtagctgcagcaatcggcttcaatagctggttcttctggccactctattggcctgcacaaggcacaatgttttgggcactttttgttcttggacatgattgtggtcatggaagtttttcaaacagtcct

SEQ ID NO: 3226 - DNA, 325 bp, Glycine max
  Clone ID: LIB3028-025-Q1-B1-F4
ctcaaaaactcgttctccttcttctataaactgtaactgttttcatctctcacagatcttcggagcagaatgaaggttctcgaatttcatcgcttcctcctttcgcgatgatgctatagtagaataagaagacaaagagagagaagtatatggacgatataggtagctcattcatcaatgttaggagaattctccacggggaaatctgccattcaaattcagctgatgttgtggtaaggtcagccgcatggcttgggcgaagtctgtcctgtgtctgtgatcaaagtatagatagtgatgcttctaacactttcgatttaaacct

SEQ ID NO: 3227 - DNA, 360 bp, Glycine max
  Clone ID: LIB3028-025-Q1-B1-F5
gttaggtttttgagtttctattgacaatgggataagtaaatcttgtaaaggttagtatgttacaactttgtctctgtaacatttccctttctatttggctcctcctgctagaagtgaggtttgaagggattagaaaattttcaccttactatatatgcattcaagacaggtgatgcttgatagaatcgtattctgtgaagtatagtttttggctcataaatatggactaatatctatcttattcttaacacgtgcctattcttcattaatggcttccatttatttctgtatttttataccacaggctcctctgaagcttatacctgccataaaaggtagccgtgagaaacatgggggttc

SEQ ID NO: 3228 - DNA, 384 bp, Glycine max
  unsure (1)..(384): unsure at all n locations
  Clone ID: LIB3028-025-Q1-B1-F6
ggaatcagaggctccccctaacttctggggccacaccccggcagaagaatactacacctcccaaggcgttcgcaacaccaagtcccacttcgaaacccccaacggcagaatcttcacccagtccttcctccctctcaacctccaaccccaccaagtcaaagccaccgtctttatgacccacggctacggctccgacaccggctggctcttccagaaaatctgcatcaacttcgccacctgcggctacgccgtcttcgccgccgacctcctcggccacggccgctccgacggtctccagtgctacctcggcgacatggacaaaatcgccgccacctcnctctccttcttcctccaagtccgcaatagccacccctactaaaacct

SEQ ID NO: 3229 - DNA, 223 bp, Glycine max
  unsure (1)..(223): unsure at all n locations
  Clone ID: LIB3028-023-Q1-B1-F3
actactaattcactcactgaatatatagtactttaactaaggtcatgttttgatggtagcagaaacttccaaagcagttacttactgttttgcatctttctggtatctttagtcttttgtggtattattaaggccattaagcgtgtagtgttactgttgcatcatctgtgcaaggtantgatgtgaactttttgaaagatggattatatatttcacttctcct

SEQ ID NO: 3230 - DNA, 100 bp, Glycine max
  Clone ID: LIB3028-021-Q1-B1-F10
aaaaaacttatcttcattggtttgtgtttatgtagatttttgtatgcaagactagagcatataatcgtgtgatcaagctattttgtctctcttatgtatc

SEQ ID NO: 3231 - DNA, 314 bp, Glycine max
  Clone ID: LIB3028-021-Q1-B1-F11
agaatggattggatacttctattaatggggctgaggtgaagcatgtgatgaaagtgagcctggatgatgatagacatgattactattcaattgggacttatgatgagaagaatgttctgttcacaccagatgatgctaagaatgatgttggcgttggattgaggtatgactatgggatattctatgcatccaagacgttttatgatcagaataaggagaggagagttttgtggggttggattggggagtctgacagtgaatatgctgatgtggccaaaagttgggcttcaattcaaagtattcctaaaactgtg

SEQ ID NO: 3232 - DNA, 401 bp, Glycine max
  Clone ID: LIB3028-021-Q1-B1-F12
aaaaagggttgccttggacacttctcaccttgttttctgagttatgttaatttgaaagaagctacgtggcatcaagaatgggttcaggtgattggtttaagacaataattagctcaagaaaatcaaaagaaggaagatcaaagaaattaaagactaagatttatacaagaaaaaagtccaatggtttagcaaatggaatgaaaagcgaaaatctagagtcagatggggtatcagttgaaactattgctgcaacaaggatccaaacagcattccgagcttataaggctagaaaatatttacaccgcttgagaggattcacaaaactgaagatccagactcaaggttcctctgctaaaaaacaagccgttaccactataacttatcttcattcatggagcaag

SEQ ID NO: 3233 - DNA, 386 bp, Glycine max
  Clone ID: LIB3028-021-Q1-B1-F2
attcttttatttcttgtctcacccgcaccatgcaagtgtgccaactactgtgattggtatggcgacacgtgtcccttttgttttgtgcgcagccaccacttctcccaaccactgccttaaatactgcgtggtggcaccgtcacttcctctaccggtttcttcctcctcattaagccgccactttctctctctttccttttcgtcttctttttcttcttcgttgggtttgttgccacttagtaagaaagagggtgtgaagagagtggggagaagatttggtgttgtggccatggcggagtctaagagtactgtgcttgttacgggagcgggtggtcgcacaggacaaatagtttacaaaaaattaagagagaggccaaaccaatatg

SEQ ID NO: 3234 - DNA, 352 bp, Glycine max
  Clone ID: LIB3028-021-Q1-B1-F3
tcacttcctaaatagcgagcggacgctctctctctattattttacaacctttttcgcacctttgcgctcaattcaattgaattagtctaattgtaacaagtatggattcacaagtttgtgagacattgaccttcaaatagagtgatcaagggttgaaaatcataggcggtccacggatgacatcatttatcgataagccatcaccatctgatcaaagtggaaaggattgaattggacacaatgtttaagtcccttcaggcagaaattagaggaaccgagatgggtgattatccaggatcatgccccatatggtccgcaatattgatcagtgttccaattatggaagactgtg

SEQ ID NO: 3235 - DNA, 370 bp, Glycine max
  Clone ID: LIB3028-021-Q1-B1-F5
tcttactgcaagagaaagagaagagacaaggtctatggaaataatgttgagatccaagccatgtgtgaaatgtataatcgtccaattcacatatactcctacaccacagaacctatcaatatctttcatggaagctacaacactgacatgccaccaatacgattgagttatcatcatgggaatcattacaactcccttgttgatccacggcgcttgacaattggtgctgggcttgggttcagcagtcttcgtggaacaaatgttgacaaagatcaagtcaaggctgctattaaagctcaacaagacaaacagatcaataatgcactgttagccgagggtcggttttactctgatctcgagctcacagaaa

SEQ ID NO: 3236 - DNA, 370 bp, Glycine max
  Clone ID: LIB3028-021-Q1-B1-F6
caaacatttttccatgaaacttgcatctaccattattattctatcacatccatggccatagttgtgaagctacatgttgtcccagaatgtttgaaccaacagaaaacgaggtcgctcaggaggggatttggctcatgcccttcccctggggtgcttggttttggccattattgtgatcggttctctgtgaaagtgtgcagggcttttaggactgaggatggtggggatgtaaaggagaaaaagttacgaaatttgaagaaaaatgaagagaaaaccaaaagggaaagtgggttttggagttccctcaagtctatcttgttgaggaatttcatggtgggttcaaaatcagatgatgagtatcgccaagctg

SEQ ID NO: 3237 - DNA, 374 bp, Glycine max
  Clone ID: LIB3028-021-Q1-B1-F7
gttgtcttgtttatatggtgatggtaagccatacatggagctgagaaaaattgctggagggtttgatggtggttctctagttgccacgcttgattccaaaatcggtgaacagttgatgaagcaaaggccaatcttcagtgagatcaaagaggtaaacaatgctgtttctaaccttcttgttgcttctgatgaagtgagacatgatgcagccaaggaattgcagacaaagctgagtgtgttggagaagctatctgatgatataaggaaggaggtggataatctgtttgccaatgtaatgactcagagattcgaattaattgatggctttcggctacagaaacagccacaaaaataaagtgtctgaccatatatat

SEQ ID NO: 3238 - DNA, 395 bp, Glycine max
  Clone ID: LIB3028-021-Q1-B1-F8
ctgttcttgcgcgtgaacaagcctcaggtaagccaaaaccatggttaagcataacaatgttatcccaaacggacacttccgtaagcactggcagaactatgtgaagacttggttcaatcagccagcacggaagacaaggagacgattggctcgtcagaagaaagctgtgaagatattccccagacctacggctggacctctcaggcccattgtacatggtcaaactttgaaatacaacatgaaagtgagaggtggaaggggattttctcttgaagaactcaaggcagcagggattcccaaaaagcttgcaccaaccataggtattgctgttgatcatcgtcgcaagaaccgttctttggaaagtctgcaagctaatgtgcagaggctgaaaacat

SEQ ID NO: 3239 - DNA, 392 bp, Glycine max
  Clone ID: LIB3028-021-Q1-B1-F9
tctatctcttgtttcaatttcaacaacggttactcctttttcgttttgagtttcaatcaagccatcatcatgtctaccgcatcgcaacccaaggccaagaaaacggcgtcgtccaagaagcccctctcccaccctcccttcgccgtgatgatagcagaggcgattgcgagtctgaaagagagaaccggttcgagccaatacgcgataaccaaatacatcgaagggaagcacaaggagttgcctgcaacctacaagaagcttgtcctcgttcatctcaagaaatctgttgctgctggcaagcttgttaaggtgaaaaactcctttaagctcgcaccgactaagcctgctccggttaaggccgctgctcccaaaaagccaaccaaagctgccac

SEQ ID NO: 3240 - DNA, 390 bp, Glycine max
  Clone ID: LIB3028-021-Q1-B1-G10
gcaaaactcaaacgaatacgttttctctttctcttcaatttcacccttattagcatagcatattcatttccctttcttgaatcgttcttaactgcgagaggggatatcagagaagttgattgggctcccattaataacagatctgaatgatctgatggagtctaaaggtgggaagaagaagtcgtctagtagtaagtcctttttgtacgaagctcctctcgattacatcattgaagacgttcgaccacacggtggaatcaagaagttcagatctgctgcttactccaactgcatccgcaagccatcctgagattccctaggtcctgttaagacctaccccccttagtcctgcatctgctatatttttctagtctcttctcgtctcctttt

SEQ ID NO: 3241 - DNA, 383 bp, Glycine max
  Clone ID: LIB3028-021-Q1-B1-G11
gtttagtttcgaaccctttccttttccttccttctccgcctcaccaccctaacccaaccctctctctttctctctccaaaatctctctccctcccaccgttatttagggtttggcagatctcgatccgtcacaatggacgttcgcaagcgcggaaggcccgacgtcaaccttaacggcgccgttaagaagaccaagcaagaattggagtccttatcaagtggtgtaggaagcaaatcgaagccatgtaccaagtttttcagtactgctggctgcccatttggtgagggctgccacttcttacattatgttccaggtggttacaatgttgttgcccatatgatgaatttaaaacccgcggctcctctaccaagaaccgttgctg

SEQ ID NO: 3242 - DNA, 398 bp, Glycine max
  Clone ID: LIB3028-021-Q1-B1-G12
attgtggcgtcgtgggctgatggccggcacgagcctctctcacgtgatccaatcgacggtcctagaattgcccagaaccacccgccacgtcagaatctccgccaagagccaccgcgtctccgccacctctgaccaacgccccgcgggaccctgctgcatctacgttggccccctcgaaaccgctaacaaagagaacctcgaagccctttattgccaagcacgggatgcttattatagtggtcaacctctgatagtggatgacatgtttgatagagtagagttaaggctaagatggtttggttcaaagtcagttgtaaagtatcctcggtgcagtattaggaggcaatccacatttgctgatgctgaggaagatctgtctatggtttttgcattagcaa

SEQ ID NO: 3243 - DNA, 382 bp, Glycine max
  Clone ID: LIB3028-021-Q1-B1-G2
agagctgttcgtgcgcatgcacttcactcaagtttgcctgagtcatggttaaggcataccaatgttatcccaaacggacacttcgatgagcactggcagaactatgtgaagacgtggttcaatcagccagcacggaagacaaggagacgattggctcgtcagaagaaagctgtgaagatattccccagacctacggctggacctctcaggcccattgtacatggtcaaactttgaaatacaacatgaaagtgagaggtggaaggggattttctcttgaagaactcaaggcagcagggattcccaaaaagcttgcaccaaccataggtattgctgttgatcatcgtcgcatgaaccgttctttggaaagtccgcaagctaatg

SEQ ID NO: 3244 - DNA, 366 bp, Glycine max
  Clone ID: LIB3028-021-Q1-B1-G3
acgagaaaggagagcgatggagcggagcgatgacaaatctgacggagatggcctccaatctcgactctctccagaagcttctcctcaccaaagccgtcttcgtcgacgacgacaccttctccaaagcctccctcgccgccgaccaggcccgcaccatcaagctcctccagcaacgagtccagaccttggagagagaggtcgacgccgccatcaccaccgccgcccgcgctcgctccgagaagcgccaggccgaggctgctcagaaatccgccgaatcgcgcgctcatcagctcaccgccgaactcgaaaacaccacaaaggtgtttgagctgcacatggaagagctgcgagcgaaacaagaagaga

SEQ ID NO: 3245 - DNA, 381 bp, Glycine max
  Clone ID: LIB3028-021-Q1-B1-G4
gcagatcaggatgcaatgagcacaactttgctagcagaatggaatgttttaaatgcagtgctcccagggacacgtactagaaaaaatgagtttatcctagcaagaaaggctacattaattaatggagatgctgcaagatttctttattaatttctttgggatgttgaagacagtgtgaattctgaaaaggtggtttaaaatcccatgttacagagaagctagccagctgcatcccttaaggtctttctcagatttacctcaagagctacaacaatgttgttttggtgctttaaactactttctttagttttggcgttagagagttcatttattgtatggtgcgtggttttcttaaatgaatatgaatctcttttcttgtcg

SEQ ID NO: 3246 - DNA, 348 bp, Glycine max
  Clone ID: LIB3028-021-Q1-B1-G5
ggccaacgttgactacgagaagatagtgcgtgacacctgcaggaacatcggcttcgtctcaaatgatgtgggactggatgccgacaactgcaaggtcctcgtcaacattgagcagcagagccctgatattgctcagggtgtacacggccaccttaccaaaaaacctgaagaaattggtgctggtgaccagggtcacatgtttggctatgccactgatgaaacccctgaattgatgccattgagccatgttcttgcaacaaaactcggtgctcgtctcaccgacgttcgcacgaacggtacctgcccctggctgaggcctgatgggaagaccgatgttaccgttgagta

SEQ ID NO: 3247 - DNA, 391 bp, Glycine max
  Clone ID: LIB3028-021-Q1-B1-G6
ctccttcccttttttcatttccttttcgatttcaccatttgtttctgagacaccctttcttgaatcactgcaccctttttccctctctctcagaaaataaagtttttttttccaagtgaggatgttaaaatgaaaggaataatagcattgcacacgcttttgccatttcttctattttctgccattttaccactctctttctcagctcaaccccgcaacgccaagaagcccaaaaccccatattctgataataatcatcatcgcctttcctcctctgctgttttcaaacttcaaggaaatgtgtaccctcttgggcattacacagtgtctctcaacattggctatccccccaagctttatgaccttgacattgactcgggtagtgacctta

SEQ ID NO: 3248 - DNA, 324 bp, Glycine max
  Clone ID: LIB3028-021-Q1-B1-G7
atgggattcagttacatgcaagcgattgaggcttacagcatatttggggacgatgttgattcaatggtttgttacctgttagaaaccggcagtagcagcagacgtaaaggcaaggccactgaatgacatgccatcaagttaaataaatatctatatctatagtttttgaattgcaaccaaatcagttaaataaataaccctgtatcaagctacttactctgtagtttaatttggtatctggcatatttatgacggatatagaaagaaaaaactgagcaatgatacaattttatttggctaatgattgcaggtcattttatattc

SEQ ID NO: 3249 - DNA, 366 bp, Glycine max
  Clone ID: LIB3028-021-Q1-B1-G8
caaagcttccatcttaagtgaactgaaaaatgaggctgattttcatttgggggccttattaaggaaaggtggacttgaaagtttggagagcattgtgaggataaaggaggcagaagccagaatgtttcaaaccaaggcagatgaagcaagaagagaggcagaagggttccagaggatgatcaggacgaagactgcgcagatggaagaagagtacgccgaaaagctttccaaactctgtttgcatgagaccgaggaaacgcagaggaagaaattggatgaactgaaagtcttggaaaattcttattttgattactataagatgaaaaagagaatgcaagatgagattgatggtttgttgcggagaat

SEQ ID NO: 3250 - DNA, 394 bp, Glycine max
  unsure (1)..(394): unsure at all n locations
  Clone ID: LIB3028-021-Q1-B1-G9
tccctctaaattaggttttccctttcttcttcttcttcttcttattaccctaaccctaaccttagctattcgaattccactcctcttcgcgaaatcatggcgacgactttggtgagctccgcgggtgggatgcttgcgatgctggacacgctctctccaacctcaacaacttagttttttattatggtctattgtcgattctaaaatcctagctgatgaaactgatgacaacaattgatgtatattgtttcaggctacaccaaaactcagtgaggataaagtcaggcagtgtgttgatacaagactaggaggagaatacccacccaaagctgttgctaagtataaggtcagtctggccccgggggagcgggtgtattgaggtanatttacagct

SEQ ID NO: 3251 - DNA, 340 bp, Glycine max
  Clone ID: LIB3028-021-Q1-B1-H1
aagaaatccaatgggtcctctgaatccgaatcacgtatttcgaatgccatgtctcctcctcaaatagataaggaaacttcaacccatcctcagatcagtagtaacttggagcagaatgagtcacctcggtttaataagctggaccaggaatccgcctcacctcctcggtgtgatgtgcaagagcttaaaactacgttacctcctcaacttgataagccggattctactagtttggtttgctttgaggacaagctacctgaatcgaagttacaagccgcaaaaagaaactcttccagaaaatattctccaattcactatagggatgcttcagttgaagatg

SEQ ID NO: 3252 - DNA, 398 bp, Glycine max
  Clone ID: LIB3028-021-Q1-B1-H10
gtcaagtttttatgacttgcctgtctttaaggatttagttcaggactgtgttgctttgctggcatatgaacgggctctggaatcctccgtaagttatcttctaaaagactcgcagcgtgaagttgtagctgacacagtaaatgccatgatattgtccgcaaatcctaatatgaaagattcaaaacattgcttgcactcctatcttgagaggttacttagacagcttactgcttgctgcttagagaggcgatccctgaatggagagcagggagaagctttccaacttcagagagtgcttagcagtagtagaagaggctagtgctaggtgatatgtctattgatcttcttacgccgctgtttatattgccccaggatttgtaacattgccaagtgcaaaa

SEQ ID NO: 3253 - DNA, 320 bp, Glycine max
  Clone ID: LIB3028-021-Q1-B1-H11
ctctgttccaaaaccctaatccttcgtcatcgaatgagatggctgattctcccctcgcaaggaactcaaagtcaccttccccatggaaagctcagtccagatcgagatctacgtcaaggtcgatatctacgtcgaagtctaagcctagacaaatgtcaagatcgcgttctataagtcatggcaagtcaaggtcaccaactcatcgaaagtcaatgtcaacaattcatagaacgtctgaacctacagatccttgtgacacactttaagtaactggtctatcttcgacggtcaccaatagagacctataggagcatttctcc

SEQ ID NO: 3254 - DNA, 357 bp, Glycine max
  Clone ID: LIB3028-021-Q1-B1-H12
ggttagggttttctctcttcatcactctctgtgtcgctccgtttcaatggctcagcaagacgctcaaaacggcgggtcggagaatgccgctgctgctgctacggtgtcgtttgtcgctgtgaagccgcagctcctcgtcgaagctcccaaagccaacgacgccattctgttcttcaaggctgcgtttggcgctgaggaagttggccgtacgctcaaccctaagcgcaaagctgagcacgagctccctctcatactctccgcagaactcaaaatcgctggctccaccattctcgtcgccgacctcgttgatgacacttcttcgccagcgaaaacggggggaaacggtgtcgttttgtg

SEQ ID NO: 3255 - DNA, 367 bp, Glycine max
  Clone ID: LIB3028-021-Q1-B1-H3
tgtcacttttctttcttacctcttgggcatcactgtgactctgtgcatgcttgctgtgcttgaaattaaatggtctggcattgagctggaagaatggtggagaaatgagcagttttggctgattggagggaccagtgcccatctagctgcggtgcttcaaggtttgctcaaagtcatagcagggattgaaatatcattcaccttgacttcagaatctggtggtgatgatgtagatgatgagtttgctgatctctatattgtgaaatggacatcccttatgataccacctatcacaattatgatggttaacttaatagctatagcagttggagttagcagaaccatatacagtgtcatagcacagtgg

SEQ ID NO: 3256 - DNA, 384 bp, Glycine max
  unsure (1)..(384): unsure at all n locations
  Clone ID: LIB3028-021-Q1-B1-H4
caacactcagctcaagtagaaacccaaattgcccttgataattcaggttaatcaaacaaagctgaaaaaaaaaaacaacaaaaaaaggtgttatttttatctagtgtagttattttagtaactttgtggtaccacttaactttgtggtgtataatgaagctcctagtctctttgaagtctccaaaaaattgttggagaaaaagggtggtgggtttctttcttagatttacaagaaacaagtttcttaattggttttccctgtttatattatatatatttgttgtttttgtttgctcctctctctggagctgtgaaggttgangtgtgactgtgaacagaatattctattatggaacaaggagactgtattttttatattttgct

SEQ ID NO: 3257 - DNA, 361 bp, Glycine max
  Clone ID: LIB3028-021-Q1-B1-H5
gaagagtgccaccgaattacccaacttgggttttttggtgtcctttttaactgtggtgcaaaattgaaggctatctctttggtgagctgctacgggatcaaagatctgaacttggtgttgccaacagtatctccatgtgaatcacttcggtctttatctatcagtaattgccctggatttggcaatgcctcactctctgtattgggaaagctgtgccctcagcttcagcatgttgaattgagtggactcgatggagtgacagatgcagggcttcttccactccttgagagttccgaggctggtttggataaagtgaaccttaatggttgcacaaacgttaccaataaagtagtttcgtcct

SEQ ID NO: 3258 - DNA, 367 bp, Glycine max
  Clone ID: LIB3028-021-Q1-B1-H6
gcatcacataggataaacaatctgtgggctgaagtacagaagcagaaggaacttgagaaaactttgcaaaataggtatgggagtctaattgaagagctggaaaagatgcaaaatgtcatggaccaatgcagattacaagcacaacagcaagaagaaattaaagccaaccatgctcgtgagtcaactgagacccctgagaccaaggctgatggaattgatgtacagggtacagcaaattgtgaagctgtacctcactcggtagagcatggacgagctctagcagttgagtcatctgctgatggaactgctgaccagcaagtagatattgtgcatgaccaggctacttctagtgtcagtcatgacatgg

SEQ ID NO: 3259 - DNA, 385 bp, Glycine max
  Clone ID: LIB3028-021-Q1-B1-H7
aaaaataaaaataaaattacactgaactgagtagaggaatggtgtagtagtggagagaaatcgcgatctggaatagggtttagctgaaagatcgagttgaaatgggtttctttggtaccattttggggtttttgggatttggggttgggatttcgattggtctcgtgtctgggtactttctcttcatctacttccaacccaccaatgttgaggatcctgaaatcaagccattgtcggagcaagagcaagagactctgcaacgaatgtttccagagattcctctttggataaaaaatccggattttgatcggcttgattggctgaacaagtttgtagaatatatgtggccgtatcttgataaggcaatttgtaagactgcgaaaaa

SEQ ID NO: 3260 - DNA, 333 bp, Glycine max
  Clone ID: LIB3028-021-Q1-B1-H8
atcttgtcattcaccgagaaagtcgtactgattcctcttcatctttcgttaaagcgagtacttttcgttcttgatctgttggttacgatgtcgtattcaaggagatctaggtattctccttctccttctccttctccatacaagcgatacggtaggtctgtgtccaggtctctctcaatatcaagatccagaagccgttcaaggagtttatcaagagatgcagaaaatccatgaaacaatttgtatgtgacaggattgtctcctaggattaccaagagagaactggagaaacaatttgctggctaaagaaaagtgataaaagtccaaccggga

SEQ ID NO: 3261 - DNA, 396 bp, Glycine max
  Clone ID: LIB3028-021-Q1-B1-H9
tgaaatatctaacaaccttaaagatctgatacataaccttagttataaaaggttaaatattctccttttaaaaggtaatcactttatgggggatataccaaagcaactatgccagttgatagatttaaacatgctagacctttctcataacaatttctctggtgttatccccaaatgcttaggtaaaatgccttttgagaataagaacccgaaggacttgttagcaagattttctatctttgatccagatctccatatccatgccgctgctctgtcgccatcaaatgtgcaagagaaagtgaatttcactacaaaggaaagaactgacacttacatcgggagagtccttgtttatatgtctggaattgacttatctcacaataaactgaagggaaa

SEQ ID NO: 3262 - DNA, 362 bp, Glycine max
  Clone ID: LIB3028-022-Q1-B1-A11
cacttatccacctactttcatttgagccactcttctcagtccaaaacagtttctcgttttctcatctgaaaaatgaggagcatctttgtccttctccttgttctgggtttgtttaagtatgcatttgctgaagaagggttttgctctgctccttcggaatcgaaatcaaagcctctttattggaaagtggataaccccactctctcacctatccaccttcaagatttgcctggattcacacgcagtgtttataagagtaatcatgctttggtatcaccagaaagtcatgtatatggcccattgcctgattggatcgacacgtcaggcgcatatttaatttcaacagaaatgggttcacactt

SEQ ID NO: 3263 - DNA, 162 bp, Glycine max
  Clone ID: LIB3028-022-Q1-B1-A2
ctctgttccaaaaccctaatccttcgtcttccaaggagatggctgattctcgccgcgcaaggaactcaaggtcaccttccccatggaaagctcagtcgagatcgagatctaggtcaaggtcgagatcgaggtcgaggtctaggccgagacgaaggccaagat

SEQ ID NO: 3264 - DNA, 75 bp, Glycine max
  Clone ID: LIB3028-022-Q1-B1-A5
gtttgattgtcctagctttgaccacggtcatggtgatctccattcccgttgtgacacgcttttcttgtggttttc

SEQ ID NO: 3265 - DNA, 293 bp, Glycine max
  Clone ID: LIB3028-022-Q1-B1-A6
ctagcgtgcacacaaaataatggacaaaaaaccatgcgactcatctcatgatccagaggtgagaaagggaccatgggtgatggaagaagacttgatcttgataaactatattgcaaatcacggtgaaggtgtttggaattcgttaggcaaagcttctggtcttaagcgaaggggaaagaattgtcggctccgttggcgacagtaccttcgtcctgacgtgaggagaggaagcattacacccgaggaacagcttttgatcagagaacttcatgcaaagtggggcaatacgtggt

SEQ ID NO: 3266 - DNA, 137 bp, Glycine max
  Clone ID: LIB3028-022-Q1-B1-A7
cgaggttgcgttcaatgttcagggggtttctgtcgactgcttcattggggtggctgagttgcgaacagggtcagtgtgtggagcgtgcgaatgtgcttgagatgaaagagtagcagatctcactggcagtgcatcgg

SEQ ID NO: 3267 - DNA, 294 bp, Glycine max
  Clone ID: LIB3028-022-Q1-B1-A8
ggaggctctgaagatccacaatccaggcattgaatctttgttcaagaggcgcatggcagatgctggtgaagggtgcaggtccgtgcacctttctgacacacagtggtagtaagcgaagagggtttggcaaagtaagagttgcggcgggagactcagtttctcgctcggagaccattgcagatgacgaggatggagtggggggagggcgtccagatgcgacagcagagcagatcgggagggcatactagagggtgcatgagagcgtgccacccggatttgagtggaaatgatcct

SEQ ID NO: 3268 - DNA, 203 bp, Glycine max
  Clone ID: LIB3028-022-Q1-B1-A9
gcaagtggctcacacacgcacagatctgatctatctgaagctgaaaacgccgacgcccgacggtgatgatgaagatggggtcctcaccttcacgttgctccttcttcctattcctcctcctcctagtggcgctcttcccctcgtcgctctccgatatccggttctccgatatccgaaacgactatcgctctatcgttcccttc

SEQ ID NO: 3269 - DNA, 163 bp, Glycine max
  Clone ID: LIB3028-022-Q1-B1-B1
tccaagcttcctggcacactttgataagttttttgtgcagctccaatggcagcctctcaaatcacttcatcattgaggaacgtggctgcatttgaaaggtttgaaccttcaacgcttcgatttccttctgctgggcacgtcagtagtgggacactgacacaaa

SEQ ID NO: 3270 - DNA, 398 bp, Glycine max
  Clone ID: LIB3028-022-Q1-B1-B10
caacgaagtctcacagcacactcagatctctcttctctttcttcaattccattgttgtttggttcccttcactctcacaatgcgaatcctcgtcctgctctctctcgccacccttctcctcttctcctccttctctcccaccttctgcgaccacctcgccgacgacgaggacctcagcttcctcgacgagccctccgccgcgccggagcacgaccaccactacggcgccgatgactccaatttcggcgactttgaggacttcgaggaggacgacgcggaggcgtacaagcagcccgaggtggacgagaaggacgtcgtcgttttgaaggagaagaacttcaccgacgccgtcaagaacaaccgcttcgtcatggtcgagttctacgcgccctggtgcg

SEQ ID NO: 3271 - DNA, 398 bp, Glycine max
  Clone ID: LIB3028-022-Q1-B1-B11
gagagattgagaagagaaagcgttccaaaatgttcacgctatctcgcgtgttcgctctcacttccccttccaggcataagctcttggaagtgctgtcctctacgaaagttgaagtcggagaccgtctgcgccaagaggggcgcgattttacctattcagctgccatttctacggctacatataactatgctgccaaaggacacgcttccgatcgaatatttgcgccctatactgtttacaatggcaaagctgcagtctcgttgattccttgtcctcaaactttcactaagttggattctgggaaggttgtagttgatcgacgcggttcaatcatgaagtctttcatgcattccattggagagcgcagatatgactgggatacaagacacaaatttgct

SEQ ID NO: 3272 - DNA, 294 bp, Glycine max
  unsure (1)..(294): unsure at all n locations
  Clone ID: LIB3028-022-Q1-B1-B2
gggattatactggtttggggtatgctagatatcatgcaagagatgtaaatggagactttcganggtgcgtggcagagaatggagtgctccataatgccgtaaggtcatgtgtaaaggattctgatttcaagacaacaatctagcggtgggngttaagttcaatgaggttgagagcaaagtctaagtcgagggctgaggagaggcggagagcgagagaaccatcagctgctcaagggcatggtgcgagaggggagcttaggggtggcagtagcatatatgcagagttggtggttg

SEQ ID NO: 3273 - DNA, 162 bp, Glycine max
  unsure (1)..(162): unsure at all n locations
  Clone ID: LIB3028-022-Q1-B1-B3
ggaagttcatgaataagccagtgagaatcctggtagagcgtgatgaactgagcctgnagggtataaagcagttttatgtcagtggtggcaangaagacggggagctggagacattatgtgacctttgtgagactctggctagcacgcagagtgtcatttttg

SEQ ID NO: 3274 - DNA, 218 bp, Glycine max
  Clone ID: LIB3028-022-Q1-B1-B5
atcggcttaatgcgtagtttccctcgccggggatcggtcgaggacggggcggcttcgcggcggcgacgctccatcggcgcgcgaggcgggcatttggggatctgtggacgccgacgactttgcggacgtctttggtgggcggggggcaactctccttgcgtggagggggcgcgagtccggggcggggggcaggggggtgtggggggggcgcggagttt

SEQ ID NO: 3275 - DNA, 294 bp, Glycine max
  unsure (1)..(294): unsure at all n locations
  Clone ID: LIB3028-022-Q1-B1-B6
gtcgtgtctactgtgacccttgccgtgctgggtttgagacctcagcggcgagctacattgctggtgctgagattagggtgcgatgcaagagcagggttggcaacgaggttgtgtacacgaagaaggggtacaccgactcaagcgggncatacacaatgtacgtgcgaggaggatcacgcagatcaggtgtgcgcggggaggcgtgggggcagccctcacccggaatgcagggaggtcagcccacgccgcggaggagccgtggggattctcacccgctacaacggaattgcctcc

SEQ ID NO: 3276 - DNA, 160 bp, Glycine max
  Clone ID: LIB3028-022-Q1-B1-B7
gtcgaagttctctgtttcctttcggtctcaggtcaatgggaaggtgggggggcagggtcccatcatggggtttgtgggtgtggacgagagatcacagtacgggtttgccagtctaatgaaaaaagttggagtttttgattggggggggtacctggttcca

SEQ ID NO: 3277 - DNA, 361 bp, Glycine max
  Clone ID: LIB3028-022-Q1-B1-B9
catcaagctccgctccaacacaggggaaaatgagggagatccttcacgtgcagggagggcaatgcgggaaccagatcggttccaagttctgggaagtggtgtgcgacgagcacggcatagatccgacggggaagtacgtcggaaactcagatctgcaactcgagcgcgtgaacgtctactacaatgaagcctcgtgcgggcgcttcgtgccacgcgcggtgctgatggacctggagcccggaaccatggacagcgtgcggaccgggccgtacgggcagatcttccgccccgacaacttcgtgttcgggcagtccggcgccggcaacaactgggctaaggggcactacaccgggggcgccga

SEQ ID NO: 3278 - DNA, 229 bp, Glycine max
  Clone ID: LIB3028-022-Q1-B1-C1
tgggaagaagattttgattcagaagtatcgtctgcatggcggagttgagtgatggactgtgagaagagactgttttattggagcggagtgtagtaatgattgaatgggctcccgtatattcaagagagacatttcctgcaagtgtggggaatttttagttttaaggtggaagatttcgtaaggtaggaggtttggagggagcggcgggcggtttgaaaacgggtgtcac

SEQ ID NO: 3279 - DNA, 391 bp, Glycine max
  Clone ID: LIB3028-022-Q1-B1-C10
gaactcatgaccaagattgacaggcgatacggcaaagagcttgagaaagagcccaagtttttgaagaacggtgatgctggttttgttaagatgattccaagcaaacccatggttgttgaaactttctccgagtatcctccacttggtaagtttgctgttacggacatgcgtcaaactgttgctgtgggagtcatcaagaacgttgagaagaaggatcctaccggagccaaagtcaccaaggctgcccagaagaagaagtgaatcgtgcgggctggttcatcaagggatgttggttacaataaatgttggtttcttttctgtactcttgtgtcgtcttttctaggtagcttgtttttcggacaaagtttgaagtctccagcatcatctcgca

SEQ ID NO: 3280 - DNA, 394 bp, Glycine max
  Clone ID: LIB3028-022-Q1-B1-C11
ctgagagggtcagccatgacccaaaccctctcattctctctctcaccttcccagaaaaccctagaaattaattaaaaccatccaatcttcttttctccatttccccgatttttttttttcatttctatttcaatcgcaacctcctcctccttccaagtcaacgcggatttcagaattctcgatccatgtcgtccgagatcgaggttgtcgaggaggtgcagtcccgcgacgagcaatcgggggcggaggagagcctccgtaatgacgtgtacacggcggcggcttacggggatttggagaggctgcagagattggtggagcaagagggttgccccgtctccgagcccgacggtttgggctactacgcgcttcagtgggccgcacttaacaaccg

SEQ ID NO: 3281 - DNA, 373 bp, Glycine max
  Clone ID: LIB3028-022-Q1-B1-C12
gcttgatgctgcaaacaaagctgtgtccaagattggagagcacatgtcaggtggttctagtggcggttcctcagctggtggttctcagggtggggatcaggctcctgaggcagaatatgaggaggtgaagaagtaagtcggggaggagtttgtatccactttttactgatttatttgtctagatcacaagttagagatgaatcatcttttttcatttagcatataatataaggttttttgtactaaaagatggagttcattttttaccttaaggccttttaaacttgtagtacttctggagaaccaaattatgcctgtttgaataacgatattcaaaattttgcctagtgactagtgacacattttttactct

SEQ ID NO: 3282 - DNA, 161 bp, Glycine max
  Clone ID: LIB3028-022-Q1-B1-C3
cccaattcacctgaaccctgcgcactacggcagtgggattattagagatggcagagaaaagggcacggcttgctttaagtggcgggggcatgagcaatgtgagatgacgggtttggatcctgagtagaatacgttgttcaaggggggcgtggtgtgcactg

SEQ ID NO: 3283 - DNA, 161 bp, Glycine max
  Clone ID: LIB3028-022-Q1-B1-C4
agagaaagctatggtcgagtctagattcagggaacgtctcctccactccaggtgggttttgaaaaagaagtgggtgtttgggaggctggatgattttagcaagaagcaacttccacataatgtgacgtggggcttgagcttgagaggggccatggaacaca

SEQ ID NO: 3284 - DNA, 159 bp, Glycine max
  Clone ID: LIB3028-022-Q1-B1-C5
gagagttgtgaagaaggcacagaagaatgtttgataagaaggactggagctgcacaggtcgattatatctacactcagcagcagaaacccaaacgttagtggcatcatcgcaggaccttcttcggggaccaaatataagtggagagtatataaatcaat

SEQ ID NO: 3285 - DNA, 300 bp, Glycine max
  Clone ID: LIB3028-022-Q1-B1-C6
tgacggaggagcagtttgccaaatagtttcagacgtgtgacactacaagattggagtaggtgctgcagcttgaccagtgtggaaggtgtataccggatgatgcattacttggtactttgagacagtcaccaaggtggttgcgagagttaattacactgtccgcgcagtggtgcgtgccgtctgtcagggaaggggggggatgtgcgagcttcttctgccccagcactgaggtgcaggaatctaggccagtgctcccttcgcgcatctgccagtattaatattttggctgattcagtggga

SEQ ID NO: 3286 - DNA, 135 bp, Glycine max
  Clone ID: LIB3028-022-Q1-B1-C7
ctcgagccgaagcggctcgagaaggaacaaagcttctagttcattggcgtgcgcaccgtttcgccctcggccgtttgggcggtcgcatgccgactgttcggtaaccccccaacaaaactcaaagccttttttgtt

SEQ ID NO: 3287 - DNA, 362 bp, Glycine max
  Clone ID: LIB3028-022-Q1-B1-C9
tgctgccataacagtgggtgattttgacaccatggattgcacacagcacttactctttcctagtgagtgatgcaaaggagagggaccttggttacttcctcatcttcccttatatgatggtgaggatgctgcatgaccaagttcggatcacactctctcgccatcgaactgccaaaggcaaaaacagaattgttgacaagggcattgagtttgaacaagttgatcgagaaagcaattgggatgaccagatcttgttcaatgggatcatattttatataggttatatgttagttccagagagttctcacatgcccttgtggagaacagatggtgtacttatcactgctcttttacatgctgga

SEQ ID NO: 3288 - DNA, 280 bp, Glycine max
  Clone ID: LIB3028-022-Q1-B1-D1
gaaatattctacaacttataacgaatgaggattttgtcagcgtttatcagccggggtttaaggaatcatggagggccaagagttagaagagcaagcttctttgcgaattcgcatgatccagcaaaaggtgcatcaatggtttacaggccgattaatgagttattagcaggaggaaacccaacaatcgagagggagacggagatgggagaaatcatggcacaggattttgctaagggggttgaagagaagtcgggcttgagagcgttcaggttgtgaaatg

SEQ ID NO: 3289 - DNA, 393 bp, Glycine max
  Clone ID: LIB3028-022-Q1-B1-D10
ggataactgaaggtgatcatcattttagatattattataagaagttcatcaaataattgatcagaaatattcgatggggagctttgaaactgagctgaatcttaaggccacagagttgaggttgggattacccggctgtgatgaaactcatgacaaaagttcatccagtagtggatctgttgttagaagcaacaagagatcttcaccagaacccagtgtggaagagtccaggtgcaactctaatggttcttcagattctaccaccacaagtgatcatgatgaagacagtgtccaacctgcaaaggtacaagtagtggggtggccaccaattagatcttttaggaagaacagtctgcaacaacagaagaaggtggagcagcagggtgatggaag

SEQ ID NO: 3290 - DNA, 375 bp, Glycine max
  Clone ID: LIB3028-022-Q1-B1-D11
gttttagtagctctcacagttcaaattttctacatttcacccatagatccagttttgctggatataaaacctgctccttcaaccaaagacaatcaattacagaatatcattaagcttggagaaggacttttgaaggaaccagaagatgttgttgtagataaagaagggactctctatacagctactcgagatggttggattaaaagattgcgcaggaataatggaaaatgggagaattggaagcatatagatagtcatactttgctaggaatcgcaacagcaaaagaaggtggtctcattgtttgtgatacttccaagggtttgctcaaggttacagaagaagatggttttagtgttcttgtttcacacgtaaat

SEQ ID NO: 3291 - DNA, 395 bp, Glycine max
  Clone ID: LIB3028-022-Q1-B1-D12
aatatgaaaaacgccaagaaatggctgcagctgctttggcatataaatgcttggaggtggtatacatgagactggtttactgtaaacattctagcataaacagggatcggcatgagttgcaatcaactctacaaatggtttctcaaggtgaatctccttcgtcttctgcatctgatattgataatttaaataacctggcggtagcggacaaggctactttgacaaggggttctaatactcatgttcctagcaatcaagtcatatctgctcggaatcgcccaaatattgtcaggcttcttgattttactcaagacataaatcttgcaatggaggcttctagaaaatgcaagaccacttacatggctgctagtttgaacatggaagattcatggaat

SEQ ID NO: 3292 - DNA, 163 bp, Glycine max
  Clone ID: LIB3028-022-Q1-B1-D3
tggtgttgctctcacgactaatggaagtgctcaagagaagcctgggagggctctgtctaggaggaaactgggaattcagggagggggagcagtaccagcccgctgaactctttgaagcaacaatggggcaagtgagagaaggcgcagggtctttcacatctct

SEQ ID NO: 3293 - DNA, 161 bp, Glycine max
  Clone ID: LIB3028-022-Q1-B1-D4
gggaatttggccaaggggatgtcaattgttgcatcacgagctacaagattgccgagatatgcttcagttgcgagagaaggggatctaagtgacctattggctggaggggaggctatttcaactctcgttaatgttgttggtgttgggagtggaattcaatt

SEQ ID NO: 3294 - DNA, 328 bp, Glycine max
  Clone ID: LIB3028-022-Q1-B1-D5
gtcgtttgattgtgaagtgagttcccattgagcagatgttggaggcaacaacgtcgacggcagctcctcgaggagtccggcaacctcaccaaagcccccaaaaagcccttgtcagtttttcccctaatactaataattagtgagtaacgattaacgatttagaagagcaacaacgacgacgacactttgagacaggtaagcctccaaattcctatctcgcttcgaatggaatccacagctctgtcgcgcataggcctggcgggcctggccgtgatgggccaaaacctagccctgaggatcgcggggaaggggttgccgatctccgtct

SEQ ID NO: 3295 - DNA, 136 bp, Glycine max
  Clone ID: LIB3028-022-Q1-B1-D6
tttatattcacgacaacagagtttcgacagagatcataatgaattcgtagtgcatgatcaattgccaccttttaattgtgaggaacttgtaaatcgtagaaacaattttcactcatccatcgaactatgcaaggga

SEQ ID NO: 3296 - DNA, 293 bp, Glycine max
  Clone ID: LIB3028-022-Q1-B1-D7
ctcctcttcttactccttacaagatgggcaaattcaatctgtcccagggagttgttttggcaccgctgaccagacagaggtcttacgacaacgtcgcagaaccccatgccatcctctactactcccagagaacttccaagggaggcgttctcattactgaatgcactggcgtctcggacacggcgcaaggctaggcggagggcccggggatatggactacggagcatgttcaagcttggaaacccattgtcgatgccgtcgacgccaaaggcggtgttttcgtctgtcagatt

SEQ ID NO: 3297 - DNA, 292 bp, Glycine max
  Clone ID: LIB3028-022-Q1-B1-D8
ctacacgcaagtttcatttgaaggtgtactcactgagacatgtggcacagcacgatatcatggtgtcgtggatgttggggacggtacagctaatggtcatgattattggatcctcaagaattcatggggtcctacctggggagaacatcgctacatcaaggtagaaggaaatcctgctaacagcagatcaggcaggtgtggaattgcaattgagccatcttagcaccttaagaatggtccagatcgagctaatcctggagcatcaaccccttcacctgtgaagccaccaaat

SEQ ID NO: 3298 - DNA, 427 bp, Glycine max
  Clone ID: LIB3028-022-Q1-B1-E10
cccttacttaaacccggaattcggtccaagggctcaaggcgcttttataccaggtttcatgacattcatgtccatagggggcttcccgtctttcatagaagaaatgaaggttttctacaaagaaagactgaacgggtattatggcgttggagtctacattctttcaaattttctgtcttcatttccctttgtggcagtgatgtccattgctacggggacaataacctattatatggttaggtttcgcacagaattttcacattatgtgtatatctgtctggatcttattggctgcattgcggttgtggagagctccatgatgattatagcttcactggttcccaacttcctcatgggattgataattggagcgggatatattggtgttatgatgatgactgctggctatttccgtcagatccctgat

SEQ ID NO: 3299 - DNA, 401 bp, Glycine max
  Clone ID: LIB3028-022-Q1-B1-E11
caaaacactcataacacaaagcacaaagcaaagctcatccttgagttaaaaaatggcagcagcttcttccatggctctctcatccccatccttggctggcaaggccgtgaagctgggcccatcagccccagaagtgggaagggtgagcatgaggaagaccgtcaccaagcaggtctcctcaggaagcccatggtacggcccagaccgagtcaagtacttgggcccattctctggcgagcccccgtcctacctaaccggtgagttcccaggcgactacggctgggacactgctgggctttccgcagacccagaaaccttcgccaagaaccgtgaactcgaagtgatccactccaggtgggccatgctcggagccttgggctgcgtcttcccggagttgctgt

SEQ ID NO: 3300 - DNA, 313 bp, Glycine max
  Clone ID: LIB3028-022-Q1-B1-E12
atcaaccatgctggatccgcatcttcactcatagacagtggctgtggatctgcccctacagtgcgcactaacactaattggtgcagatcacgtgatgcactgtgacctgagtacataccatctctcacacacaaaagttttcatcatacgaatttgtagcagagatgtacaagactgggcgtcaagagtagtgatgtttacagattaaatgagatgtgctgagtgtacgcttcacatcacgtaaatatgtccatcaatgtgcattggatctgccgacgtctcttcgtgacatgctgtgtgcgtatccacctcc

SEQ ID NO: 3301 - DNA, 280 bp, Glycine max
  Clone ID: LIB3028-022-Q1-B1-E3
caacaagccccaatgcttggggcaaaggactactacagtggttggaattttccaagttagggggaattaccatccaagggggtggcagcattgatggaggaggctcagtgtggtggcaagacaatccatatgatgatcctagtgaggagcaagaaaagctcattggcccgttgaaccacacagtatggaggcccggccggcgagggcgcgattcaaagtgagatgggaggaaagatgccagccgtcaagccaactgcattgcgggtctatgggagtttta

SEQ ID NO: 3302 - DNA, 287 bp, Glycine max
  Clone ID: LIB3028-022-Q1-B1-E4
gccctctcttcaggtcaccatctagactggaatcatggctgatggaccacggcatccatcagttgttcagaagctagctggagaggcgtacctggtgtcgacgcttagccccaactttaactctacgaattattctgcaactggggcgtgcgtcaatggcggaaggcaggcgcctggggtgggtgttggggcacgtgtggcgcgagttgcggtgcatgctcgaggagagaaaggggggagtggatgtcgagggggttttcggaggggtggagtatccgctgcggtgt

SEQ ID NO: 3303 - DNA, 180 bp, Glycine max
  Clone ID: LIB3028-022-Q1-B1-E5
cacaaatagccctcttggccttcaatttcgtccaattccaaatcatgggtagctcgtcagttttcacgtcttacattgtgttgagtctagtgagggcactagcaattagcggtttcaatttcaaaggggcagaggcagcacgtggcttctttgtgtttggtgagtctgtcgtggacaatg

SEQ ID NO: 3304 - DNA, 294 bp, Glycine max
  Clone ID: LIB3028-022-Q1-B1-E6
cccaattcttccccctccacccacccagcatagctctctattcctaggtagtagcacgcctcacattaccttgtgtcagcagctactttgactccgttaccataccattacaataattatcaaacctaaccagtaaaaatcgtgaccgtggaggaaatccggaacgcgcagcgttgccatggacgcgccacgagcgggggcggtcggcaccgccacgccgtcgaactgcgtgtgggaagccgattacgcggactactagtgtgggcagtaccaacagcgagcacatgactgatc

SEQ ID NO: 3305 - DNA, 179 bp, Glycine max
  Clone ID: LIB3028-022-Q1-B1-E7
tagaggactcatttggaatttcggatggtctcaaggaaaacgggtcgagagaacgtgtgaggtcatcggattccagggcaggtggagagaaaatgcgaagggatcgactcaatgacaggtttatggaactgtggtctagcgggggccctggaatgcctctggaagggggcaaggctgtg

SEQ ID NO: 3306 - DNA, 399 bp, Glycine max
  Clone ID: LIB3028-022-Q1-B1-E9
tctggaagtaattattggaactaaggatctatagctttagtttttacttggttctgtatgtttgtttaacaatgcaagctagattctgtcaataaaaaggtacatttcagtccacaaatacagattgatgcaagacagaatccatttcaaaccagaacccgttttcaatcttcaggtacccctgcagcgaaaactctttcatggcatttagcatcagagacaaagtctaccttaaaagggtcttcgcatgcttccccttccccaaagtaagtttaggaatttaatagtctgtgaccgtaccaaaactgctgcattttgtgtttttgatactcagcatagagggtattatatcagcatagatggtattatattacactttcacattgacttttgcagcac

SEQ ID NO: 3307 - DNA, 280 bp, Glycine max
  Clone ID: LIB3028-022-Q1-B1-F1
gtcctcccacctcagtgattcatgtagccagcgattcctctccaattatttcttcgatataggttcatgaatgcaggcatttagggcaacagaagtgagtcagatcctaaagcatttgaagttcaaaagcttgcatcttattgagaagtgtttccttacaatattcgcgtgcgaagtcgcgacgcatgggggaacggtggggtgtgcgcgtagctggcatcaagaagacatcaattgctggaaagcaggcagcgtccaaagcggtggaggttccaaaggg

SEQ ID NO: 3308 - DNA, 431 bp, Glycine max
  Clone ID: LIB3028-022-Q1-B1-F10
cccttagttaaatccggaattcggtccaaaaaaaaactgttttaagccgtaaaacttttgatcaaaggttgtaagtaatttttttttaaaagtaaaaacataacggtttagttccttttaacattaaaaacataaaaaatgatgaattcttagaaatgaactaaatttacacaatttttaaaaaattgcgttcaactttatcaatatgaaagtataacaactttgactgcgtttgaccaaaggtacagaaactaaaacaacatttttaatattaaaaaaaaatgattacatttcacataatttgaatagttttatctcattattttccgttgagtcatgctcgagtcacttgacattctttttaataattgaatttcaatactacgaaagtatgctttgtttgtgttttgatatatcaattcatcactact

SEQ ID NO: 3309 - DNA, 395 bp, Glycine max
  Clone ID: LIB3028-022-Q1-B1-F11
cggctcgagcaacagtcctccatctacaatcatacaaacctttattctaagttctgatggctctgcgatcattctcttacgatgtgttcctcagcttccgaggggaagatactcgttatggtttcactggctatctctacaatgtccttcgggaaaggggaattcacaccttcattgatgacgacgagccccaggaaggggacgaaatcacgacagcacttgaggcggctattgagaagtccaagattttcatcatcgtgctctctgaaaactacgcatcttcctccttttgtttaaactcactcactcacatccttaactttactaaggagaataatgatgtgttggttttgcccgttttttatagagtgaatccttcagatgtcccgacacac

SEQ ID NO: 3310 - DNA, 311 bp, Glycine max
  unsure (1)..(311): unsure at all n locations
  Clone ID: LIB3028-022-Q1-B1-F2
aattcggtccaaggttctaaccattattggttattgcaaaaatgaactttcttgtaagttgtatgacaaatatagacaaatctggcagcattccacggggaaggatgaanggaacagtgatttagaatatcttgtgaatagtttctcagcgcttgaagcgaaggtccttgaacaatatacgtttgcaaaggcaaacttgatcagatctgctggcatgaattatctgctgcattctggcattcagtgtggagcagcacctgcagttaaaggtgttccggatgcagcagtagagttgctgcacacattggtag

SEQ ID NO: 3311 - DNA, 166 bp, Glycine max
  Clone ID: LIB3028-022-Q1-B1-F3
aaggtcagtgaaaatggcggtacccttgctctccaataggatcgtgaattaacgcctcaagatgtttatacgcccccacagtgatcgcaagatctccgtcaaaccaatctggcgcagacccaagggtattgattctcatgtcatgacaaagtgcacatgatgcact

SEQ ID NO: 3312 - DNA, 291 bp, Glycine max
  Clone ID: LIB3028-022-Q1-B1-F5
aaaggaaggggctttttggttaagtcatgggctccgcagccacaggttctggcccagcaatcaacgggaggattcttgaggcagtgcggctggagctctatactggagagcgtggtgaacggggtgcctttaatagcctggcctctgttcgcggagcagaggacgaacgcgttgatgctcatgcgtgaagtcaaggtggggctgaagcccaaagttgccgaggacactggacttgtccagagccagggagtagccgcggtggtcaagtgcctcatggaaggcgatgaaggg

SEQ ID NO: 3313 - DNA, 345 bp, Glycine max
  Clone ID: LIB3028-022-Q1-B1-F6
gtgaatgcaagcttgatatcacgccattggccacggggatcagcagcacctggtgccaatggcgtgaatgcaagcttgatatcaaaaactgctcacctaatcaactcagtgtaatgcaaggattcaggacagatttcttaagggcatttagtgtggttggcaacgccgcatctaaagggcattttatagatggttgctatgcacactgccaaactggaatacaagagacatggctgagaaatgactccccagtggtggccaagacatcaattgcaaaggcagtgggtgattggttttatgatcgaaggcccttccgtgagatagattgtgcctacccttgcaacc

SEQ ID NO: 3314 - DNA, 343 bp, Glycine max
  Clone ID: LIB3028-022-Q1-B1-F7
agaggttttgacgcaacacactttcactgagaaaggatctctatcgaccaaggagcagaataaaacccttctctctggtaagtgaataagagaagggcgtcagatcggaaacttcacactttcgaggaggtggcaaaggaggaggagaccaaggattgctgggtcagcagttctggcaaggtgtagggtgtgacgggagtgatgggagatcatcccggaggtgatgagggtgtgtgatctgcaacagggaaagatggagcgagtgattttgaagatgttggagacagtgattctgctagagagagggtggaaagagaggacattggtgagattgagggagcaa

SEQ ID NO: 3315 - DNA, 343 bp, Glycine max
  Clone ID: LIB3028-022-Q1-B1-F8
cgcgttggtgcaaagcatccttcgtttcaatttctctctctcagcgctttctgcaatcgaacctttcatctccaaagggatccacaggccgaaggagaaatggggctgacattcacaaagcttttcagtcggcttttcgcgaagaaggaaatgcgaattctgatgggtggtcttgatgctgctggtaagacgactagcctgtagaagctcaagctcggagagatcgttaccagaattcctaccatcgggttcaatgttgagactgtggaatacaagaacattagcttcactgtttgggatgttggtggccaggacaagggtcgtcccttgtggaggcactact

SEQ ID NO: 3316 - DNA, 378 bp, Glycine max
  Clone ID: LIB3028-022-Q1-B1-F9
tacaccggttagcaactgaggcgggatttgaactgaatttcttgtcccattttggtgggaaggtctttcccaatgagaaaactgaggacctagagtttttgattggtttggcccataagaaattattgaaagctttctgtgaagaaagcatcacttcaaagaagcaaaattttcagcaaaagatagcttggccacattgggactttttacatatcttggaagaaggactagaatatttttgtcagcaatgggcattaaggatcttgacggagtaattatgaacttcctcaggttgatctctttgcttgtttgttacattttaaccattccaattttcaagataccgatcctgaagattcaatgctttgattttagtta

SEQ ID NO: 3317 - DNA, 348 bp, Glycine max
  Clone ID: LIB3028-022-Q1-B1-G1
attttcctttcgtttcctttcattttccctcactttctcgctccccaaacggcccctctctctcctccaatggccgaccagctcagcgacgaccagatcgccgggttcaaggaggccttcagcctcttcgacaaggacggcgatggttgcattactaccaaggaacttgggactgttatgaggtcacgtggtcaagacccaagtgaggcagaactgcaggatatgataaacgaggttgatgctgatggcagcgggaccatcggtttcccagagttcctcaacctgatggctcgcaagatgagagacagcgactcagagggtgagcttaaggaggctttccgtgtgttt

SEQ ID NO: 3318 - DNA, 343 bp, Glycine max
  unsure (1)..(343): unsure at all n locations
  Clone ID: LIB3028-022-Q1-B1-G10
gcanaatgcaatatagaaccaattccagcacttctccaaggtgtcattgatcatcttattcagtggcaattacttcccgagtacaaaagaccaaatggttgtatcatcaacttctttgaagagggggagttttctcagccatttctgaaaccaccacatttggatcaacctgtgtcgactcttcttctctctgaatcaactatggcttttgggcgtatacttatgagtgaaaatgatgggaactacaaggggccactcacgctctcattgaagcaggggtctcttttagtgatgagaggaaacagtgccgacatggcgaggcacgtaatgtgtccatccccta

SEQ ID NO: 3319 - DNA, 402 bp, Glycine max
  unsure (1)..(402): unsure at all n locations
  Clone ID: LIB3028-022-Q1-B1-G11
tcgtccaaggccggttgcaaaagttatgagttgcatggtttaacccccaaacggggaactttttgaatgttaaatggagcacctgtggggactgcgggctgggaattgggccgtaacccggtgttaaacccgtttctttataaacccaacaagcgggtcgggatgagatttgaggtccagaacccgtctcatattccgaggatgtaccactccggtgccgttttgcttcgcgatgggcgagttcttctcgctgggagcaaccctcacacgtattacaatttcaccaaagtgttgtttccaacggaactgcggttagaagcgttttctccttggtatcttgagcccggattctctaacgtgcgtcccgcaatagtatctcctgcgtcncaaacaaaactcaag

SEQ ID NO: 3320 - DNA, 402 bp, Glycine max
  Clone ID: LIB3028-022-Q1-B1-G12
caagccaaaagaacaacatggacattgatctttctcctcagttgcccaagaaagtttacggtgccaatggtggctcctactacgcatggtccccctccgaccttcccatgctccaccaaggcaacattggtgccgctaagcttgctctcaacaaaaacgcctttgctcttcctcgttactctgactcttccaaagtcgcttatgttcttcaaggtagtggagtggctggaatagtgttgcctgaatcagaagagaaggttgttgcaataaagaagggtgatgccttggcactcccctttggtgttgtgacctggtggtataacaaggaagaaactgagttggttgttctgttccttggggacacttccaaggctcacaaagctggtgaattcactgactttt

SEQ ID NO: 3321 - DNA, 215 bp, Glycine max
  Clone ID: LIB3028-022-Q1-B1-G5
ggactctgctgattcttctgaagtaccaggcactattcaaatgcatcttttcatttgtaattttagttactatttgggtagttaagaaccagatgctgaaacttgtattttttcccttatcttagtagatttcccccctgagagatttttaaaatcttgtgatggcgcgtattgctttatgagggattggcgagggggggaagtttggggaagag

SEQ ID NO: 3322 - DNA, 333 bp, Glycine max
  Clone ID: LIB3028-022-Q1-B1-G6
tcttcctctcaccgagtcacgcactcggcttgactcgtacgaactccgatcgccccccgagtcacactcaaccagcacgaccgcccgatccgacgatgtctcgcgcctcctccgccgcagattccgccgcctccggtgagatcagactgttcggagtcagagtcgtcgtcgattccatgaggaagggcgtcagcatgagcaggctctcacagtacgagcatcctcaagacgggagcaacagcagggacgctctcgccgcgggttacgcctccgccgacgacgccgctcctcagaactccggccggctccgggagcggcagcgaaagcgaggag

SEQ ID NO: 3323 - DNA, 271 bp, Glycine max
  Clone ID: LIB3028-022-Q1-B1-G8
cggctcgagcttaaaaatccgttttttatttcccgtgcatggctttttctgaaattaattcttacccagatgaataagtgctttggaatttgtttctaagaaccccttgttttgtgggtaacttcctactttgtggtggaattggggtaatcgatctggggaagtgaagatgtcgactccggcgtaggagggacggaggagggattttaaaagattgcaacaagatcctccggctggcatcagtggggctccccaagagaagaagattatg

SEQ ID NO: 3324 - DNA, 393 bp, Glycine max
  Clone ID: LIB3028-022-Q1-B1-G9
agctactttggcttggctttctgaattttgggttttcagtgctgagagctgaacaagaagatggggggtggaaatcaagaggcagtcaagcagctgcagaccctgatggaaaatgtggatgatgagcagctgaagaatacattccagattatgcaccagggttatcaaacggaaacgttaatacggtttctcaaagctagggactggagtgttgccaaagcccataaaatgttaattgattgtttgaactggagggtggaaaatgagattgacaatgttttaaggaagcctatccctacggatttgtacaaagccatacgggattctcaacttataggaatgtctggttactcaaaggaggatctacctgtcattgctgttggtgttgggctc

SEQ ID NO: 3325 - DNA, 157 bp, Glycine max
  Clone ID: LIB3028-022-Q1-B1-H1
tgtctaacatctctccgtatccagtctattatcaaacatactcacaaatgaccattattatctctatttcagttcttacatggcaccagagtgtacttttatttatttatttttagatcaagagaagtcaacttccagtgaggagggggggggcgag

SEQ ID NO: 3326 - DNA, 402 bp, Glycine max
  Clone ID: LIB3028-022-Q1-B1-H10
tagtagagtaaccaaaaggagagtgcaataactcgttgtacattcctagtgtgtgggagagacatggctaagatgtgtgttttggtgttggttcttgctctggctgtggccacaagtgccagaaacgttcccaaccccaaggatgctggtcttaaggaccagaagaacttcatcagctatggtggagttggtggttattccgggattgggaacaatggactgccttttggaggagctggtgccggaatacgtggtggttttggcggaggtggtggacttggtggtggcctcggcggtcctaccggtgggatcggagggtttggcggtaccggtagcggtgtcggtggcggtattggtggtggcgttggaactggcgttggtggtggcagcggtgttcttcct

SEQ ID NO: 3327 - DNA, 399 bp, Glycine max
  Clone ID: LIB3028-022-Q1-B1-H11
cgcagaagcctcctctgcctcgcaatcatcggcattgtcgtcgccgccgtcggaggtcagtctccagcggcggctcccaccacttcctcggcatccccagccacagccccttctaaacctaaaccaaaatcacctgcgccagttgcttctcccacttcatctcctccagcttcatcccccaatgctgcaaccgcaacccctcccgtttcgtctcccacggtagcatctcctccgtctaaagctgctgctccagctccagcaaccactcctccggtggccacacctcccgcggccactcctcctgcggctacacctcctgctgtgacaccagtgagctcgccgccagcgccagttccggtgagttctccaccagcgcctgttccggtgagctctccccct

SEQ ID NO: 3328 - DNA, 388 bp, Glycine max
  Clone ID: LIB3028-022-Q1-B1-H12
ctatactggaataaggaaacatatctttaggaaagctgtctatgttgcatagaatactcccaatttttaatcttaggtaaaaattgatctttaaaggaggcattctatcggaagaaagcttaggtctattattgtgcagattgataccaagcgaatgtaaacttcttttgattttttgtttttgcaatctttgaaatttattctctgccaatgtgttagggtctgggacacgctgttctggcttcaattctctggtttcatgccaaatctgtagatttgaaaagcaaagcttcgataacatccttctatatgtttatttggaagctattttatgcagaatacttactcattccttttgttagatgaggatgcagcggcaatattgact

SEQ ID NO: 3329 - DNA, 352 bp, Glycine max
  unsure (1)..(352): unsure at all n locations
  Clone ID: LIB3028-022-Q1-B1-H3
tccatgtacctggactatggtcacatgnttcttctgagaaacttggtcattgggcggggcactcctagtcaaagtttatctggggactctatctccaagcatggggaacttaaccaacctccagattgtgcttctacagaataacancataagtggaccaatcccttcagagctaggcaaacttcctaagcttcaaacgcttggtgtcgctgacaacttcttcaaaggggagattcctccctctcttgggcacctggagaagcctcgaagacctgaggctcaataataacagtcttgttggtgaatgcccagagtcactgggtggcatgacccagcttaagtttcgtgattt

SEQ ID NO: 3330 - DNA, 127 bp, Glycine max
  Clone ID: LIB3028-022-Q1-B1-H4
atccggtccaaaaggccaatttaaaatggaggataaccaaggacaatttctgcacctgtgttgcaaaaaagacatgatgacaaaggttgatgtagcaaggggacctaatatgtttcactagtacttc

SEQ ID NO: 3331 - DNA, 345 bp, Glycine max
  Clone ID: LIB3028-022-Q1-B1-H5
attgatttctttggtgcactcagggctagagtatatgacgatgaagtgaggaagtggatttctggtgttggtgttgacttgattgggaagaagcttgtgaactccaaggaaggacctccaacctttgaccaaccgaagatgactttgagcaagctcttggagtagggtagcatgcttgtccaagaacaagagaatgtgaagagagtacaactggcagacaagtacttgaacgaggctgctcttggtgatgctaatcaagatgccatcaaaagaggaactttctatggcaaagcatcccagcaagtaagaattcccgttcctgaaggttgtactggtccaaatgcc

SEQ ID NO: 3332 - DNA, 313 bp, Glycine max
  unsure (1)..(313): unsure at all n locations
  Clone ID: LIB3028-022-Q1-B1-H6
atttaaccgaacaatccgatatttgcttcctaatggaatcaagtattaacccttttccctccgaatactccccaaacacanggaatgggctccaatcgtcgtttcaaatttaattttaaggttcttcgttacgcgttgtgtggcgttgtgcgtgagaaagtgcgcgtggtgaaaaggcatggcttcgcagctcctgagaggagccttcggaagtcgtttccttgcaaaccctagggccttctcctccggtgcttccagtcggatccgcgccactctcttccccggcgacggcatcggccccgagatcnccgat

SEQ ID NO: 3333 - DNA, 343 bp, Glycine max
  unsure (1)..(343): unsure at all n locations
  Clone ID: LIB3028-022-Q1-B1-H7
cgagaacaccgcaacgatgaaagagggtcgggccgaggcctccatgggaaggttcggagccctcgacgagctcttcgagaagacccgcgtccgacgaaaggacgtgggtgtcctagtagtaaactgcagcatcttcaacgcgagaggatcgctctcagcaatgatcagaagccactgcaagatgagagggaagagtcggggggacagcctcggaggaatcggttgcagcgcggggatgattggtgtggagctggccaatgagattcgtcaggcgaacccaaataactacgcggtggtggggaggagggggatgggggngtggaactggtaccaggggaaggat

SEQ ID NO: 3334 - DNA, 131 bp, Glycine max
  Clone ID: LIB3028-022-Q1-B1-H8
tttaaatggaaaagctccatacttccgtcctcgcccttgtaatccttcgtgccatactatctcaagaatgattactcacaagtatgaacactaatcacggatcacataaatgttgaaatttcctagttaca

SEQ ID NO: 3335 - DNA, 396 bp, Glycine max
  Clone ID: LIB3028-022-Q1-B1-H9
gcatggaggtggttttacaatgtagttggagattcaaggtgccctatctctgacacttggtggcaaacagaaacgggtggcttcatgataactccactaccaggtgcttggccccagaaacctggttctgcaactctccctttctttggagttcagccagtcattgtggatgagaaaggtgttgaaatagaaggagagtgcaatggatatttgtgtgtgaagaaatcatggcccggggcattcagaactctgtatggtgatcatgaaagatatgaaacaacatatttcaagccattttccggatactatttcagtggtgatggttgcagcagggataaagatggataccattggctcactggaagagttgatgatgttatcaatgttagtgggcat

SEQ ID NO: 3336 - DNA, 275 bp, Glycine max
  Clone ID: LIB3028-023-Q1-B1-A1
gttccattaacagcaacagtaaggagataaccatggagattccaagcttggttcgactttacaaggatggcaccattgaacgcctccaaaactcaccaattgtgccacccacgcttcaagatccaacttcttccaaagacgtcgtcatctctggtgaccccctcatctccgctcgtcttttccttccaaaccggattcgatcgcagcaggagggtcatttcctccccatcgtggtctactttcacggtggaggtttcgtcactgaagctgccttc

SEQ ID NO: 3337 - DNA, 409 bp, Glycine max
  Clone ID: LIB3028-023-Q1-B1-A10
acgtctactctaaatgatgactctcggggcaattccaattccacattttcaagaaataaggaggcaaaaatgttcatatatgaattggaattatttgttttcttagtaggcctatcctgatgccaaaggaaatgagatcggaattcctcggggaattccaattccacattttcaagaaataaggaggcaaaaatgttcatatatgaattggaattatttgttttcttattaggcctatcctgaagccaaaggaaatgagatcggaattcctcggggaattccaattccacattttcaagaaataaggaggcacaaatgttcatatatgaattggaattatttgttttcttattaggcctatcctgaagccaaaggaaatgagatcggaattcctcgggggtaccgagct

SEQ ID NO: 3338 - DNA, 370 bp, Glycine max
  Clone ID: LIB3028-023-Q1-B1-A11
cttgcaacggatggccctgggggtgtggtagcaatgaactccatgttagttgacatgcaaggttcaacaggtggatattcctccatgatgggggtttcttcaatgtcaatggctcgtcaaatatccatcgacaacgtgccggggagggaggttggagatcaacaaaggaagttgtcgtccactcttgctcaggcttggaaggatgacattgatacaggaaatttggtgtcatcagtggttgaattatttggcgaaagtgtgttgccgtttgttgtttcaaaccctgaagcatgtatgtttttgtagcactagttgcactgtgtaggtatttgttttttgcatgtgaaagtgcatgcaataaggtggcatg

SEQ ID NO: 3339 - DNA, 369 bp, Glycine max
  Clone ID: LIB3028-023-Q1-B1-A2
cataatttcgcatgttattcgacatagtttgggtggatgaggtattgtaaatgtaaataaagtccactcgatgaaagcaacattaaaataaaatctatgaaatgctcgagaaaagaagcaaaaaagagaagaagagaagagagcaaaaaagatgtggtcttgcccaaaacacgcgacgccgtttaacaaggctcttgtagttattccctccgtctcagccaccacatggcgacagcgccacggcgtctccgccaacgctaagcaacaaggtgagaaattgggttacacccttttggccactctcgaatccaattcgactccaattccgaaagcagcgcaagaagaaggcgagattagtgggtctgatgt

SEQ ID NO: 3340 - DNA, 339 bp, Glycine max
  Clone ID: LIB3028-023-Q1-B1-A3
agttagtacacaaaagggttacttcagcttccacatatcttgaagaattgatcaatgggcaagtctgtcgttgagaagctactttggatggcaactgtgtgcttggcgctgggtgtaatttccattactcccaaagcccaagcagcagtgacatgcacccacgtggtgagcaacctcaccccatgcatttctcatgtgctcaatggtggcataaccgtgcctggcccttgctgcaatgggatcaagaccctctttaaactcgctcacgccacaccataccgccaaaccgtttgcaaatgcacaaagaacgctgttagcgcgttccattatggcaagtcc

SEQ ID NO: 3341 - DNA, 398 bp, Glycine max
  Clone ID: LIB3028-023-Q1-B1-A4
atgcgtccacgtctactctagatgatcccctcggggaattccaattccacattttcaagaaataaggaggcaaaaatgttcatatatgaattggaattatttgttttcttattaggcctatcctgaatccaaaggaaatgagatcggaattcctcggggaattccaattccacattttcaagaaataaggaggcaaaaatgttcatatatgaattggaattatttgttttcttagtaggcctatcctgaagccaaaggaaatgagatcggaattcctcggggaattccaattccacattttcacgaaataaggaggcaaaaatgttcatatatgaattggaattatttgttttcttagtaagcctatcctgaagccaaaagaaatgagatctgaattc

SEQ ID NO: 3342 - DNA, 110 bp, Glycine max
  Clone ID: LIB3028-023-Q1-B1-A5
tgcagatgtttttttcgtttctactgccaactcatatgggagactcttatatgaggctgttgcacttgtattttattttatataaataaatataaatataattatattat

SEQ ID NO: 3343 - DNA, 366 bp, Glycine max
  Clone ID: LIB3028-023-Q1-B1-A6
ctcgagccgaatcggctcgagcggctcgagcagccacttcttctcccagtttcagctctcccctctctcttcttttcctcggctctggttcggtaaggcgtagggggttgttattattcttcataatggttgcaacagctgctacggcgtcgtttctccctgtgccttcgccggacgctggaaaagggaaacccaagggtggtggtggcggcggcgtttctgtgaacctcggaggactcaaagagaagcaaggtttgtgcggttgcttgcaggtcaaggcaaatgcacaagcccctccgaagaccatggagaaggttgagaatgatttgccatggttgccgtcgtcgtcgatttcgcacgccccga

SEQ ID NO: 3344 - DNA, 371 bp, Glycine max
  Clone ID: LIB3028-023-Q1-B1-A7
ccactcttaatttctctctgccttgcccatttacacacctctccaacctttcactttcagctttatttgaatccctctctctcctttccaaatggccaacgttgaggttgcacatcaaacaccaacaacagttccagaaaatgaaacaaccgaggtaatcaagacccatgaaacaaccccgggaccagtaacaaccactgaaggtcctgcaacagaacaagcagcaactgaaggtcctgctcaagaagaacaacaagcaactgaagttcctgccccagaatcaatcaccgaagcaccaaaggaagaaaccaccgaagcaccaacaacagaaacagtagaaacaacaactacagaagaagccaagccagagg

SEQ ID NO: 3345 - DNA, 384 bp, Glycine max
  Clone ID: LIB3028-023-Q1-B1-A9
gaattctccaaacactctagaatttgcatgcactgttcttcatacaatggcattacgcgagcttcttatgatggggatattgctgctggtatgtcttgctaaggtttcatctgatgttaacatgcaaaaggaagaagatgaagaacttcgctttcctaatcaccctcttatcgtgagagacgggaacagaaggctaatgcaagacataggtaagcaaaacaaagtattttggatgctttattaggttaactttgatcctgtgcttccggttttaacttttagattcttactaactagtctccttagtgacattttttaaaaaaaaatttaaaaattatcataaaaatcacatgaaagcctaaaaaaacacaagcaatgttattt

SEQ ID NO: 3346 - DNA, 348 bp, Glycine max
  Clone ID: LIB3028-023-Q1-B1-B1
aattgaagaaactcttgaaaaggttgtcaagttgcttgcctatattagtgacaaagatttgtttgctgaattttataggaagaagcttgctcgaaagctcctttttgacaagagtgccaatgatgatcatgagagaagtattttgacaaaactgaagcaacaatgtggtggtcaatttacctcaaagatggaaggaatggttacagatttgacattggcaaaggagaaccaaacaagctttgaggagtatttaaccaataatcctaatgcagaccctggaatagacttgacggttacagttttgactactggcttctggcccagttacaaatcttttgatctcaatct

SEQ ID NO: 3347 - DNA, 394 bp, Glycine max
  Clone ID: LIB3028-023-Q1-B1-B10
gttcgagaacacgagcagcgaggctggaaagaccatggctaaggttctgaacgcgtctttggagctcagcaacaacgcgttggacatagtcaacggtgtttcgagtctcttcaagggtcttaacttgagttccttcagcgtcaacagcaacaggaagcttctctcggaggaaacggctttggtggatgggttccctacgtgggtgagtgaaggacagaggaggcttcttcaggctgtggaccccaaacccgacgtggttgtggctcaggatgggagtggacaggtgaagacaatccacgaggctcttaaattggttcctaagaagaacaagaagccttttgtgatttacatcaaggccggtatctacaatgagtatattatcatgaacaagcac

SEQ ID NO: 3348 - DNA, 382 bp, Glycine max
  Clone ID: LIB3028-023-Q1-B1-B12
gacgagtgcaaagttaaggacaacgcttttatgattgcttttgcctgcatccaaattcttctaagccaaataccaaacttccataagctctcttggctctctatcgtagcagctgttatgtcttttgcttattcttccattgggcttggcctttccataggcaaaatcataggtgggggacacgtgcgaacaaccttaacaggggtggaagtttcgggaacggaaaaggtttggaaaatgtttcaagctatcggtgacattgcctttgcttatgctttttctaatgtcctaattgagatccaggacacactgaaatcaagcccacctgagaacaaagtcatgaagagagcaagtttgattggcattatgactacaacattgt

SEQ ID NO: 3349 - DNA, 350 bp, Glycine max
  Clone ID: LIB3028-023-Q1-B1-B2
cgcaatttgcgcgcactccgtcgccgttgccgacacctcctccgcgtatccttccatccccggcacggaaaccggtgagtgctccctccgcggcgtgggcgtgggcgacggtgttctggttcctccacggcgagaagtatacgaggaggggcgaatcttcgacatcactcacagatatgtccccgagatgccggtgtgggactcgacggaggggctcgggcaacacttcctgtggctcgataagagcatgaagaatggctcgctcgctaacagctctaacatgaagctcggtgttcacaccggcacccatgtcgacgcgcccggtcacttttacgacaattactacgacg

SEQ ID NO: 3350 - DNA, 363 bp, Glycine max
  Clone ID: LIB3028-023-Q1-B1-B3
gcagcagtatgtcacatactcacagattcaccatccttctcagtccatggctcccaattctgctgcccctggccaattatgcctttggctatgccggttctgctcatgctcgtgtatagtactctcaacctatggcacccacaatgccttcacagtaccacactatgatgaatgcacgaagggtcagcgcagcatccctcagacaccgttgagcagcaccaggtacgaacctcacaaccattataagccagtccttaagggtcgcagagccaattttgctaaaaatgggtttgtttccctttaagtttttatatgcaattcttgtggtcatgtttgataaaactgtttgtgggaagtatttgg

SEQ ID NO: 3351 - DNA, 358 bp, Glycine max
  Clone ID: LIB3028-023-Q1-B1-B4
aaacactctgttctcgtcgcatgcacataaacaataacaaatggcttccacaactatgttgttgctggtcgtgttcatgattctatgtatatcacacccctcatttcaaatggttcttgtgcctttaacacacacactttccaaagcccaattcaacagcacccaccaccttctcaaatccacttccacccgttccgcaaaacgcttccgccgccaactctccctcccactctccccgggcagcgactacactctctccttcaacctgggcccgcaggcccaggcccatcccattacgctctacatggacactggcagcgacttagtctggttcccctgcgccccttttaaatgcata

SEQ ID NO: 3352 - DNA, 371 bp, Glycine max
  Clone ID: LIB3028-023-Q1-B1-B5
actcataacacaaagcacaaagcaaagctcatccttgagttaaaaaatggcagcagcttcttccatggctctctcatccccatccttggctggcaaggccgtgaagctgggcccatcagccccagaagtgggaagggtgagcatgaggaagaccgtcaccaagcaggtctcctcaggaagcccatggtacggcccagaccgagtcaagtacttgggcccattctctggcgagcccccgtcctacctaaccggtgagttcccaggcgactacggctgggacactgctgggctttccgcagacccagaaaccttcgccaagaaccgtgaactcgaagtgatccactccaggtgggccatgctcggagccttgg

SEQ ID NO: 3353 - DNA, 360 bp, Glycine max
  Clone ID: LIB3028-023-Q1-B1-B6
aaagcaactagaaaaaaaaaaaaagagaagaaaaaaaaacttggttttatcttctttgttattattatattcacttcttcaatatcttggttctttgatattattattcgattgagcaaaaaatgggagttccagagagagaccctcttgcacaattgagcttgcctcctggatttagattttatcccactgatgaggagcttttggttcagtacctttgccgcaaggttgctggccatcatttctctcttccaatcattgctgaagttgatttgtacaagtttgatccatgggttcttccaggtaaggcagcgtttggagagaaggagtggtacttcttcagtccaagagacaggaagt

SEQ ID NO: 3354 - DNA, 364 bp, Glycine max
  Clone ID: LIB3028-023-Q1-B1-B7
ttggaaaagaagaagaaagatatgagttcaatggagaatgctgtacatgagttggagaagaaatgggcacaagttcaggaaaatgcacttaaacagccttcccctgggcaaagggagaagacattggataaacacctgcatggtctaattgagcaactagcagttaaacaggcacaagctgagggcttacttggtgaaattcatctgaaagaaatggagctcgaaagattgaatgggctatggcgacgaacggagagtagcaattcagaggcgaacactgctgctaggaatcgtttcagtaaaggctcctctgataagttacatagtttgtcagattacgaaggtcatcagaggcttccttatc

SEQ ID NO: 3355 - DNA, 367 bp, Glycine max
  Clone ID: LIB3028-023-Q1-B1-B9
ctatttgagttttgggagcatgaacaagttccctactcctcaacttgttgaaatagctcatgcccttgaggattcagaccatgatttcatttgggtggttaggaaaaagggtgaaagtgaagacggggaaggcaatgactttctccaagagtttgataagagagtgaaagcaagcaacaaggggtatctaatatggggttgggcaccacaacttctcatactagagcatcatgccattggagctgtggtgacacactgtggatggaacacaataatcgaaagtgttaatgctggtttgccaatggctacttggcctctgtttgctgagcagttttacaatgagaagttgctggctgaggtgctgaga

SEQ ID NO: 3356 - DNA, 140 bp, Glycine max
  Clone ID: LIB3028-023-Q1-B1-C1
tgatgacactgatgatgatactgttatctcatagtcatacaggtgatagttttgaactatgttatagtaaatggaggtggcatactgccatgatgaatgctaattttttagtcattaaattctctttatttttctttgat

SEQ ID NO: 3357 - DNA, 365 bp, Glycine max
  Clone ID: LIB3028-023-Q1-B1-C11
attttcagttcagtgttggctcacttcatattaaaagagaaattgcacatttttggcgtgcttgggtgtgctctgtgtgtggtgggatctacgtctattgttttgcatgcaccgaaagagaaagacattcattctgtcaaggaagtgtgggaacttgctacaggaccaggttttattgtctacatttgcgctatagtgatattagtttgcgtccttcatttccgttttgtgcgaagccatgggcagactcatatgatggtgtatctcggaatatgttctcccaccggctccattacggttatgggtgtcaaagcagtgggaatcgctttgaagcttacatttgaagggacgaatcaatttgttta

SEQ ID NO: 3358 - DNA, 390 bp, Glycine max
  Clone ID: LIB3028-023-Q1-B1-C12
cacagttagtacaaaaaagggttacttcagcttccacatatcttgaagaattgatcaatgggcaagtctgtagttgagaagctactttggatggcaattgtgtgcttggtgctgggtgtaatttccattactcccaaggcccaagcagcagtgacatgcaaccaggtggtgagcaacctcaccccatgcatttcttatgtgctcaatggtggcaaaaccgtgcctggcccttgctgcaatgggattaagaacctccttaaactcgctcactccacaccagtattgttaaacccgtttgcaagtgcataaagaacgctgttagtgcgttccattatggcaagtccaatgtggaccgtgctgctgctcttcccaagcaatgtggggttaaca

SEQ ID NO: 3359 - DNA, 283 bp, Glycine max
  Clone ID: LIB3028-023-Q1-B1-C2
agaacacaagaaattatatcacaatcagatccatataactatgacattgctgctgtacactctaccatcgctcatacctaactatgaatagtccacacctcaaactggaacagtccctggtcaagattaccactaagtgcgtcccccagaatcttcaccatctacggatgaaggatacaactttacatacaaagctcctaatacttcaagtcacatacacagatggatttaagcctaacattgacatcgattttagatgagggtttctcatgggaagataact

SEQ ID NO: 3360 - DNA, 342 bp, Glycine max
  Clone ID: LIB3028-023-Q1-B1-C3
cacaaatggagaattccccatctcatccttcttctcttcaatgtcctccttcaaccctttctcccctccaccacccaccccttacctcaccaacctcggcttcggctactccatcgccatcgccctcggcgtcctcttcctcctctccaccctcatcctctcctcctaactctgctgccgcaccctccgccaccgcaacaacaaccgccacaccccccgtaacaacacctccgatggcatcgtcctcccgcgcgtgatcttcgtcgccgaggaccacgacgatgactttattcgccagaacgacgccgtcaccgggctcgaacaggccgtaataaactccta

SEQ ID NO: 3361 - DNA, 367 bp, Glycine max
  Clone ID: LIB3028-023-Q1-B1-C4
ctctacaatggcctcagccgcatcccccaccactttctctctcctccactccgccaccccttcctcctcctccaccgccacctccgcctccccctccccctcgcgcgtgcagctcacctcctccctccgcgcccgcccgctgcgccgcctgggcttcgccgcggcggacccgctgctcgcggcgagtgtagcggcgcgcgtggcggcggtgagaggaggaggaaagggcgcgaggggggtggtgtccatggcgaagaagagcgtgggggacctgagcgcggcggatctgaatgggaagaaggtcttcgtcagggccgacctcaaagtcccgctcgacgacaaccagaacatcaccggcgacaccaga

SEQ ID NO: 3362 - DNA, 364 bp, Glycine max
  Clone ID: LIB3028-023-Q1-B1-C5
aattcatatcatatcatatcttgttcgctatattctctctgacaccccccggaggattgtgttgaggacaaacacaacaacaaacatataacattccgacaggatggtctttcggagctccacctccctaattggcctcctgtccctcctcttcctcctctccgtctcctccgccattcgcctcggccttgtccgccgtccttccccggagctccctctcttccgggaggcccctgccttccgcaacggcgaggactgcggctcctcgccttccgccaccattaacgtagccatgaccctggatactaactatcttcgtggcaccatggccgcggtgctctccatgcttcaacattcaacgtgt

SEQ ID NO: 3363 - DNA, 367 bp, Glycine max
  Clone ID: LIB3028-023-Q1-B1-C6
attaacttcacacttcactctctagtcatggcttcttctcttcctcttctcaaccttcttaccctcgctctgtcactactcttctgcattgccttaacttccgaggttggcgtgcaggcgcagatggaggagacaggcttgaacctcatgtcggaggcgttggagtggccaaccgcaatgtcgctctacgacgaagacagcgaagaagaggatgtccagaacggttacagtcggagatcgttgttctggcggaggatgaagtactacatctcctacggcgctctttccgcgaaccgaatcccgtgcccacctcgttctggtagatcttactacacccacaactgctacagggcccgaggccccgttc

SEQ ID NO: 3364 - DNA, 364 bp, Glycine max
  Clone ID: LIB3028-023-Q1-B1-C8
gcgagtgagtgagtcgtttctctgcagcaacaaggtttagccactccaaacagacgagaaatgggtcgtggggtcagtgctggtggtggtcagagttccttaggttatctctttggcagtggggtgcctgccagcagtgcaaacagtcagcctgcaaatggtgctcgcactcaaaatgctagtgctccttcaccaccagtcgataagcaaagtccagcaccagcaccagcaccagcaccagcacctgcatcatcaccaattgataagcaaattccagctggaattcctggaagtctcaaaaacaattaccatcgtgctgatgggcaaaactgtggcaactttcttactgatcggccatctacca

SEQ ID NO: 3365 - DNA, 364 bp, Glycine max
  Clone ID: LIB3028-023-Q1-B1-C9
ggcgtcttcataaacgccgcccaaaacttctcatacccttttattcattccattcgtttctagggttttcttttctttgccgagaaaatgagagagtgcatttcgatccacattggccaggccggtatccaggttggaaacgcctgctgggaactctattgccttgaacacggcattcagcccgatggacagatgccgagtgacaagaccgttggcggaggagacgacgccttcaacacatttttcagcgagaccggcgccggaaagcacgtgccccgcgccgtcttcgtggatcttgaacccaccgtgatcgacgaagtccgaaccggtgcgtaccggcagctcttccacccggagcagctga

SEQ ID NO: 3366 - DNA, 387 bp, Glycine max
  Clone ID: LIB3028-023-Q1-B1-D10
agactggagaggtggaagagctgcttcatttaacatcattcctagcagcactggagctgccaaggctgttggaaaagtcctccctgctttgaatggaaaattgactggtatggcattccgtgttcccactgtggatgtctctgttgttgacctcacagtgaggctggagaaggaagcctcctacgatgaaattaaaaatgctatcaaggatgaatcagagggcaagttgaatggaattcttggttacactgaagatgatgtggtctccaccgactttgtgggcgatagcagatcaagtatttttgatgcaaaggctggaattgcattgaataagaactttgtgaagcttgtttcttggtacgacaactaatggggatacagctcacg

SEQ ID NO: 3367 - DNA, 188 bp, Glycine max
  Clone ID: LIB3028-023-Q1-B1-D11
acacaacaaagttgcaaagtgaacaacgattaagccatgacagctctaattttaatcctcacgctatgcatcattgctgtcaccttcgcatgacaagcagcatgctccaatagtcacgcaagtgcaaaccaacgaggttttcaagctcaaccaatccaagccatagggtacaaagtttctttactttt

SEQ ID NO: 3368 - DNA, 386 bp, Glycine max
  Clone ID: LIB3028-023-Q1-B1-D12
gcaaacgatccaaactcttttttcatttgcagcatcaaaatgagtggtagcaacgatggtagcggcagctggagctctaggtttttgaaggtggctagtgcagctgccgctacagccgccgttgccggcggtttatatgccattctttcatcctcaacctctgctagctctgagatggaagtgccgtttggcagcgcacggcgtgagagcaaagaacgtgacgatggtggctccgggtctcatcctcgcgagggtgccaccacggtcagtcgttggaagaaacctgagattggttgggtgaagctgaacgtggatggttcacgccacccatacaaaagttcctccgctggttgtggtggtgttctgagggacgcatcaacaaagtg

SEQ ID NO: 3369 - DNA, 364 bp, Glycine max
  Clone ID: LIB3028-023-Q1-B1-D2
ctttggcctggggtctttgttacaatcatgaaatgagtcctatgcagtcatactgtgatgactacttcaaactcacatacccctgtactcctggtgctgactactatggacgtggagccattcccattttttggaactacaactatggtgctgtcggagaagctttgaagattgacctactaagccatccagaatacatagagcagaatgccacccttgctttccaggctgcaatttggagatggatgacaccaatgaaaaagtcacagccctctgctcatgatgcttttgtcggcagctggaagcctaccaagaatgacactatggagaatcgggttcctggatttggcactacaatgaacat

SEQ ID NO: 3370 - DNA, 341 bp, Glycine max
  Clone ID: LIB3028-023-Q1-B1-D3
cgagaggtacttgctcacagatatatttttttttttgtctccatcattttctcgagagctttcagtttctgtggttcatctttcttcttcttaatctttccccccctctctgtaacatcccgcttctctgaatccctttctgctaatcatctgtctttcaagctaagattttctggtttgtcttttaattcaccaaaaagcaaacttataaggatttttcgaaagccaggtgttttcagaaacgagattcatgttttattgtcgaatttcgctagtcatatttattttttatcagttttttttcctttgcaaccaacccataagggtaattttggttcctc

SEQ ID NO: 3371 - DNA, 368 bp, Glycine max
  Clone ID: LIB3028-023-Q1-B1-D4
aaacgagtagcaggatctgttgtttttgttctttttcgttttctacgaggaaggaaaataacaataacagaggaagaaagaaaattacacagtttcaatttcagtatcagctacactttttagaaatggctactctatcaagcttcatcgctacgccgaagaatcccaatacccactttctctcaggttcctcattgacgatggacaaatgcttcttgaaaatcagctccagtgaacactttccaggttcctctttaaagactaaagcaacacgtaaccagccacttgttattcgagcacgtggtgatggtggaagaccaagtaatgggaaatgggtttgttggtggggtttgtattgggaagacaaa

SEQ ID NO: 3372 - DNA, 368 bp, Glycine max
  Clone ID: LIB3028-023-Q1-B1-D5
gacgtccatggccactttcttcgcccaaacctccttcccctcccactctctctccaaaaccttcgatacccatttcgcccctgccccgaaagtcaacgtctttgtgaacttcagggcgaggaggcacgttggggtgcgagtttcgaacgcgctgatcgaaccagatggagggaagctcgtggagcttgtggtgacggattttgagagggatttgaagaagggtgaggctctttcgttgccgaggatcaagctctcaaggattgaccttgagtgggtccatgtcctcagcgaaggatgggccacacccctgaaaggcttcatgagagaagccgagttcctccaaacgcttcatttcaactcgctccgac

SEQ ID NO: 3373 - DNA, 360 bp, Glycine max
  Clone ID: LIB3028-023-Q1-B1-D6
gcattgcagaagcgtctccattttctttcgcgatggccgcgcgagccctgttgaccagaaaaaccctagccaccgttctccgcaacgacgcgaagcccataatcggagctggcatagctgcagctactcattctcgtgggttgcacgtgtacacgctccccgatctggattacgactatggcgctctggagccagccatcagcggcgaaatcatgcagctgcaccaccagaagcaccaccagacttacatcaccaacttcaacaaggccctcgagcagctccaagactccgtcgccaagaaagattcctccgccgtcgttaagctccagggcgccatcaagttcaacggcggaagtcacg

SEQ ID NO: 3374 - DNA, 366 bp, Glycine max
  Clone ID: LIB3028-023-Q1-B1-D7
gtttactgctaactctgatcggaagaaactcgcgccaaatgcttttgttcttgttcctactcgcgaactaagtcaacaggtatatgcggaagtgaagtctctggttgaattatgcagagttcagctgaaagttgtgcagttgaatagtaacatgcttgctaatgacttgcgggcagcattggctggacctcctgatattttgatctccactcctgcttgtgttgcgaagtgtttgtcctgtggcgtacttcaggcggcatccattaatgcatcgcttgaaactcttgttcttgatgaggcagatcttctattatcatatgggtatgaaaatgatattaaagctttaacacctcacgtacccagaag

SEQ ID NO: 3375 - DNA, 403 bp, Glycine max
  Clone ID: LIB3028-023-Q1-B1-D8
ggagatacaacttgcatgcgtccaggtcgactctaaaggatcccctcggggaattccaattccacattttcaagaaataaggaggcaaaaatgttcatatatgaattggaattatttgttttcttattaggcctatcctgaagccaaaggaaatgagatcggaattcctcggggaattccaattccacattttcaagaaataaggaggcaaaaatgttcatatatgaattggaattatttgttttcttattaggcctatcctgaagccaaaggaaatgagatcggaattcctcggggaattccaattccacattttcaagaaataaagaggcaaaaatgttcatatatgaattgggattatttgttttcttattatgcctatcctgaagccaaaggaaatgag

SEQ ID NO: 3376 - DNA, 382 bp, Glycine max
  Clone ID: LIB3028-023-Q1-B1-D9
attccgaattcagagatagcacgcaccaggagaagccatggctactcaatccccttcacctcagaacctaggtggtgaaattgagcaaacagaaaatgtagatcagcataataggggagaagagcttggtaaacagagttcagacacatcggtgtttgtgaactcagagccattgcgtgaggaacaaattcagaatgctgtgaaatttctgtcgcacccgaaagttagaggttctcctgtcatccacagacgatcgtttctggagaagaagggccttacgaatgatgagattgatgaagcctttcggcgtgtgcctgattcacctccaagtgtgcagacagctggcataaatcaagatggacaattgaagccatcatcaaac

SEQ ID NO: 3377 - DNA, 343 bp, Glycine max
  Clone ID: LIB3028-023-Q1-B1-E1
gaagattccacaacagtgggagggagatccaaaaagagagagtggaaaagatggcgcggttgatcacagtggtgtggtgcgcggtggcggtgctattatgcgccgcggccggtgcgtcgtgggtggaggaggcggcgaacccgatacgaatggtgtctggcgtggaggcggaggtggttcgggtgatcggggattgccggcgtgcgttgaagtttgctaggttcgtgagcaggttcgggaagagttaccaaagcgaggaagagatgaaggagaggtacgagatattctcgcagaatctcaggttcatccgctcccacaacaagaagcgtttgccctatactct

SEQ ID NO: 3378 - DNA, 207 bp, Glycine max
  Clone ID: LIB3028-023-Q1-B1-E10
gctaggtttgattgggattcgcactttgaggaggggaaatcgcaagggaatctagattccagaatggacgctcaaccacagcttagcggtgatgattctcagtgagtgggtgagacatgtgcgacactaaggtggaggtgattcactcgtggtctgatccatcatccctcactccgagtctcatgtattcattttcttattcggatg

SEQ ID NO: 3379 - DNA, 285 bp, Glycine max
  Clone ID: LIB3028-023-Q1-B1-E11
taaaaaatgaaattaacatttgcttgtttagggcttgaataacacataaattagagacaattaactattagaactgtcacgggaagccagtgcctatgtattttgattctcacaccactcggcatcaattattcgaatgtaaagtaggttgtctgttttatgtacccaaaagaaaaagtagcctcgaggtttagctgatggtgcatcacaatcttttttcctggtttaatatagtttcagctaatttatggcaaaaagaacaaatcacactacaagatttttttt

SEQ ID NO: 3380 - DNA, 240 bp, Glycine max
  Clone ID: LIB3028-023-Q1-B1-E12
ggaaggggagtagtagtaagaaaatagtaaaaaaatattatattgagaagtttggattcatatattgaggtgcacaaatatacagcaaaccaaagtatatagttttcttttttctttcttttttggaaaattaatggttgaacaggcaaggagaatttttgtcgttactttctgtcggcatgtatgtaatgtaatagaccatgaattctaagaactataatccgagtgcattgatttatt

SEQ ID NO: 3381 - DNA, 377 bp, Glycine max
  Clone ID: LIB3028-023-Q1-B1-E2
cattcggctcgagaatcagtgcaagagaatcgccctccatcttctttcttcttcaattcattccgatggcgattccgttgccctctctcgatctcactcaccactccgatttcgaacccttagtctccccagacggttacatctccatttgcggctacggttccctcctctccgagacaagtgccagaaccactttccccgacctcgtcaacttccgaatcgcccggttaactggtttccgccgtctcttcaactccgtcggacgcatctttttcactcaccgtgttgccaatatcttttctcaggagattgctggcctttctgttgaaacatgtgatggtgaattcattgttgtaactgtttttgagataaagaac

SEQ ID NO: 3382 - DNA, 284 bp, Glycine max
  Clone ID: LIB3028-023-Q1-B1-E3
ctctcatcagattcgggtcgggttagcgttatcggataacttcgcccataaattctctgtttacggggcgaaaatgacagtattcttagccacgaggctcgtgttgcggagatccccgccgcgtctctggcggcgcagcttttctcgggcggccgtacacgccgaaaatgacactgttgccgtgccgtcgcttccgttgttcgattactctccgcctccgtatttcgggcgtatcgctgacgagattctggccaacctcatggagtatcgtagtccctccatct

SEQ ID NO: 3383 - DNA, 307 bp, Glycine max
  Clone ID: LIB3028-023-Q1-B1-E4
cgcaagagccttttgttgctcttacaagtgaggaggaagatgaggttgaatgtgccttttcttccaactggaggaaaatgttcatatgtataagaagttgcttgaggatgttgggaggagaagtggcacgcttcacaggctgaattttgagattgatttgaatgagaagcgcacggaacattataatttgttgcgggcgaagaaggaattggttgaggaacaggaaatgccgcaagagccttttgttgcgcttacaagtgaggaggaacataaggttgaaagtgtcttttcttccaaatgggggagg

SEQ ID NO: 3384 - DNA, 180 bp, Glycine max
  Clone ID: LIB3028-023-Q1-B1-E5
attgtctgtgtgatggattcccgccttcatatcgttacatggccatttctagaacactcggctatgcagattctgatttgtcggaatcatttacgcagaaatggtgaaagctcaaggaaattggtcagtcgtgggtgataaagtatgcctacaatccaactgcatgagattggatcacaa

SEQ ID NO: 3385 - DNA, 61 bp, Glycine max
  Clone ID: LIB3028-023-Q1-B1-E6
tgctgcgcttgcaggggttgtaaaactaatcaatataattaaataaattacattctgtctc

SEQ ID NO: 3386 - DNA, 363 bp, Glycine max
  Clone ID: LIB3028-023-Q1-B1-E7
aatggttttgggtatggtgcccactggtcaattgctttagcagcagcttcagagctatttggcctaaaaaactttggaactctctacaattttctcaccatggctagcccagcaggctctctctttctatctggatttgtagcaagcacaatatacgactattacgcggagcagcaagtgaaacaccgaatgctcactggaaattacaatgacttgcttctttgtgagggaaacatttgcttctccatcacatttgggattttagctgtaatttgcttatgtgcagcatctttgagcttgatcgttgctcacagaacaaagaaattctatgcacagctttatgaacagtctcaaacttaaaaa

SEQ ID NO: 3387 - DNA, 377 bp, Glycine max
  Clone ID: LIB3028-023-Q1-B1-E8
ctttttatattctgttttattgggattctcactttgaaaagtggcaatcccaatcgattccatattctagaaatcaaactgaatcagagcttagcgtggtgaactcagtgagtgagtgagagatggcggagagtgaagtggaggtgattcattcttggtctgctccaagatccctcagtactagtctcatgtattctttttctcagagggatgacatagaagtgcttgatgagcccctctatgcaaatttccttagagtaactggtcttgatagaccctacagggaggagctactctccaaaatggaagctgatggagataaggtcactaatgacataatttttgctccaggaaagaagaaatatagattctgtaag

SEQ ID NO: 3388 - DNA, 363 bp, Glycine max
  Clone ID: LIB3028-023-Q1-B1-F1
caagttattgtgagcaaagaaagatagtgagtgaagtaactgaagagaagaaaaaatgccgtgcctcaacctcagcaccaacgtgtccctcgaaggcgtcgacacctcttccatcctcgccgaagccacctcctccgtcgccagcataatcggcaaacccgaagcctatgtgatgattgtactgaaaggatcagtacccatagcttttggtgggaatgagcagccagcagcttatggagaattgggttccattggtggtcttaaacctagtgtaaacaaggaacttagtgctgcaattgcttcaattctggaaaccaaattgtcagtgccaaagtcgcggttcttcttgaaattctatgacac

SEQ ID NO: 3389 - DNA, 394 bp, Glycine max
  Clone ID: LIB3028-023-Q1-B1-F10
caccctgaagatgatgaaggagaaatggttgttccccaggctcgttatccttgggaagggagtgatcgtaattatgaatatgaggagctgcttggcagggtgtttaacattctacgtgaaaataatcctgaacttgctggagatcggcgaaggacagttatgaggcctcctcaagttcttcgtgagggcacaaagaaaactgtgtttgtcaattttatggatctatgcaaaacgatgcatcggcagccagaccatgtcatggccttcttgcttgctgaattgggtacaagtggctcccttgatggacagcagagattggttgtaaagggaaggtttgcaccaaagaactttgaaggaattctgcgacgatatgtcaatgaatatgttatttgcc

SEQ ID NO: 3390 - DNA, 391 bp, Glycine max
  Clone ID: LIB3028-023-Q1-B1-F12
gttggtgcaaagcatccttcgtttcaatttctctctctcagcgctttctgcaatcgaacctttcatctccacagggatccacaggccgaaggagaaatggggctgacattcacaaagcttttcagtcggcttttcgcgaagaatgaaatgcgaattctgatggttggtcttgatgctgctggtaagaccactatcctgtacaagctcaagctcggagagatcgttaccacaattcctaccatcgggttcaatgttgagactgtggcatacaagaacattatcttcactgtttgggatgttggtggccaggacaagattcgtcccttgtggaggcactacttccagaacacccagtgtcctatttctgttgtagacagcaatgatagggaca

SEQ ID NO: 3391 - DNA, 361 bp, Glycine max
  Clone ID: LIB3028-023-Q1-B1-F2
gcagcaatggtgaacgttccgaagacaaagaagacctactgcaagagcaaggagtgcacgaagcacacgctccacaaggtcacccaatacaagaagggcaaggacagcatcgccgctcagggaaaacgccgttatgaccgcaaacagtccggttacggtggccagactaagcctgttttccacaaaaaggccaaaaccaccaagaaaattgtgttgaggctccagtgtcatggatgcaagcatgtctcgcagcacactatcaataggtgcaaacattttcagatccgtggtgacaacaatggaaaatgaaactctctgttctagatggaatattagaatttgccatttcacacactctctc

SEQ ID NO: 3392 - DNA, 138 bp, Glycine max
  Clone ID: LIB3028-019-Q1-B1-E7
gctagatccggaagaaacatctaagcacactgccaacaaaatgctaagaaccgtctactcgccgtgttgctagcatttttctatacgctccgcgcccctgatgagcaacactaaagtcgacgctcaactcagaggtgg

SEQ ID NO: 3393 - DNA, 378 bp, Glycine max
  Clone ID: LIB3028-019-Q1-B1-E9
cctggaaagccgcctgttgattaccaaggagcaagagatgtcaaaccaattgctgaatttgcacttcaacaggtaaaggctcttttgaaggatcggttaagtggaaaagcaacaggaggatctagtgaaaagacagaaaccagttcttcagtagaattaaactctggcaactttgatgaattggtgatcaaaagcaaagaactctggattgtggaatttttcgcaccttggtgtggacattgtaaaaaattagctccagagtggaagaaagcatccaataatttgaaagggaaggttaaactgggccatgttgactgtgatgctgaaaagtctctaatgagcaggttcaaagttcaaggattccctacaatcttggta

SEQ ID NO: 3394 - DNA, 371 bp, Glycine max
  Clone ID: LIB3028-019-Q1-B1-F1
ctccctgcccctgcctagattattactaccgagaaagaaagagaataaagaaaagagagaaagagagagagtgatcttgcaagttctgttccagcaagccatggcaatttcagggtcagagactcagagtcctttagtgaaaagcgtttttcaggtggaagttgagtgtgtgaaatgcgacttgtgcgggttcacagaggaatgcacccctgcgtacatcacgagggtgcgtcagaggtaccagggtcgctggctttgtgggctgtgcgtggaggctgtgaagcacgacgtggtgagatcagacagtgtcatcaccacggaagaagcgctggaccgtcacatcagcttctgcagagagttcagatcatcga

SEQ ID NO: 3395 - DNA, 377 bp, Glycine max
  Clone ID: LIB3028-019-Q1-B1-F10
gtttactcagaatagagattatattctatttctctctccttaattcccttcgtttctctctcttcgccattcattttcctccaacttgttggtctctctgtctctctctctctaggatcccttccttaccattctttacttctccccttttacttgaccccttcaagttgaagtgatcacatagttatcctctaaagcagtattttgctggtgattttcatctgcaatggagttctgaatctatgatgatgggatttctcatttgaacccccagagatggacaagaaagagcatattgcaatttttactagtgctagccttccatggttgacaggaaccgctgtgaaccctttgtttcgtgccgcgtttctcgccaa

SEQ ID NO: 3396 - DNA, 378 bp, Glycine max
  Clone ID: LIB3028-019-Q1-B1-F12
ctcgagccgaatcggctcgagggaacactcacccaggaatcatttggggattgctaggctggtggggaaccttaggccatgcatttggtgtctctagtatgccaggatttggtgccagtctcagcttgccacaagcactttccaacactagaactgatgggctaggagcactctacagagaagggacagcttcctttcttaactccttggtgaacaacaggttcccttatacaacccagcaagtcagagacagatttatagcatctcttgcctcaaataaggcagcagaagcgcaagccaacctcttcaagatggccaatgaggggcgaatgaagccttgagcatgatatagttaatttggtttgtggtgtcagttta

SEQ ID NO: 3397 - DNA, 398 bp, Glycine max
  Clone ID: LIB3028-019-Q1-B1-F2
gacagagcctgttcccgcggaatcagcgacgaggaagacgctgaaaccgcaaggaaaaaacttagactctccaaagacgaatccgctatactcgaagaaagcttcaaagaacacaacaccctcaaccccaagcaaaaattggcactggcgaaacagctaggacttcgacctagacaagtggaggtgtggttccagaacagaagagcaaggacgaagctgaagcaaaccgaggtggactgcgaagtattgaaaaggtgctgcgagaatctgacggaggaaaatagaaggttgcagaaggaggttcaggagcttagagcactgaaactttccccacagttttacatgcaaatgagcccacccacgacgctcaccatgtgcccctcttgcgagcgtgtggc

SEQ ID NO: 3398 - DNA, 395 bp, Glycine max
  Clone ID: LIB3028-019-Q1-B1-F4
gaaactgtatgacatatagattgagtgttgctgatgtatattggtaacattgaagttgggaatgcgtttgaggacgtttctgaatgaaattcgtattgtgcattcaattagcacttttctttagttattttaagtgcttgtagttggcctctttaacttataatttcctttttgttatcttgcagcttcttgggtgccatggaccattggccaatcgtgaacctggaagagcctttttggatactgctactagttcttagtctgtcttttaatttggaaatactagacttttggataacattagttttgcaagagtgaatttgagttattttgtcagcacattccatttacttaaattttgtttgcgaacctcttcgatttggttactttaatgg

SEQ ID NO: 3399 - DNA, 230 bp, Glycine max
  Clone ID: LIB3028-019-Q1-B1-F5
gcagatatcactaaaacctctacaagaactaactgatatatgatcattatgtggctctttcacttgttgttttagcaaggtatatacagtgcttgagtttgttacttttaacagcactaacaggcaactgcctgatattgtatttgttaccaccaacaacgtcactttaccctgcgtcatacaaccttttcgactggaaacatgcccctccaattttgacgggcaatttc

SEQ ID NO: 3400 - DNA, 391 bp, Glycine max
  Clone ID: LIB3028-019-Q1-B1-F6
agcccaagccctatacaaccaaaccctaacacacacccatttgattcactttccatggctagcctcaaggttgcatttttggctgcagtgctctgcatggttgtggtgagtgcacccatggcacatgcagctatcacgtgcgggcaggtgacgaatagcctgatcaattgcatcggttacctccagaacggaggaacgccgccgtcgggatgctgcaacggagtgaagagcctcaatgccgccgccaagaccaccgccgaccgccagacggcgtgcaactgcctcaagtcggccgccagccagatctccggcttcaaagccaataacgccgcctcgctccccggcagatgccgaatctccatcccctacaagatcagcatctccaccaact

SEQ ID NO: 3401 - DNA, 192 bp, Glycine max
  Clone ID: LIB3028-019-Q1-B1-F7
ctttggaccccgagatatgtcattgccagaactaataccatcgaatccattgctaccgggaacaactgaggtacatcaacgcaggaaatgtgttactgtgttggggaacatgaatcacgagacctggcctgtatgatctacgcttccgtagtagggatcaagctcaatggggcccgtggcatctcgaactgg

SEQ ID NO: 3402 - DNA, 393 bp, Glycine max
  Clone ID: LIB3028-019-Q1-B1-F8
ttgcaattcgcaatctttgcgagttgcgagactgagaattcagaaatttctcttttgttttgcatttttcatggcaaacgttgtattttgttgcaaatgaattggattatgaaatctagaaaggatggaggggattttgctttgttttaaataaaagaagagtgaatcgaattttgaggagtagctggtgatgaatgaattattggcatgagctgcgacaacgtttctgcgcaccgtgtattgtcacacgggttgttgttgcgatgaataatgtgccaaaatgctaatctgaggctctctctctcttttcattttaggtttttgttctctcttttatcgtttcacaagctcttcttacgattttctttctttccccaaattattgattcggat

SEQ ID NO: 3403 - DNA, 389 bp, Glycine max
  Clone ID: LIB3028-019-Q1-B1-G1
atgtgttttatgtattgcaaagttgcctgcggagggctatatccacttccaatatcagttctgttgtcgcagttttgagtggtgctagtagtttgcttggtactgaatatcatgaagccttgcagcacaaaactagagagccaaaccttggtgcaaagttgttctttggtggtgttggcgtgcaaaagacggggacagaaattgcaacagctttgaataatatggatgttagcagtgaagatgttctgaagctaaaacatgaaattgaagaacagtgtgctgaggtatttcctgcaccggctgatcgagaaaaggtaaaatcttgtttgactgagttggcagatagcagcaatgctttcaagcaagctttgaatgctggcatagaacaa

SEQ ID NO: 3404 - DNA, 377 bp, Glycine max
  Clone ID: LIB3028-019-Q1-B1-G10
aaataaactagtattaaggagctagaggcaatgggaaagagcaaggttcttgttgtgggtggaactgggtatgttgggaggagaatagtgaaggcaagtttagaacaaggccatgaaacctatgttcttcaacgtccagagattggtcttgacattgagaaggtgcagatgctgctttcattcaagaagcaaggtgctcaccttgtggaggcttctgtttctgatcaccagagcttagtggaagcagtgaagcttgtggatgttgtgatttgcaccatgtctggtgttcattttcgctctcacaacttgttggtgcagctcaaacttgtggaggccatcaaagctgcaagaaacgttaagcctttcctgccttcaaa

SEQ ID NO: 3405 - DNA, 371 bp, Glycine max
  Clone ID: LIB3028-019-Q1-B1-G11
agccaagtgaatgtgagagaacataaagctcaaagagcataatgtcgatggatcattcacatgattggggatacccttcatgtaggagggcacaagaaggatgaggagcatgacggtgagcaccatgctggagaatacaaaggggagcaccatggtgaacacagtagtgagtacaacggagagcatcatggtgaagacaacactggatagtagcatggtgagcataatccagagcacatagaggggttcctagaccatgtcaatgacaagatccatggtgagggcggcgccgccgatggcgagaagaagaatattgagaagaagaagaatgagcatggccatgagcatggccatgacagcttcagcatcac

SEQ ID NO: 3406 - DNA, 384 bp, Glycine max
  Clone ID: LIB3028-019-Q1-B1-G12
gagcatattccgttatgagggggatgaggtgaacatgacattggcaaaatctgaggctaaactgcttcacgagaagattgcagagaaggcctacaatgatgaggagctgatcaggattttgtcaacaaggagtaaagcacagttaacagcaacactaaatcagtacaacaatgagttcgggaatgccataaacaaggatctgaaaaccgatccaaaagatgaatatctgcaattattgagggcagccattaagtgcttgacttaccctgagaaatattttgcgaaagtcttgaggatggctataaacaagctgggaactgatgaaggggcccttactagagtggtgaccaccagagctgaagttgatttgcagcgaaatgctga

SEQ ID NO: 3407 - DNA, 302 bp, Glycine max
  Clone ID: LIB3028-019-Q1-B1-G2
cttcaattcagcaacatgtcctgacactgacggcattggctgggtagaggaaccatacatatgcacagccccaataaagtacaagtatgccaactactctaaccgaaactatgcaaagaccgggaaagctattttgaagttccagttgatcaatcaacgtgcagatttctcagttgcactattttcaggtggattacccgatcctagacctgtggcaatttcgaattccatatcatttgcaaatcctaaagcacctgtgtatccgcgccttgctctatgacaatcttgggatgaaatgacag

SEQ ID NO: 3408 - DNA, 395 bp, Glycine max
  Clone ID: LIB3028-019-Q1-B1-G3
ggatagatagagtgatacacatcacattttctcaaagtaatttattaattaataaataaatggcggcggcggcggcagtgacggtgctactcccacctaggattccgaccgccaccaacgttacccgctgctctgctttgccttctctgcctcctcgcggcaccaacactaaaaccactttgctcttatcttccctcaagcacttctcagtgtcccgaaaatcttctctgcttcagaccagagcttcttcagaggaatcatcctcagtagatgccaatgaggtgttcacacatttgaaggaaaagtgggatgctcttgaaaacaagtccacagtacctttttatcgtggtggggccttacttgctgtttggctatcgtcgattcgtgtgagcgcc

SEQ ID NO: 3409 - DNA, 393 bp, Glycine max
  Clone ID: LIB3028-019-Q1-B1-G4
gttgaaaacacataagaaaaaaaatgggttcttctctgtggacctgtctgattttgttatcacttgcttctgcttccttcgccgcgaaaccaagagcaccaattgatgtggcatttggcagaaactatgtgcctacctgggcctttgatcacatcaaatacctcaatggtggttctgagattcagcttcatcttgataaatacatcaggtactggcttccaatcaaaagggtcctacttgtttggtcacttcagcatgtacataaaattggttgctggtgattcagctggcacagtcactgctttctagttatcatcgacaaactcagaacatgatgaaatagacgttgagttcttgggaaacagaatcgggcaaccttatattttgcaaaca

SEQ ID NO: 3410 - DNA, 391 bp, Glycine max
  Clone ID: LIB3028-019-Q1-B1-G5
atttcaatcaacggttatacccttttctatttgagcatcatcatgtccaccgcagcgcagcccaaggccaagaaaacggcgtcgtccaagaagcccctctcccatcctaccttcgccgcgatgatagcggaggcgatagcgagtctgaaggagagaaccggttcgagccaatacgcgataagcaaattcatcgaaggcaagcacaaggagttgcctccaacctacaagaagcttgttctcgttcatctcaagaagtctgttgctgctggcaagctcgttaaggtcaaaaactctttcaagctcgcagcgactaagtctgctcctgttaaagccgctgctgctcccaagaagcccaccaaagctgcggctaagcccgccgccaagccgcctt

SEQ ID NO: 3411 - DNA, 191 bp, Glycine max
  Clone ID: LIB3028-019-Q1-B1-G6
caacaaaggaagctttatcagctttgaaaagttcatgaaaccttgtcaaagtaaatcagccaaacttgatttcttccccctttttgtcgtaaatgttactgtaaatcaatcaactatctatgatgggaagaacgcatattgtaatagccaaaaacaattttgactcataccgatgctaacaaaccagtagc

SEQ ID NO: 3412 - DNA, 239 bp, Glycine max
  Clone ID: LIB3028-019-Q1-B1-G7
cctgtttcgtctgttaatgcatctctacccgatccgatgcaacctgttattccacaggttattgcaccttttgttgcaccttctttagctccaattcctgcaattcctccgcctcgcccactgggaccgcttccagttcggtcacctgctcattacgccatctgtgccacagaatcgcgaagttggctcaggtgactctgagtcagacactgaccactcagctccacgaattaggcagg

SEQ ID NO: 3413 - DNA, 381 bp, Glycine max
  Clone ID: LIB3028-019-Q1-B1-G8
agaaaaatgaagtctttccatctcacagtgacagctttgtgctgtgtagtggttgtgcttggagtgcttccactctccctagatgcacaactagatccctccttttacagagacacttgtcccagggttcactccattgttcgtgaagtcgtcaggaacgtttcaaagaaagatccccgtatgcttgctagtctcattagacttcactttcatgactgctttgttcaaggatgtgatgcatcagttttgttgaacaacactgccaccatagagagcgagcaacaagctctgccaaacaacaactcactaagaggtttggatgttgtgaacgacattaagacagcagtggaaaaggcttgtcccgggcgtgggttcttgtgc

SEQ ID NO: 3414 - DNA, 281 bp, Glycine max
  Clone ID: LIB3028-019-Q1-B1-G9
ccgaatgagattatcaaacacatcatctgtcgattgtgaatgcgaaggattgcgttgtcttccttcctcttctcattcgcttcattcttcgatcttcgtccggggactgctcagaatagcatcaccatcactcgcagatggatacgatcggatgcttacactactctggatgctctcagcatagtgtcggagctgaaggacttgcacgattagccatcaacttcttgaagagcatggagaattcgctgtcggattttgcaatggtagttaaggcatagggg

SEQ ID NO: 3415 - DNA, 396 bp, Glycine max
  Clone ID: LIB3028-019-Q1-B1-H1
gttttgtgtgtcaccttggtgtgcatacgagatggaggagcaaaatggtagtggtaagttgagccaagggcttcgcaaagtgaagccttaccttgctatattgtcccttcactttggctactcacggatgtatatcatcactatggtttccttcaagcatggaatgagtcattggatactctcagtgtatcgtcatgtagttgccgctattataatagtcccttttgcacttgtccttgaaagaaaaataagaccaaagatgactcttcccatcttcctgaggatagtggcacttggtttccttgagccagtgctagatcagaacttgtacaacatggggatgaaaatgacctcaacaacgtgtgcatccgccactgttaatgtcctcccggccat

SEQ ID NO: 3416 - DNA, 373 bp, Glycine max
  Clone ID: LIB3028-019-Q1-B1-H10
gctttggatgatgagagggtcaaggttgctaatcaggtgggaagtattccgcttgattgggctttgggagcttttattctgcaaacagcagctgatgcagatataccgaaccataactggattggcaccattttcagcgatgaatcacataccctcctctcaattattggaatttttataatattgttaacggcatggtctatatctaggtggaggaaacctcagttgaagacataatacattctaaaaaagggccaattaataacacgccagttgggaaattatacctgatgggagaaggaattatgggtcctgggttaatcatgtggaagcactgctgtgattaagatgaaaatatttaacccttaaaact

SEQ ID NO: 3417 - DNA, 337 bp, Glycine max
  Clone ID: LIB3028-019-Q1-B1-H11
ataagctttacttaattagcaaatccaaatatggcactttcttcttcatcatcttcaacatccatatttgctttagctttgttcactcttttgcttataggaagttcttcagctcaactctctgagaacttctatgatagtaaatgtcccaaggttttctatgccgtaaaatccgttcttcaatctgctttgggtaaagaacctcgccagggaacatctaacgttcggctcctccttcaagactggtttggccatgggtgttatggattaattataactgatgggccttcctcaaaaaagaatggaacttccaacaattactccttgagaaggtaag

SEQ ID NO: 3418 - DNA, 360 bp, Glycine max
  Clone ID: LIB3028-019-Q1-B1-H12
gggattcaaacaaaccgcattcgcactgtgcatccctttcttccttcctcgtcttattctccaaccctctccaaaacctccttctcactcttcttctttctgctactctccctctaaacaacgtcgtttctcgtcgtacagccatgtcatacgactacctcttcaagtacatcatcatcggcgacacaggtgtagggaaatcgtgcctgctcctgcaattcaccgataagaggttccaaccggttcatgatctcaccattggtgtcgagttcggcgctcgcatggtctccatcgattctcgacccattaagcttcagatatgggataccgctgggcaagagtcttttagatccatcacta

SEQ ID NO: 3419 - DNA, 375 bp, Glycine max
  Clone ID: LIB3028-019-Q1-B1-H2
gcggaatcagctagaattttctaataatggccaaagacgttgagcaggttacagagcacggtgaatactccgcgaaggattaccatgacccacctccggcgccgttgatcgacccagatgagctcactaagtggtccttgtacagagccgccatagctgagttcatagcaacactccttttcctttacatcaccgtgttgaccattattggctacaagagacagagtgacaccaaaatccccggtaacaccgagtgcgacggcgttggcattttgggcatcgcttgggccttcggtggcatgatcttcatccttgtttactgcaccgccggcatctctgggggacacatcaaccctgcggtgacattcgggttgt

SEQ ID NO: 3420 - DNA, 75 bp, Glycine max
  Clone ID: LIB3028-019-Q1-B1-H4
ttaaatttcatgtggttacacctgtcttcaatcacagattttatgtcactcattgtactgccttttgatgctgtc

SEQ ID NO: 3421 - DNA, 388 bp, Glycine max
  Clone ID: LIB3028-019-Q1-B1-H5
ctcgagccgattcggctcgagaagtttttacagctgatcaaatatgtaagtggctcttatgattctgaggatggatttcgcttgttggataaagagatttcagagcatgaatatttgaaaaagagtgttgagggtttatctcggaggcttttctatcttgctcttccaccttcagtatatccatctgtttgcaagatgatcaagacttgttgcatgaataaatctgatcttggtggatggacacgtgttgttgtcgagaagccttttggtaaggatctagaatctgcagaggaactcagtactgagattggaaagttgtttgaggaagcacagatttatcgtagtgattactacttgggaaaggaactagtgcagaacttgttggtac

SEQ ID NO: 3422 - DNA, 390 bp, Glycine max
  Clone ID: LIB3028-019-Q1-B1-H6
cagcagtactaccattagccgcgtttttcaaaagtgattttcgagaattagcgatgggaattgaaagaggaggcttcaagggattcaggagcgcctggagcgtgccgcccaagccgtgcgattcctgcaagctggcctcggcggcgcttttctgccgccccgattccgcgtttctctgcatcgcctgcgattccaacattcactgctcgaacaaactcgcgtcgcgccacgagcgcgtgtggatgtgtgaggtgtgcgagcaggcacccgctgctgtcacgtgcaaggccgacgccgccgccctctgcgtcacgtgtgactccgacatccactccgcgacaccccctcgcgcaacgccacgagcgcgtcaccgtggaacctttccttgac

SEQ ID NO: 3423 - DNA, 396 bp, Glycine max
  Clone ID: LIB3028-019-Q1-B1-H8
attaagtcaattgtttcagaagaacaaacaagtctacaacttgctctagtggggactttttttcctatccccccttttttaatgaattcgtaaataccattgttaatagttcttcgtaggagtattagcatacaactggttaagttatatgctgtatcaaattaataagaaccttggaagaatcacaccagaaaagctagcagttgtagttggaggagccaaagttcttataaatccctcactagaatcgcatacttcctatatgggattcaagtctcataccttgctattggattctagcacacatattatgtcaatgattgtattggattttgatgctgtcttcttttgctatctaaatttggtagtgttgctaattctatctgcaacattttt

SEQ ID NO: 3424 - DNA, 361 bp, Glycine max
  Clone ID: LIB3028-019-Q1-B1-H9
gaagaaaagagaagagaagaagaagatggaggtgagtttatcctcaacatcatgtatacccttaagctcgaagttgaagcataagcatggccttttccactctcaaattcccattcacacagcttcaaccaataccagaagaaccaaacctttgtccgttgttaacgcctccagacaaaccttgtcttccaattggctcgtttctccacacgatttttctgcatccaccgcttcgccatggcttcccatattcgaagagctcgacgccaccaacatgcttctccgtcaaagaattatctttttgggttctcaagtggatgatatgactgcagattttatcattagtcagcttttgtttttg

SEQ ID NO: 3425 - DNA, 278 bp, Glycine max
  Clone ID: LIB3028-020-Q1-B1-A1
cggcccgagggctgagcgatgttttccctcctctaaggtcccaattttttcttaaaccctagaacacacactctctctcacagaagaagaagctgctgcagaagagaatttccaaaatgtcgatgtccaagagttccaagatgcttcagtacatcaactaccgtatgcgtgtcaccattcaggacggtcgccagctcgtcggaaaattcatgggcttcgaccgccacatgaacctcgtcctcggcgactgtgaggagttccgcaagcttcctccgggc

SEQ ID NO: 3426 - DNA, 397 bp, Glycine max
  Clone ID: LIB3028-020-Q1-B1-A10
caaagtttcagtttctctctaacgttgttgttaaatgacagtagatctggtacgtgctgccaagatggggatggaggagaatatagcgatacaagaagctgcttccgctgggttgaagagtatggagcatctgattcgtgtgctttcttctcaaatcccttcttctgcttcgtcttcttctaacgcacaccaccaccgtcttaatctcaaccaccttgactgcaccgaaatcaccgacttcactgtctccaagttcaaacaagtcatcaacttgttgaatcgcacgggacacgctcgctttcgtagcgcaccttctcatccttctccttctacttctcttccttctcaacctcaacctcaaccacaaccacaaccatatgcactgaatcctgatttc

SEQ ID NO: 3427 - DNA, 342 bp, Glycine max
  Clone ID: LIB3028-020-Q1-B1-A11
acactcgggttcgacggaagcttggcgtggaagcaaacgtagtcaagtggcaaactgttcctgcagcttgcggagagtacatagctgactacgttctaggagaccaatatagatcagattccaaaacagttaaccaacaagcttatttctatgctaaatccctcaaactcaccaacaaagatgtctttgtcttggacgttgacgacactactctctctaatctccagtattttgctaaccatggatttggtgtggaaccacacaatacgacggcgtttaagaactgggttcttgatggcgaggcattcgcactgccagagactcctaaaatgtacaacaaac

SEQ ID NO: 3428 - DNA, 404 bp, Glycine max
  Clone ID: LIB3028-020-Q1-B1-A12
gaacgattcaactagactaacacggaaacaaggtgcatcatgccttgacaatgggaatggtggcggtatcaccggaatctgacagtgacaacaactcctcaaataccaacaatcctcaaaacctcaatgaaacggagccgtttcttgactacgctcttgcgcaagccgagctttaccacaaggccttcaacgacaccctcgattcgacaaacgatactgcataatcccgtttctcccaaatcagcacaacttcttccgcccactttcaccagaccttggattctttgggtgatctcaaatctcagtacactgcttatgatggtcttttgtttggaacgcataaagaaggtgtaattgttgcaacttcgcatcctgtgattacatgtggggctactgcttccctg

SEQ ID NO: 3429 - DNA, 387 bp, Glycine max
  Clone ID: LIB3028-020-Q1-B1-A2
gtgaaggggggttactggattggaccaacccttcggttctgaattcggtcgttgatttcgtaccggggaataataatcataatcaattggtgcaggaccagacgcaaggcatggtgaactacaacgcgtgcaatgacctctatgtccctacgttatgccatgtgggcacgtcagttccgcaaaagatggaggaagatgtgcaaagcggcgtgagaaaccaacgggtccagaacaattcctggtttcttcagaatgatttcacacatgggtttcagaattcggttgacacgtctgggtttaagtacccggttcaaccggtggggttcgggttcacgaattgaaccctgttatcgattaataatagtagtaatcctttaaatcggtaaa

SEQ ID NO: 3430 - DNA, 407 bp, Glycine max
  unsure (1)..(407): unsure at all n locations
  Clone ID: LIB3028-020-Q1-B1-A4
cacaagccaagtgaaagtgagaaaaaataaaaatcaaagagcataatgtcagggatcattcacaagattggggagacccttcatgtgggagggcacaagaaggaggaggagcataagggtgagcaccatgctggagaatacaaaggggagcaccatggtgaacacagtagtgagtacaaaggagagcatcatggtgaacacaaagctggagagtaccatggtgagcacaagccagagcacaaagaggggttcctagacaaagtcaaggacaagatccatggtganggctgcgccgccgaaggcgagaagaagaagaaagagaagaagaagaaagagcatggccatgagcatggccatgacagcagcagcagcagtgacagtgattaaactgctgcatcacctatata

SEQ ID NO: 3431 - DNA, 301 bp, Glycine max
  unsure (1)..(301): unsure at all n locations
  Clone ID: LIB3028-020-Q1-B1-A5
gcttttgatccggaagctccccttccagaggctggttcgtgaaattgctcaggacttcaagactgatctgcgtttccagagccacgccgtgcttgcattgcaagaagctgctgaggcataccttgttgggctctttgaggacactaacctgtgtgccattcacgccaagcgtgtaaccattatgcccaaggatattcagctggcaagaaggattcgtggtgagcgtgcttgagttggtggttggaaagatgaagatgattggtggctgcggttggtgtttttgtttttcagantccttttt

SEQ ID NO: 3432 - DNA, 409 bp, Glycine max
  Clone ID: LIB3028-020-Q1-B1-A6
cgaaaagagaagaggtgtgggaaaggaggaggaagaagagcgagatggcgtcagtggtgaagaacgtactcaaatcggtcagagaaaagggtttcggcgctttcctcagggagctcaaggatgaaggctacctgagatgccttccggatggaaatctcttgcaaaccaagatccacaatattggggcaacacttgttggtgttgataaatttggtaacaagtattatgagaagcttggagacacacagtttggaaggcacaggtgggttgaatatgcagagaagactagatataatgcctctcaagttccagctgaatggcatggttggctccacttcatcactgatcacacaggagatgagcttcttttactgaaaccgaaaaggtatggtattgaacacaaagaaaa

SEQ ID NO: 3433 - DNA, 355 bp, Glycine max
  Clone ID: LIB3028-020-Q1-B1-A7
actcattgctgaattcattcaagagggtgtgcaaataaatcttgatgccaaaagtttggtctcaggaacgaagctccacaattttttggagtttgtaacatcctccgaatttcccttgggagagagcgtatcaaaattgcgtacgaaagttgatccccttactactcagtatcaaataaccggagtctaagtgtatccgcataatgaatacgtaaaactatgacgctgttaacatattttgtccaataatcatgcgtcgatgtgtgttgctaatactatgttgtcacattttatggcatctcaagttccaactgaatggcatggatggctccacttcaatcactgatcacacagg

SEQ ID NO: 3434 - DNA, 414 bp, Glycine max
  Clone ID: LIB3028-020-Q1-B1-A8
ccaaccttcaacgtctcttcactctcttccttttttccctaattgcaccctctttggctcaacaatccttcagacccagagccctcgttgtcccagttaaaaaagacgcttccaccctccagtatattactcaaatcaaacaaagaacaccactcgtcccagaaaacctagtacttgacatcggtggccaattcctgtgggtcgattgcgacaacaactacgtctcctccacttaccgccccgcacggtgtggctccgcccagtgctccctcgccagatccgacagctgcggaaactgcttctccgccccaaaacccggctgcaacaacaacacgtgcggcgtcacgccagacaacaccgtcaccggcaccgccaccagcggcgagctcgcgcaggacgtcgtctccctccaat

SEQ ID NO: 3435 - DNA, 339 bp, Glycine max
  Clone ID: LIB3028-020-Q1-B1-A9
ctctgcttcaacttgctccctcagaagcgaagaagaagccacagagaaccagtctcctactctctctcacccacaagaaaaatggcatctcacatcgttggatacccccgcatgggtcccaagagagagctcaagttcgctctcgagtctttctgggatggcaagagcagcgccgaggatttgcagaaagtggctgctgatctcaggtcatccatctggaagcagatggctggtgctgggatcaagtacatccccagcaacactttctcgttctatgaccagctgctcgacgccaccgccaccctcggtgccgtcccccccaggtacggctggaccggc

SEQ ID NO: 3436 - DNA, 331 bp, Glycine max
  Clone ID: LIB3028-020-Q1-B1-B1
gcatgagactcgcatgttcccgtgttgggaccacttccaattgggtttgcggtgttcatggctcacttggacaccatccctatcagcggcactggcatcattccagctagaagccttgggcctgctgtcatattcatcaacgaaaaggcttgggatgaccagtggatcttctgggttgggcccttcatcggtgctgctcatgctgcattctaccaccagtccgtgttgacggcccaagcatcaaaagctctacggtctttcaggagctcctcaaacctgtgattctggccgagctaattgagctaacagagacatgcttcatttaattgtg

SEQ ID NO: 3437 - DNA, 276 bp, Glycine max
  Clone ID: LIB3028-020-Q1-B1-B10
aaggagtcattgaactttgactatatttttcagagttcagattattcttctcttttgaattttgattttgggggtttaagtttctgagagaaaaaaaaaaatgataaaggtcgttctttttttgttctgcattgcctctgcactgaccctttcagtatcggagtccaaatctgcttctgtgcaacctcatgcagctgaatctttctctgttggatataatcagatgaagactgcagcgaactgttcttacctggtagttaaatctacgaattgttc

SEQ ID NO: 3438 - DNA, 356 bp, Glycine max
  Clone ID: LIB3028-020-Q1-B1-B11
caacactgatggattatacagcgcaaagcgttcagctgttattagggcatcagatgatttctggccaagagaccctgcatcccacacgattcacattgcatcagtggcttacaatactattttccttggtgaatttatgcagccagactgggatatgtttcataacctacatccgatggctgaatatcatggtgcagcacgagctgtatggggatgtccaatttatgtcagtgacaagcccggacaccatgactttgatcttttgaagaagcttgcactacctgatggttctatattaagggctaaacttccaggacgaccaacaaaggattgcttatttactgatcctgccagag

SEQ ID NO: 3439 - DNA, 381 bp, Glycine max
  unsure (1)..(381): unsure at all n locations
  Clone ID: LIB3028-020-Q1-B1-B12
tgcaaactagttttgttttgggaacatcatcacattacattagattggtggtaatggcagcgtcactacaagcagcagctactttcatgcaacccaccaagttgagcaggagcaacactttgcagcaaaagtctactcagtccatttccaaggcttttggtttggcacctgttggagctaaaaaggtcacatgctcccttcaggctgatcttaaggacttggctcacaagtgtgttgatgctaccaaaattgcaggattcgcccttgccacctctgccctcgttgtctctggggcaagtgctgaaggtgttccaagaggctaaccttcgacganatccagagcaagacctacttggaagtgaaggggacacgaacagcaaa

SEQ ID NO: 3440 - DNA, 357 bp, Glycine max
  Clone ID: LIB3028-020-Q1-B1-B2
taaaaccgccacaaatttctccatagttatgggcacttccattctcgacgccctgaacgttcgcgtggaaggttccggcgacaagtaccttgtcctggcccacggcttcggcacggaccaatccgcgtggcagcgcgtgctcccttacttcacccgcaactacagcgtcattctctacgacctcgtctgcgccggcagcgtcaaccccgaccacttcgactaccgccgttataccaccctcgacgcctacgtcgacgacctcctcaacatcctcgacgccctccgcgtcccccgctgcgcctacgtcggccactccatctccgccatgatcggcatgctcgcctccatccgccgccc

SEQ ID NO: 3441 - DNA, 335 bp, Glycine max
  Clone ID: LIB3028-020-Q1-B1-B3
aagacttcatcttcggcgacgcctccgcggtgttccagaactgcaccatggtggtaaaaaagccactggagaaccaccagaacatcgtgacagcacaagggaggctcgacaagcaggagaacaccggcttcgtcctccagaaatgcgtgatcaaggccgacaccgacttggtacccctcaaagacacaatcaagaactacctcggaaggccgtggaatgagtattcacgaaccatcatcatggagactcacattgatgacctaattcaccctgatgggtttcttccttgggaaaggaactttgccccaatcacactttactatggtgagttcaac

SEQ ID NO: 3442 - DNA, 389 bp, Glycine max
  Clone ID: LIB3028-020-Q1-B1-B5
caagaagaagaacaccaccaacaacaccaacaacaagaagcatggggacaacactaataataatgatggcacaaagactggtgctgagaagaaattcaaaacacttccaccatcagagtctctgcctaagaatgaaaccattggaggctacatctttgtttgcaacaatgataccatggcagagaatctccaaagacagctctttggtctgcctccacgatacagagattcagtaagaacaataactccagggttgcccatttttctgtacaactactccactcaccaactccatggtatctttgaggctgcaagttttggaggatccaatattgatccaacggcttgggaggacaagaagtgccctggtgaatctcgtttccctgctc

SEQ ID NO: 3443 - DNA, 370 bp, Glycine max
  Clone ID: LIB3028-020-Q1-B1-B6
ctcctctgtctctctctctccaccattgccatggatccttacaagctccggccatccagcgccttcaattctcccttctggactacaaattctggtgctcctgtttggaacaacaactcctctttaaccgttggagctagaggtccaattctgcttgaggattatcatcttgtggagaagcttgcaaactttgacagggaacgtatcccagaacgtgttgtccatgccaggggagctagtgcaaacggtttctttgaagtcacacatgacatttctcacctgacatgtgcagatttccttcgagcgcctgaagttcagacgcctgtaattgttcgtttctcaactgtcattcatgaacgtggtagccctg

SEQ ID NO: 3444 - DNA, 357 bp, Glycine max
  Clone ID: LIB3028-020-Q1-B1-B7
atccattgcacctttctcttcctccgatggctaatctctcactcttgttcttcggtctcctcctattctccgctgccgtagccaccgtcgaacgaatcgacgatgaagacaaccttctgatccgtcaagtggtgccggacgcggaggaccaccacctgctcaacgcggagcaccacttctccgccttcaagacaaagttcgccaagacctacgccacgcaggaggagcacgaccaccgcttccgtatcttcaagaacaacttgctccgcgccaagtcgcaccagaaattggacccctccgccgtccacggcgtcaccaggttctccgatctcactccgtccgagtttcgccggcagt

SEQ ID NO: 3445 - DNA, 376 bp, Glycine max
  Clone ID: LIB3028-020-Q1-B1-B9
cagacagatgcggcagcaaataataatggcttcaaatcccaaacctttgacttttgaggaggtggctaatcacaacaacacaaaggattgctggattattatcaatggcaaggtgtatgatatcacgccatttctggatgagcatcctggaggagatgaagttttggtaacgtcaacacggaaggatgccaccattgattttgaagatgtgggccacagtgattctgccatacatatgatggaaaaatacttcgtcgggaaggttgacacttccactcttccagcgaaagttaaccatagtctgccacaacctacacaagcaggtggcgctgggaatcaatcttctggatttgttgttaaaatcttgcaattcctg

SEQ ID NO: 3446 - DNA, 301 bp, Glycine max
  Clone ID: LIB3028-020-Q1-B1-C1
ccttcacagttcaactcttgctcgacaactactgcagaaaggaggggtgactggatgtacatcgaacccgaatataccttgctatccgccaccaaaacgagcatgtcctatatatattcgtaattgctgacgaaaattagatgtttctggactctaaagtttcactcaaatcgacgggagaagcaattaatgtcatgctgctatatatatatatatagtagttgttattggggcctcagctttttaaaactactcctgtgttaaaacccggggtgtaaaatcttgccttaaaattccgtgt

SEQ ID NO: 3447 - DNA, 403 bp, Glycine max
  Clone ID: LIB3028-020-Q1-B1-C10
cctcaggatatctacactactactgcatctaactgaaatcaaagtttcaattaactgaagcagacatggcctctcagagttgcatcattttggctttgttcatcgctattttttccttctcaagcatggacacagcatttgcagcacgccatctcttgcagaatattccagggctaccagatttctctacaccccccaccttgccacctttaacaatcccaaatgtactatgcaatggatccatattcacattcttacccatcttatgtccaccatcttcaagcaccagtactactatcccttaaggcttcacttggagtttgatacataatttatgcactaatctctacgtactcgatctgcatttcggttcaattctcattgcatgccttcctcgatctcg

SEQ ID NO: 3448 - DNA, 230 bp, Glycine max
  Clone ID: LIB3028-020-Q1-B1-C11
gaggccaactaatttctttgagagaaatccagtccttaagaccctttctcctggcattgttaaatttctagggtttctcacaacctggatttgcttttgagctttgtcactttaagtacaatattgttgatcgatagatccggagaaacattatctttttactaatatcggtcatatgtgctaaggtgagaaaataataattttgaataatgattcctctatatcattgt

SEQ ID NO: 3449 - DNA, 393 bp, Glycine max
  unsure (1)..(393): unsure at all n locations
  Clone ID: LIB3028-020-Q1-B1-C12
ctctagcacacaaaacttgctatagcagtaagctataactcatttgaggctctgtgagaattgagaaatggctaaagatgttgaggttcaagagcaaggaggagagtactctgccaaagactaccatgaccctcctccagcacctttgttcgacccagaggagctcacacagtggtccttctatagagccctcatcgctgagttcatagcaacccttctcttcctttatgtcactgtgctcaccattattggctacaaaaggcagactgatacaacggtaggtggcaccgactgtgatggggttggcattttgggcatcgcttgggcctttggtggcatgatcttcatccttgtttactgcaccgccggtatttcaggangacacataaaccc

SEQ ID NO: 3450 - DNA, 405 bp, Glycine max
  Clone ID: LIB3028-020-Q1-B1-C2
gaaattcggtccaaccaattttccagttaccttaaggttcaaacccaaggaatttggaagccagggaacaacaatggaggcaagcaacaacaagttccggtactcttaaagcaactcctttccttggccaatgcaagggtgccaatgccaatgctcttagggatgttgtctccatgggaactgggaagtacaccatgggcaatgatttgtggtatggaccagacagagtgaaatacttgggacccttctcagctcagaccccttcatacttgaaaggagaattccctgaggattatggatgggacactgctggcttatctgctgacccagaagcatttgccaagaacaaggctcttgaagtgaatcatgggcgatgggccatgcttggagcactaagatgcatca

SEQ ID NO: 3451 - DNA, 325 bp, Glycine max
  Clone ID: LIB3028-020-Q1-B1-C3
cttacttaaactcagaattcggtccaaggaaagaccactgattctaggggatgtaacagccaagaacttaaaggaggttggattcaacacatgggagaagttaattctcagggatccatctgagtactctggtaagttatcatttgaatacaaatcagctgaaagagacaagctggataaggagggatacagaatcattggaaacgttggggaccaatggagtgacctcctgggaaccaccaaagggactaggaattttaagctgcctaaacccttgtacaatgattaagctctcaaatcaagcctcaaagttgcgccttaattt

SEQ ID NO: 3452 - DNA, 317 bp, Glycine max
  Clone ID: LIB3028-020-Q1-B1-C4
caaacatccatcatcattattattttactccgaacgagttgacaccgattccactcactcaaccatgagccgattcaggcgttttgagctcatagaacaaccacctttcttccactcctgctactctttcccctccttcgtcctccaagaatcactctctctcgagctcgaactcctggcaacttccaagcaacttcgaggctttccaaaatatggtgcacgcgccgtcgttcgcttaccggggcgtggaaaggcatctcgagaatgagttgcgtttgcagagcctctctgaccgtgtgggggagctggattcccgg

SEQ ID NO: 3453 - DNA, 243 bp, Glycine max
  Clone ID: LIB3028-020-Q1-B1-C5
gacaatcggttccttttgccttttgtcaccttcagtttcctccctgttagtcaaattgatcataatccatagcaggacgaggacagagacaattcaaatgtgaaaatgaacagaaagcataaagcattgtgttacatcaaaacatctgtgccctttctgttactactttgaccaacaacacaaaagataaacccaagaggaagacaaaaaaaaagttagtcaatggtcatccaaatggaccaa

SEQ ID NO: 3454 - DNA, 400 bp, Glycine max
  Clone ID: LIB3028-020-Q1-B1-C6
acaaggcagaaagcaagctcatcctagagttttaaaaatggcagcagcctcctccatggctctctcttccccatccttggctggcaaggccgtgaagctgggcccatcagcccccgaagtcgggagggtcagcatgaggaagaccgtcaccaagcaggcctcctccggaagcccatggtacggcccagaccgcgtcaagtacttgggcccattctctggcgagcccccgtcctacctcactggcgagttcccaagtgactacggctgggacactgctgggctttcggccgacccagaaaccttcgccagaaaccgtgagctcgaagtgatccactccaggtgggccatgctcggggccttgggctgcgtcttccccgaactgttgtcccgcaacggggtc

SEQ ID NO: 3455 - DNA, 213 bp, Glycine max
  Clone ID: LIB3028-020-Q1-B1-C7
caaacatggtcacccccggatccaattctgctaaggtttcccctcaggtggttgcggagcacactgttagagcccttcagagaaccgtgcctgctgcagttcctgctatcgttttcttgtctggtgggcagagtgaggaggaggcatccgttaacctcaatgccattaaccaggtcaatggaaagaagccatggtcactctctttctcctttg

SEQ ID NO: 3456 - DNA, 321 bp, Glycine max
  Clone ID: LIB3028-020-Q1-B1-C8
ctcatcttggttcttcttgtgttaaccctaaaagatagtgtcacttgtcaggcgcggcagccttgctctccaccacgattccacgacctccacgccaccacggtcccagtcggcgccggtgcattgcggagtcgcgacttcgctcccgtcgtcactcacattcgctggcgatttgggttgggttgggttgtgagaaggggtaaagtgggggcaggtgtggtgggcgcagctcttgtgtcgcaactataccacatttacaagagttttcatgtgtgagagatttccccaaggggaacccccaggagcaggtattggaaacat

SEQ ID NO: 3457 - DNA, 395 bp, Glycine max
  Clone ID: LIB3028-020-Q1-B1-C9
attgacttgaccggaggcaaaaataccagagcactctttggtatatgcttgtgcacctctgctgttacacagcttacgaaagggaaaagcaaggaggacaaagaagggtcccagttacaatctctagcagccaaagtattagagaaagattacaagcagagagctcccgacaagcttcctcaacttacaactgccttgaagagtttaacattgtcatcatgatgcagcatctcttaaagattattatttagttacttttgacattttctcagattgttgcgagctttaatcaacatatttagatttcctcaatcattttttccccaatattagaatgaaaattcatattggtctgcattttagcttcgataatggatatttaatgaaagacaata

SEQ ID NO: 3458 - DNA, 381 bp, Glycine max
  unsure (1)..(381): unsure at all n locations
  Clone ID: LIB3028-020-Q1-B1-D1
aaaaaaaataaacaatggggatangggtactatttgttgggtttttcttgctatcttgtgttgtgtgtgtgaagggtgtggagccaaaagcctcacccacttgtacatttccggcagtttacaactttggggactcaaactcagacactggaggcatatcagcttcatttgtgccaattcctgcaccttatggcgagggcttctttcacaagccttctggaagggactgtgatggccgtctcattgtagatttcatagctgagaagctaaacttgccatacttaagtgcttatctgaattcccttgggaccaattaccggcatggggcaaattttgccactgggggatccaccatttagaagcaaaatgaaaccatatttc

SEQ ID NO: 3459 - DNA, 391 bp, Glycine max
  unsure (1)..(391): unsure at all n locations
  Clone ID: LIB3028-020-Q1-B1-D11
aattaacactgctagtgttgctggaacctttagtggaggggcttcacatgcctacacaagttcaaagcacgcactaattggactgatgaaaaacactgcggtggagcttggacagtttggtattagggtaaattgcttgtccccttatgtggttgccacaccattgactaagaaatgtttcaatcttgatgaagaccgaaatggtgagatttattccaacctaaaaggtgttcatcttgtgccaaacgatgtggccgaagctgctctatatttggcaggtgatgagtcaaagtatgttagtggtcacaatcttgtgttagatggagggttcaccaatctaaatgtaggattttctgtgtttgggcagtctgagtaaaanatgtcttttaat

SEQ ID NO: 3460 - DNA, 381 bp, Glycine max
  Clone ID: LIB3028-020-Q1-B1-D12
ctcgagccgaatcggctcgagcaaagagagagagtaatcaagatagctcctttgaattttctatcagaatctgagggcccaaaatctagggttttctgtgcttctctggggatctgaagacatgcagtccaagtctgaaactgcaaatcgactgagatcagatcctcattcctttcaacctggcagtgtttattctgagccttggtggcgtggtattgggtacaatcctgtggcccagacaatggctggggcaaatgcatccaattcatcgtctcttgaatgccctaatggtgattctgaatccaatggagaaggtcagtctttgtccaatagcgggatgaatgaggaagatgatgatgccactaaggaatcacaacctgc

SEQ ID NO: 3461 - DNA, 414 bp, Glycine max
  Clone ID: LIB3028-020-Q1-B1-D2
ttcatggctgatcggtggaatcctgccaacttaagagactcgagatatgtatggttgcctttgatagtggcaggacctgttgatcagcctcttgagtacagttttgaattcccattgtggtcaagagtgtctatctattggcacagaaaatggagactgcctcaaggctggaacggcttcaaataatgtagcttctctttgtacattgtaatatacaaagatttggtatacggttatatagaaacccgagtctcaataatatgctcactttaatttagggtaagctgagaatagtttgagggagcgcatgtatacgagaaagattatccacttgattgggattttgctaaaaatccagcattgtttatgaattgtgtcatgacatcatgttatgaaatggtagttatgtaaaaa

SEQ ID NO: 3462 - DNA, 329 bp, Glycine max
  unsure (1)..(329): unsure at all n locations
  Clone ID: LIB3028-020-Q1-B1-D3
gagaaaaaangaagaaacagaacaacacagaaactcaaaaccaaaataaaattattatggatcacattcataggttacgttgttttgggacaatacccaaaattccttttctaatgctactttccctgcttctcttcagtttcgttaacgcatccttcgacctcgctactatacccttcaacgacggctaatctccgctcttcggagctagcaaagttgttcgctccgaagatggataccgcgtacaactccgcctcgatcgctaaacaagttcgggtttcaattcctccagtatgtaccagtatggattcttcaccgcgagaatcaag

SEQ ID NO: 3463 - DNA, 394 bp, Glycine max
  unsure (1)..(394): unsure at all n locations
  Clone ID: LIB3028-020-Q1-B1-D4
gtnacaagagaaagctaaaatgggacttgggactctgccactgaccccttcttacagcagtttctcttcaaagtcaggagggcttttacatgacatcaccaatcacagcagggttaatagaagcatgaaattcagagtttcagccaaacaagagaagcaagaagagaagaaaaagcaatctttgttcagcagtgtgactgaagctcttgatttttctcaagtgagatctgctgaggatgctcagcttatagaagaggctannagaaccacaagatcgggagaaacgattagtatggaacactatggagctcctagaaagaaaattggtgggacatacaacgattttttcaaatcttacgttgaagttgaccgggcatatgtaaaagaaggatgg

SEQ ID NO: 3464 - DNA, 321 bp, Glycine max
  Clone ID: LIB3028-020-Q1-B1-D6
gggatggagaaagtgaaggtgcttcggcgactcctcgagacaccaggggttcaccaggggccagcctgtttcgacgctctgggtgcgaagctcatagaatccgctggcttcccctactgcatcaccagtggcttctccatcgccgcttccaggttggctctgcccgacaccggcttcatctcctacggcaaaatgctggaccagggccaactcatcacccaagccgtttccattcccgtcattggcgaccccgacaacggctacggcaatgccatgaacctcatgtgaaccgtcaagggtttcattgccgccggtttcgca

SEQ ID NO: 3465 - DNA, 333 bp, Glycine max
  Clone ID: LIB3028-020-Q1-B1-D7
ggtcttgcggctctggccaaccacctatcagatttcccttcaaactcatcaagggaattaaagatgaatgtggttatccggggttttgtctatattgtactcaaaaacatgagactatgcttgctctctcctccgtaaaactccaagtcagttacataaactacgaaaatcatgaaattgtgttgaatgacccggaaaattgccttccgcacaagtttctgcaaatcaacgattctcttattcatccttacaaatttgacgatgaagctaaaacaagttagttgagcttcttcaactgttcttcagttgagcatcaacacctgagaaacttac

SEQ ID NO: 3466 - DNA, 368 bp, Glycine max
  Clone ID: LIB3028-020-Q1-B1-D8
gcaatttcgtcacatcaaaaatatccaatatgagtacggcaccggcagattggagaaccgctcgtcgttggaggcggacatagcggctgtgaagcccagccacgtgttcaacgccgcgggtgtcacgggtagacccaatgtggactggtgcgaatctcacaaagttgaaaccatccgaaccaacgtcgtcggcactctcaccctcgccgacgtctgccatcataaaggcctcatcctcatcaactacgccaccggctgcatcttcgagtacgattcttcccacactctcggatccggcatcgccttcaaggaacacgacactcccaatttcaccggatccttctactccaagaccaaagccatggtgg

SEQ ID NO: 3467 - DNA, 317 bp, Glycine max
  Clone ID: LIB3028-020-Q1-B1-E1
tgtaaatgttggaaatcgcttctgatatgtgtaactctgttgctatcttggcagatctagtcactttttaagagatcttttactaatgttggttctttgtgcgtaatttttataatcccagttattagttatacacacacacacacaacacaacagaacagtgtcatagtttgttgttgtaagctatatatgcattcatggcttctgctaattgtcctgctgctctgtttatcgcctttgcattgtcctgtcctgtgatcttgcaactggctatcaggcaatatttaacaacattactggagtgtgactcatgccac

SEQ ID NO: 3468 - DNA, 184 bp, Glycine max
  Clone ID: LIB3028-020-Q1-B1-E10
gagccaaattccattttccaattcaaaaccctaactccgttcgaagcaccaaatcgtgatggcaccaaaggcagataagaagccaccagagaagaagcctgtggaggagaagaaatcgacggtgggagacaaggctccggcggataagaagccaaaaggcggaaagaagcttccgaaagaagga

SEQ ID NO: 3469 - DNA, 299 bp, Glycine max
  Clone ID: LIB3028-020-Q1-B1-E11
aaacccgaaattcggcccaagcaaaatccctatccagtaaattaactataaagccaacccaacaattatccctttccttccggccccgctttgctttcctggccctttcaaaaaatgttgaacaatttgtggacaaaattggaaacccaattttcccaggtggcacatattacattaggccacaaccttggggggctgccggtgttgaattgaaactaggccggaaaggaaaaccaaatggcccatttaaggttttgcaaaataagccacaaacttcccttggaaaacaattcaaatca

SEQ ID NO: 3470 - DNA, 401 bp, Glycine max
  unsure (1)..(401): unsure at all n locations
  Clone ID: LIB3028-020-Q1-B1-E12
gttgaaacacaaagaagaaaaaatgggttcctctttgtggacttgtctgattttgttatcacttgcttctgcttccttcgccgccaacccaagaacaccaattgatgtgccatttggcagaaactatgtgcctacttgggcctttgatcacatcaaatacctcaatggtggttctgagattcagcttcatcttgataagtacactggtactggcttccaatccaaaggatcctacctgtttggtcacttcagcatgtacataaaattggttcctggtgattcagctggcacagtcactgctttctatttatcatccacanactcagaacatgatgaaatagactttgagttcttgggaaacagaaccgggcaaccttacattttgcaaactaatgtgttca

SEQ ID NO: 3471 - DNA, 247 bp, Glycine max
  Clone ID: LIB3028-020-Q1-B1-E2
aagcatcatcaaaacttaaactcaaagaatcagaaaaagaaagagagagaaatgagtgaagaagccaaaaagaacttcgccggagctctaacggcgatgcccaactccgatgagccgaaaccggcaccggtgccagctgttcccccgaagaaggtcatcatcaagagcgctgatatgatccccgacatgcagaaggaggccgttgatatcgccgtcgccgcgtttgagaagtacaatgtggagaaag

SEQ ID NO: 3472 - DNA, 145 bp, Glycine max
  Clone ID: LIB3028-020-Q1-B1-E3
ggtccaagggccttgaatccaggtcccaacgggttggaaattttttgggaaccttatggttgctgggaatttgtccgtttccggggaacacaattttggaagaggttctgataacatccgtgacaaacatggcatctgggcggtc

SEQ ID NO: 3473 - DNA, 375 bp, Glycine max
  Clone ID: LIB3028-020-Q1-B1-E4
tttccctctctagaaccttcctttttcctctttccgtgtctgtctgtctgtctctctctcccccatggcttccgatctcgaagcaaaagccaaagaggccttcgtcgaagaccacttcgaactcgccgtggaccttctttctcaggccattcacctcgaacccaacaaagccgaactctacgccgaccgagcccaagccaacatcaaactcaacaacttcactgaggctgttgctgatgctaacagagcaattgaattgaattcttctctaccaaaagcatatttgcggaaaggtactgcgtgcatgaagcttgaggaatatgagactgctaaggctgctctagaggtgggtgcatcaatgtctccagacaactc

SEQ ID NO: 3474 - DNA, 395 bp, Glycine max
  Clone ID: LIB3028-020-Q1-B1-E5
tgacaaccttagcttgaaggatgcttccattgctaagcagaagctgtggagagcgtgttaaaggatctaattcaaatatgtttgggttacaccgaacgaagctcttgcttttctctacatgtgttgcacgaggcttcacaaattttccaaatggtcatgaatttggcagtgagtttgctatgatgagcagagatcaagtccaactcggaagaatcccagtgtctgacaagctcgtttattggtttgtcacaaggccacggacttctaaagattcaacaatttggaaagacccagttcttattagacagtcattaatagaatcaatgaaaggtttcccagaaggggcggtggagataatacgaaattgcaagttgagcttcttgcatctgactgag

SEQ ID NO: 3475 - DNA, 358 bp, Glycine max
  Clone ID: LIB3028-020-Q1-B1-E6
ctcgaaccgttcttgtcaggaagatatcatgacaaaatggccgtaacagaaacagtcctaaaggatgctggcttccacacatgggagcagttaattctcaacgatccacatcttatcactccaaatgcactttcatacaaatcagcaatgagagagaatctgttgaggcatggatacacaattgttggcatcattggagaccaatggagcgatctgcttggagaccacagaggcgaaaacaggacctttaaacttcctaatcccatgtactacattgagtagtaccttcacctctctcaacagtctaactagagtttgctcctatctatatgtaacaaggtatgctgatatgcactat

SEQ ID NO: 3476 - DNA, 387 bp, Glycine max
  Clone ID: LIB3028-020-Q1-B1-E7
gaagaatttcaagcttcgtgtggttttatgccatgttgatgtggaagatgtaataaagcctcttcttgaagttacaaaaacagctatgcttcatgactgtacactcctttgtggatggagcctggaggaatgtggccgttacttggagaccataaaagtctatgaaaacaagcctgcagacattattcaaggccaaatggatacagattatctatcacggcttactcattcccttacaactgtccgacatgttaacaagactgatgtagtcacccttggtaccacatttgggtctctttctaacattatgggtgcatctatggaagatcttgctcgttgccctggcataggagagcgcaaggtcaagcgcttgtttgacacttttca

SEQ ID NO: 3477 - DNA, 402 bp, Glycine max
  Clone ID: LIB3028-020-Q1-B1-E8
cataaatgctcaaactctatcagaaatggagatccctgaaagctatattgaatccctacccaagaatggaagatcaagtcttggggacttgatctacaggagcattacagatgattttttcgatcctgatcagctcctatcagccatggacatgtcatcagaacataaaatcgtagatctcaaggacagaattgaggcatccattgtgatttggagacggaagatgaaccaaaaagatagcagcaaatcagcttggggttctgctgtgagtatggagaaaagagaaatctttgaagacagggccgaaaccatcttacttctcctaaagcatcgttttcccgggactccccaatctgcattggatataagtaaaatccaattcaatcgggatgttgggcacgc

SEQ ID NO: 3478 - DNA, 385 bp, Glycine max
  Clone ID: LIB3028-020-Q1-B1-F1
tgaatatgctctttacagtacagccaagtcatcataacgattaataattagctcatagtttttttggaagagttgtgaaaatgggacttgtggagctttttggggtggcatctatgcccgtgatcaaagtactactaatcactgctgttggcttgcttcttgcactggacaacgtaaatttgttgggaaaagatgcaaggatacaagtgaatcatcttgtgcattatgtgttcaatcctgcactggtgggtggcaatttggccgacacgattacttttgagaatgttgttttattgtggttcatgccggtcaatatcctcttgacgtttataataggctctgccttaggatggatccttatcaaattaacaacggctcccaaaca

SEQ ID NO: 3479 - DNA, 390 bp, Glycine max
  unsure (1)..(390): unsure at all n locations
  Clone ID: LIB3028-020-Q1-B1-F10
aatggcatgacagcagggcacaccattgctgtgtttgaatgtgttggtaggagcccatatgattattgttcgagatacttcacagttgagaattatcgattaacatatgcagaatctattcaccctgtgccaaatgttgacaaaccaccagtccagggtgaatctacttctttagttatggtaacccctccaccaacaaagcgccctccaggtcggccaaaaatgaagcaagttgaatcaatagacataattaaacgtcagcttcagtgcagtaagtgcaagggacttggccacaataggaagacatgcanactatcatagtatcacaattaacaacataggaatcgttttttaatcaaaatgcacatctctgagctatttccaacaaca

SEQ ID NO: 3480 - DNA, 403 bp, Glycine max
  Clone ID: LIB3028-020-Q1-B1-F11
gttcttcttttgtggcacaagaagaagcatgcatcaacagggtgataagtgatgaatctcgtattgctctctcttctgacagtacacaaaagggagataaagatgagttcctcctacctgaatttaatgatcttgttaaggacatggactttggagccatcattgtcagaaattcttttaaagaagatatggaagcaccatggttaaaagtaggatcttctatagcatatgctagtcccgagaaggacgactatgagcaagagataagtcaactcaggagcatgattagaatgcttcaagacagggggcgaagtcttgaggttcaactgcttgagtactgtcgtcttagagagcaagaaacagcagtgatagagctccaaaatagattgaaagcaagtaccat

SEQ ID NO: 3481 - DNA, 382 bp, Glycine max
  unsure (1)..(382): unsure at all n locations
  Clone ID: LIB3028-020-Q1-B1-F12
atcatttctcaatcactgccacactgatactactgacacgcccacctaccaccttaatgctcttcaactcccactactgcctcactctctctcaggcccttcaaggttttctttaggataaagaatttatgggtggatcaatttcaaaacggaggcgttctaagcaacattcgtcaaatttttttcctcggtatcagcaacctcatttcccacaaagccaagataatgggtctgtggggcattatgggtattcacctcagagctatggtggtggtcgtgctccagaacaaggaaagagctttgataggaagtattcnaagatangtgatgattataagagcttggaccaggtaactgatgctctggcaaaagctggcttaga

SEQ ID NO: 3482 - DNA, 384 bp, Glycine max
  Clone ID: LIB3028-020-Q1-B1-F2
cttcacttgagtccatggttgatttcgccactaccaagctcgggagcaacgatgttgatgctgtttccacagaagtgacaaaaaaagataatgagttacaacagtatacaatggcaccaggggttaagaggttgggtgaggacaaggctagtgttgtgtgtcacaaggagaattacccttatgcagtgttttattgccacaaatcagaaaccacaaaagcctattctgtcccattggagggtgctgatggaagcagggtcaaagcagttgcagtgtgccatactgacacatcaaagtggaatcccaagcatttggcgtttcaagtgcttaaggttcatccaggaactgttcctatctgccacttcctgcctcaagatcatgttg

SEQ ID NO: 3483 - DNA, 406 bp, Glycine max
  Clone ID: LIB3028-020-Q1-B1-F4
aagtggtcacatgaaacttcagacacaggtcttctttgcttcaattgatcagcgcagtgaacgtgcagcgggtgagagtgcgtgtaccgctcttgttgcggtaatggctgattggttccaaaacaatcgtgatctcatgccaataaagtcccagtttgatagtcttattcgggaaggctcgttagaatggaggaacttgtgtgaaaatcagacctatagggagcgattccctgacaaacattttgatcttgaaacagtcatccaagccaaaatacgccccctttctgtggttcctggcaagtccttcattggatttttccacccagaaggaatggatgaagggagattcgattttctgcatggggccatgtctttcgataacatctgggatgagattagtcatgct

SEQ ID NO: 3484 - DNA, 403 bp, Glycine max
  unsure (1)..(403): unsure at all n locations
  Clone ID: LIB3028-020-Q1-B1-F5
gtatttatttaattggcaaaagacggtgtttgggtttcacagacagacacacactcggttctgccttcacaaaaaaattatcgagatcccctttttctcctaagaaaagccatggctaagggtcccggtctctactctgacatcggcaagaaagccagggatctgctgttcaaggactaccacagtgaccagaagttcaccatcaccacctactcacccactggagttgctataacagcatcaggaaccaggaaaagtgaactgtttgtggctgatgtcaacacccagttgaagaacanaaacatcactactgatatcaaagttgatacagattctaatctcttcacaactatcactgttaatgaacctgctcctggtctgaaggctatttttaacttcaaag

SEQ ID NO: 3485 - DNA, 270 bp, Glycine max
  Clone ID: LIB3028-020-Q1-B1-F7
ggagacaacagatacatccttggttggctctgggtttaaggagggaaattgattcttgttctttgggaaggataaggaatcaatctgatcgctggaagagaggaagtatcaatagtaatggaaatggggatttccaagacgacaacataaacaagcactgaggttaccgagaacaattccaattccagtaggactagcagcatcagcactcagactgaaactgacagccatagctccgttgctgctccctaatccgtaagagaaaaaggc

SEQ ID NO: 3486 - DNA, 402 bp, Glycine max
  Clone ID: LIB3028-020-Q1-B1-F8
cacgttccgagttttctgatcgctcatagagagttcgacgcggcggttgcagaagaagattgcaagatgaagttcaacatcgcgagtcccaccactggatgccagaagaagctcgagatcgacgacgatcagaaactacgagcattttgggacaagaggatctcacaggaggtcagcggagatgcacttggtgaggaatttaagggctatgtcttcaaaattactggaggttgtgacaaacaaggattcccgatgaaacagggagtgcttactcctggtcgtgttcgacttttgcttcacaggggaactccttgcttccgtggatatggaaggcgtaatggagaacgtaggagaaagtctgttcgtgggtgcattgtcagcccagacctctctgttttgaac

SEQ ID NO: 3487 - DNA, 404 bp, Glycine max
  unsure (1)..(404): unsure at all n locations
  Clone ID: LIB3028-020-Q1-B1-F9
tcagaacgatgtgcatcgatggcaatgggaaagacagtgcgatactttagcaacttcttcgataacgactatgcaacatcaatttactgtcagctgaggaccttggtgtatccaaggaagagaggcaacttgtggactccctgtaggaaacttgcttcaacgatccgtcatcgcgtcgagagaaacgtcttctaatgcttccgggggatgacgtgcgccctccagatgttgctatcacatactttgagactcctcgtacatcttcaaatgcanatctatcatccaagaacgaacgagacaagaatgagatccctttgcgttaatggtcaggaccttctcctacatacactatcaaccacagttcacatatcggagatgctacttcatatacagatgctaatata

SEQ ID NO: 3488 - DNA, 364 bp, Glycine max
  Clone ID: LIB3028-020-Q1-B1-G1
ggagacaacagatacatccttggttggctctgggtttaaggagggaaattgattcttgttctttgggaaggataaggaatcaatctgatcgctggaagagaggaagtagcaatagtaatggaaatggggatttccaagacgacaacaaaaacaagcactgaggttaccgacaacaattccaattccaatagcaatagcagcagcaccactcagactgaaactgacaaccatatctccgttgctgctccctacgccgtatgagaaaaggtcttagtctatcactctgattgtctttacgaagccaagctgaggcaagctgagtatcacaacactaaaggctggcacttcctcgttcattatcttg

SEQ ID NO: 3489 - DNA, 393 bp, Glycine max
  unsure (1)..(393): unsure at all n locations
  Clone ID: LIB3028-020-Q1-B1-G10
ggctaacagacggagtggctgtggaattgttcagttaccatgtagcttagccatgatgcccgaactgtcttcattctacactgattattgcaacaggtggcaatggatagaattggaagaaggtgaagaaaaattgggctcaataatatcttcaaaggcacaattgttttgtgccacgaattgcaatctatgtgatgattttttcttagcaggtttcaagaggtttgctcatgtangatatttaaatctatcggggaataatttcacaatccttcctgaattcttcaaagaactgcaatttttaagaactcttgacgtgagtgattgcgagcatcttcaagaaattagagggcttccaccaatcttagagtantttggtgcaagaaactgtgt

SEQ ID NO: 3490 - DNA, 324 bp, Glycine max
  Clone ID: LIB3028-020-Q1-B1-G11
aggaccaatgggaaaaggagaaagaagaaaaaaaaagggaatgggatggttgcaattgcagagaatcgtgaccaagggaagtgctaatttgatctcaccactcccactttcacgattcttctcgaaatcttcttccccctatgttgtgaaagttgggattccagagtttctaaacgggattgggaaaggggttgagtcccacgttcctaagcttgaatccgaaatccgggaattccaaaaaccttccctcactcgcaaccctcaacctcaagaagcttggcattccttgcaaacacaggaagttaatattgaaatacacacaca

SEQ ID NO: 3491 - DNA, 400 bp, Glycine max
  Clone ID: LIB3028-020-Q1-B1-G12
gtccgtcgttttgctcaatacaaatggcttgcaacaagaggagtcaatgaagaagccatacttctttcactacctttggatcttcgtcgagaaattcaacatcacttgtgtctttctcttgtgcgccgtgtacccttcttctcacaaatggatgatcaacttcttgatgctatatgtgaacggcttgcgtcatcactgagcaccgaaggaacctacctatttcgagagggtgatccagtggatgaaatgttgtttatcattagaagtcaattggaaagctccacaaccaacggaaggaaggtctggattcttcaattccatctcactccggcctggtgacttttgtggggaagaattgttgacatggggcttaatgccaaactcaaacctcaacctacct

SEQ ID NO: 3492 - DNA, 93 bp, Glycine max
  Clone ID: LIB3028-020-Q1-B1-G2
ctttctccttactcctcgtccgaacctctcactacttcttcagtcctttaattcaaccctctcaccgacaccaacatcaacctcggttccttc

SEQ ID NO: 3493 - DNA, 367 bp, Glycine max
  Clone ID: LIB3028-020-Q1-B1-G3
aaggtgggttttcactgatcaagcccttcctgcggatcttatcaagagaggaatggcagtggaggatccatcctctccctatggccttcgccttgtgatagatgactacccttatgctgttgatggactagagatatggagtgctatccagacatgggttaaggactacgtctccttgtactatgccacggatgatgcagttaagaaagactcagaactccaagcttggtggaaggaagctgttgagaagggtcacggtgacttgaaagacaagccatggtggcctaagttgaacactcttcaagatctgattcacatttgctgcattattatatggactgcttcagcactccatgcagctgtgaat

SEQ ID NO: 3494 - DNA, 316 bp, Glycine max
  Clone ID: LIB3028-020-Q1-B1-G8
atttgaaattgatacagagctgagagcatcaaggaatcgaagaatagaagattcatttttttttctttttgatatggaagctgatgtttctattatttttgttgcgttttcaaaaccctaaattggagaaatcccaatttccccttctgtctttctgctttggatgtttttcaaccaaaaaattgtgcttttcaaatcttttgctctgatgggtacttcaaatcttctcttgtttttccctctgatgaacctgtgtgctaaggcgggttccaaggtggtgcttaatgggaataatatcaatctcccctttgaagaa

SEQ ID NO: 3495 - DNA, 395 bp, Glycine max
  Clone ID: LIB3028-020-Q1-B1-G9
gctctagcttttctcgaaagcttcctttttgggctatatgttcacaaacaccatttcccctgaacacccaattcctgtctaaaacacacttctcaatatctatctctagaatggctaaccatgatgcaaaagaagaacaaaggccactcaaccaatggagaagaagcaaagggggattcatggcttccatgttcatttttgtcttgtcagcattggacaacatgggttttgtggcaaacatggtgagcatagtcctatacttttatggagtgatgcactttgatttggccagttcagccaacaccctcacaaacttcatggcttcaacctacctgctttcccttgttggaggcttcatctcagatacttacttgaacagatttacacatgcttgc

SEQ ID NO: 3496 - DNA, 318 bp, Glycine max
  Clone ID: LIB3028-020-Q1-B1-H1
aaaaagaggaagatactgctttggtcaacccattgctttgtatagtttccacactttttttcacctggttcaagtcaaagaaattattgtggtttgtgatccttcatacaaggacatttttgaagatgcaaagggagattaccaagcagaactcaaatttgcactgcctggaaaagaaagacaggattctgtttataatggctttcaggctgttgatcctaactctgaacttgtttgcattcatgattctgcaagacctttggtattatcagcagatgtgaaaaaggtccttaaagatggtttattgaatggagctgc

SEQ ID NO: 3497 - DNA, 317 bp, Glycine max
  Clone ID: LIB3028-020-Q1-B1-H10
aaggacaaacctcgtgtttacatgggatgcatgaaatcaggggaagttttctctgagctgaaccataaatggtatgaaccagagtggtggaaatttggtgacaaaaaatcatactttcgtcatgcatcaggagagatgtatgtgatatcacaagctttggctaaatttatatcaataaacagatctattctccgtacctatgcccacgatgatgtgagtgctgggatctggtttatcgggcttgatgtgaagcatgttgattagggcaagttttgttgctcatcttggtcgacaggagcaatctgtgctggtgtttg

SEQ ID NO: 3498 - DNA, 361 bp, Glycine max
  Clone ID: LIB3028-020-Q1-B1-H12
tcgagcatatccaaatggccctttacattacactaataattggcctcctagtaaacaccctagtactctataaatagcatttgcatgcaccttagtcttcaccaaaatactcctcttggcatcttgtgttgtgtccctcttttaagctatttccttctcttaacacaattggttgtgccaattgccatagtcaccaaccaattaacaaaggtatatatatcatcatatcatcaccaaatgaaaaatattgggttgttttttcttgtggtggtggctacttttgtggtggcagccacagctggtagcttttaccaagactttgaaataacgtggggtggtgagcgtgccaaaatctatgaga

SEQ ID NO: 3499 - DNA, 407 bp, Glycine max
  unsure (1)..(407): unsure at all n locations
  Clone ID: LIB3028-020-Q1-B1-H3
ggtccaaggtgggaaattaaaattgtaaaatgagccaaagaaatttatttaagggtccaaaatcccaattaccaaggttccggaaattttttggcaaaccgatccaccccttgtttggattgatttaaccaaaccaattttaacaaagatttggaaaaagcagaagaacaaaacaagatgtggaagaaagacagaggaaggtgttgagagacagagccatgaaaggagaaacttggtttcctaagaattttagggtgtcctacggtaaagacacgtgggaatgggactgttcaccaactcataaatgggtccctgaggccccatcatagctcaataatttaatgttatgtactatgtactatgatgtccttaaatacagccaanacacagttaggctgttcaaaaat

SEQ ID NO: 3500 - DNA, 372 bp, Glycine max
  Clone ID: LIB3028-020-Q1-B1-H4
acgcttaactcgaaattcggttccgagaagcattctcaaaccttcttttgctcctcctctggtttgtgacttcatgttggtatcattggtttggccatagttgttccctggcctggccaggccactgactcttgagtcttgagccagttcctttttcgggttgttgaacattccggattttaaagcattgccttctaccagtcatattcttgtcacttctaaaaaatggaaaactcagatacaacactgacaagttcatccctgcctccaccacctccagtatctgcggaggagccagagcccaagaagttgaagatgttcaacacaacttctgatgatgaagaaacaggcaccaagaaaagatacaagcgc

SEQ ID NO: 3501 - DNA, 376 bp, Glycine max
  Clone ID: LIB3028-020-Q1-B1-H5
cttcgtctcaaatctcttcgttccttcgattcgttccatttcttccaaaatggccaaagacccagttcgcgttctcgtcactggagctgcagggcaaattgggtatgctcttgtccctatgattgctatgggagtgatgttgggtcctgaccagcccgtgatcctccacatgcttgacattcctccggcagcagagtcattgaatggggttaaaatggaattggtggatgctgcattccctcttcttaaaggtgttgttgccacaactgatgtggttgaggcatgcactggggtcaatattgccgtgatggttggtggattcccaagaaaagaaggtatggagaggaacgatgtgatgactaagaacgtctccatt

SEQ ID NO: 3502 - DNA, 391 bp, Glycine max
  Clone ID: LIB3028-020-Q1-B1-H6
aaaaaaactatggctagattctgctggagaccagctgcggtgggtgatgatggagatgtgaatggtccacttgaacggctgctatggtacaaggatttggggaaccatccttatggggatttctcaatggctgtgattcaagctaatagttcattggatgatcgtagacaacttgaatctggaccattgacttcggactatttgggtcctcaaggaaccttcataggtgtatatgatggtcatggtggcaccgcagcctcgcaatttgtcagtgacaatcgtttctgcaatttcaagaattttgcaggtgaacatcaaagcatatcggagaatgttatacaaaaagccttttcagcaacagaagagggttttctgtccgttgtgaagaaac

SEQ ID NO: 3503 - DNA, 375 bp, Glycine max
  Clone ID: LIB3028-020-Q1-B1-H8
caccaagcggtggctgtccgttccggcgccgaccagtcggtgttctaccggtgcagctttaagggttaccaagacaccttatacgtttacgccaaccgtcaattctaccgtgactgtgacatatacggaaccatagacttcattttcggtgacgcagtgacggtgcttcaaaactgcaacatctatgtgaggaaaccgatgagcaaccagctgaacacggtgacggcacaaggaagaaccgaccctaacgagaacacagggataatcatccataactgtcgtataactgcagctggggatttgaaagcagtgcagggctctttcagaacctttctaggtcgcccatggcaaaagtactcaaagactgttttcatg

SEQ ID NO: 3504 - DNA, 401 bp, Glycine max
  Clone ID: LIB3028-020-Q1-B1-H9
ctcagagaaccaaaagcaagtttgtctttgctggaccttctaaatcagctgagacccttttgagatacattgctgcggagcaacttccggtcaagtatgggggactaagcaaagatggcgagttcggaatttccgatgctgttacagaaattacagtgaggccagcagcaaaacatacggtagagtttccagttactgaggtgggtttggtcttttcctttgtgtttttttgtcggaattgattgatctcgattgaggtagaattcaatgaatgcagcatagaaatgcggagtctttcctaggattcctctgtcctcaagattttaatattatccttttcgttctttacttatttctcccgtttcatgcgacaaattagggcaaacccatgccccgagatg

SEQ ID NO: 3505 - DNA, 324 bp, Glycine max
  Clone ID: LIB3028-021-Q1-B1-A10
agtcggtcggtcagcctactaatctctccttttcttcttcttctctacagtaatttagtttgtggagaatacataattagctgtttagatgatgttggtcccttgtgtagttagttagctatgtgtttgctgtaatggtaaatgtcaggatttcttttaaacatcttcatatgtatttgccaatatcataatgtgtcgtataacatcataccttggtttaagcagcatgttgacgaaaccttcactaaattttaattttgggtttagtttattttatacattaagtggacaatgcagccgaaaaaaaaacatcgttcaaccaac

SEQ ID NO: 3506 - DNA, 77 bp, Glycine max
  Clone ID: LIB3028-021-Q1-B1-A11
cgtacgtaaactcagatatcgcatgaaagatcatgtggtcagcctgccagcctcacgcctattcttccgtcatcaac

SEQ ID NO: 3507 - DNA, 333 bp, Glycine max
  Clone ID: LIB3028-021-Q1-B1-A2
aaaatactgcaggagttctccaagctctttggcgcgtttaatactgcggattttataccctatctcgggtgcgtggatccacaaggtttgaactcgagactcgctagggcacgtggcgcgctcgatagcttcactgatcagatcatcgatgagcacgtgcataagatgaagaatgatcagagcagtgaaattgtcgatggagaaactgacatggtcgatgagttgctggcgtcctacagcgaggaggcgaacttgcacaattcatcggacgatttgcacaactctctcagactcactaacgataagatcaaggctatcaatatggacctgatg

SEQ ID NO: 3508 - DNA, 358 bp, Glycine max
  unsure (1)..(358): unsure at all n locations
  Clone ID: LIB3028-021-Q1-B1-A5
atgcgatgtggtgagtgaattgcagagtcggcaatggtatgtgtatgagcgtagtcacacttgaattgaattgaagctctgttccttcatgtgacgacaatctccaacgtcatctgagctctcgtatattccccagccatggccgaaaaggtcaccataatgaggctcaaggttgatcttcagtgccacaaatgctacaagaaggtcaagaagattctctgcaaattccctcaaatccgagaccaggtgtacgacgagaagaataacatcgtgaccatcgcggtggtttgctgtaaccctgagaagctcagggacaaaatttgctgcanaggttgtggtacgatcannagcattgaaa

SEQ ID NO: 3509 - DNA, 394 bp, Glycine max
  unsure (1)..(394): unsure at all n locations
  Clone ID: LIB3028-021-Q1-B1-A6
ctttagagtaatgggttctttccagacaggatttggagggggagtgggatcagcttttccttcagcagcaaccttccctcattacgccatccagcaagggataccttataatgtttatgggtactctccttactcgccggattacacttaccctacgagctactatggtgtgtatggaggagcaacagcacagtacccagtttatggaagtggacctgctgcagctgcaggagggatgatgagcggtggtgcagcgttctacccatatctgcagtacggaggagaagggagtggcggcggcggtacttccggacagggttatggtgtgaactaccctcctcaggctcatctttttcagtattctcncattgcttccaccgctggctatgcccag

SEQ ID NO: 3510 - DNA, 385 bp, Glycine max
  Clone ID: LIB3028-021-Q1-B1-A8
cacggttggattgttagttgctaaggctctcacttcctcggcaaacccgtattatcagggaatttctcccggtagcaccccagtgctcgcattggatgtatttttggtgcaggcttcagcgaacactattctttctcatttccttgggcttgttttctcactggagttgctgcgatcagtcacattaccaccttcagatgcaactccatttcccaaatttgcgtaatatgtgcctcgagactagataatgaaatcacacacccaaaaattgtccctcgtctcttgtggttatttgcttaattaattgtgttcagctttttgatacagcgttttgaggccctcttcctaggcaattgacctcatcgtgtaattccaatttttaaag

SEQ ID NO: 3511 - DNA, 357 bp, Glycine max
  Clone ID: LIB3028-021-Q1-B1-B1
ctgagacctgataaagattccatcttgccacttgggtatgtcccattctgaaattttcccccaatccccaatagcatgtgctttgttacattagtatcaatcaagtacaggaccaaaccaatttagttgaagcatattgataaatatagctctagccctcaaaagcaactgggcaagcctgttttggacgttgaggcatatgacttcgtcagcaccacctataagttgttgtccaatgaacactgctggtacagttgggcggcaaccaacctgaatcagtgccctctctatttgctgaccatttgtcattttgtcaatctcgataaccgtatggttggcaccaaagctgcatatgag

SEQ ID NO: 3512 - DNA, 135 bp, Glycine max
  Clone ID: LIB3028-021-Q1-B1-B12
agaatttgttataatactagctagtactggtattttagcatgttcctgcaaaacagcgacagagattgcaaaattggtaattacaagtccaagccaattagtattcaaaagagtttggtatactcatttctaact

SEQ ID NO: 3513 - DNA, 369 bp, Glycine max
  Clone ID: LIB3028-021-Q1-B1-B2
ggcttcttcaccttcctcagaaaacaaaaacctagagggagtagctggtggtgccggagagaaacccattccacttggtgagaacgttctgcagaagcatgctgcattctttgacttgaataaagatggtgtcatctacccatgggagacttttaaagggttgcgtgaaatcgggactggggttttgctgtccgttggaggtgctattttcatcaatgtgtttctcagtcagagtactcgtcccggaaagtttccatctatactttttccaattgaaattaaaaatatccaacgcggcaaacacggcagtgacactggagtctacgatactgaatgaaggtttgtaccttcaaaatttgaagaaatttt

SEQ ID NO: 3514 - DNA, 197 bp, Glycine max
  Clone ID: LIB3028-021-Q1-B1-B3
caggcatacttcaatatggtctgaaaccatgaagatcaatagattcctagatgatcttctcgaacgtagggaccaatgagccgaggacatagataacgagcatttatccatcgaagtccgaaaaaaccctcttctgtgctcactctgtcgccaaacgaataacgaacccacattataacatcgggaagcgtatcact

SEQ ID NO: 3515 - DNA, 99 bp, Glycine max
  Clone ID: LIB3028-021-Q1-B1-B4
gaacattgttttaggggagggtattgatgttccaactaacacaaagacatgcgcaatgtaccaaaacaaaaaaagagaaacaagagtttttttttgtcc

SEQ ID NO: 3516 - DNA, 395 bp, Glycine max
  Clone ID: LIB3028-021-Q1-B1-B5
ctccggaatccccgccgtctcccttggtccctctcccggcccttctctctccgccaccggcaaccgcctctctgacttcgccaggctcctcgacttgaacttcgtgttcacgcccattctcactcccattcaccagctcgaccacaacagcttctgcattgacccaaacgaggtcttggccgttaacttcatgcttcagttgtataacctcttggacgagcctccctccgcggttgacactgcgctcaggttggccaagtctctcaaccctagaattgtcacccttggcgagtatgaagcaagtgtcacacgtgtcggggtttgtcaaccggttcaggactgcgttcaagtacttctctgcggtgtttgagtctctggagcctaatttggccgcg

SEQ ID NO: 3517 - DNA, 395 bp, Glycine max
  Clone ID: LIB3028-021-Q1-B1-B6
ctgccattccagctgccatcattgccgagtgctatggctttggaagaccttggatttttatattgagcttacttggacttacaccacttgctgaacgtgtgagcttcatcacagaacaagttgccttttacactggtcccacagtcggaggacttctgaatgctacatgtgggaatgttactgagctcataatagcaatatttgcccttagcagtaacaaaattgctgtggtcaagtattctctgttgggttctattctttcaaaccttcttctggttcttgggacctctctattatgtggtggcattgcaaaccttaaagtggaacagaaatatgacagaagacaagcagatgtgaactcacttatgctgttggtgggattgttgtgctacctg

SEQ ID NO: 3518 - DNA, 354 bp, Glycine max
  Clone ID: LIB3028-021-Q1-B1-B7
gagagagacaaaagcgtgaatcatgtcggacgaagagcatcacttcgattctcaggcggatgcgggagcgtccaagacgtatcctcagcaggctggtaccattcgcaagactggctacatcgtcatcaaatccaggccttgcaaggttgtagaggtctctacgtcaaagacaggcaagcatggacatgcaaagtgtcactttgttgcaattgatatttttaatgggaaaaagcttgaagatattgttccatcatcccacaactgtgatgttccacatgtgaatcgcactgactatcagcttattgatatctctgaagacggctttgtgagtctgttgactgataatggaaatac

SEQ ID NO: 3519 - DNA, 373 bp, Glycine max
  Clone ID: LIB3028-021-Q1-B1-B9
ataatgttggagcattaattatggaaccagttatccaaagtgctggtggaatgcatatggttgatccactttttcagcgtgtgcttgttaaagaatgtcggagtagaaaaattccagtaatctttgatgaggtttttactggcttttggcgtttgggagtagagactgcagtggagctaatccattgtgtaccagatatagcttgctttggtaagctgttgactggcggaattataccattggctgtcaccttggcaacaaatgctgtttttgattcaattattggagactcaaagctcacaacccttttgcatggacattcttactctgcacatgctatgggctgcgctgctgctgttaaatcaatccaatg

SEQ ID NO: 3520 - DNA, 333 bp, Glycine max
  Clone ID: LIB3028-021-Q1-B1-C1
gcagtgtgacatgttgaagacattttcacatgtagaaccaaatactaaaaatcaaatctgtattgaaaagcttacacccaatttgcagcacctgacactcggtgaaaatgaactgaagatgattccgcatggagaatttccaggaaacgtcttgcacaatttaaaagctcttattttgctgaacttcagcgttgagtcctatgaatttgcatatggatttctacaacaggtgcccaatattgagaagcttgaggtgtaatgtacttccttcaaggagattttctgcgttcaaagtcctaatgtggatgatactggactcctatcacagctgaa

SEQ ID NO: 3521 - DNA, 396 bp, Glycine max
  Clone ID: LIB3028-021-Q1-B1-C10
gtgatttttgcttaattactaaaccaaaccatttcttattccctcatcgaaaccttttctttctatatatttcccttttcaatatcatggcacctaacatcaccaccgttgttgccaatgccaccactgagcaattacccaaagctcatggaggaagtagtgggcgtgcctttgtgacttttcttgctggaaacggtgattatgtaaagggtgttgtgggtttggccaaaggactgagaaaggccaaaagcatgtaccctttggtggttgctgtgttaccagatgttcctgaagaacatcgtgcgattctcaaatcccaaggttgcattgtcagggagattgaacctgtgtaccctcctaagaaccagacccagttcgccatggcctattatgtca

SEQ ID NO: 3522 - DNA, 341 bp, Glycine max
  Clone ID: LIB3028-021-Q1-B1-C11
tgaggcaccgggtggaaaggggaatgattttcctggtcaaacagagagaaggaaagtgcagtggacagatacttgtggtagtgagcttgttgaaatacgggaatttgagcccagcgaagtggatgatgagtcagttgatgaatttgacaatgggaatctcaaaacttgttcctgtgctattatgtaaattggcattccaaaggatgacacagatccatttatgaggcgccaagttgttgattgctaacatattccatcactcagcttgaggaaaaggagcagatatttttcagtctagtggagatttatacaccatttcttgcctgagcgataatttgtgt

SEQ ID NO: 3523 - DNA, 363 bp, Glycine max
  Clone ID: LIB3028-021-Q1-B1-C12
cagacatacctacgtgggttcggtcagtgcgcgaagaagagaccgagtccggggatgatcctgcctcaggcaatgaagtatctgaagagaagcttcaggctcttttgaacattgcaatggcatgtgtttcactagtaccagagaacaggcctacaatgagagaggttttaaagatgattagagatgcaagaggggaggctcatgtctcatctaacagtagtgatcactcccctggtagatggtcagatactgttcaaagctttccaagggaagaacaccagagcatatgattggtaactttttttgacagcgtaatagttgaaactatgcattctgatttttcctgaattggttattgatatg

SEQ ID NO: 3524 - DNA, 360 bp, Glycine max
  Clone ID: LIB3028-021-Q1-B1-C2
gtttttcaccgattgggtcaacccgacggatcttgattcagtttccgaatttgggtcgggttgccaaacccaagggatggtgaattatgattgtaatgacttatttgtcccttctgtgccgcccttcggccacagccatgtaaactacatggtgggggcaccaccgtccgaggaggaggttcaaagcggtgtgaggactcaacaggccgatggggccgcatgttttcagcagaacccaaatgcccgattgttaccgggctcgggcgacccatttgggtttgggttcatcatgggtcagcaagttgagttcgggtttagggactgaacgatctgatagtgttgttctgtaaataattgggg

SEQ ID NO: 3525 - DNA, 351 bp, Glycine max
  Clone ID: LIB3028-021-Q1-B1-C3
caaaaaccatggtgtcaccaatctcacttattgtcctcttgttatcagtttcttgagcagattcagcttcagttcaagaaagttttgtccaatgtctcaacttgaattcggacaaaacatttccattttactcatcaatctacactgcaagcaacccttcattcaccagcatccttgactcctccgcacagaacctaaggcttttggtgccttcagtgccaaaacccgagttcatattcacaccctctcgtgattcccatgttcaagcagcagtaatctgctccaagaaacttgggattcacattagagtgcgaagtggcggccatgactatgagggaatttcgtacgtct

SEQ ID NO: 3526 - DNA, 371 bp, Glycine max
  unsure (1)..(371): unsure at all n locations
  Clone ID: LIB3028-021-Q1-B1-C5
gaacaagtcctcaagtttccaccacctcatgtcatcaaagttagtaagtctgcatggatgactgatgaagaatttggaagagagatgcttgctggtgttaatccatgcctaattgagtgccttcaagtgttccctccaaagagcaagctagatcccacagtgtatggtgatcaaactagtacaataaccaaagaacacttagagatcaaccttggtggactctctgtggaacaggcactgagtggtaacagattgttcatattagatcaccatgatgcattcatcgcatatctgaggaagatcaatgaccttcccactgcanagttctatgccacaaggaccatccttttcttgaaagatgatggcacctt

SEQ ID NO: 3527 - DNA, 364 bp, Glycine max
  Clone ID: LIB3028-021-Q1-B1-C7
gttcttcaattcattctagttctggattccgactagccgcgttgactcggttccgtttttcattctcgcggatctaatattaaggaatagcttaagggcacattacaatgaaggcattgattctggttgggggatttggaacaaggctgaggccactgacactcagtttccctaagcctcttgttgattttgctaacaagcctatgattttgcatcagatagaagcccttaaggccattggagtgactgaggtagtgctagccatcaattaccaaccagaggttatgttgaatttcttgaaggattttgaatcaaagctcggcatcaagatcacatgttctcaggaaactgaaccactgggaac

SEQ ID NO: 3528 - DNA, 222 bp, Glycine max
  Clone ID: LIB3028-021-Q1-B1-C9
gtaatatgatcgtgtttacgtgtaagttgcaacatgatatgaaattgtaaatatattaagaaaatattagaaccttgatctccttttgctcggtataattattcaaatgttgttattgtatgattcatagttgcatacaagattctggatcattgataggatctctttaccattaaaaattgaaatattgtttgtcaagatctagttaatgccttaatggtc

SEQ ID NO: 3529 - DNA, 294 bp, Glycine max
  Clone ID: LIB3028-021-Q1-B1-D1
aatctcttctcttcgctcctgcacttgttgtttctttgcccttcatggcatctcaggctagccttctccttcaaaagcagctcaaagatctttgcaaaaaccccgtcgacggcttctctgccggtttggtcgatgaaaccaacatttttgaatggagtgtcaccataattgggccgcccgatactctctacgaggggggatttttcaatgctattatgagtttcccatccaattacccaaatagtccaccttcagtgaagttcaactcagagatatgggaccccaatgtatatc

SEQ ID NO: 3530 - DNA, 394 bp, Glycine max
  Clone ID: LIB3028-021-Q1-B1-D10
ccttatttaaacacatagcttctgtacttcggaaatgacaataattgcaaacacaaattctagtcatatcatatatccttcaacctctcatcattaggcattcagcaagcaagaggaaaaaatgggcaaaatgggcaaaattatgcttgttttgggtagcctcattggattatgctgtttttcaatcaatacctatgccttctcaccttctggatggaccaatgcccatgccactttttacgggggtagtgatgcttcaggaactatggggggagcttgtgggtatgggaatctgtatgcaactgggtatggaactagaactgcagctttaagcactgccttatttaatgatggagcttcctgtggtcagtgctacaaaattatatgtgattac

SEQ ID NO: 3531 - DNA, 375 bp, Glycine max
  Clone ID: LIB3028-021-Q1-B1-D11
gttgagaactaagaaggagaagcaaatggcttcctcaatgatctcttccccagctgttaccactgtcaaccgtgccggtgccggcatggttgctccattcactggcctcaagtccatggctggcttccccaccaggaagaccaacaatgacattacctccattgctagcaacggtggaagagtgcaatgcatgcaggtgtggccaccagttggcaagaagaagtttgagactctttcctacctgccagaccttgatgatgcacaattggcaaaggaagtagaataccttcttacgaagggatggattccttgcttggaattcgagttggagcacggtttcgtgtaacgtgagcacaacaggtcaccaagatacta

SEQ ID NO: 3532 - DNA, 387 bp, Glycine max
  Clone ID: LIB3028-021-Q1-B1-D12
tttggtaatgtgattgaagggtagttcaagtctgttacgctgtgagacccttaaccattactcgcacagtcacaaatgttggaccaccagccacatacactgcaaatgtccactcgcctgctggatataccattgtcgttgtgccaagatccttgactttcacgaaaattggggaaaagaagaaattccaagttattgtgcaggcaagcagtgtaactacgcggagaaagtatcaattcggggatttgcgttggacagatggaaagcatatagtaaggagtcctattacagttaagcgcagatgaaaattccccaatggatttggtttttttgtattgtgtggatgcatgtttagatataagctagttagactctatatatatacct

SEQ ID NO: 3533 - DNA, 152 bp, Glycine max
  Clone ID: LIB3028-021-Q1-B1-D3
gttttcttcagaaatttgccatcgttgagagaagcgtgagagccttagtcgttcaagatgagagctaagtggaagaagaagcgcatgaggaggttgaccaggaagcgccgaaagatgacaccgagatctaagtaggtgcttgagcaggagtt

SEQ ID NO: 3534 - DNA, 343 bp, Glycine max
  Clone ID: LIB3028-021-Q1-B1-D4
ctcaatttgtatgccaatgtccgaccttgcaacagtcttcgacgctacatgactcgaaatgataatgtcaatcgaaatacaattcgtgaaaatagggaatgcgagtacagtgggcttgaacatcacgttgtgaaaggtgttgtataaagtctcaaaatcattacacgtcaagcaagtttaaaggtatctgagtaagcctttcactatgccaaggctcatggcaaagagagggtttctgccatacacatagccaatattatgcaaaagactgatggccatttccacaagtgttgccgttaggttgcagagaaatatcctgacattacttatgaagaagttgtca

SEQ ID NO: 3535 - DNA, 389 bp, Glycine max
  Clone ID: LIB3028-021-Q1-B1-D6
ggccaggcaagccccactcaaccaccacacctctcctcgttcacgctacccctttctgctcttcttctacctttcaagttttaaaagtataaagatggcagagacattcctatttacctcagagtcggtgaacgagggacaccctgacaagctctgcgaccaaatctccgatgctgtcctcgacgcttgcctcgagcaggacccagacagcacagttgcctgcgaaacatgcagcaaaaccaacttggtcatggtcttcggagaaatcacgaaccaagccaacgttgactacgacaagatagtgcgtgacacctgcaggaacatcggcttcgtctcagatgatgtgggactggatgccgacaactgcaaggtcctcgtcaacattgagc

SEQ ID NO: 3536 - DNA, 347 bp, Glycine max
  Clone ID: LIB3028-021-Q1-B1-D7
attcaggattaaacaggagaagctcttctaggaatgggtgtggtaggggtaggcggcgatcacaggcacaggttaccccaactcctccccctcctcctgtggcaactgttgaaacaagcaccccacttattcagcagcttagtaacattgaagtggtgggattggaggatagaagcctagcaggttggggcaagacaaccagaaggccccgtaggcaaaggttcccggcaggtaatcctccgtcaatccggttaatctgatcactgtaagaggcttaaatttgtagatgagaatttatagagggtaagcacaaagtgggtccatttcaatattgatggaaaacacga

SEQ ID NO: 3537 - DNA, 352 bp, Glycine max
  Clone ID: LIB3028-021-Q1-B1-D8
cggctcgagaaagaagggtggcttaagtggctcaactccaaagcagagagctctgttttgtatgtgagttttgggagcatgaacaagttcccttactctcagctcgttgaaatagcacgtgcgcttgaagattcggggcatgattttatctgggtggtgaggaaaaacgatgggggtgaaggagataactttttggaggagtttgagaagagaatgaaggaaagtaacaaaggatatttaatatggggttgggccccacagttgttgatactggagaatcctgcgattggagggttggttactcactgtggttggaacacggtggtggaaagcgtgaacgcggggttgccga

SEQ ID NO: 3538 - DNA, 323 bp, Glycine max
  Clone ID: LIB3028-021-Q1-B1-D9
gaaagacacagccattgtttgtttactttccattgattgagcgaaagctttgttttttctgcgatcattttccattgggtggaagaaagtctcaacctttagtcgaaagagcaaggatctgagtgagtgagcgatcatgtgtggtggtgcgattatctccgacttcattccagcgggtcccgccggcggggcgcagcgcgtgaccgccgacatcctgtggccgaatttgaggaagcggttctcgaagtcgctgctggacgatgatttcgaggcagggttcagagaattcgaggatgactcggaaatcgaggatgtcgatgatg

SEQ ID NO: 3539 - DNA, 387 bp, Glycine max
  Clone ID: LIB3028-021-Q1-B1-E1
cacgttagcacaaactatcatggccacggcaacagcagctgccacctcgtcctttatggggacgcgtctcctggaggctcactccggagcggggcgagtgcacgcccgattcggcttcggcaagaaaaaggctcccgccccaaagaaagcctccaggggattgggccgagacaccgacagacccctttggtatccgggcgccaaagcgcccgaatacctcgatgggagtcctgtcggagactactggttcgatccgtttgggctaaggaagcccgcggactatctgcacttcgagctggactcgctggaccagaaccttgccaagaacgttgccggggacatcactggaaccaggacccaactccccgaactttagttccagccctt

SEQ ID NO: 3540 - DNA, 342 bp, Glycine max
  Clone ID: LIB3028-021-Q1-B1-E10
attctgaggcctgtgcggtgctctgagacgaggggccatagtttgggaccctttgaaccctaatctccacccaaacccattttcccgggaagttccctctgaaacgaagacgaaaatgcacaatcacaggctgaagcagcagcaacaagctctgatgcagcaagctcttctccaacaacagtctctctatcaccctggtctccttgctcctcctcagattgaaccaattccaagtggaaatctgcctcctggttctgatccaagtacatgccgcagtgtgtatgtccggaacatccatacgcatgtaactgagccgcttttgcaagaagtttttgcgggtac

SEQ ID NO: 3541 - DNA, 388 bp, Glycine max
  Clone ID: LIB3028-021-Q1-B1-E11
ggaggagtgacagtgtggaaggtcttctcttgtcttgctcgcgatcggagactttgaaaccctcccttccttctcctttcacctattcatcccaagcattcgacaatgtctccgttctcgaagctcttgtttctgatactgatggtgttcgtctcatccgcgatcgcctccgacgacgaaagagtgagcgaattggtgtccctgcaatcgagatccaaatcgggcctaatccggctgaacgaccaatccctggcccgcttcctcaccgccgtgaaaacccctcgcccttactccatcctcctcttcttcgacgcggcgcagctccacgacaagccggagctccgcctcacggagctccgcaacgaaatctccatcggctcctcctcct

SEQ ID NO: 3542 - DNA, 398 bp, Glycine max
  Clone ID: LIB3028-021-Q1-B1-E12
attgttgtttaggtacagaaaaatggcatcatctcagtcgaagaagagagttgacgctgtcgattctcgcgctgcttccgttctctttcgcgccaaagatggaagtgcttttgctcgatgcgacgactgcaagaagaatgtgccggttgcactcatcgacatgcacagttgcagccttgaagctaaaattaaaatgaacctagatgctcaagttgtggaacaggctgctgaagctaagaagccagagaggaagaagcccaaatccaaagagcctatggcaaaaaaggctaaagttgagaaggtgaagaaagtcaaggatcctaacatgcctaagcgtcctcccacagccttctttgccttcttggatgattttagaaaatctttcaaggaagctaatc

SEQ ID NO: 3543 - DNA, 165 bp, Glycine max
  Clone ID: LIB3028-021-Q1-B1-E2
caaattcactcagattctcccttcccctttttgatttttcttagaaaactcccaaattcgaatcaatatgaagaaagtggtgctaaacgtggaactccatgatgacctcatcaggaattagggcatgaaggcagtatccggtatttcacgggtagagtcagtccc

SEQ ID NO: 3544 - DNA, 365 bp, Glycine max
  Clone ID: LIB3028-021-Q1-B1-E3
gtgggtacccttgccttcataggaagtgagaaactaggctagttagtcccattggaatttttttttttgtggctgaagaaggtgaaaagggggcaagtttcactcttcaaggagtttgaagggtgtcaacttgtgttttgagactctgaggttgaagctgcattttttttaagggtggggatgggttctagttgtggttgtggtgtgacacttgttcttgttttctgcttatggggtgtgttgatctccctatcttctgctgctaagctcagtgcttcaaggcagaagcttgaggttgctaagcatttgaatcgcttgaacaagcctcctgttaagaccattcagagtccagatggggatacaat

SEQ ID NO: 3545 - DNA, 371 bp, Glycine max
  Clone ID: LIB3028-021-Q1-B1-E4
gcttctctaaattctctgtctacttcaccaagcacttttggttgcagctttgggtaatttccaatatggtgtttcctctccgatctatcgttgctttactcaatcttgcagtggtgtgaacgcatgcagaaaccttgctccctgaagtttactggaactcgaagcttcttaccactccagtgccgatagccattacagatatccttcacccatatttgggagaacacaaatagcacctctgtggacgtacgaaaggggggcgtaaaagttaaagcacggaaaagaaagccagtagggatatcagtgaacgtaggacaatgaggagtgaacgtgatcacaaggaatggaaatcccaacagaggcacatcaat

SEQ ID NO: 3546 - DNA, 360 bp, Glycine max
  Clone ID: LIB3028-021-Q1-B1-E5
gttcttcttctccttgtggccttcttccctctaacattccctgtggtttctctgaacatatttatataaaggttgtgctatagccttagaggctcatttggtttaatttgcctatgtcatatcatatgtactccttttttcatttcctctctcatttttggagtatttgatttgatgtgcatatatatacacacacattacaggtatatatatgcttagataatcaaaaaatatataccaagttttgtgtttggtttatatatatagttctctctttctctctctttcattcgtattcgtcttcttcatcttcatcgtttcatcttcttgtcacagtgtgttgattaattggtgtgactc

SEQ ID NO: 3547 - DNA, 384 bp, Glycine max
  Clone ID: LIB3028-021-Q1-B1-E6
ctccttcaccaccctcaggtggtggtggaagttacaatccaactccatcaactcccccaggtggtggaagctatgatccaaccccatcaccacccacagatggtggaagttacaatccaaccccatcaccaccctcaggcagcaactgtggcacaccaccacatgacccctctactccaacaccctcagtcccaacaacaccatcaaccccaacaacaccatcaaccccatcaacaccatcacaccctccctcaggaggaggtgggtactataactcaccaccaacttatggaggtggtagccccccaacaccaatcactgtgagcccaccttcaaccccaattgaccccggcacccccactatcccctccacaccccccttac

SEQ ID NO: 3548 - DNA, 304 bp, Glycine max
  Clone ID: LIB3028-021-Q1-B1-E7
aaagaacctgtgccgctgactcacccgattcgaagcaactcgtcaggtttaggagtcagaaattattttcatgcctcgctggttaatttacgtacaaggtgcatcctctgtacgtatgactgtgatatatatatatatatatcgtgtatgttgcaattgtaattaaagacactggtgtggcaacaattcagctaaatttgtgctcgatgtacgtttcatgtgttgattagatattaattaatgaaaaataatgttatttttgtgtgtttaaaacaatattttcttttggaagtggtagcccccc

SEQ ID NO: 3549 - DNA, 193 bp, Glycine max
  Clone ID: LIB3028-021-Q1-B1-E9
ttttccttcaagtaatgttgggcttgctctgcctagcatatgcataactgagtgagattgttattgaccttaccttagatttcttacttaagtaggaaaaggaagggaagagaaggctcccttgtttcacatgttagaagttcgacatgttgtaattggaacatctggcttatgaccatgttgtaccttcttg

SEQ ID NO: 3550 - DNA, 299 bp, Glycine max
  Clone ID: LIB3028-019-Q1-B1-E6
ctacaacagatccggaaatgagtccttctgaaaatggcgtcactcaacctagtctaacatgacttgtgatcacaatacctgtgcctgggactcaataccacatgatcactgcgccaacgccagatcctgtgacacctaaccttgttaccgggcttgatgatctacctcagccgtggactcgataactacgataatccacactggaacgtgttgtggctgaccggcattacagatcttcagattctgcccagcctgatagctcaatccgagacttctctcagtacgcaaccacagatcct

SEQ ID NO: 3551 - DNA, 360 bp, Glycine max
  Clone ID: LIB3028-017-Q1-B1-E5
gaatactcttcttcaatcaagcgaaggtggtctcacttgactcgattgcaagtgatccacgacacactgttcgcttcacaaaagcttcgaatccaattcctcagtaacatctgcaagaagtcttctccttcaccatgccaccaaagcctttagactatgggtcaataaatgaaaacgtgaagaagagtcaatatgctgtcagaggtgaattataccttcgagcttctgagcttcagaaagagggcaaaaagattatatttactaatgttggcaacccacatgcattgggacagaaaccactgagcttccctcgtcaggttgttgctttgtgccaagctccattcctacttgatgatccta

SEQ ID NO: 3552 - DNA, 361 bp, Glycine max
  Clone ID: LIB3028-017-Q1-B1-E6
ctctttcttcctcttcctcagtagtgcgattttcgattctcttctctgcaactatgcctaaccctaaggtcttcttcgacatgaccatcggcggtcaacctgccggccgcatcgtgatggagctctacgccgacgtgactccgagcaccgccgagaacttccgcgcgctctgcaccggcgagaagggcgccgggcggagcggcaagcccctccactacaaaggctcgtccttccaccgcgtgatcccgaacttcatgtgccagggcggcgacttcaccgccggaaacggcaccggaggcgagtcgatctacggcgccaagttcgccgacgagaacttcgtgaagaagcacactggtcccgg

SEQ ID NO: 3553 - DNA, 344 bp, Glycine max
  Clone ID: LIB3028-017-Q1-B1-E8
agacagagcagcactcacattcacaacgaaggtttcctattcatcagacatggtgaaggcaatcagagttcacgaactcggtggccctcaagttctgaagtgggaggatgtggaaattggagatccaaaagaaggcgaggtccgtgtgaggaacaaagccattggggttaatttcattgatgtctactttcgcaaaggagtttacaaagccccttcttttcccttcactccaggtatggaagctgttggggttgtgacagctgtgggtgctggactcactggtaggcaggttggagatcttgtagcttatgcaggtcaaccaatgggttcatatgcctaagagc

SEQ ID NO: 3554 - DNA, 363 bp, Glycine max
  Clone ID: LIB3028-017-Q1-B1-E9
ctccgatggctaatccctcactcttgttcttcagtctcctcctattatccgccaccgtagccgccgccgaacggatcgacgatgaacacgaccttctgatccgtcaagtggtgccggatgcggaggaccaccacctgctcaacgcggagcaccacttctccgccttcaagacaaagttcggcaagacctacgccacgcaggaggagcacgaccaccgcttccgtatcttcaagaacaacttgctccgcgccaagtcacaccagaaattggatccctccgccgtccacggcgtcaccaggttctccgatctcactccggcggagtttcgccgccagttcctcggcctgaagccgctccgccttc

SEQ ID NO: 3555 - DNA, 343 bp, Glycine max
  Clone ID: LIB3028-017-Q1-B1-F1
tccatatgttatattttattttatgatatacatagaagcttgttcttctgatctaattttatgagatcaagtgttggttctttctccatctagtactattatttttcccctgtaatatatatatatatatagtattctaattaaactaattcacaggctacttgatccgtttgttttgaagaagatcatcgcctgtttttggttaactgtttaatccacatccagtttcattttacgtgatccgttaaatctgaatggaagctgttttgacgcctcacgcgacggcacataaacaaccgtttgctcctaacaagaacatcagaatgaaaaccccgaagaaaaa

SEQ ID NO: 3556 - DNA, 98 bp, Glycine max
  Clone ID: LIB3028-017-Q1-B1-F10
cagtagtagtacattatacacaggttctcactcgttatagcactacaaaattgaattgctataacgagtgagaacctgtgtataatgtactactactg

SEQ ID NO: 3557 - DNA, 394 bp, Glycine max
  Clone ID: LIB3028-017-Q1-B1-F11
ctcgtggggtttcagaaacagctgagaagttggctaatatgtcgattggtactcgaagacaatccttaggacaaacccgtccgcctcccatgaaggctggagtcaattggatttctgaatctggaaatttcatgctcaggtccggacaataaattccatctgaaagaagtttgacaagaaaagttgccgggtgagatgatgagaagtatttgctgacttggagattctttgatgatcaatatttttaagtcttctaatgatgatattgggtttgcacctctgcccctgatgcgtttggtgatgatttttgtttctattacgggtttgatatgttttttttggggagatactgtcagttttacatttggctaaagttgtgcggatgcgtctgtct

SEQ ID NO: 3558 - DNA, 392 bp, Glycine max
  Clone ID: LIB3028-017-Q1-B1-F12
attagtactagcactgtacctttgcccgaaacttttcttgactcttcctgtttcgctcaaattctaccctcctcaaattgggaaggtggtgatttccaaagcctttacaacgttgcttttgatcaagggcgaacagcatcttttccccctcagccatttacaggtctagttgaagctagcaatctaaaaatggagatgtaaaccagataatccattattacaatatgttggattaggtcactcggaatgcctttgtcaagatttttttctattagagtacatcgcatatattggttgtatactgctccgtagaataaataagatcatattaatacctgttaacttgagacacgtgcatgtgcacgtttaaagtactatatagctgataatat

SEQ ID NO: 3559 - DNA, 361 bp, Glycine max
  Clone ID: LIB3028-017-Q1-B1-F2
gttttcttcagaaatttgccatcgttgagagaagcgtgagagccttagtcgttcaagatgagagctaagtggaagaagaagcgcatgaggaggttgaagaggaagcgccgaaagatgagacaaagatctaagtaggtgcttgagcaggagttgagatgagctttccatctgctaccagcctcatgacattttaggctgttatggctcttatgatcttgaggtctagtcgctaggggagcttcactcttgacttagtttgctttactggtcctggtcctggtccaagactattgagtgtgggttaagttgtgatgtttagtgttttgtggtatctaattaagtaccgggttttaaacctttt

SEQ ID NO: 3560 - DNA, 356 bp, Glycine max
  Clone ID: LIB3028-017-Q1-B1-F3
ctctttcttcctcttcctcagtagtgcgattttcgattctcttctctgcaactatgcctaaccctaaggtcttcttcgacatgaccatcggcggtcaacctgccggccgcatcgtgatggagctctacgccgacgtgactccgagcaccgccgagaacttccgcgcgctctgcaccggcgagaagggcgccgggcggagcggcaagcccctccactacaaaggctcgtccttccaccgcgtgatcccgaacttcatgtgccagggcggcgacttcaccgccggaaacggcaccggaggcgagtcgatctacggcgccaagttcgccgacgagaacttcgtgaagaagcacactggt

SEQ ID NO: 3561 - DNA, 356 bp, Glycine max
  Clone ID: LIB3028-017-Q1-B1-F5
gctggcttttccattcctgaaccggcagtgcagccagacaccaagtcagagaagtctgttcctatgaataacagcactattgatccctttgctgctgttcctcttaataattttgatggatctgatatttttggtgactttacttctcaatctgattctgtgtcttcccagccctccaataatgttttcagtgatggcaagcatgataatgtgactggtaaatctttagcagactctaaagtttcacctaaaaaggataatttccaggtgaagtctggcgtctgggctgactcactaagccgtggattgattgatctcaatataactgctcctaaaaaagtatccctttgcgacgt

SEQ ID NO: 3562 - DNA, 348 bp, Glycine max
  Clone ID: LIB3028-017-Q1-B1-F6
ggctgaatattgcctcgagcttagacatctatgttccaagggatgaaagatttggtcacttgaaaatggcggattttcttgcctatgcactgaaatccatagttcaagttctcaaaccggagtttgaatctctattcgacagcacccctaatgagtttgacaaatttgaagatgtacttaaactctatgaaggtgggattgaggtgcctgagggtatacttacggaagttagggataacatccctgcagagatgcttaaggaaattttccgatctgacgggcaaaggcttctcaaatttccggtgcctcaagtgattgcagtggataaatcggcatggcaaactgatg

SEQ ID NO: 3563 - DNA, 362 bp, Glycine max
  Clone ID: LIB3028-017-Q1-B1-F7
cttcaaaacactcataacacaaagcacaaagcaaagctcatccttgagttaaaaaatggcagcagcttcttccatggctctctcatccccatccttggctggcaaggccgtgaagctgggcccatcagccccagaagtgggaagggtgagcatgaggaagaccgtcaccaagcaggtctcctcaggaagcccatggtacggcccagaccgagtcaagtacttgggcccattctctggcgagcccccgtcctacctaaccggtgagttcccaggcgactacggctgggacactgctgggctttccgcagacccagaaaccttcgccaagaaccgtgaactcgaagtgatccactccaagtggg

SEQ ID NO: 3564 - DNA, 354 bp, Glycine max
  Clone ID: LIB3028-017-Q1-B1-F8
ggcgcttaatctttacaggaagaagactggcagtgacaagtacttttggattcatcttgataaacgggtgcctactggggcagggcttggcggtggaagtagcaacgctgcaactacactatgggcagccaatcaatttagtggctgtcctgcctctgagaaagaactccaagaatggtcaagtgagattggatcagatattcccttctttttctctcagggagcagcctattgcactggtcgaggagaggttgttcagaatattcctccaccagtatctctagatgttccaatggttctcataaagcccccagaagcatgttcaactgccgaagtctacaagcgtctatgttt

SEQ ID NO: 3565 - DNA, 395 bp, Glycine max
  Clone ID: LIB3028-017-Q1-B1-F9
ttttgcttcctttctgtccaagcaaattttccctcattcattctcctctcctttccccttcctcacaaatcacttcccttcttcaataccaaatcaaattccttctcaatttgattctcttcggccatgtttgcttacagggttttgtcccgttcctctgccatcctttctcgaagcttcacccttttctctgtttcacgaaattcccaacctttctccaccaccctgtccaataacttccattccctccttcacccatctcccaacaagctgattccggttcaaaccaattttctgaattcatcattgacttcgagattcgggttttcttcaacggcctcgcatgagcatgcaagtgaagaagcaaaggtatctgatcagtctgaacaagctga

SEQ ID NO: 3566 - DNA, 375 bp, Glycine max
  Clone ID: LIB3028-017-Q1-B1-G1
ctatgatctaaggcttcttccacattttgtttgagagaaagagagaatcagaggccatccttcctgaggattaaaccacattgctttctaaagtataaaatctcaactcgttaatattccttaggaattgggtttggaggcaccccaattccaacgccaaaaggtttgaactttgggcgcctctgaatctctcaatcgtgggactcacaatctaagttgtaagttcatttggtccttgttaaacagcagagtttccacggtttgtgttggtgggggttcaaaatgttgggggttttcattaatcgaatccttattctcgttctggggtatgcataccctggattcgaatgctataaaacagttgggaaaaataag

SEQ ID NO: 3567 - DNA, 404 bp, Glycine max
  Clone ID: LIB3028-017-Q1-B1-G10
gggaatcttttgctgtgtttgtcaaggaggaagaaatccctaatttgaggaacatactgctgtccatctcagaagaaagatacttagagatgcataagagggcgaaaaaggtgcaagagcattttctctggcatgctgaacctgtaaagtatgatttgtttcatatgcttcttcattcaatttggtacaatagacttttccatataagccggacatgacgatatgaattttggagacaagtcactgtgattgatagcttgatgatgtatagattgtttgagttaacaaatgaagcaagaacaatatggttagagaaaaagttcattgattctagagaaaatgttattgtttgattcatatccctagagaataattgattcataataatgttagtgtttgatcat

SEQ ID NO: 3568 - DNA, 394 bp, Glycine max
  Clone ID: LIB3028-017-Q1-B1-G11
tggctaaccaaccctgacactccttcttctccgcttcctcttcgatcatcgcttcagaatgccgccgaagttcgacccctcccagatcgtcgacgtcttcgtacgcgtcaccggcggtgaggtcggcgcggcgagttccctcgccccgaagatcggtcccctcggtctctcccccaagaagatcggagaagatatcgccaaggaaaccgccaaggactggaagggcctccgcgtcaccgtcaagctcaccgtgcagaaccgtcaggccaaggtcacggtggtcccatccgccgccgcgctcgtcatcaaggccctcaaggagcccgagcgtgaccgcaagaaaacgaagaacatcaagcacaacggcaacatctcgctagacgacgtcatcgag

SEQ ID NO: 3569 - DNA, 366 bp, Glycine max
  Clone ID: LIB3028-017-Q1-B1-G2
atcatatctccatttccatttcctctctctcagtttccaagaatcttaagctatgggaaagtcttacccaaccgtgagcgctgattaccagaaggccgttgagaaggcgaagaagaagctcagaggcttcatcgctgagaagagatgcgctcctctaatgctccgtttggcatggcactctgctggaacttacgacgtgagctcgaagaccggtggtcccttcggaaccataaagcacccctccgaactcgctcacggcgctaacaacggtcttgacatcgctgttaggcttttggagccactcaaagcggagtttcctattttgagctacgccgatttctaccagttggctggcgttgttgccgt

SEQ ID NO: 3570 - DNA, 361 bp, Glycine max
  unsure (1)..(361): unsure at all n locations
  Clone ID: LIB3028-017-Q1-B1-G3
ggagttcaacgagatggagcanataaagcacagaatagttgaagtgaatggcataaaaatgcatgttgcagagaaaggagagggtccagtggtgttgttcctccacggcttccctgagctctggtactcatggcgccaccagattctctctctcagctccctcggctaccgcgccgtcgctcccgatctccgtggctacggtgacaccgaggcaccaccttcaatcagcagctacaactgcttccacatagtgggtgatctcgttgcgcttattgactctctgggtgtccaacaagtgttccttgtggctcatgactggggagccatcataggttggtatctctgcatgtttcgccctgac

SEQ ID NO: 3571 - DNA, 376 bp, Glycine max
  Clone ID: LIB3028-017-Q1-B1-G4
atttagtggaaaagaagatgcagatgttgtcacaaaacagaggaaatcagggtatcttacaacattcttgctgtgtaagagaacattttttgggccaaaagggtaggaaatcatgatagatggtaacatgtgaatcatactgccgaccaattagatgggtgcttggttgaattcattgaattttattctgtagaaatagtcgtttgagaaagtgattattttgcataattaatttgatacgcaagacccacggaaatatgaacggattgttcaacactccaacctggtagaaaatgaatccttgtaagtccaaaatgtgtgtttgacttttgtaaactcccaacctaaaattggtgattgttaattgtgtttgttt

SEQ ID NO: 3572 - DNA, 373 bp, Glycine max
  Clone ID: LIB3028-017-Q1-B1-G6
cgaaaatgtggaagagaacgggttttgaagaagaagcagttcaattgatcaactcagatttcagggacctaagtctagctgctaatagactcgcccatcatgccatcaaacttggtggcattggctttggagcctcttttttcggattgtttgctgccattgctgctatttatctgttgattttggatcgtacaaactggaaaacaaatattctcacagcactactcattccatacattttcttcagcttgccttcattaattttcgacgtcttcaggggagagcttggaaaatggattgctgcagttgctgttgtattacgccttttccttccaagacacttccctgattggctggaattgcctggtgctct

SEQ ID NO: 3573 - DNA, 358 bp, Glycine max
  Clone ID: LIB3028-017-Q1-B1-G7
gataactgtctccatgcactttctttcatggccgttcttttctccaatctcatcagcatcaccaacaacaccaaaccctgcttctctttcacctcaaaacccataatttgtggggccaagaacctcacttccaaacggagcctcatccttcaaactcctctggtctgcattggcattggcctaactcctcaagtctcagttgcgcaagaatcgccgtccaaatcgcttctttctagcattgaaaacacgacatcttggtttcagttctacggtgatgggtttgccattcgagtctcaccggagtttaaggatatcacggaacctgaggatttggatgctggacagtccctttatgggg

SEQ ID NO: 3574 - DNA, 358 bp, Glycine max
  Clone ID: LIB3028-017-Q1-B1-G8
ttgaaatctttcactctcagccgccattctcccacttccaactccttcttccccccctttctttgtccatcccacccccgccaccgccgaatccaccactctcgaaatccaatcatgtctgccacatccgtcaactccgaacgagcacgcgcccctcccgccattcccttgccccctccccctctctccaacttcaaaattggcctctgtcaactctccgtcagccccgacaaagacagcaacatcgcccacgctcgcaccgccattcaggatgctgcatcaaagggcgcccagcttgttcttttgcccgaaatttggaacagtccttattccaaacgaatagttttcctgtccacgc

SEQ ID NO: 3575 - DNA, 263 bp, Glycine max
  Clone ID: LIB3028-017-Q1-B1-G9
ctggtgctggggcagccgaggatgattatgctgctccttctggtggaagtggtgctggccccaagattgaggaagtggactaaatgtgtagttgctttcatccatttatctgtttaaaacttatttgatgcttttttattgaattttaacttttatgatttttgttggatgggatactaattgttttgcccgtgtgatatgaacgttgctttacgcattatgtcatttgctttatttcattagatgagaatactcattgtttt

SEQ ID NO: 3576 - DNA, 368 bp, Glycine max
  Clone ID: LIB3028-017-Q1-B1-H1
gttttctcaacatactctgacaaccagcctggtgtgcttatccaggtctttgagggtgaaagagcaaggaccagagataacaatttgttgggcaaatttgagctatctggcattcctcctgcacccaggggtgttcctcagattacagtgtgctttgacattgatgccaatggtatcttgaatgtctctgccgaagataaaaccactggccagaaaaataagatcactatcaccaatgacaagggtagattgtcaaaggaagatattgagaagatggttcaagaggctgagaagtacaagtctgaggatgaagagcacaagaagaaggttgaggccaaaaacgctttggaaaactatgcatacaacat

SEQ ID NO: 3577 - DNA, 396 bp, Glycine max
  Clone ID: LIB3028-017-Q1-B1-H10
aaaaccaagtactacaagggaagaagaacttagctacaagctaaggaaggatcaaagagaatggctcaagcaatggcatcaatgactagcttacgtggttcctctcaggctgtgttggaaggtagccttggctccacacgcttgaatgtggggagtggaagcagggtggcctcagtcacacgtgcagggttcacagttagagcacagcaacaacaagtgaatggtggtgaggtacaaagtagccgtagggcagtgctttcacttgttgctgctggtttgaccactggctcttttgttcaagctgtgcttgctgatgccaaacctatcaaagttggaccacctcccccaccttctggcggattacctggaacattgaactcagatgaaccaagagac

SEQ ID NO: 3578 - DNA, 398 bp, Glycine max
  Clone ID: LIB3028-017-Q1-B1-H11
gggatgtgtcttcacatatgatgctgttggttcctatgagagggttggatatagctctcagggttctggatccacacttattatgccatttcttgataaccagctgaagtctcctagcccactcctgttacctgcgcaggatgctgttactccattgtctgaagcagaagcagttgatctggtcaaaactgtttttgcatctgcaactgagagagatatatacactggagataaggttgaaatcgtcgtcctaaatgccagtggtattcgtcgtgaatacatggacctaaggaaagattaatgctttacagaaatttactgttggagataccagacttggattgagaatgtttgaaatgcttctagaattttaaatgacatagtgggtttttcacatg

SEQ ID NO: 3579 - DNA, 409 bp, Glycine max
  Clone ID: LIB3028-017-Q1-B1-H12
ggaatggtgaatcatcccgaggtagcacaattaaattgagcatagagatttgtttctattccacgacccatcccttctaagatgacaagatctgcatcgctggcaaggtaagcaagctcctgtgacactcttgtaagatcaatgacaggtaaatcattgccagagttcgcaattaagagatttgaagtactgacacccacaagctgtccatcttcatcctaatgctgcagacctgcaatttttctactgttaatccttcatcttgatacaccattacatgcctgtagtttggatactctttaaaatgtcattttagtattataaaggtgataaaaccaaaacatcttacttgtaataagaagttattctacatacatgacttggtctcactctaacgaaaaggtaatat

SEQ ID NO: 3580 - DNA, 367 bp, Glycine max
  Clone ID: LIB3028-017-Q1-B1-H2
ggaagaagaagaaaatggaggaggaacaaaacggcggtcgtttcgacctcataatcctgggcgcctcaggcttcacaggcaaatacgtcctccgcgaagccctcaaattcctcaacaccccatcctcccccctcaaatccatagccatagcgggccgaagcccacaaaaactaacccaggcccttcagtgggcctccaggcccaaccctcccccctccctccccatcctcaccgcggacaccgccgacccctcctccctccgttccctctgcgcccgcacgggcctcctcctcaactgcgtgggccccttccgcctccacggcgagcccgtcgtggccgcctgcgccgcagcgggctgcgactacct

SEQ ID NO: 3581 - DNA, 344 bp, Glycine max
  Clone ID: LIB3028-017-Q1-B1-H4
aaattcttcattctcttctcatcgatggggcagaagtctctgatctacgcgttcgtgtcgcggggaacagtgattctcgcggagtacaccgaattcagcggaaacttcaactccatcgccttccagtgccttcagaagctccctgccaccaacaacaagttcacctacaattgcgacgcacacaccttcaattacctcgtcgacaatggctacacatattgtgttgttgcagatgaatcaattggaagacagttacccatggcttttctagagcgtgtcaaagatgaatttgtgtcaaaatatggtggtggaaaggctgccacagctcctgcaaacagccttaa

SEQ ID NO: 3582 - DNA, 375 bp, Glycine max
  Clone ID: LIB3028-017-Q1-B1-H6
aaaacatgcagttgcatttgttcggccagttagtgtggcctgtcaggtggtgaatgggttccatttctacgagaatggagttttcactagtgacacttgtggtagcacttcccaggatgtgaaccatgccgttcttgctgttggatatggagttgaaaatggtgtcccatattggctcataaaaaattcatggggagaaagctggggtgaaaatggctacttcaagatggaattggggaagaacatgtgtggtgttgcaacttgtgcatcttatccaattgtggcataaattgcataacaatatggtccctggtgactaccaccttgtcatgcttcagagtttagagcgtattgctgatgccagtattgatgaat

SEQ ID NO: 3583 - DNA, 375 bp, Glycine max
  Clone ID: LIB3028-017-Q1-B1-H7
gaaacagtgtgatgaaaatgaaggtccttgttttcttcgttgctacaattttggtagcatggcaatgccatgcgtacgatatgttccctctccgaatgaacactggctatggtgcccgtactccggaggtgaaatgcgcaagttggaggcttgctgtggaagcacacaacatctttggctttgagaccattcctgaagagtgcgttgaagcaacaaaggaatacatccatggcgaacaatatagatcagactccaaaacagttaaccaacaagcttacttttatgccagagacctcgaagtccatcccaaggacacatttgtgttcagtatagatggcaccgtactctctaatattccatactacaaaaaacatg

SEQ ID NO: 3584 - DNA, 392 bp, Glycine max
  Clone ID: LIB3028-017-Q1-B1-H9
ctcctctgattcattcacccaatttttttctgtcctcttttcctctcagaggagcctctgagtctgctcaggtgttccttgtcaagagatccttttgtttttgaggtgtgaagggaaagagaaaaaagatgaatcagtgtggttatcagcagaagaaggccttgacaagctgtgaggagatgaggatggaatctgtggtgtgccctaaacctcgaagattgggcctgttgaaccactcaacctttgataaccacatcagacccttgaggccaccctttatcaactaccaatcagaaattgaagattcaggagttggggctgagcttatggacattattctccccaagagatctggggggcaagtggcttcatcaccgccatttttctgtgga

SEQ ID NO: 3585 - DNA, 393 bp, Glycine max
  Clone ID: LIB3028-018-Q1-B1-A1
ctgaaagaaagttgctaacacttggcaccacttatcaacttatcatagttgataacatcaaaggcacaacattgagggaatgagggttgttatatcagcagtatgtgctattgtgctattctcttatgctgctgcgtacgatcctttggatccaaacggaaacataacgatcaaatgggatgttgtgtcatggacaccagatggctatgtagctgtggtaacaatgagcaatttccaaatgtttcggcacatcatgaatcctggatggaccttgggatggacatgggcaaagaaggaagttatatggtccatggtacgagctcaaaccacagaacaatgagactgttctaagttcaaagggaatgtacctcactgctgcaagaaaactcccac

SEQ ID NO: 3586 - DNA, 376 bp, Glycine max
  Clone ID: LIB3028-018-Q1-B1-A10
cgccggatctgctaaaatacgcttgatccatatgggcctcctcgaccacttgtgggacgacaccgtcgccggcccaaggccggaaaacggtctcggcaagctccgaaaacaccacaccttcactttccgacctagctccggcaaggaaacggagggcgggagcgtgagatcgtacggagacgaatcgtcggaggaagcgacgagagtgacgcgtagtatcatgatcgtgaaaccgcccgggtaccagagtggatcgcctccggtttctcccgccggttctactactccgatttctccgttttccggaggaaaagattcgtttcggtttcgaagaaggtcggcatcagatgcgtacgagaagagagggcagaacaga

SEQ ID NO: 3587 - DNA, 390 bp, Glycine max
  Clone ID: LIB3028-018-Q1-B1-A11
tccaaaatttccggccaacaaaaacaagcaacccaaaacgctctaacatcgtaaaaaagtgatttttcattagtcatagatcattttctgcacatttctgcaggatgaagttgatcctgcaagcttattagacatacctaggctttgctaagttaatgctgttatggcttttgaaaatggttccaaaaaggagcttcagaaagttggtctaaaaatctccaagagctttcctcttactaggactactctggcatctatggagtctttgtccctgccagtggttcaggaaattgttctttctgctgatatgcaatgtgagaagtgccagaagagggttgctgatattattactaaaatgaatgcagagaccgagtcagtggtggtgaatgt

SEQ ID NO: 3588 - DNA, 374 bp, Glycine max
  Clone ID: LIB3028-018-Q1-B1-A12
gttgtaactccgttcttcttcttttgttgttctgtgtctgtgtttgttttttctctcacctgaaaatgtcttgctgcggtggtaactgtggttgcggaagctcctgcaagtgcggcaacggctgctgaggctgcaagatgtacccagacttgagctacactgagtcaaccagcaccgagaccttggtcatgggagtggcacctgttaacgctcaatttgagggtgctgaaatgggtgtgcccgctgagaacgatggctgcaaatgtggaccaaactgctcctgcaacccctgcacttgcaagtgatgtgttgggagagcaagcttcaagcatagatagcccttaattatgaataatgataaactattaatgtgt

SEQ ID NO: 3589 - DNA, 351 bp, Glycine max
  Clone ID: LIB3028-018-Q1-B1-A2
tcttctcctccaaatgaacccggttcacaagaagattccggttctcatccacaatggcaaacccatttgtgaatccctcattgctgttcagtacattgaggaggtttggaatgacagaaatcccttggtgccttctgacccttaccagagagctcaggctagattctgggctgattatgttgataagacgatatatgatcttggaaggaagatttggacatcaacaggagaagaaaaagaatctgccaagaaggagttcatagaagcccttaaattgttggaggaacagctgggagacaagacttattttggaggagacaatctacgttttgtggatatagcgcttgttcc

SEQ ID NO: 3590 - DNA, 289 bp, Glycine max
  Clone ID: LIB3028-018-Q1-B1-A4
gcaaaggcatatgaaaaatcttcaatcaatgagtccatgcagcttggaaaatgggtagcaagtggcgacaacactcttgttaaagatagtatcatctcccttgaagaggggaaggtcaaacaggagatctcagtgagacttcaacatgttgaaagaggagtgttagagattgaactcgaatgtgttcctctaactcaatagttgagatagatgttaagggtcaaaacttagcataacacaatttggagcattatcactatagatgtcctttctctgttctcctttgtac

SEQ ID NO: 3591 - DNA, 373 bp, Glycine max
  Clone ID: LIB3028-018-Q1-B1-A5
gactaaactccgacgacgcctcccgtcgctcctcgatccggtgatgccatattcgccaacgtcgaacgcgtcaatgcggagctgtttactttggcgtatggcgcaattgtgcgtcaattgctcacggatgtggaagaggctgacgaggttaacacgcagcttgatcaaatgggttacaatattgggatccgtttgattgatgagtttttggccaagtcgaaggtctccagatgcatctacttcagagagacgactgatgttattgcaaacgatggttttaagatgttcctcggtgttactgcatctgtgaccaattgggatgctgatggaacatgttgtagtaatgttttggaggataaacctttggtagatt

SEQ ID NO: 3592 - DNA, 337 bp, Glycine max
  Clone ID: LIB3028-018-Q1-B1-A6
aaaaactatccaagaatcaaaactattgttaataaagttggaaccattacaaatgaatttcgtgtgccagagtttgaaattttagcaggagagcataatatgattacagaagtgaagcaatatggtgccacttttaggcttgattacagattggtttattggaactcgagattggaacatgaacacaaaaggttagtctcaatgttccaagctggacagaccatttgtgacatgtttactggtataggcccttttgccattcctgctgcacaaaaaggatgcatagtctatgcaaatgatttaaatccggatagcattcactatctgaggattaatg

SEQ ID NO: 3593 - DNA, 326 bp, Glycine max
  Clone ID: LIB3028-018-Q1-B1-A7
gggtgattaccacaagtaccttgccgagttcatgactgtggcacataggaaagaggcattagagagtactttgcttgcttacaaatctgctcaggatattgctcttgctgacttggcccccactcaccccattatgctggtacttgctctcaacttttctgtcatccaatattagatccttaactcgccaggttaggcttgttatcctgccatacaggaatttgttgaggcatgttcagagcttgacacattgttgtgattagtcatagaacgatagtacgttgatcactgcaacttctccgtgacaatctgactttgtggacatc

SEQ ID NO: 3594 - DNA, 254 bp, Glycine max
  Clone ID: LIB3028-018-Q1-B1-A8
agattattggagcagtgggaattccagtggaacatttatgtagtggaacaagagttgagggctttttccccatccttggtgctaatgggaaaccatgtaagggtggatcagtgttgagtttatccattcagtaaacccctgttgaaaaggtgcctctttatagccatggagtaggtgctggccctgattatgaaggggtccctggaaccaactttcgccttagaaaaggtggaaaagttacactttatcaggat

SEQ ID NO: 3595 - DNA, 290 bp, Glycine max
  Clone ID: LIB3028-018-Q1-B1-B1
cccaattcgaaacccttaatcctctcacactcacatgttgattgatcttttgggtaccatttggacacaatctgccaccgttcaagattcccgcgggggacacattttcgacggcgggagacaaagttccttcggccattttcccaaaggcccgtttgaagcttccgaatgatggatcgcttcggcggtcatcggacaacaaccacaagttccctcatcaccgttgagacatacaggatctatatcttcaaggttctgaagtatgtccatcctgatattggtatctcaag

SEQ ID NO: 3596 - DNA, 384 bp, Glycine max
  Clone ID: LIB3028-018-Q1-B1-B10
cctctgcccctaacaccaataaagatggaaaagccatcgataaggctagtgcgataagatcgaaacattctgtgactgagcagcggagaaggagcaagataaatgagagattccagatattgagggatctcatacctcatagtgatcaaaagagggacacggcatcatttttattagaggtgataaagtatgttcagtacttacaggagaaggtacaaaagtatgaaggttcatatcaaggttggggtcaagaaccctcgaagttgatgccatggagaaatagtcattggcgtgtccagagctttgccggtcaacccacggctgtaaagaatggtttgggtccagtatcaccttttcctggaaagtttgatgaaagcaatgtta

SEQ ID NO: 3597 - DNA, 381 bp, Glycine max
  Clone ID: LIB3028-018-Q1-B1-B11
ggcacacattcacctgaagcttccaaagcaatggcttcccttgcagcatccactgctgctgcttcccttggcatgtcagaaatgcttggaaaccccatcaacttcagtggtgccacaaggccagctccatctgcttctagtcctgcctccttcaagactgtggctcttttctccaaaaagaaggctacaccaacacctccaaaaaaagctgctgctgctgctcctgccaatgatgagcttgccaagtggtatggtcctgacagaaggatcttcttgcctgagggtctcttggaccgatccgaaatcccagagtacttgaccggagaagtccctggagactatggttatgacccatttggtcttagcaagaagccagaagac

SEQ ID NO: 3598 - DNA, 224 bp, Glycine max
  Clone ID: LIB3028-018-Q1-B1-B12
actcataatgtagtttgtatatctctatatgcgaatgctcgcagagcgattggataattaggtggtaatgccatccattcgattctgcagctttgatcttcgttttccttgtgaccgtgtaaccctctgtgacagtatagagttgtgccctagttaagtcgtttttttttttcgaattttggggattcacgttgtaagggaatgcattgttgaaaggaattctt

SEQ ID NO: 3599 - DNA, 378 bp, Glycine max
  unsure (1)..(378): unsure at all n locations
  Clone ID: LIB3028-018-Q1-B1-B2
agcattttcagaggaacaatggcgggtagggtttcgacgtgcttcttcttcgtgtttgctctttctctccttcttccttttcagatctccgctgaggaatcatcggagaaagagttcgtactcacattggatcactctaactttcacgacactgtcagcaagcacgatttcatcgtcgtcgagttctacgctccatggtgtggccactgtaagaagcttgctcccgagtatgagaaagctgcttctatcttgagtagtcatgatcctccggttgttttggctaaaattgatgccaatgaggagaagaacanagaccttgcatctcaatatgatgttaggggatacccancaattaagattctgagaaatgggggaaag

SEQ ID NO: 3600 - DNA, 369 bp, Glycine max
  Clone ID: LIB3028-018-Q1-B1-B3
gagaagttgtgggatggaactcagaagccgtcaaatatttcagttaatttggcactccagcacctgtatgattggaaacaaattcattgtaaagaatcatcttcatctgcgcagacaatacatggactccaccagcagcttcttttatgaagtgtagtattgaagcagtcttattccaagacaccggctctttggtgtttcagcttgcatcaggcactctcgtgggaattttattgctgccagaacacaatgctatcagggagatctttcacctcaggaagcagaggaaatagcattgcttacagtggtgagttggtatcatttctgcatttggatatataatgtcatttttgaaattgattgttaatc

SEQ ID NO: 3601 - DNA, 320 bp, Glycine max
  Clone ID: LIB3028-018-Q1-B1-B5
tatgaagaatatgtgcaacgaataaaagaaagcgatggaaagcgcttcgcgatgcacgaaagagaagaaatggaagcaaagtttccgcgttttgtctttcataaaaaaaatgttaaattattattttctatgataggattggtttcttgtcttttttctcttgtttaagaatttcggtgtattttaacagttgtaaagcactctgcgctctctctgcatgatcatgtacaactacaagcatgctctctgtagttttcaacctgctgcgcttgcaggggttgtaaaactaatcaatataattaaataaattacattctgtc

SEQ ID NO: 3602 - DNA, 381 bp, Glycine max
  Clone ID: LIB3028-018-Q1-B1-B6
cgccaatgctgcgtacattggcactcctggaaagggtattcttgctgctgatgagtcaacagggacaattggcaagcgtttggccagcatcagtgtagagaacattgaatccaacaggcgagctcttagggagctgcttttcactgctcctggtgttcttcaatatctcagtggtgtcatcctctttgaggaaaccctctaccagagcacagctgcaggcaagccctttgtgaatgtcttgaaggaagctggtgtgcttcctggcatcaaggttgacaagggcacagtcgagcttgctggaactaatggagaaaccaccactcagggtctagatggccttggtcagcgttgtgccaagtactacgaagctggtgcacgttt

SEQ ID NO: 3603 - DNA, 344 bp, Glycine max
  Clone ID: LIB3028-018-Q1-B1-B7
ctcgagccaaaacaatctccgttgcttaccgtttcttgaaagcgaagacacctgaacaaagggctgctgttgacttggacacccattactctcaagaatatcttgaagaatatgttggaacagataagaggagagccatcttatatcagcaatatgttaaaggtatatcaacaactgggatgcaatctaactatggtttcgatggtcaactcaatgcatgttggacacataaaatgactgaaacagagattgaggtgatcaaatctgcaggttttcttgtttcagtcatccatggcaggcatgatataattgctcagatatattatgcaaaaagacttgctgaa

SEQ ID NO: 3604 - DNA, 175 bp, Glycine max
  Clone ID: LIB3028-018-Q1-B1-B9
aattatggatgagaaatattggtattgatattttcccaaatttaggaccttgatacttagaacccatagtcttgcgatcaagaattttcatttttgttgtttcatgccatcagcttataatcctggagtttgagccccccccttttggttgaaataattaagactcgtttggatt

SEQ ID NO: 3605 - DNA, 347 bp, Glycine max
  Clone ID: LIB3028-018-Q1-B1-C1
gatggaatgtccaagcagagcttgtgcactgcagatgggccatgttgggagctgctggcattttcatcccagaattcctcacaaagattggtatcctgaacatcccttcatggtacactgctggagagttggagtacttcacagacactaccacactcttcgtagttgagctctttttcattggttgggccgagggtagaaggtgggctgatatcatcaagccaggctgtgtcaacactgaccctatctttcccaacaacaagctcacaggaactgatgttgggtacccaggtgggctttggtttgatccacttggctgggggaagtggttctcctgagaagatcaa

SEQ ID NO: 3606 - DNA, 353 bp, Glycine max
  Clone ID: LIB3028-018-Q1-B1-C10
tgcgtccaggtcgactctaaaggatcccctcggggaattccaattccacattttcaagaaataaggaggcaaaaatgttcatatatgaattgggattatttgttttcttaataaggctatcctgaaaccaaaggaaatgagattgggaatcctccgggaaatccaattccacattttcaagaaataaggaggcaaaaatgttcatatatgaattgggattaattggtttcctaataagcctatcctgaagccaaaggaaatgagatctggattcctcggggaattccaattccacattttcaagaaataaggaggcaaaaatgttcatatatgaattgggattatttggtttc

SEQ ID NO: 3607 - DNA, 260 bp, Glycine max
  Clone ID: LIB3028-018-Q1-B1-C12
gtttcctgcatctggaccagaaacccagcgacatgcatctgctataagaaggaagatcacgatattagggaccagacttgatagcttgcaatctctgttgtcaaaggtccctgcaaaaactgagaaggagatgaatcgtcgaaaggacatgcttgcaaatttgaggacaaaagttaaccaaatggcttcaacattgaacatgtctaactttgcaaatagggatagtttgctacggccacaaataaaatcagatgcaatga

SEQ ID NO: 3608 - DNA, 347 bp, Glycine max
  Clone ID: LIB3028-018-Q1-B1-C2
gatgaaatatccatgaatcccatgtcaaatgggttctgcacatgttgagacctgcaggcactttcatcggaaatgtcctcaaaagcagtggcctccttctggaccgctgatgatgtagagctggcgcatgagcttagttcataggcaatactacactcttgggagctccgctccttttcaatggttgggccgatcggtaccaggtgggctggtatcatcagagcaggctgtgtcagcagtgtccctatctttctcaacatcacgctcgcaggaactgatgttgggtacccaggtggggtttggtttgatccacttagctggggaagtggctctcctgagacgatcac

SEQ ID NO: 3609 - DNA, 380 bp, Glycine max
  Clone ID: LIB3028-018-Q1-B1-C3
gtgatattggggcagcgcagcaatacgtaacaagttctatcattgaggaagtttccggtctccgaaaatgaacgacgcagatgtctcgaagcaaatccagcagatggtgcggttcatccgccaggaagctgaggaaaaggccaacgagatctctgtctccgccgaagaggaattcaatatcgagaagctgcagttggtcgaagccgacaagaagaagatcaggcaagaatacgaacgcaaagagcgccaagtcgaaattcgcaagaagattgggtactcgatgcagctgaatgcttctcggatcaaagttcttcaagctcaagatgacgtgatcagttccatgaaagaagctgcatccaaggaactgttgaatgtgagtc

SEQ ID NO: 3610 - DNA, 363 bp, Glycine max
  Clone ID: LIB3028-018-Q1-B1-C4
atggtgggtcttagtgtagtcctggaagcccagaagagttgcatcaacaaaaagacacctcaagtcattaacaaatccaccatgctgatgcttagcagcatccacaacaaaccctcccctcaaccttcttctctttttcagccacccacttttcttgaccaatgctttctttgtgggaagagactcttgccagggaaagacatctacatgtacaaaggggacagggcattttgtaacgtggattgcaggtgcaagcagattttcagcgacgaggaagaagctattcagaaagagaagtgttctttggctgccatgatgcccacatcgtcgagttcttccatctcaacggcacctcatcaccgg

SEQ ID NO: 3611 - DNA, 326 bp, Glycine max
  Clone ID: LIB3028-018-Q1-B1-C5
atcacatacagcagaaaacagttgacatgaatggcatacagctgcatgttgcagagtaaggagatggtccaatggtgttgttcctctacggcctctctgatctctggtactcagggcgccatcaaattctcatctctcagctccctcggataccgcgccgtctctcgcgatctccgtggctactgtgataccgattcaccacgttcaatcttcagctacaggagcttccacatagtggatgatcacgttgagcttaatgactcactggtggtcgactaaatgttccttgaggatcaggactgcagaagcatcataggttggtatct

SEQ ID NO: 3612 - DNA, 344 bp, Glycine max
  unsure (1)..(344): unsure at all n locations
  Clone ID: LIB3028-018-Q1-B1-C6
ccggttcacggagtcactgcactattattcaaccctattcgactcgctggagggttcgcctgtgaaccctaacgataaggccatgtcggaggtttacttagggaagcaaatctgcaacgtggtggcgtgcgagggaatggaccgcgtggaaaggcacgagacgctgaaccagtggcggaaccggttcgtttcgaccggattttcttcggttcacttgggttcgaacgcgtacaagcaggccagcatgttgctcgcgctttttgcgggtggggatgggtatagggtggaagagaacaatggttgtctcatgttgggatggcacactangcccttgattgccacct

SEQ ID NO: 3613 - DNA, 332 bp, Glycine max
  Clone ID: LIB3028-018-Q1-B1-C8
ggaataatgattatggtttgtggagatgcaacggcaaggcgttgaggaagtgagcatacaagagttggcgtcgaatccttccctcgagaaagatcaactgaaccatctgagataacacgtaaacgatgaccctgcaaattctgactatgttgacatggatagggaactttccgaggtcattgccttgaccgatgaactccttgcaactgcaaaccagaatgaaatcgctgcacctcctaataatgctgctgcatctccagtcttagccatacataacgagaatcaattgcgagatactacttctgatcatcacgagaaacttcctgttggca

SEQ ID NO: 3614 - DNA, 383 bp, Glycine max
  Clone ID: LIB3028-018-Q1-B1-C9
ctccaaatggaatagaaaaacgcactaaagattccatccatttggaacttgggagagtagagtaccattgctccactgtcgccggccaccatgtctttctcggagttccgaccactcgacgacacgtccctcatcgaatacataaagtccgtccccgccctctcctccaaactcgccgacaacctcgacgacttatcagtcaaagaagtcggagatggcaatcttaacttcgtcttcattgtttccaaccccgcaggttcttttgtcatcaaacaggctctgccgtacgttcgttgcataggggaatcgtggcctatgacgaaggagagagcgtattttgagtcgctggcactgaaagaagagggtcgtttaatccccgaaca

SEQ ID NO: 3615 - DNA, 344 bp, Glycine max
  Clone ID: LIB3028-018-Q1-B1-D1
ccaatatattccattctctctgtgtatttccctacctctcccttcaagatgcagatcttcgtcaagaccctcaccggcaagaccatcacccttgaggtggaaagctctgacaccatcgacaacgtcaaggccaagatccaggacaaggaaggaatccccccggaccagcaacgtctcattttcgccggaaagcaacttgaggacggccgtacccttgctgactacaacattcagaaggagagtactcttcacctcgtcctccgtctccgtggtggcatgcagatcttcgttaagacactcaccggcaagaccataaccctagaggttgaaaactccgacaccat

SEQ ID NO: 3616 - DNA, 370 bp, Glycine max
  Clone ID: LIB3028-018-Q1-B1-D11
gtttttggctctattgttcctgttctgactcttggctcattttctaagagatggatagttcctggatggaggcttggttggtttgtgacaaatgatccatctggcacttttagaaatccaaaggtagatgagcgctttaaaaagtactttgatcgtttgggaggtccagccaccttcatccaggcagctgtacctcagataattgagcatactgaaaaggttttcttcaagaaaaccattgataatttgaggcatgttgcacatatatgttgtaaagagttgaaggatattccatacattatatgcccttataaaccagaaaggtccatggctatgatggtgaaactaaacctttcacttctggaggata

SEQ ID NO: 3617 - DNA, 370 bp, Glycine max
  Clone ID: LIB3028-018-Q1-B1-D12
ctgacctttgacaggtaaaaggcgaaccaaatatatcatacatatgttctagatactatagagcacctgagctcatatttggcgcaactgaatatacttcagccattgacatctggtctgttggatgtgttttagctgagctgctgcttggacagcctctgttccctggtgagagtggagttgatcaacttgttgagatcatcaaggttctgggcactccaacaagggaagagattaagtgcatgaaccctaattatacagaatttaaattcccacagattaaagcacatccatggcacaagatcttccataagcgcatgcctccagaggctgttgatttggtatcaagactactacaatactcccctaa

SEQ ID NO: 3618 - DNA, 376 bp, Glycine max
  Clone ID: LIB3028-018-Q1-B1-D4
gtgatttcagtgagtgatcggtgttcacttgatctcatcataatcgtcagcgtcaattgaagaagatgccgatcagaaacatcgccgtcggaaggcgtgaagaggcgactcaccccgacacgttgaaggcggctttggctgagttcatctcaaccttcatcttcgtgttcgccggctcaggctccggcatcgcctacaacaagctcaccgacaacggcgctgccacccctgccggcctcatctccgcctccatcgcccatgcattcgccctcttcgtcgccgtctccgtcggcgccaacatctccggcggccacgtcaaccccgccgtcaccttcggcgccttcgtcggcggcaacatcaccttcctccgcggcat

SEQ ID NO: 3619 - DNA, 350 bp, Glycine max
  Clone ID: LIB3028-018-Q1-B1-D5
atttgatgctctattggaattcttaactgtccgagaacatcttgagctttatgctagaataaaaggtgttccagattttgcaatagacaatgttgttatggaaaagttgacagaatttgacttattgaagcatgctaataaaccatcattttcacttagtggagggaataaacgaaaactgtctgttgcaattgcaatgattggagatcctcctattgtcattcttgatgagccatccacaggtatggatcccattgccaaaaggttcatgtgggatgtaatatctacgatctcaacaaggcgacgaaagactgcagtaattcttactactcacagcatgaatgaaactc

SEQ ID NO: 3620 - DNA, 291 bp, Glycine max
  Clone ID: LIB3028-018-Q1-B1-D6
atttgatgctctactggaattcttaactgtccgcaaacatcttgaactttatgcatagaataaaaggtgttccacatttagcaatagacagtgtcgttatgggaaagttgacatcatttgacatattgaagcatgctaataaaccagcattttcacttaatggagggaatagacgatgactgtcagttgcaattgcaatgagtggagatccacctattgtcaatcttgatcatccatccacatgtatggatcacattgccaaaaggttcatgtgggaagtttgatctacga

SEQ ID NO: 3621 - DNA, 364 bp, Glycine max
  Clone ID: LIB3028-018-Q1-B1-D7
aaggtaaaggtccttgttgttccggtgtgctgctagagaatctggtgaaggatgtcaattgttccaatcaaccaaggtcactcccaggactcttgggatcaattcatcgattttcctctccctccttccatctccagcttcttccccggcttcgaattcggattcggctcatcggtggttaacacacgtgtggactggagggagactcccagagcccacgtgtggaaggtcgtgcttcctggcttcacaatcgaggacgtgctggttgagctacaagaccatagggtgctccatgtcaacgtggagagtggtaacttcctgacgaggtttaagattcccgacaacgggtacctcgaacaactca

SEQ ID NO: 3622 - DNA, 367 bp, Glycine max
  Clone ID: LIB3028-018-Q1-B1-D9
caccaataagggagttcaagaatttggagacaaaaggggttcctttcccaaagaaccaacccatgagaatatactctagcctttggaacgctgaggattgggccacaaggggtgggcttgtgaaaacggattggagcaaggccccattcacagcctcatacagaaacttcaatgccctaacctcttcctccactggccaatcactggacgccacggggctggccaagatccattgggtgcaaaagaattacatgatttacaactattgcactgatattagacgtttcccacaaggcctccctccagaatgttccattgcttgagaatgttcattattcaattcaatgttgcatattattatatatat

SEQ ID NO: 3623 - DNA, 78 bp, Glycine max
  Clone ID: LIB3028-018-Q1-B1-E10
aaaaaaagaattttgaacctgcctctgttaaagtttgcattttttttgggtgggttgcaagtactgtgcaagctttgg

SEQ ID NO: 3624 - DNA, 378 bp, Glycine max
  Clone ID: LIB3028-018-Q1-B1-E11
tagttagcctcttcttgtttctcctgcaatcaacgacacccccccaaaaatgacaggagagacagtgaacccaaaagcttaccctttggccgatgcgcaactcgcaataacaatactggatcttgtgcaacaagctgccaactacaagcaactcaaaaagggtgctaatgaagcgaccaagacactgaacagaggcatctctgagttcgttgtgatggccgcggacactgagcctcttgagattcttctccatcttcctcgcctagctgaggataagaatgttccctatgtattcgtcccatcaaagcaagcccttgggcgagcatgtggagtcacacggccagtgattgcatgttctgtaacaactaatgaaggaag

SEQ ID NO: 3625 - DNA, 355 bp, Glycine max
  Clone ID: LIB3028-018-Q1-B1-E12
tggacatggttctcggttagcttttccgtccttaattcaggaaaatcgtgtaatatatgttctccatgtaaatgaggatggaagccttttaaacacaatttctgatgaagagtgctctctagttgattgggtccttgtagatagtgcaaagggtggcagtggtaaagcattcaattgggaccagttgaaactgccaaacattaaaagcaagtatggttggctcttagcaggagggatccatcctgagaatgtttctgaggctctatctactctcaggcctgaaggggtggatgtcagcagtggcatttgtgcatcagatggtatccgtaaggatcaatcaagaatagcttctttc

SEQ ID NO: 3626 - DNA, 375 bp, Glycine max
  Clone ID: LIB3028-018-Q1-B1-E2
gtccctcacagaagctatagggacagcatggacattcatgctgtttggaattgtggccattgtggcaatcttcgttgtcaatgtttttgtgcctgagaccaaaggggtttctatggaggaagtggagaagatgctggaacaaagatctgtgcagttcaagttttgggagaagagagattctggctctgagaagcactgactcaaagaacaataaaaagaaaaaagcaaaattgtttgagtcatgttttagtttttatagcttaaaatgttgaaattaagtggcttgtgaagttatgggtatttgatgacaatggttgttctctttgggtaagatttggtgatagttagcattttaactctaatgagtatgtaact

SEQ ID NO: 3627 - DNA, 349 bp, Glycine max
  Clone ID: LIB3028-018-Q1-B1-E3
gttctatgctttcaagtactaccaattgggcactttgtttactgtcatcattattttttcagcatcacaagattgtccccttattcaacagttagctggctaaccaaattatctattaattaggcaaattatgggaaattcagaatccaagttgccaaccggttttaggttccaaccaaccgattaggagctcattcttcactaccttagtaaaaaggtatcatccatacccttgtccgtttccatcattgcagaggttgatatctacaacttagatccatgggacttaccagctgaggcaatctttggtgagaaagaatggtactcttttagtctcagagaccgaaag

SEQ ID NO: 3628 - DNA, 379 bp, Glycine max
  Clone ID: LIB3028-018-Q1-B1-E4
catcaattgtattgctagaggtcaaaagatccctctattctcagcagctggtctcccccataatgaaattgctgcacagatctgtcgtcaggctggcttagtcaagcgactagagaaatctgataatcttcttgagggtggagaagaggacaattttgctattgtgtttgcagctatgggagttaacatggagactgcacagtttttcaagcgtgactttgaggagaatggatcaatggagagagtgactcttttccttaatttggcaaatgatcctacaattgagcgtattatcactcctcgtattgctcttactactgctgaatatttggcttatgaatgtggcaagcacgttcttgtgatactcacagacatgagt

SEQ ID NO: 3629 - DNA, 202 bp, Glycine max
  Clone ID: LIB3028-018-Q1-B1-E5
tgcacatggatctcggttatcttcaccgtccataattcatcacaatcgagtgagatatgttctccatatgaatgatgatagaagcctattactgagagtttccgaataacagtgctctctaattcattggctcattgtaactagtgcccatgatgacagtgtgacaacattcacatgggaccagttccaactgccaatcatt

SEQ ID NO: 3630 - DNA, 372 bp, Glycine max
  Clone ID: LIB3028-018-Q1-B1-E6
tggaacttgacatagtaccatttgattcatgttccaaagagtaccaaaatctttatgaagagtggttcaattatgcagatgcagatggggatggtcgttttacgggaaatgaagccatcaaattctttgccatgtcaaacttatctcgacaagaacttaagcaggtatgggccattgcagattcaaaacgagaaggatatcttggtttcaaagaatttgtcattgctatgcagcttgtttctttaggacaatgtggatactcaataacacacgatttgctaactagtgatgctatgagacatgcaaaaccacccacaatggatggtttggatgtattgcttacaaagaaaaaacgtaaacaaaaagataaag

SEQ ID NO: 3631 - DNA, 359 bp, Glycine max
  Clone ID: LIB3028-018-Q1-B1-E7
gttcgagatgttgcttgggcacccaatttagggctccctaaatctaccattgctagtgcatcgcaggacggtaaagtgattatatggaccgtggcaaaagatggggatcagtgggaaggcaaggttttgaatgatttcaagacacctgtttggagggtctcatggtctttgacaggaaacatactggctgtggctgatgggaacaacaatgtgacattgtggaaggaagcagtagacggggaatggcaacaggtgacaacagtggagccttagaatgtgatttgaaaatggttagaattttcgttttgaaatatagttgatatcttgttctttgcatattatacagttgattaattgtg

SEQ ID NO: 3632 - DNA, 342 bp, Glycine max
  Clone ID: LIB3028-018-Q1-B1-E8
acctactctccgctcccaagagcacgcaccaccactattgcacttcttcctcgttctccctctttttcttcttcttcgctaaacccttttttcgatctcactaacacaacaatgggagacgagaagaagggcaagcctgctgcttccggcgtgtggtccaccatcaagcctttcgtcaatggtggagcctccggcatgctcgccacctgcgtcattcaacccatcgatatgatcaaggtgaggattcaacttgggcaaggatcagctgcgcaggtcacttccaccatgcttaagaatgagggttttgctgccttctataagggtctatctgctggattactc

SEQ ID NO: 3633 - DNA, 376 bp, Glycine max
  Clone ID: LIB3028-018-Q1-B1-F1
atcaaattcaaacagaaccttctgcagagccaaagacattttcagttaaatgtggagtaaggggtaacactggtccagcctgcaatgtggttggaatgattgatcgaatgatattgggtatacaacacctgtacaagagaccaatatatgcgcggatgcctgaatgcagtattaattctcccaactatggaccattacctcctgatgctcctgcttggtgtcaggccccttttgatcctgaaggactcctaagttcagtgatggctattgtcacctgcttgattgggttgcactatggacatattattgtccattttaaggaccacagagtgagaatcatatactggatgatcccaacctcctgtcgtttagtttt

SEQ ID NO: 3634 - DNA, 233 bp, Glycine max
  Clone ID: LIB3028-018-Q1-B1-F10
gaaatcattattccactcacttattggagaccatcagttgtattagatgtccaacatctaggacagctctgaggctagttgtggcactgtgaatcccatggacaatttttgctgtttcagtcacggtactatctaaagcatgttgatgtgactgtgtctcacactatcatttcatatctgaagcacatgctcctctttgcgacattttgtttctgttcctgactaggttttgc

SEQ ID NO: 3635 - DNA, 380 bp, Glycine max
  Clone ID: LIB3028-018-Q1-B1-F11
tttcgagttgcgccattttcacctgtcctctctctctctctctctctctgtcaccgtgttgcaagtatgaaggactgttggttttttgacaacaatttcaatggtctgtcggatgagagtcttgatgatgtgatggacatggagcttttggatttgccccttgactttgaggatgtggaaactgatgctgtggaagaacaagattgggatgctcagctcaaactccttgaagacccaccaccaccacttggagttttcccactacaacaatcctctgcattctgtggacaaactcggaatgagaatgcgaaactcggcagcaagagtttctctgcttctctagcgaagactgtcagacctgcatatggcaaaactattcc

SEQ ID NO: 3636 - DNA, 370 bp, Glycine max
  Clone ID: LIB3028-018-Q1-B1-F12
cgacgtgaaagcgaagaaaaatgaagaattctaagaaaacttgcgcgcggaagtaccacaaatcgggaaatccacgcttgcggtggacacctgaactccatgaatactttgttgaaattgtggaaggtcttggcggaaaaaacaaggcaaccccaaagagcattctgcatatgatgcatgtgaaaggactgaggatctctcacattaaaagccatcttcaaatgtacaggaacatgaagggaggtacgattctcacatcaatgcaacaggaaatgggagaaaatgtgcatgttaaggatcatcaaccaatctgctccaactgttcatcccaaagcataatcttcagattacaaggggacaaatttaaatt

SEQ ID NO: 3637 - DNA, 370 bp, Glycine max
  Clone ID: LIB3028-018-Q1-B1-F2
aatagatatttacaacacactcacttttcactctcccttcatttagtttatatatagtttcatttcctcttctaaaacaacaatagttcatatagtccatttcacttcactaaggttatttcttagattgcttccatgggagacaatgttgtagtgtccaatatggagctagagaggttgcttagcatgaaaggaggcaaaggtgagggaagctatgccaacaattcccaagcacaggccatacatgccaagtccatgcatcaccttctcaaagaagccctagatggagttcaacttcaggcccctaacataccttttgtggttgtggatttggggtgttcatgtggcaacaacaccatcaatgtggtgg

SEQ ID NO: 3638 - DNA, 269 bp, Glycine max
  Clone ID: LIB3028-018-Q1-B1-F3
attagattcatacatttaactaagaactttattatccttatctagctttatctatgatatgaagcattcgcgctatacactgtattttcggaagtgagactgcacgattgtttttgtgaatactccatttgccatcgtagtctggattcacgtttgtttgatcactcagtctcacaactcgaatatgaggactctctcaagttcgtatcgcagtggcagcgatgtcgcatcatctgccggtgacattcactgggtttcaacttaagcag

SEQ ID NO: 3639 - DNA, 317 bp, Glycine max
  Clone ID: LIB3028-018-Q1-B1-F4
aaacaccttagataatttgattcccgagtctacaacttcaactaatccaatcaccactaaagcggtccaaaggacatacttgcacgttcatacgtctcatgatatctgggatattttctcgatacgacattttaactcactgttacgcatcatacatcagatctaacatgaccaatgtccatcagtctccccagttggatcaacgccgattttccagttggatttattgattgcatcagtcttgtcaggttcatcataatttctgggagagccatgtcaagctctcacgtcggtggggggaatcgcaattctaacag

SEQ ID NO: 3640 - DNA, 366 bp, Glycine max
  Clone ID: LIB3028-018-Q1-B1-F5
ctttcttatttacaagttcctctcttctcttctcccttcacacacccattttccctttcactcacccctcattcaaatcatggatttcttgcaagcaccagaaaatcagatacttgtgggtgtggccgtggccgttgtagccattgggcttggtgctgtctatctctattcatctaagaagcgcaaaggttgcttggacccattgaactttaaggtgttcaaacttgttaagcgtgcacagctgagccataatgttgctaagttcacatttgcacttccaacacctacatctgttttgggtcttccaattgggcaacacataagttgcaggggtaaagatgctcaaggtgaagaacttatcaaacc

SEQ ID NO: 3641 - DNA, 368 bp, Glycine max
  Clone ID: LIB3028-018-Q1-B1-F6
atttttcttgcgtacacccgcattgttttttccccacaagcaagtttgcaaaggcaataatctctattaccctcattatccaaaatcagaaaaaatggccactagaggcctcaaaatttgcttggccgtgtcctctcttttcttgatcattcttgccatcgttattgtgaccttaattttgaccatctttaaacccaagaacccagatatatttctccacccagttgacctagaaaactttcaattgctttcacctaatacaactagtgcacccttaggcatagtgatcacaattgtgaaccctaattatggaaacttcaagtacgtgaattccagtggctatcttaaatatcgtgacaccattatag

SEQ ID NO: 3642 - DNA, 375 bp, Glycine max
  Clone ID: LIB3028-018-Q1-B1-F7
cgtgttctctgctgcgcgagctatctagggtttagaacctcgcatttacagaagacatggcgactgtggtgccaacctccgaagaagacgctgcactctccgtcgttcgattcgcctctgaacttgcctgggccgatgccggtcccgaggttgctgagccccaagttagcagactctgcgtggaggctgaagaattcattgttatgggaaagtggttggagctagcatcattgatgattacctctgctgaactgattttctcgaaggtttctgaaaaagatatagagtccatcttcactatcatctgcaatcttgttacaaagaccgaaaatccagatgaaatgatggagattggtgaagttataacgaccaaaa

SEQ ID NO: 3643 - DNA, 349 bp, Glycine max
  Clone ID: LIB3028-018-Q1-B1-F8
atggccaccaccactacccagcctccctcgaatatctgttttttccttctgttgttgcttctagcacactttcatttgggcataagccaacttgagctgaattactactctaaaagctgcccaaaagctgaagagatcatcaaggaacaagtcacacaactatataacaagcatggaaacactgccgtttcgtgggtcagaaatctcttccacgattgcgtggttaagtcatgcgatgcatcattactgttagcgacggtgagcgatgtagtgtcggagcagacatcggatagaagttttgggatgagaaacttcaagtacgtaaacactaatcaaagcaacggttgag

SEQ ID NO: 3644 - DNA, 377 bp, Glycine max
  Clone ID: LIB3028-018-Q1-B1-F9
attaattgcacgaatggcacttcgttgcttggtgatgtccctttctgttctcttcacacttggtcttgcgagagaaagccatgccagagacgaagatttttggcatgctgtttggccaaacactcccattccaagttcaatgcgagatcttctaaagcctggccctgcaagtgttgaaatcgatgatcaccctatgcaaattgaagaaacacagtacccgaaaaccttcttctataaagaagaccttcatccaggcaaaacaatgaaagtacaattcagcaagcctccctttcaacaaccatggggtgttggtacatgggtaaaggaaattaaagacactactatagaatgatataattttgaagagctatgcatca

SEQ ID NO: 3645 - DNA, 367 bp, Glycine max
  Clone ID: LIB3028-018-Q1-B1-G1
gaaggaaccctggctttcatcttctaaattggttgttaaacctgacatgttatttggaaagcgtggcaaaagtggtttggttgccttgaatttggattttgcacaagttgtttcatttgtgaaggagcgtcttggaaaagaggttgagatgagtggatgcaaaggacccataacaactttcattgttgaacctttcatcccacacaatgaagagttttaccttaacattgtctccgagagacttgggaacagtataagcttttcagaatgtggaggaattgaaattgaagacaactgggataaggttaagactgcatttgttccaactggaatgtctcttacgtcagaaatcgttgccccacttgtt

SEQ ID NO: 3646 - DNA, 366 bp, Glycine max
  Clone ID: LIB3028-018-Q1-B1-G10
tggcggtattaacattgatggcatttccactaagccttcttggaggaacttcagttacgctgaccttgccgttgccacggacgatttcagccctgagaacttgcttggaaaaggtggtcatgctgaagtctacaaaggatacttagcagatggtcaagttgtagcagtaaagaggataatgaggaatgaaaaagaagccgaggacagagctggtgatttcttgacagaacttggaatcattgctcacattaaccaccccaatgcaacacgcttgattgggtttgggatcgacaatggtctctactttgttctacaattggccccacatggcagcctttcctctttgctctttggttctgaatgttt

SEQ ID NO: 3647 - DNA, 383 bp, Glycine max
  Clone ID: LIB3028-018-Q1-B1-G11
tccaagggaaccaaccaacaattttcaaaaaaaggatttggaattggaaaggcgagggattgcgctgcgtctcttcctcttctctttcgattcatccctcattcataatcttccaatccaacaacctcagcctcacactcacacatacacacatctgaacgcgtatcgtccctcccatggcttcaaagcgcatcctcaaggagctcaaggacttgcagaaagacccaccaacttcttgcagcgctggtccagtagctgaggacatgttccattggcaagcaacgattatgggtcctgctgatagtccttatgctggaggtgtattcctagtcactattcactttcctccggattatcctttcaaacctcccaaggttgccttt

SEQ ID NO: 3648 - DNA, 346 bp, Glycine max
  Clone ID: LIB3028-018-Q1-B1-G12
gtaacagtgagaggcatctgagggggaataaaacatggtttcaacagcaagagatacagagcatgattacaaagcgccagggtgcgcacgttagcaccgaaccccgtgggttcctctcccctaactcgcttcgcccccacggcattcctacgctgatccacactcaaaacgcatcacacaaaacaccgtttcgcagccctaacggacgaggggggtaaaacaaaaaactgatgcaaatgtttcggataacgagattctcggggtttttctccgccgcaatgtttgtgactggtcgtgttactctctccccttccgtccaatccgaagccattcgatcctccaccga

SEQ ID NO: 3649 - DNA, 344 bp, Glycine max
  Clone ID: LIB3028-018-Q1-B1-G2
gaaaacacagttctcaccatttccctctcgattgtgaaacctgttgttgttaactgaacttttctgaacaagaatgtctgggcctggaaagggaggcaagggtttgggaaatggatgagcgaaacgacaccgtaaggtgctgcgccataacattcagggaatcaacagtcccacgattctccctttggccctcacgggtggcgttaaccgtcacagtggtctcatctacgaagagacacgtggcgtgctcaagatctttttggagaacgtgattcgtgacaccgttacctacactgagcatgctaggacaaataccgttaccgcaatggacgtggtttatgctc

SEQ ID NO: 3650 - DNA, 334 bp, Glycine max
  Clone ID: LIB3028-018-Q1-B1-G5
gtaacagtgagaggcatcggagggggaataaaacatagtttcaatagcaacagaagcagagcaagattagaaagcgccagggtgcgcacgttagcaccgaaccccgtgggttcctctcccctaactcgcttcgcccccacggcattcctacgctgatccacactcaaaacgcatcacaaaaaacaccgtttcgcaaccctaacggaggaggggggtaaaagacacaactgaaaaagatgtttcggataacgagattctcggggtttttctccgccgcagtgtttgtgattgttcatgttactctctcaccttccttcgaatccgaagccattcg

SEQ ID NO: 3651 - DNA, 365 bp, Glycine max
  Clone ID: LIB3028-018-Q1-B1-G6
tgggaagggaaggaggagagggagagggagagagaaagaaaggtgaattggattgcatctctctctgtgtgttggaagaggggaatcgtagatctgatttctttctttctttttaataattttgtgatcagaattattgagctgaacaaaagacaatgggattgtgggaagcttttctcaattggcttcgcagccttttttttcaagcaggaaatggagttatctctaataggacttcagaatgctgggaagacttcccttgtaaatgtagttgctaccggtggatatagtgaggacatgattccaactgtgggattcaatatgaggaaagtgacaaaagggaatgttacaatagagttatggga

SEQ ID NO: 3652 - DNA, 386 bp, Glycine max
  Clone ID: LIB3028-018-Q1-B1-G7
aagagagagggagagagatggagttgagcatgaaagtgttggtgaaagttgcttcgttgcttttcctattggaattcactgcaacagttgttgatgctcgcttcgatccaagttcattcatcactcagtttctccccaatgctgaagccaacaattactatgttaaatccacaacaaaagcgtgctgtaacagctgtccttgcacaaaatcaatccctccacagtgtcgttgttcagatattggagaaacatgtcactctgcatgcaaaacttgtatttgcactcgctcaattcctccacagtgtcattgcagtgacataaccaacttctgttatgaaccttgcaactcctctgaaaccgaagctcactaggaatattgagcatgt

SEQ ID NO: 3653 - DNA, 381 bp, Glycine max
  Clone ID: LIB3028-018-Q1-B1-H1
gaactttgcagcataccagcatgagcatgaagctcttccagctcttctccctactcccattcttcctctacttctacacaatagaagcagccgttggcccattgcaactgacacacccactggaccccttaactcagcaagaaatcaccctcgtcaaaaccatagtcctaaaaaaagtaccccaagccagccaaccgcgtcttcttccactacgtcggcctcgacgatcctgacaaggccgccgtcctcaaatggctctcctccggcgcccggacgccgcgcaacgccttttccatcgccctcatcaatggccaaatccacgagctcaccgtcaaccttctctccccgcgaaacgttgtcttgggacaaatccacacaagg

SEQ ID NO: 3654 - DNA, 381 bp, Glycine max
  Clone ID: LIB3028-018-Q1-B1-H10
ttttgctttcaaaagatgagatagtacaaaagtgcttgtgagtatcgtatctatccagtgtgtttcttcttcttctctttcaagggtagatttctgaagaagaagaaaacccttacaaatctaactccgattgaaatttgaaagcgttaaaccctaaacccccaaattgattcattccgctcgttggtgtcatggcttcttcatcgagtagcggattgacgttcaagctgcaccctctggtgatcgtgaacatctccgaccactacaccagggtcaagtctcagatgaacccaacccacgcgccaccgcacaccaccaccaacaacaacaacgccaacggcggcgacggcgtcgtttcgccgccgctccacccgcgggtct

SEQ ID NO: 3655 - DNA, 382 bp, Glycine max
  Clone ID: LIB3028-018-Q1-B1-H11
tataacaaaaaaagtatgaaaggaaaagtactaggttccgcagtttctctcatcctagtggtgggtgtggtaattggcgtggttgctgtagttcaaagcccaaagggcgtgaacaacaacaacaatggaggagaattgaaaaccagcaacagggccgtgacagcgttgtgccaaggctcagacgaccagaaactgtgccacgaggttctgtcatcttcgaacagcacagacccaaaggagtacatcgcaaccgtggtgagaacctcgatggacagcgtgatcaaagcgttcaacatgagcgacaggctgacggtggaacacggcaacagcagcgccggaatgaagatggctctggaggattgtaaggacttgttgcagtccg

SEQ ID NO: 3656 - DNA, 378 bp, Glycine max
  Clone ID: LIB3028-018-Q1-B1-H12
gattgaaatacattggctatcaaattttgcctagagagagcactttgtatgagaaatatgataaaaatgatcctattctgagagaccctacaagcattaacaagaaggggtgggaatacacaaagaagatctatcttgacagccaaaatgtcatgttagacctcagaagattcagaaaaaggttgcatcgagcgtatgagtatacactctccaaatcaaaactgagtctccaacatcaaccaatgtgaatttcaatggtttcttttggttctccgtattcattgatgtgaaaaaaaattaaaattttcttaaaatctagaacattcttatatgcatataaaggcgcacctgaaaagttcttagtgcgatatgttgttg

SEQ ID NO: 3657 - DNA, 367 bp, Glycine max
  Clone ID: LIB3028-018-Q1-B1-H5
cataacgcacaaagcaagctcatcctacagttttaaaaatggcatcatcctcctccatggctctctctgctccatccttggctggcaatggcgtcaatctgagcccatcagcccacgaactctggagggtcagcattgagaacaacgtcatcaagcaggcctcctaccggatacccatggaagcgcccaaaccgcgtcaagtacatgggcccaatctctggcaagcccccgtactacctcataggctagttcccatgtgactactgctgagacactgctgggctttcggtagaaccagaaaccttcgccataaactctgagctcgagctgatccactccacttgggccatgcacggggtcttgggct

SEQ ID NO: 3658 - DNA, 358 bp, Glycine max
  unsure (1)..(358): unsure at all n locations
  Clone ID: LIB3028-018-Q1-B1-H6
ggtggtaatggcagcgtcactacaagcagcagctactttcatgcaacccaccaagttgagcaggagcaacactttgcagcaaaagtctactcagtccatttccaaggcttttggtttggaacctgttggagctaaaaaggtcacatgctcccttcaggctgatcttaaggacttggctcacaagtgtgttgatgctaccaaaattgcaggattcgcccttgccacctctgccctcgttgtctctggggcaagtgctgaaggtgttccaaagaggctaaccttcgacgaaatccagagcaagacctacttggaagtgaaggggacaggaacagcanaccagtgcccaacaattgatggt

SEQ ID NO: 3659 - DNA, 361 bp, Glycine max
  Clone ID: LIB3028-018-Q1-B1-H8
ccaaaatctgacatttatgcttttggaatggtgatcttacagttattgacagcaaaaccagcaatagcacttgctcataaggttgaaacagctattgatagcgggaatttaacagacatactggatccagaggctggagcttggccatatcaagagacactagacttggctttgctaggattgagctgtgcagaacttcggcgaagagaccggcctgatttacaagatcatgtccttccaacactagagagattgaaagaagttgttgatagggcccaatgctcagcttcaattgttactattaaatccaaacctcctaatcactttatctgtccaatacttcaggatgtgatggatgacc

SEQ ID NO: 3660 - DNA, 357 bp, Glycine max
  Clone ID: LIB3028-018-Q1-B1-H9
agtttccatcctctatatttcttcaatcttctctcccttctacttctagggtttcgcttctgcaacggacgaccttcttcaactcatcaaagttgactttgtgagccaattcaatcaggcttgagaaggtatcctagtgttgtttgttcaccttcatctccatgatggaatactgtaaagatgtcctcagctgtcttgattcggatacgtctcttaagatattcatgtgtctggatgatctggctgatcttgttcgggttacttgtgtctcgcgatcttggagacactttggtgagttatactagttcaaacaaagcatttgtttctcaaccgatgcctcagtttcatgaaaattca

SEQ ID NO: 3661 - DNA, 401 bp, Glycine max
  Clone ID: LIB3028-019-Q1-B1-A1
actacctaagcgcaccggcgagtccatctaggatgtctgaattatacaccgaatttgaatattattcttcggcttcaccctcttcattcgaagcaggcaacaaaattgatgatgacgatgaagacgaaaacaacaacgattacagctttgcgttttacgtgaatcgcgatcaatcagacaagtcgtctcgctccgccgaagagctcttcgacggtggcaaaatcaagcccttgaacgagtcatcacgtgcgacttctgttgctgaacaaaaaagaggcagagaaagagagagaagttcttcttcaacaagaacaacaaagttgtcgtcctcgaactcgggtgttcgtacggtggcacgatcactttctccttatagaaaatcatgggaagttgaacaacag

SEQ ID NO: 3662 - DNA, 379 bp, Glycine max
  Clone ID: LIB3028-019-Q1-B1-A11
ctgcttaaaagtattgagcggtttcatgttttagaaatcaaagattatgcatttttgttgcgggctacatagatcactctttatttcattgttatttcgttgggttttgataagaaccttactagaaaagctagccatgtagttcttgttctcatagctacaagtgattccagtttcagcatagttccatcatgttactgtgtttagagggtgacaagtataataattgggccagatatggttcctaagttaacatttctgtagctttattcgagtttgtagcgtcctctgttaagagcagccttagaaaatagggtcttgttacctaaaagcttttgcatcctggaaggcatgtattctttttattgctcatatatta

SEQ ID NO: 3663 - DNA, 380 bp, Glycine max
  Clone ID: LIB3028-019-Q1-B1-A12
ctctctcgacctcctttaaattacatatataattatgactcataggttctggatgaatttgctttgcgttgcattattaacattgatcctattacatggggcatcaagaggacatgatgatgtcgtcaaaatcggtgccatattcacattaaaaaccataaacggacgagtttccaaaattgccatccaagctgctgagaaagatgtgaattccgatcctcgcatccttgggggtcgtaaattgtccataaccatccatgattccaacttcagtggttttcttggctttattggggccctcaagttcttggtgaccgacacagtagctataattggtccacaaagttcagtaatggcccatgtgctttcgcatcttgcaa

SEQ ID NO: 3664 - DNA, 393 bp, Glycine max
  Clone ID: LIB3028-019-Q1-B1-A2
atcactctagctgttgcaaatttctactagttttcaatggcttctgcagatgttgagttccgttgcattgttggtgggcttgcttgggtcaccgggaacgatgccctcgagaaagccttttcaatctacggcgacatcgttgaatcgaaggttatcaacgaccgtgagattggcaggtccagaggattcggctttgtgaccttcgcctcagagcagtcaatgcaagatgcgatcgcaggaatgaacggccaggaccttgacggtcgtaacatcactgtcaacgaagctcagagccgcgccagccgtggtggtggtggaggcggtggtttcggaagtggtggtggatacaaccgcggtagcagtggatatggtggtggtggtggcggcggcgga

SEQ ID NO: 3665 - DNA, 400 bp, Glycine max
  Clone ID: LIB3028-019-Q1-B1-A3
caaaagacaactgaataaccactcaaataaacatctttctccacaaacctagcgggtctccacttatccaaaaaaagaattcactatccatcatggacattaggaaggttacctgtgccgttctcattgccgctgcctccatgagtgcagcattggctaccacagaggtctctgcacccgcccctggccctagcagcggtgcctccgccgccactgttggctccttggttggtgcctcagtcttgtccttctttgccttgttccactaaaatgtgcacggttatggggaaagaatgttgaaggaacatgcagctcaaggaagaaggctgcatatatttacttagatacacttatgtatggaataaagtgtgaacacaagagttatgtgcattgatatgta

SEQ ID NO: 3666 - DNA, 377 bp, Glycine max
  Clone ID: LIB3028-019-Q1-B1-A5
aagaaagggagcaattaaaaaaatcagaaaacaatcaagttggtttttatggaagctcttgtcgtttttatggttaccttttgactaagtgcagggttgcgtgaaatcgggactggggttttgctgtccgttggaggtgctattttcatcaatgtgtttctcagtcagagtactcgtcccgtaactctctttatccccataaaaactctcttttttttttttttttacattagtaatttgtctgttttaatatgagtgatttctcctcttttttttcaattaatctaacttttattggtttctggcgtacatagtagcatataatatatttttaacaaatggaaatagtatgttctttagattttcctttaaaaata

SEQ ID NO: 3667 - DNA, 189 bp, Glycine max
  Clone ID: LIB3028-019-Q1-B1-A7
attttgtttcttgtcacattgtcagcactgtgtatgatacaaacttcataagtaaatcgaaagcataaatggtttctgacaaccattagttactctgtgagggattgcctcagattaaagtactagtatgttggcattcacttcacccgtgaaataaagcttctgtctacaaattcctaccaaagggca

SEQ ID NO: 3668 - DNA, 393 bp, Glycine max
  Clone ID: LIB3028-019-Q1-B1-A8
aagctagccaatcctaattcctattcctatccttattactacataactctaaagtaagtaagaaaaatagagcaatttcacaacacaagacaactcttataattgtgtgagttattaattgagtatgggaaggtccccttgctgtgagaaagctcagacaaacaaaggtgcatggactaaagaagaagatgacagactcatatcttatattcgagctcacggcgaaggctgctggcgttcactccccaaagccgccggtcttctccggtgcggcaaaagctgccgtctccggtggatcaactacctccgccccgaccttaaaagaggtaactttaccgaagaagaagacgagctcatcatcaaactccacagtctcctcggtaacaagtggtc

SEQ ID NO: 3669 - DNA, 366 bp, Glycine max
  Clone ID: LIB3028-019-Q1-B1-A9
gaacgccgttgtgtcggagcttctctgccaccagacacctcggtcaaccacaggcacggccgtccagatcctgcatcaagatagcgtcaacgagacctgtggagcacattgtcctgatcaatgtgaaggaagaaacggaaccgtcacaggtgagtgacatggtgaacggacacggctctctggtgtcgctggatcaggttctccacctcagcgtgcgcccactcacacggcaaccgatgatacgccctaaccttcactcacatgctccatacccgctacattgccaatgaggatctctacacgtactcagcacagccaagccacgtcagcgtcttcatggcatacgtgctctgcatcaccgacgac

SEQ ID NO: 3670 - DNA, 390 bp, Glycine max
  Clone ID: LIB3028-019-Q1-B1-B1
gtgcgagagagacagtggaaagaaaggaaagggatgacgctgggtctgatcaatgcgaatcctgtggttcacgccaagaaagagcgaatcgctcgttctgatgatcctcacgccgatgacgccgttgatcctctcgacatctatgatatccttttttttttttcagtttctcttctcccactcccaactcaactaactgttgagatccttgacttggctttgacaaatttcgtgagggatattcgggattccgaacatccttagtccctggaacagctcagtgttctctccgaggaatctatctccgttgacgacaaattaggccgaattctgataacttttacgccgaccgtacagcactgtagcatggccacggttattggactttgt

SEQ ID NO: 3671 - DNA, 320 bp, Glycine max
  unsure (1)..(320): unsure at all n locations
  Clone ID: LIB3028-019-Q1-B1-B11
gagcgttttaacagaagtaaggctgaacatgagaagcgggaaggcgaggaggagggtgctggtggaggaaatgaacctggaggcagggatggtgaacaggaaaaggttggggagaaaaacacggttcgcatatttgtgcatagcggaaccgtggccgaaggtgtcgggggtggcgaaggtggacctggagagtggggaagtgaagaggcacgagtacggagagagaaggttcggtggagagccattcttcttgccaacacgtggagggaatgggaatgaggatgaanggtacgtgatggcttttgtgcatgacgagatga

SEQ ID NO: 3672 - DNA, 370 bp, Glycine max
  Clone ID: LIB3028-019-Q1-B1-B12
gcacatttgaacatacgtaatgatgagaaagagagacagaaagagaaagagaaagataatcgttaatctgaatgggttacatccaccatggaagaaccggtctcaggtacatacacagattcagatccgataccggtgtagactcaaactctggcagatcgcattcgcgcgctgcattcgcctcccattccactatccacggcaacatgctttttttctcaaaaagcgagttctatctcaaccaaattatcgtacaggtggtacgcgacatgcgcagggagcaaaacgagcgtttgcgcctctgtctcgacaccgccaacatctacaaggagtcggtgcaggactacattggcgttgggtccctcatcgc

SEQ ID NO: 3673 - DNA, 399 bp, Glycine max
  Clone ID: LIB3028-019-Q1-B1-B2
caatcctcagtttctttcttcaacgtttccatcatacacagatcccaatcctctctcaagccctaatttcccctcatttccatggccacagaagagcccactgtcgcggtggaacccgctcccgaacctgcctccgccgatcctcccccggaggagaaggaggagaccaaacctgaagccaaggctaagaaaaccaaggagcccaaacctaaaaaggtttccagacctcgcaaccctcccactcatccttcctacgaagagatggttaaagatgcaattacctcgctgaaggagaaaaccggttcgagccaatacgcgattgcgaagttcatcgaggagaagcacaagcagcttccaccgaacttcaagaagcttcttctctaccatttgaagaagctc

SEQ ID NO: 3674 - DNA, 394 bp, Glycine max
  Clone ID: LIB3028-019-Q1-B1-B3
agcaaatattgcctattcggcaatatggcggaaaatggttcaattgagctgaacaagtttgtgttgttttgtttgttgttgctaatacaagtggcagtttctgaaatcatttttgaagagcgatttgatgatggatggcgaagtaggtgggtgaaatcagactggaaaagcagtgagggcaaagcaggttcattcaagcacacagctggaaaatgggctggtgatccagatgacaaaggtattcaaacatccagtgatgccaaacactttgccatctctgcaaaaataccagaattcacaaacaagaacagaacattggtccttcagtattctgtaaaatttgagcaagagattgaatgtggtggagggtacatcaagcttctctctggatttg

SEQ ID NO: 3675 - DNA, 397 bp, Glycine max
  Clone ID: LIB3028-019-Q1-B1-B4
atttttcctctgcgcctttgcatttcagcagcacaccacaatggccaccaatgcattcactggcacatctctctccatgcgatctgtcattcctcaaacacaggcatttgcctcaatttctggcccgacatctgcttcaatttccagctttgggagaaagaatgtttcttttagcttgcagccacgcttaattcgccttaaaatttcctgtgctgccgctaaaccagagacagtagagaaggtgtgcaaaatagtaaagaagcagctggctatgcctgaaactgatgtggtgactggggagtcaaaatttgcaactcttggtgctgattcccttgacacggttgagatcgtgatggcacttgaggaagcatttggtattgccattgaagaggacagt

SEQ ID NO: 3676 - DNA, 392 bp, Glycine max
  Clone ID: LIB3028-019-Q1-B1-B5
cagtgttgcctcaaagaacaatgatgtgcaattggcagattttattgaaagcgagtttttgggtgaacaggtggaagccataaaaaaaatctctgaatacgttgctcaactcagaagagttggcaaaggacatggtgtgtggcactttgatcagatgctactccatgaggaaggagttgctgcttgattaacattttttttctacctctcgttcgtgcatctagttagttattcggattagtattttcaggtcttttaatgctagagatgaacaaagtggatatggagtaatattggtcatttgtatgtcgtgttttttttagtaatattggagtaatatggaatttgcgtattggactaatatggaattgacgtattgttggagtaatatg

SEQ ID NO: 3677 - DNA, 266 bp, Glycine max
  Clone ID: LIB3028-019-Q1-B1-B6
ggagttgtccactaagagcatggctgtacaagctcttgtatcatcagcatctctgaccttcgcagccgaggttacaagacaaagtcttggctcaacatcactcgaatctcccattggcgtctcaagatgagccacctttcgtgtcatcgcagctgggccacgccatgtcaaacaaggatcagctagacccttgtggtttgcctcaatctcgagtctgtctcacgtgcatgggagccttccgggtgcctacggctttgagcctccgg

SEQ ID NO: 3678 - DNA, 241 bp, Glycine max
  Clone ID: LIB3028-019-Q1-B1-B7
gctagcaaaaggacacatcgcacatgctctgttttgatgcatacatttccatttctctatttaacacttgttaccaaattctcgctacatccgccttcttttttctctctccatccaacatcgaaacgaggtcgttttgtgttccgccgaaggcaccggaggttgtagcaggctagcagcgatggctttggcatccaatctcggtggcaagattgacaccgccgaagttctctctgccgtt

SEQ ID NO: 3679 - DNA, 394 bp, Glycine max
  Clone ID: LIB3028-019-Q1-B1-B8
agagcatcactgaactaacaaagcaaccctatgtcgaaggtggtttgtgtcaccggagccagcggcgccatcggatcatgggtggtcctactcctcctccagcgtggttacaccgtccatgccaccgtccaagatatcaaggatgaaaatgagacgaaacatttggaggaaatggaaggagcaaagagtcatctccatttttttgaaatggatcttcttgacatcgactccattgccgctgccataaagggttgttccggcgtaatccaccttgcatgtcctaacatcattggtcaagtcgaagatcccgagaaacagatattggaaccggcgataaaaggaacggttaatgtgttgaaggcggcgaaggaagcacgggtggagcgcgtggtgg

SEQ ID NO: 3680 - DNA, 381 bp, Glycine max
  Clone ID: LIB3028-019-Q1-B1-B9
agaaaatggaaagtggggttgtggctgtgaacaacaacatcaacaactatgaatccaaggcaacttccaccatcaccattaagggcattctcagccttctaatggaaagcattgatgatgagaattgtgatggtggtggaagcaagaagagagttatttctcttggtatgggtgacccaactctcaccacattgttccacacaccaaaggttgttgaagaggctgtcgctgatgctcttcaatctcgcaagtttcatggctatgctcccactgctggacttctccaggctagaattgcaattgctgaatatctatctcgtgaccttccttatcaattatcacgagatgatgtcttcatcacttgtggatgcacacaagcca

SEQ ID NO: 3681 - DNA, 386 bp, Glycine max
  Clone ID: LIB3028-019-Q1-B1-C1
gggttttagcgcagcttcttctagatttaaggaagatgggtaaggaaaaggttcacatcagtattgtggtcattggccatgtcgactctgggaaatccactaccactggtcacctgatttacaagcttggaggcattgacaagcgtgttattgagaggtttgagaaggaagctgctgagatgaacaagaggtcgttcaagtatgcctgggtgctggacaaacttaaggctgagcgtgaaagaggaatcaccattgatattgctttgtgggagtttggaacaacacagtattattgcacagttattgatgcgcctggacatagggatttcattacgaatatgattactgggacatctcaagctgactgtgctgttcttatcattgat

SEQ ID NO: 3682 - DNA, 322 bp, Glycine max
  Clone ID: LIB3028-019-Q1-B1-C10
taagaagtcaaatatgcaaagattttccttcacctggacttggctcaagatattgagttgggtttgcttgatcatttctattatctcacttgtgggttccatccaaggcctttcggttagtatcaagaaatacaagcccttccaagcagaacaatagaactttcatacttagtattccaacttgagccaagagtttctattgagggcgacaaaatttgtattactatgttttgaaatagttgttatattttcaattctcgaaatcgagacaacttgttatactaaagtaatataataaaatgtttactttgctatgttaaaa

SEQ ID NO: 3683 - DNA, 378 bp, Glycine max
  Clone ID: LIB3028-019-Q1-B1-C12
agcaagcacagcaacaacaacagtgatgaaggagccaagagcttctcttcttcatctgattgtgacaatgacggtgaattggttccggaaataaaccagaaccaccaccactccaccactggtaagccgccaataatccacaacacccggcacaaggggttggttcaagtgagaaccagtctccaacaacaattgggggtgcacaggaaagggtgaaatttaaaagggcacacaaagaaactgcaaagataaaagagtcaaaggagaaagcaagagcaagagcaagggaaaggactacgtacaagattattatgtgcaatgttaacaccaacaacaacaacacaggaaggaaggtgcaacaacaagacttgaagaaaa

SEQ ID NO: 3684 - DNA, 396 bp, Glycine max
  Clone ID: LIB3028-019-Q1-B1-C2
gtaatgcagcaaagagggaaaggtaacaaccgtagatccaggagtttctcaaggtcccgtctcgctgttgaaggcacttagccacacacacacacccaccgctttcagctatggatgagcgtcacattcagaaatcttactggcttcagcattccgccgatctctccgtcgaggcaatgatgctcgattccaaagccgctcatctcgacaaagaagagagacccgaggtgctttccctattacctccattcgaaggcaagtccgttattgagcttggtgctggtattggtcgatttactggtgaattggctctgaaagctggtcaattgcttgctgtggacttcattgacactgctatcaagaagaatgaaaccatcaatggacaccacaaccatg

SEQ ID NO: 3685 - DNA, 300 bp, Glycine max
  Clone ID: LIB3028-019-Q1-B1-C4
aagggcaagctggtggacaaggttgtgggtgccaagaaagaggagctgcatttgacaatagccaaacatgccgcaattgctgctgcgtgaagtgccagatgaatatgtttagactaatagacgattgtcttcgagtcagtttgcgtttaatactagtaatctgttattgggtctgtgtgcatgatttcagaacggatttagagttagtacaacatggatgggttatgtgtaaatgacattgttgcactatcgtgattgaaacatttctgctgatgaaattatccaaaagattagccgggt

SEQ ID NO: 3686 - DNA, 302 bp, Glycine max
  Clone ID: LIB3028-019-Q1-B1-C5
gttgaaaagagaaaagaaagagaatgggttctgctctgtggacctgtctgagtttgttaacacttgcgtctgcatccttcgccgccaaaccaataacatgaattaaggtaccaattgccagaaacaagatgccgacctgtgcctttgattacatcaggaaccggaatggtggtacggaaatgcagcgtcagctggacacatagccacgtactggcatccagtcatcacggtcctacctagtaggtcagctcagcatgtacatacaataggtagctggagaatcagctggcacagtcatcgcc

SEQ ID NO: 3687 - DNA, 251 bp, Glycine max
  Clone ID: LIB3028-019-Q1-B1-C6
gtacactcaaaacagaaagcagaaagcatagctcatccttgagttaacagatggcatcagcttcttccatggccctcccatccccatccttggctggcaaagccgtgatgctgggcccatcagccccagaagtgcgaagggtgagcatgaggaagaccgtcacggaacaggtctccgcaggaagcgcatcgtatggactagatcgagtcacgtacctgggcccaatctctggccagcctacgtccgtacct

SEQ ID NO: 3688 - DNA, 394 bp, Glycine max
  Clone ID: LIB3028-019-Q1-B1-C8
tgccatttcaatccccagtttcttcttcaacgtcctcttacgagcagatcccaattctccttcccagtttcaaaccctaattccctcattcccatggcctcagaagagcccactgtcgcggtggaacccgctcccgaacctgccaccgccgagcctcccccggaggagaaggaggagcccaaacctgaagccaaggctaagaaaaccaaggaacccaaacctaaaaaggtttccagacgacgcaaccctcccactcatccttcctacgaggagatgattaaagacgcaattacctcgctgaaggagaaaaccggttcgagccaacacgcgattgcgaagttcatcgaggagaagcacaagcagcttcgaccgaacttcaggaagcttcttctct

SEQ ID NO: 3689 - DNA, 372 bp, Glycine max
  Clone ID: LIB3028-019-Q1-B1-C9
ggcttctttgaagtgagttgatcatttcatcagagcgaggcttccatgttcaccacagccatgccagaatccaatgattccgtttccgttgacatggagaagatctacctcggtggaaaggagcatcatattcgaactggctgtggtactgtgtctgtcatagtctatggcgatcctgacaagccagctctgatcacttatccagatttggctctaaactatatgtcatgcttccaaagactatttttctgtccagaagcagcttctttactgcttcacaacttttgcagatatcatatcagtcctcctggacatgagagttcttgcagttgggagcagctgcaatttgtgtcaaagaatctgttccttctg

SEQ ID NO: 3690 - DNA, 385 bp, Glycine max
  Clone ID: LIB3028-019-Q1-B1-D1
ggtaaagattcatgggaatacgcccagaattgcgagtcagccaatgacggttcatgcgccaggaatccaagcaacctttatttcagcggaaacagcaacttggctgtacagactatcagatcagtgaatcccaaaggcgttcacatattcgttacaaaatgtataaacgtcaggttgagaaaacttaagctggttgcaccgggaaccagccccaatactgatggcattcatgtcagccactctgacactgtgataatgtccagaaataccattgcaactggggatgactgtgtctctctgataccaggactcagaaacattttcatcaacaaactcacgtgtggccctggagatggtatcagtatccgtagccttgggaagtatg

SEQ ID NO: 3691 - DNA, 365 bp, Glycine max
  Clone ID: LIB3028-019-Q1-B1-D11
aaagagcacaagagttagcaaaagagaaagccgatcttgcaattcaaagtctccaatgcctacctcagagtgtatttcgtttagcccttgaagatatggtggcatataaccttcaacggattgcataagcttgtgcatgctgatgacacattgttaaagaaaaaacacaaaaagattcttttggtcctaatatagggatgagagagccttgaactttttgtcatttcaagaatttcaagcaaatctacacttgtgctacttttggggtacttttatagtcattgaagggcaaagcaagcgcgcattctcatcatttaatatatttgcagcttcctgcaaagtacaagaacataatatattccatt

SEQ ID NO: 3692 - DNA, 360 bp, Glycine max
  Clone ID: LIB3028-019-Q1-B1-D12
acctcttcctccactccctaagttgccaccacttcatccagttccaatctacaagaagccacttccacctcttcctccactccctaagtttccaccacttcatccagttccaatctacaagaagccacttccacctcttcctccactccctaagtttccaccacttcatccagttccaatctagaagaagccacttccacctcttcctccactccctaagttgcctccactcaagccacttccacctcttcccaaacttcctcgaaagcactttttccatcaccccaaatggttcccagtacgaccttcttcctctcatccttaggctttatatattaatattgcagaagtagatgatta

SEQ ID NO: 3693 - DNA, 398 bp, Glycine max
  Clone ID: LIB3028-019-Q1-B1-D2
cactaaccaacttcgttctttgttccgttctactttcacttcccaacaacaacaagaagatgccttctgcagaagcttcctctgaaaccatttgtgtcaccggcgctggtggcttcatcgcctcttggatggtcaaactcctcttggaaaaaggctacactgtccgaggaaccctcagaaatccagatgatcccaagaacgggcacttgaacgagtttgaaggaacctccgagaggttaactctgcataaggttgacctccttcatcttgactccgttagatcagttattaacggttgccatggtgtctttcacactgcttctcccgtcaccgataaccccgaagaaatggtggagccagcggtgagtggagctaagaatgtgatcatagctgctgca

SEQ ID NO: 3694 - DNA, 387 bp, Glycine max
  Clone ID: LIB3028-019-Q1-B1-D5
gacgccaacacctggcatgccagtaagtcatatatggactcagaaatcatctcttgcagctgatcatgcagctgctggaaattttgagactgcactgaggttgctgaaccggcaacttgggataacaaattttgcccccctgaaaaccatgtgtctggatcttcatactggcagtcattcctaactccgggcattttcttctgctccgatcatatcacttgcagttgaaagaggttggactgagtcatctagtgcaaatgtgagaggcgcaccggcacttcctttcaaattgtctcaattggatgaaaagcgtaaagctggttataagtgtactactgctgggaaattcactgaggctcttaagacatttgttactactcttcatac

SEQ ID NO: 3695 - DNA, 347 bp, Glycine max
  Clone ID: LIB3028-019-Q1-B1-D6
gaccccaacacctggcatgccagtaagtcatatatggactcagaaatcatctcttgcggctgatcatgcaactgctggaaattttgatactgcaatgaggttgcggaagcggtaccttgggataacaacttttgcccccctgaaaaccatgtttctggatcttcatactggcagtcattcctaactccgggcattttcttctgctccgatcagatcacttgcagttgaaagaggttggactgagtcatctagtgcacatctgagacgggcaatggtacttccattcaaattgtctcaattggacaaaaaccgtaaagctgggtagaagtttagtactgctgggaaat

SEQ ID NO: 3696 - DNA, 177 bp, Glycine max
  Clone ID: LIB3028-019-Q1-B1-D8
ggcacatgtaacttgtctacttagccttgtgtgtgttttgctcatgtctcagactattttgcgaagatgcgttggcgttttctttttcaaaagccacatacatacttgatttgcgagggatagaatattacatggttgacaatctaggcaaagactggccaccgaggtctatttttg

SEQ ID NO: 3697 - DNA, 378 bp, Glycine max
  Clone ID: LIB3028-019-Q1-B1-D9
aacagtcataacttgcatacgaatctgcaacatatattcatggcagctcttggggaccaatcagaagaacaggccatggctgcccaacctaaacctcagaaccgacccatttctaacatcgtcatcgtccttggtagcttatgattgtgacggtttcgacaacgggttccttgggtccgttatcacgggacatacatagatcttaatataagcttggtttggccgggaaaagatacaactttgggggttgatatttgtaagcacaatatcatctgctcttgtagcgtatgctgctattcatgcactataaccagacttgagtttcagtgcaggcactgctagtggcttcattgccatctgagctaatattggtaatgt

SEQ ID NO: 3698 - DNA, 397 bp, Glycine max
  Clone ID: LIB3028-019-Q1-B1-E1
ttttcaaatggttattgcttgcagagaaagacttcaaaactactgcttttgaaagttctcaatcacatagtgggtcctattatggtgccgataattccaattataatagtaattattatcaggagccagtaaccactcaagtgcagcatggtgtttctggaattcaatatcctgatagctatcaacagccatttgatcctagatatggaagaggctatggtgctcctactccaccccagcaacctcaacagcctaatttgtttgttccaccacagactactcaggttgtgcaaactccccagccgactttctcaaatactgctgttgcaccaccacctttgagaacttttgatcctcaaactcctcccatgcttagaaatgtggagcactatcagca

SEQ ID NO: 3699 - DNA, 377 bp, Glycine max
  Clone ID: LIB3028-019-Q1-B1-E10
ggtagctagtactgctccctctgcgacttcgtttcgtatagggattttggccgccaaataaacagtctcaccataaactccaaagtcccaacgctaaacgaaaccaaaccccaaacacaaataccgttgttgtctgttgtctctgtcgtgtctatattcgcagatctctcactcattctctgttgtttctctgcccaacttcgaattcgaaagcataaacatgtttttggcgagacgcattttccgagcaccctccctttgggcgttgcactcttcctacgcgtattcgtctgcctcagcagctgcaagtcaagccgagagaagcatcatcgaaggacccagaatcgatttggtccggcaccaagtcaaatccatct

SEQ ID NO: 3700 - DNA, 377 bp, Glycine max
  Clone ID: LIB3028-019-Q1-B1-E11
ttaaactcatatactaataataaagtcttattgcatattttatatataaaaatatgcaataagactttattattagtatatgagtttaatcatcaagtactaacaataaagtcttattgcatatttttatatataaaatattttactctatgaaagaaattaaagtatgaataatggagacatgctccctatgacttaatgagttatttttggattgggcttgttttgcaggaggaaggttacccatgacatggtacccacaagggtatttggctaaagtgccgatgacaaacatggacatgcgtccaaacccagcaacaggatacccaggaagaacctacagattctacaaaggaccagtggtgttcccatttgga

SEQ ID NO: 3701 - DNA, 65 bp, Glycine max
  Clone ID: LIB3028-019-Q1-B1-E2
ccggctaggtttcacattgttactacatgccaactcatacctctctacttatccattagtctggt

SEQ ID NO: 3702 - DNA, 266 bp, Glycine max
  Clone ID: LIB3028-019-Q1-B1-E3
tagaaatagaaatactgaaatactagagctgaaacaagcttagccctaatccgatcgaattgagatttcaatttgtcaacagaaaaacctaatgtctcatcgagactctgattccaagcgtcgccactccaagttcgatcgagaaccaagtcccaagagatatagaagggatggtaaacaagacagagaaagggacaggaacagagtaacctcagatggaggagatcagagaaacccagcagatcattttacgcgtgaacccgtcg

SEQ ID NO: 3703 - DNA, 386 bp, Glycine max
  Clone ID: LIB3028-019-Q1-B1-E4
cttcttcttcccccagaccggaggagagaaaaccaaaatcactcttcactgttagggttagggtttcgattttccccttatccaatctcgcagcagcgagatgggcgccaattcgttgccatcggcggaatcaaacttcgatctcgacgagcagatctcgcagctcatgcaatgcaagccactttccgagcaccaggttagagttttatgtgagaaggctaaggagattttgatggaagaaagtaatgtccagcctgtgaaaagccctgtgacaatttgtggtgatattcatgggcagtttcatgaccttgctgaactatttcgaattggagggaactgtccagatacgaattacttgtttatgggtgattatgtggaccggggtt

SEQ ID NO: 3704 - DNA, 393 bp, Glycine max
  Clone ID: LIB3028-019-Q1-B1-E5
atgctacagatgctgctagaagcgcttctgatattgtcctcactgaacctggtctgagtgtcattattagtgcagtgctcaccagcagggcaattttccagaggatgaagaactatactatctatgctgtgtcaatcaccattcgtattgtgtttggtttcttgtttattgcgttgatctggaagtttgattttgcacccttcatggttttgattattgccatactcaatgatggtaccattatgactatatccaaggatagagtgaaaccatcagcacttcctgatagctggaaactgagggagatatttgctactggcgttgtgctaggaagttacatggcactaatgacagtagtagttttctgggcaatgaaggataccaacttcttcg

SEQ ID NO: 3705 - DNA, 369 bp, Glycine max
  Clone ID: LIB3028-017-Q1-B1-E4
gtggaagggaagaatatgcaggattgtgtaagagttgtcaaatctgtttcaatactgttatagtcgttttctttgaataagagacacatcaaaggatgcttcactatcattatggcaattgaaacattatttttaaagttttacatataatcacaaggttgaggcctaacaaggagcagcagaagtcagcagcaagcttctttggctatagaacatagctactatccccagtatatagtgaagagattcattaactttcctgacctggatatacattgtattctattttatcggctggatattcattgtattgtcgcaaccaatactaaagcattctgtttcactgcttcatttttcatgatgaagtgt

SEQ ID NO: 3706 - DNA, 371 bp, Glycine max
  Clone ID: LIB3028-015-Q1-B1-D7
gcatttcggactctaatacgactgttcagcccatatgctccgggttggggaacgaaccaggcatcttgatggtgcccatgtcgaatttctaagatgagttgctaatcccttgggaattaatgtaagtgacaagatggatccaaatgagcttgttagacgcattgagatcttgaatccccataacataccatggataataactgtgattacgaagatgggagctgaaaatatgacggtgaagcttccacatctcatcagggcagtgcgcatagcagggcaaattgtcacctgagtcagtgatcctatgcatggaaacagcattaaggctccatgtggtctgaaaactcgccccttcgatttcatcaggtctg

SEQ ID NO: 3707 - DNA, 407 bp, Glycine max
  Clone ID: LIB3028-015-Q1-B1-E1
cactcgagctcgaggcttactcagatggatgaaactgaattggacaagagaaagcaacacggcacatatacatgatgatttagggggcactcacactttttctgctatgaagggagatgtggcttgccaacgaattttgagtctacttactgctaagcattgggttatggtgctgcagtcctccttcaaagtgggaagactggattaatatcatcggttggtaatttatgtgctcctgttgaagaatggactgttggcggaactgcactcacgtcattgatggacgtggagaggagacatggtaaattcaagcctgtgatcaagcaggcaatggtggagcttgaaggggcacccttcaaaaagtttgcctccttgagggatgattgggcccctaaaaattgctacat

SEQ ID NO: 3708 - DNA, 386 bp, Glycine max
  Clone ID: LIB3028-015-Q1-B1-E10
ggcagtggtgattccacagttcgattgtggaatattgactctggagcacttctagagagaagaaggccttgagggcattcctgagcctgaatgaaggcaaggccggctcgagattgtttgttgttgtaactcgttcttcttcttttgttgttttgtgtttgtgtttgttttttctctcacctgaaaatgtcttgctgcggtggtaactgtggttgcggaagctcctgcaagtgcggcaacggctgcggaggctgcaagatgtacccagacttgagctacactgagtcaaccaccaccgagaccttggtcatgggagtggcacctgttaaggctcaatttgagggtgctgaaatgggtgtgcccgctgagaacgatggctgcaaatg

SEQ ID NO: 3709 - DNA, 392 bp, Glycine max
  Clone ID: LIB3028-015-Q1-B1-E11
ggattcatgaatgggatgtatccaagcaacaggatgtacagccaatatggaaacacatttaggcctgattctcgttttggatctgctgggtatggatctagaatgggttctttcgatagcaaatttaatggcacagggtatggctgcggtttaaaaaaaagcatggatggtttcagcgagctaaataagggacccagagctgccaagagttctgataataaaaatatcaaaagtcttggacctgtcacattattactcaaaggacagaaccttccagtgaagagtgataacaaagaagttcctccagttcctgacaaggaacagtacaatgggaaagattttgctgagaattattctgatgcaaagttttttgtcatcaaatcctatagtga

SEQ ID NO: 3710 - DNA, 390 bp, Glycine max
  Clone ID: LIB3028-015-Q1-B1-E12
ggattcatgaatgggatgtatccaagcaacaggatgtacagccaatatggaaacacatttaggcctgattctcgttttggatctgctgggtatggatctagaatgggttctttcgatagcaaatttaatggcacagggtatggctgcggtttaaaaaaaagcatggatggtttcagcgagctaaataagggacccagagctgccaagagttctgataataaaaatatcaaaagtcttggacctgtcacattattactcaaaggacagaaccttccagtgaagagtgataacaaagaagttcctccagttcctgacaaggaacagtacaatgggaaagattttgctgagaagtagtccgatgccaagtttttttgtaacaaaaccgaaagt

SEQ ID NO: 3711 - DNA, 376 bp, Glycine max
  unsure (1)..(376): unsure at all n locations
  Clone ID: LIB3028-015-Q1-B1-E2
gagagtgcagcggagcagaaagaagcaaagggggaagaaaggtggtgtgtgttgtcgcaatggacatcactgccttcaaatccctcaacattccatttccaacctttccatcaaaattttctccttttcgtccattcagtttctttcacttcaaaccttttcgcactccttcctcacctcgcttcatctcccattgctctctcaatgggtcagcagagataacaagcaaggaaggtactttgcctcgtggcgttggagaggcagtgaatgaagcgtcaagttccaagattcttcaggttgtgctcgtgtcncctcagattccaggaaacactgggtgcattgctagaacttgcgcagcatcagctgttggattaca

SEQ ID NO: 3712 - DNA, 308 bp, Glycine max
  Clone ID: LIB3028-015-Q1-B1-E3
caagctttccaatcccaacaaaaaattttccctcggcaggaggcgtcacgtgcaacctcccgctgcacggaaaagcaacttgccaattgcaaacaagtttgcatggcttttgccgcaaatggtgacgatagtgaagtcagcaactaagggaacgttcaacataaaacactagaaggtgtttacaacattggtcgttgaacaaatggggttggtgcggtggccgcactgagtaagaataatcataggctttgggctaatttcataaaaggcaatctaaattggccctaggctttcaaaactattgttgt

SEQ ID NO: 3713 - DNA, 270 bp, Glycine max
  Clone ID: LIB3028-015-Q1-B1-E4
gtcgagctgagaataccagtatgctccagtagccggcacgaatcaacatggcggataaggcagtcagcatccgaaacatgaagtttatgacacacatgcgtctcgccagagagcaattcgtcgttgatgtccatcatccaaggagggcgaatgtttccaaggctgaactgaaggataagctgggaataatgtatgacgtgaaagacatcagcaccgtatgtgtcctcaagttccgaactcattttggtcgtggcaagtccactgggtttg

SEQ ID NO: 3714 - DNA, 232 bp, Glycine max
  Clone ID: LIB3028-015-Q1-B1-E5
cttggactgagcattgatgaatatgctggtgaagcaaatgctgaaatgcctcctcttgaggacgctgatgcacatgcttatggtagcatgatggaagaagttgattacatctgacttaagtgcctgtttcctgtttagaattggtgaatggagaaacagtccttttacaatgttggaagtcttttgaaatttcgaaattttggaacgtatgtgacctaggtgccgtatgtac

SEQ ID NO: 3715 - DNA, 407 bp, Glycine max
  Clone ID: LIB3028-015-Q1-B1-E6
cgttgagttcttcatcaacctccttgtcctcaacggtggcttcatcatgatcgttattaacttcctcacaggtcacctggtcgtccccgatcgtaatgcaccaaattatttgtcttgcatcggaaatttggacgcgagagtaaagttggatgccatcacgcgtgatgactgcaggtactatgtttcattagctatgatggcttcaaaggcatcctatgagaatgcagcttaccttaaatctctaataaaaaaccactggaagatggaattcgtgagattttttgattgctggaatgattttcaagaaaaggccacaacccaagtcttgattgttttggacaagcatgagaaccgcgatacttatgtggtagctttccgaggaacggaaccctttgatgcagatgcat

SEQ ID NO: 3716 - DNA, 379 bp, Glycine max
  Clone ID: LIB3028-015-Q1-B1-E7
ctttaatctctcacacaaaatcatggacaagaagcttggcaacacgtctcatgatcctgaagtgagaaaggggccatggacaatggaagatgacttaatcttgatcacctatattgccaatcacggggaaggggtttggaactctttggccaacgctgctggacttaaacgtaccggaaagagttgccggctccggtggctaaactacctccgtcctgatgttagaagagggaatattacacccgaggaacagcttttgatcatggaacttcatgcaaagtggggaaacaggtggtccaaaattgccaagcatctacccggaaggactgataatgagagttagacctactggacgacaaggatccataagcacctcaag

SEQ ID NO: 3717 - DNA, 387 bp, Glycine max
  Clone ID: LIB3028-015-Q1-B1-E9
aaattcattttaatcctaattctgcacttcttgatcattcgatttttctcctcaaggttcgtctctgtttcatctcttttcatcatcgcagcctaattagccttagtttattgatttagctttggtctttcaccatggttacatttttacgtttctatctttcgatttgtgattttttacgttaatatgtgtataccggttttgtcgttgttgaatccgaaactttccattcgactttctgattccgtatctcgtttgtcacatgcaaaatctttcccgatttttaatctggctatctgatttgatttgattttgaggaattagggttcgtggtttgatttgattctgtgattcgcttgtgatatgtaaaatattcccggttcctaa

SEQ ID NO: 3718 - DNA, 418 bp, Glycine max
  Clone ID: LIB3028-015-Q1-B1-F1
gactcagtgtccaattccgacaaattgaggctctactcgacagaacaactacccatgatttcattcgaccttcgattcctcttccgcttcaactcttcgttcctcgttcgctgtccatttcgttgcaatcttggttcttgcgttttctttttctcctgaatctgggtgcttcaatttcggtgcaaactggctatggactacgaaccctactatagtagcggaactgatgatgatcttccaccaacacatccaaatagaatccccagaggggaacgtcttgcaggaaatggaagattgccagcaggttcaattccatacccaaggatgcatggtgaaattgatatggaaactcaaattcaccaacttgagaaggaagcatacagttcaattctacgggcatttaaagctcaagctgatg

SEQ ID NO: 3719 - DNA, 254 bp, Glycine max
  Clone ID: LIB3028-015-Q1-B1-F10
caaaggcagggcaggttggtttccgtttagttacattgaacggagggagcgggttcttgcgagcaaggtgactgaagttttttaacttttaagtttttcctgttgggttggtttcttaacctgcgaattttgtatgtatgttttgattttgtaaaacagattgatttgagatatagatggcaattttcccttgtgattatcttgtagaatttataaatcatttttttgttatccatttttattttattgcactc

SEQ ID NO: 3720 - DNA, 388 bp, Glycine max
  Clone ID: LIB3028-015-Q1-B1-F11
ctcggggctggcacatttccatctctccatctaccataaatcgttccaactcgaacatgagacaaaggcatgggagtctgtatgtcattgcattgggtgatgaatttctttgttggactactgttcttgcgtttgctggataaacttggtccacagctgctttactcgatgtatgcaaccttttgcatcatggcaataatttttgtaaaaagaaatgtggtggaaaccatagggaagtcacttcatgaaatcgacatcgcacttctaccccaagagtagagcatcatatgaagctctattcattgaatgctctaattctgcatacttccagctgagcaaattgtgtctcatctaatacggatgaccttaacagtacaacgggaagctc

SEQ ID NO: 3721 - DNA, 388 bp, Glycine max
  Clone ID: LIB3028-015-Q1-B1-F12
ctcggggctggcccagttccaggtctccttctaccataaatctttcctactcgaataagagccaaaggcatgggagtctgtatgtcagtgcattgggtgatgaatttctttgttggactactgttcttgcgtttgctggagaaacttggtccacagctgctttactctatgtttgctaccttttgcatcatggcagtaatttttgtaaaaagaaatgtggtggaaaccaaagggaagtcacttcatgatatcgagatcgcacttctaccccaggactagagcatcttatgaagctctattcattgattgctctaattctgcatacttccagctgagcagattgtgtttcatctaatatggttgaccttaacagtacaacgggaagctc

SEQ ID NO: 3722 - DNA, 384 bp, Glycine max
  Clone ID: LIB3028-015-Q1-B1-F2
tttctctttctctccttcaaaatcgttgtcaatttcgcctctttctttctcaactcccttagattctctccatcgggtcttcaaaaatgcggatgagctgcaatggatgtcgagttctcagaaaaggttgcagtgaaaattgcagcatcagaccctgtttacaatggatcaaaagcccagaatctcaagccaatgctactgtgtttcttgccaagttctacggccgtgctggtctaatgaacctggttaacgcaggccccgaacatcttcgtccagcgatctttcgttcgttgttgtacgaggcatgcggtcggatattgaacccgatttacgggtctgtcgggttgttatggtccgggagctggcagctatgtcaagccgccg

SEQ ID NO: 3723 - DNA, 359 bp, Glycine max
  Clone ID: LIB3028-015-Q1-B1-F3
gatacagggacctatacagcctaaatattgctcaagacggaatggtaacgtggctgaatggcaaactctctacaaacctgctacagattcaagtcgactatcgccgaacgaagtaaaccgaggtgtttacgagggacgtgagttgaccaactcgacagacaccacgcgtcacgcattcagaactagtagtatttttcagacacgtacgtgaaaagaagaagttacttgtcgatctcatcaaacttgagaacttttatgaatctacatgcgagaaagtcatgcacgatatgcaaaatgtccgtcaagttcaatgtccaacacaaaggtacatgtcaagtctgacataggtgtcatctatc

SEQ ID NO: 3724 - DNA, 383 bp, Glycine max
  Clone ID: LIB3028-015-Q1-B1-F4
gacttccttgctcccacttacagtctcatcatcatcttcatcttccaaagtcgcagcatttcatgctatcagagcctcagcagattctgagtatgttgcctcccgacacacccttataagggaattcttgaagggtgttgctttgatgcctctgccacttgttgtgatgagagaatcaagaccttcacatgctagacaagttgatgttggctccgtccttgtaacctctcgctctgagccttcttgcgtactcttcagagtcactcccaaggacactccagcccttcgagcagttctttgcaggaaatgtgcagccatacaagtttatcatctccccgacttggaaacaggctcgtgtaacatatatattaactggaaattac

SEQ ID NO: 3725 - DNA, 156 bp, Glycine max
  Clone ID: LIB3028-015-Q1-B1-F5
gaataatggtattattccttctccatttgtttgatctatgatgcggcttttaactggaaatcactacattgtatctttatgtcattatgcatggattgtcatgctgcacgaataacatcaatattcatgttcttcttcttagatggaaccctcata

SEQ ID NO: 3726 - DNA, 402 bp, Glycine max
  Clone ID: LIB3028-015-Q1-B1-F6
ctcgagccgactctctctctctcttcttcttcttcttcttcttgcacgtattgttctaatccacaaaaataatggccttaaattacaacattgccctcgccttctctacggttctcacgctgcttctccttcccttaccaacccttggggagctcgtgcaggagcagccactagtcctcaagtaccacaacggccaactcctgaaggggcgcatcaccgtcaatctcatctggtacggcaccttcaccccgatccaacggtccataatcgtggacttcataaactcactaagcagcgcgccaaacgcgccgcttccatcgactgccacgtggtggaaaaccacggagaagtacaaggggggaggatcctctgcgctcgtcgtagggaagcagttcctacact

SEQ ID NO: 3727 - DNA, 399 bp, Glycine max
  Clone ID: LIB3028-015-Q1-B1-F7
ggctttcaagctgatgtcaaagctttgcagaaggttttgtctgctacgcatttgacttatcaacatcaacacaacaagcaaatgagttgccctgcgatggctcagttgctctcaaacactctttatctacaaacggttctttccttagtatgctttcaatgttttgggtggccttgacaatgatggaaagggatgtgtcttcagatatgatgctgttggttcttacgagacggttggatatagctctcagggttctggatccacacattagtatgccatttcttgataaccagctgaagtctcctagcgcagtcttgttacatgcccaggatgctgttactccattgtctgaagcagaagcaatggatctggtcaaaactgtttttgcatcagcaactg

SEQ ID NO: 3728 - DNA, 412 bp, Glycine max
  Clone ID: LIB3028-015-Q1-B1-F8
attgaattctccagagagaagaagaaacttaatcgatcatcacttcacttcactaatacatcatggcagacgagacccagaacaagtatgagagctctgaggttgaggtccaggatcgtggtgtttttgactttctcggtaagaaaaaggatgaagaagacaagcctcatcctcaggaggaggtcatcgccaccgagtttcaaaaagtcactgtctcagaccaaggagagaacaagcacagcctcttagaaaagcttcaccgatctgacagcagctctagctcttcaagtgaggaggaaggagaagatggagagaaaaggaagaagaagaagaaggaaaagaaagggctgaaagagaagatcgaggagaaaatagagggtgatcatcatcatcacaaggatgaagacacaag

SEQ ID NO: 3729 - DNA, 412 bp, Glycine max
  Clone ID: LIB3028-015-Q1-B1-G1
gcactgtggcagaagtcttaggagtgtaaaacagagacgcaaaatgaagacgattctatcgtccgagaccatgaatattcccgacggcgtgagcatcaaggttcacgctaaggttatcgaggttgagggccctcgtggaaaactcgtgcgagacttccaccatctgaacttggacttccaacttattaccgacgatggcggtaaaaggaagctcaagattgattcttggtttggttctcgtaaaacctccgccgccatccgcaccgccctcagccacgttgagaatttgatcaccggcgtcaccaagggataccgatacaaaatgagattcgtgtacgctcattttccgattaacgctagcattggcaacaacagcaagtccatcgagatcagaaatttcctcggcgagaag

SEQ ID NO: 3730 - DNA, 393 bp, Glycine max
  Clone ID: LIB3028-015-Q1-B1-G10
attggaaggaacaccaaaataaggaactgcataattgacaagaatgcaaagatcgggaaagatgtcatcatcatgaacaaagatggcgttcaagaagcagatagaccagaagatggattttacattcgatcaggaatcacagtcatattggcgaaggcaacaagagaagatggcactgtcatataaaggggtgaaagtacttatttcatggactggtgaggtggccagcagtagctcgaagaagcattccaaggaactttggggacagaaggttacaattgaaaaatcagcacccccttttgctatatatgcaaaatagaaggctctcccactgcatataaaaatatagaatgaatagtgtatgaaatcaaaatgcataaacgtaaataaaat

SEQ ID NO: 3731 - DNA, 375 bp, Glycine max
  Clone ID: LIB3028-015-Q1-B1-G11
cgtcgatgtacacgtggagacgcaaagcttgtctgagccattcaaagtcatcatggagcaaagtacaagatctcattgaagacacagactgtaaggacaaatactacaccttatccgatagagctgagtccatattgctttgcctgaagcaaagatgtcctgaactttcacagacttctttggacacatgcaagatctaatacaatcgggatgtggggaaggcagtactagagagttattcaagagttttgggaggcctagcattcaacatggttgcatggattgaagatgttctttatgtagataaatcaatgatgaaccgagatgtctagacacctcaacttggtaatcgcatcctaacagtgttgctttcca

SEQ ID NO: 3732 - DNA, 336 bp, Glycine max
  unsure (1)..(336): unsure at all n locations
  Clone ID: LIB3028-015-Q1-B1-G12
ctcttctctatcgctttctcttcttccttcttacttaattctatcaccaacatagccacagacacagacatacgcactacttatttctcttcttaggccttattatcatcatataccacatcatcaaagcacttgccatcatagagtaccatgttagccaataacttatctccatcgtcagttcccacttctgagccttttccctgcactgaaaatggcactgccaccattaagaggaagagaaggcccgcaagaacaccagatccggatgcagaagtggtgtcnctctcgccgaaaacgttgctggaatcggatcgttatgtgtgtgagatctgc

SEQ ID NO: 3733 - DNA, 386 bp, Glycine max
  Clone ID: LIB3028-015-Q1-B1-G2
tttgagagtaaaaaggactacaagtctgctctaaaggcatttgaagaagtcctactatttgatcctaacaacaaggttgcccggcctaggagagattctttgaagggacttgttgatgcaaccaaaggagttactgtcatcaagtcaacagagaagaagtgagtgtcattgtatcaactcactatgaatatggcattgttaaatacatagttttcaataacttggttgtgttggaaggaattttggctctattggtgtagttactgcttactagctgaggcatactagtgctgcgaaatgtagttgaaattgaaacttgaaagtgctcgattctccaatgggttaccaaagctttgctctggtgctgatggtgtattcacttgtga

SEQ ID NO: 3734 - DNA, 251 bp, Glycine max
  Clone ID: LIB3028-015-Q1-B1-G3
gatcatgggtcgtccacccagtactgggggcccagcccttcgcttcaaccagccagaggtatcagaagtggcagctattcgtcacgagcataggaacgctatgccgtcacgtgatgttcttaaaggtcttgcagagaaattcagtgaagcacaagatcgtaaaggcaggatttcagtgcaaatgaagcaagtttggcactggtttcacaataagcgatatgcgagacgagcacaatcaagtaagactcctg

SEQ ID NO: 3735 - DNA, 402 bp, Glycine max
  Clone ID: LIB3028-015-Q1-B1-G5
ctctgcgtcaaaagcgtgcaggttttttgtgttcttatttgttagtccttcctgagagctgaatttcccggcaaacacaaacaggtttttgtggtgttgaagatgttcaagaacacattccaatctggatttctttccattttatacagccttgggagtaaacctttgcagatatgggacaaagaagttgttgatggccacattaaacgactacaggatgaagacatacagtccaatgtactagaaataattggatcaaatattcagtccacatacattacttgcccagctgacccagcgacaacgcttggtataaagcttccattcttggttattattgtcaagaatctaaagaagtatttcacatttgagattcaagttttggatgataagaatgtcaga

SEQ ID NO: 3736 - DNA, 127 bp, Glycine max
  Clone ID: LIB3028-015-Q1-B1-G6
gggcgaactaagaagcctttgtggattatgtcggagcacatgcattgtgttaaagtgacagtgctgaagcattttatttctcagctggcttttctttccctaaacaaataccctgttattctagcag

SEQ ID NO: 3737 - DNA, 410 bp, Glycine max
  Clone ID: LIB3028-015-Q1-B1-G7
caattataagcatgggtttgtggaacacaacgaatgcagtgtcatgccgctttcacaagtttggtgatgaccaaaagaatctggtcgtccaaggtgatgccacgtcttcttccaggggcatagaactcacaaagttagacggtggaggaaaaccagtgggtggcagtgtggggagagtgttatactcttctccagtgcacctttgggaaaactctacactggtcgcaagctttgaaaccgacttcaccttttccatctcatcagactctactactccaggtgatggccttgccttcttcattgcaccatttgacactaagatccctccaaactctggtgggagcaaccttggactcttaccatcagacaatgttgttgctgtcgagtttgacacttaccctaatcgtgat

SEQ ID NO: 3738 - DNA, 62 bp, Glycine max
  Clone ID: LIB3028-015-Q1-B1-G8
ctactagaagcaagggtttgtggaacattagcaatgcagtttcattgtgctttcaccaattt

SEQ ID NO: 3739 - DNA, 386 bp, Glycine max
  Clone ID: LIB3028-015-Q1-B1-G9
ccgtaatctccaaaccccacttcgtcagatactaaaaagaaaccaacagtttccatacttagtatttcttctctgactgactgatcaggttgacatcttgacattgcaatcctgccttttggttccccatttccatgtttgtggattcttcctgattcaaaggcaatatattgtgtcttcatagctcagtttttgagcctcatcagttgcaacttgcaacacaaactttatctataacttggtatctctaaaggactctcagcattgatcaaaatgggcctctctagtctcccagcaccatctgaaggagtattatgtgtccttctggtgaacactgtattgtcaatttccatattcaaaggcattgtaaggacaatcctgcacat

SEQ ID NO: 3740 - DNA, 385 bp, Glycine max
  Clone ID: LIB3028-015-Q1-B1-H1
cttggtttgatccagaaaggcttatttttctttgttctgaggaaaaaaattctgcttttcaatttctgggttttcaagcttcgtgtagaaggaaatggcacaacgttctcatgtacccaaatttggcaattgggatagtggagagaatgttccttatacagcatattttgacaaggcacggaaaggtcgaactggcacaaggataataaatccaaatgaccccgaggaaaatgctgatttaagttttgataatccatcatctgataacctacctcctaccagacctagaactaattcagaggatcaatccggaaaaggatcactgcatttggaagatgatcccaagaattttatcgaatctccagctcgtcatgacaatgtaagc

SEQ ID NO: 3741 - DNA, 375 bp, Glycine max
  Clone ID: LIB3028-015-Q1-B1-H10
gaagaaagaaagaaagccatgcaagcatgttcctcctcagacgctccactctccaagaggttagatggcaaagtagcactcataaccggcggagccagtggcatcggtgaagccaccgccaagcttttccttcgccacggtgccaaggtcgtcatcgccgacatccaagataacctcggacactccctatgccaaagtctcaattcctccgacaaaaacaacaacgacgacatttcctatgttcactgcgacgtcaccaacgacaaagacgtcgaaaccgccgtcaacgctgccgtctcgcgacacggcaagctcgacatcctcttcagcaacgccggcatcacgggccgttccgactgttctaactccatcacg

SEQ ID NO: 3742 - DNA, 388 bp, Glycine max
  Clone ID: LIB3028-015-Q1-B1-H11
ctctgatccaaacgaagtaacgaaccaaccaatcaccctgtctttctgacccaaaaacatagtcccaaatcgaacaaaatcaatcaactaactcctccaacgttgttgttattatgcagacaacaagttccaacacctccggcgccacctcgatccgttccggcatggagctcttccaccgcgcgaaggcggtgcgcctccgcagccaccacgacaagtacctcctggccgacgaggacgaggagtccgtcacgcaagaccgcaacggatcctcccgcaacgccaagtggacggtggagctcatcccggagttcgacaacatcatcagactcaagagctgttacggaaaatacttgacggcgtccaaccagccgttactgctcggcgt

SEQ ID NO: 3743 - DNA, 174 bp, Glycine max
  Clone ID: LIB3028-015-Q1-B1-H12
ctgcaatggatttctagcattcaacccttccttttctccttgcctctgtcctgacccgttcttttcttctccatgcattcccagaaagttgtagagatggaagacaagacagaaagtcatatgagttcagctgcggcctttggtgaaggggggattcaagaatcctgtgatgat

SEQ ID NO: 3744 - DNA, 324 bp, Glycine max
  Clone ID: LIB3028-015-Q1-B1-H2
ctctcggcatcaagattgtattcttatcagaaagaccactgagtctaggggatgtaacagccaagaacttaaaggaggttggattcaacacatgggagaagttaattctcaaggatccatctgagtactctggtaagttatcatttgaatacaaatcagctgagagagagaagctggagaaggagggatacagaatcattggaaacgttggagaccaatggagtgacctcctgggaagcaacaaagggactaggacttttaagctgcctaatcccttgtaccatgattaagctctcaaatcaaacctctaagttgcccctaaat

SEQ ID NO: 3745 - DNA, 191 bp, Glycine max
  Clone ID: LIB3028-015-Q1-B1-H3
ggaaatgaagtagggtaccgtttggttccaaatgcagcatctcatccccttctcagagaggatgattaccctcaaagacgtggtgctttcaccaattacaatgtttgggttacaccttacaataagactgagaaatgggctggtggactttttgttgatcaaagtcatggaaatgaaactttggctgtttg

SEQ ID NO: 3746 - DNA, 394 bp, Glycine max
  Clone ID: LIB3028-015-Q1-B1-H4
ggagcatacaacggaagaaactccatggtgcaggttaacgacgaatgttaagttgcctaagggtttgttgatggaggtgagaatccgaggaaccctattgtgattggagggtatcaattggaggatgtgttggtgcagattgattttgatacttccatggtgggattcagtccttcgcttctgacgaagcatgctacttgctctcatttcaaaccctagttttcggtgaatcgtgatgattatagtttattattatccataccacatagtttttctttagattaagaagagttttgaggagtttaacacgttctgtaataacccttttattttttttttctttcttttttgctctcctgcggtattatctgtataaactgcttaagtggcctat

SEQ ID NO: 3747 - DNA, 320 bp, Glycine max
  unsure (1)..(320): unsure at all n locations
  Clone ID: LIB3028-015-Q1-B1-H6
gaagcgtcttaataaacgctaacctctgtacccttcgctaaaatgagagagtgcatttccatccacattggccaggccggaattcaggtcggaaatgcttgctgggagctctattgcctcgagcatggcattcaggctgatgggcaaatgccaggtgataagacaattgttggaggtgcgatgctttcaacaccttcttcagcgagaacggtgcagganagcacgtgcctcgtgcaattttcgtagatcntgagcccactgtcaatgatgaagtcagaactggcacataccgccaactcttccatcctgagcagctcatc

SEQ ID NO: 3748 - DNA, 405 bp, Glycine max
  Clone ID: LIB3028-015-Q1-B1-H7
ggaaaattaatctccctttcattttctctgcatctgtactctccaaaatgccgtccttagaggaggagctcttcccttcaaccccaggcaagttcaagatcgagcgggcccaccacatgaaccgccagctctaccgctgcttcgcctccaccagcaccatgttcctgtgggccctctttttaatcgccctcaccgcttcatatctcagcttccaaggcttcgtcggctcccacgtctccctctcgttaaaacgacgcggagacggcgtcgtcggactcgacaacttcaacgactactacgatccgtctctgaaaaaagcccgcaagtccctcctcgccaagcatgacgtcttcatcgtccatggcgacctcaacgacgccaagctcttgggaaagctcttcgatg

SEQ ID NO: 3749 - DNA, 366 bp, Glycine max
  Clone ID: LIB3028-015-Q1-B1-H8
ctttaccagttgccacactagaccgagattccccctaaacccgtttgcgttgttgtttgcgaagaaatggcgactaagaggagcgtgggaacgttgaaggagggtgatttgaaagggaagagggtgttcgtgagggtcgatctgaacgtgcctttggatgacaaccttaacatcaccgatgacactagagtccgtgctgctgttcccaccatcaagtacttaactggtcatggagccaaagtgatcctttctagccacttgggacgttctaaaggtgtaacacctaaatacagtttgaagcctcttgtgccaaggctgtctcaacttctcggaattgaagttacgatggcaaatgactctattggg

SEQ ID NO: 3750 - DNA, 393 bp, Glycine max
  Clone ID: LIB3028-015-Q1-B1-H9
gtcatttctctctccggcgagaaagaaaaatgcagcatttcatggatttgcaagcgaattcggagttgggtgagtcgaattcatggctttcagtgaaagagcagtccggtgcggcacccaacaccaatttggatcgcgtcctcttcaacgacctcgtcgagattgtccctctcgttcagtcactcatcgatcgtaaagcaagccgttcattcacgcggcgtggttccatgatctacaccaagacacccaccagagaatcattgtccaaaagagtaacagattcaaaaagtaggaatgttgccccatctattcctgccaaaaagaaaagggaccacggagaaaaagaacaaggaaaaaatggcagcaatgatgctgataactattccatgtttt

SEQ ID NO: 3751 - DNA, 371 bp, Glycine max
  Clone ID: LIB3028-016-Q1-B1-A10
cgttgaggacattaccgacacgcacgccatacaaagtcgtcacgtcttaaacagtcacacggaatgtacggtttctcataccacacaacacttcacggttcaactcgctcgagtcaaaactacagtcagtttcgttagtccggttcaggaggaatttagcaagtgtgcactaggaaccaatcataagatagaagaaatagctgccgtcaaagcggttagtactcgtgggaaacggttcacagttcatcccgatcaacgcaagagtggcgtacatacagaatgtaatagagaagagattgcaatccaacaggaatgcacaatacatgaggctgtggtcgaaccggtttcggttcacaacgaagtcaatggtg

SEQ ID NO: 3752 - DNA, 306 bp, Glycine max
  Clone ID: LIB3028-016-Q1-B1-A11
tcgagatgagagccagggttgctgattttggactttcaagacatgacatggtggatagacatgcagctattccgggtacctttggctatcatgaccccgagtataaaccctccggaacattcactaagataagtgacgtatacagttttgaggtgttgctcgtcgaaattacagctggcacgaatcatcagcaaggtcatatggaagacgttgagcttgcagcaatgaacacagacggaaaacttgggtgcgaggaaaacgtggaatctcgctatcaacgaaacgttgatgtcaaggaattgcatt

SEQ ID NO: 3753 - DNA, 386 bp, Glycine max
  Clone ID: LIB3028-016-Q1-B1-A12
ctcattaattgcaagaatggcacttcgttgcttggtgatgtccctttctgttctcttcactcttggtcttgcgagagaaagccatgccagagacgaagatttttggcatgctgtttggccaaacactcccattccaagttcattgcgagatcttctaaagcctggccctgcaagtgttgaaatcgatgatcaccctatgcaaattgaagaaacacagtacccgaaaaccttcttctataaagaagaccttcatccaggcaaaacaatgaaagtacaattcagcaagcctccctttcaacaaccatggggtgttggtacatggttaaaggaaattaaagacactactaaagaacgatatagttttgaagagctatgcatcaagaaag

SEQ ID NO: 3754 - DNA, 354 bp, Glycine max
  Clone ID: LIB3028-016-Q1-B1-A2
attcttcaagattcaggtactgcgtttcggaagcagacacagatggctcgtacgaagcaaaccgctcgtaagtccacaggaggaaaggctcctaggaagcagcttgcaaccaaggctgcacgtaagtctgcaccaactactggtggtgtgaagaagccccaccgttatcgtcctggtaccgttgctcttcgtgagattaggaaataccagaagagtaccgagcttttgatccggaagctccccttccagaggctggttcgtgaaattgctcaggacttcaagactgatctgcgtttccagagccacgccgtgcttgcattgcaagaagctgctgaggcataccttgttgggctc

SEQ ID NO: 3755 - DNA, 315 bp, Glycine max
  Clone ID: LIB3028-016-Q1-B1-A3
caggaccaagtgggtggacttcaagccaccagggacaatggcaaaacatggatcaccgttcagcctgtggaggctgccttcgtcgtcaatcttggagatcatgctcattatctgagcaatggaaggttcaagaatgctgatcaccaagcggtggtgaactcaaaccatagccgtttgtccatagccacttttcaaaacccagcaccaaatgcaactgtttaccctctgaagataagagaaggagagaagcctgtgatggaggaaacaatcacttttgctgaaatgtacaggaggaagatgagcaaggacattgag

SEQ ID NO: 3756 - DNA, 228 bp, Glycine max
  Clone ID: LIB3028-016-Q1-B1-A4
caacatgattctctttactttgctgatgggtcagtattagtcttagagatgctataaggactatcattgtatcaagttatactctttgcgttttagtttactttcttagtttgttatgactcttttgtgaatgttcatgggtttatgggaaatggaactatcaaagaggttggtaagagcaagtcaaattaaagaccttttttttagtaagtaatgaaaagaaaaggg

SEQ ID NO: 3757 - DNA, 355 bp, Glycine max
  Clone ID: LIB3028-016-Q1-B1-A6
cgtcaacaactgctcttggaaactaaactttctgccgtttgcgaaagagtactagatcaatgtttggcaccaacaattactgttggtgatggatgtgataacatgaccatgattttggtgcagttcaaaaaactggcccaatcaagtgcaccggcataacataagagctatcatcttcaaatgaaataagctacatctgaactaagactagagagcagtgaaagttagtaaattttgagcagcaacactacacacatgtagacacatgagtctagatgatcattttcacttcaactagcatttgtttccaaatttctgtgtttattttcacacctagaatctgttttgcttgttc

SEQ ID NO: 3758 - DNA, 304 bp, Glycine max
  unsure (1)..(304): unsure at all n locations
  Clone ID: LIB3028-016-Q1-B1-A7
aaacaacacactgaactctcttcactgaaacgacacacacaaaaaaaagctttagtttaggatgacccaagtgaggaacaagcaagtggttctaagagattatgtcaccggattccctaaagaatccgacatgaacattgttgaaggcaccataatattgaaggttccagaaagttccaatgatgtccttctaaaaaatctctacttgtcatgtgatccatacatgcgactcctcatggccaaggaccgttctttcagggatggggccttcacccttgcctctccattgaaaagatatngtgtg

SEQ ID NO: 3759 - DNA, 356 bp, Glycine max
  Clone ID: LIB3028-016-Q1-B1-A8
agcaaatattgcctattcggcaatatggcggaaaatggttcaattgagctgaacaagtttgtgttgttttgtttgttgttgctaatacaagtggcagtttctgaaatcatttttgaagagcgatttgatgatggatggcgaagtaggtgggtgaaatcagactggaaaagcagtgagggcaaagcaggttcattcaagcacacagctggaaaatgggctggtgatccagatgacagaggtattcaaacatccagtgatgccaaacactttgccatctctgcaaaaataccagaattcacaaacaagaacagaacattggtccttcagtaatctgtaaaatttgagcaagagattga

SEQ ID NO: 3760 - DNA, 338 bp, Glycine max
  Clone ID: LIB3028-016-Q1-B1-A9
gtatgcgcgatatctatcacagctacttatataaattcggcatagataacaccgtactctctaatatcccataccatgaaatacatggatatggggtggacgaacttaatggcagcttatctgaagagagggttagtcatggcgacgcagcagcattgccaaagacacttaaaagttacaacacgctgttgtcacatggcatcaacattgtgaacttagtcagaagatatcttgacagataggtcgttccatagatcaatctacataaggctggcatccacacatcggagcagttaattctcaaagatccacatcttatcactccaaatgcactttca

SEQ ID NO: 3761 - DNA, 386 bp, Glycine max
  unsure (1)..(386): unsure at all n locations
  Clone ID: LIB3028-016-Q1-B1-B11
cacaattcacacccaccattggattcaccaatctccaaccttcttctccactgttccgtttctctctccaacggagagtcttttgttttttgtggcgagtttgttgcacgtttaagaagcaatggcacgcaagaagatcagagagtatgactccaagaggttgttgaaggagcactttaagagaatctctggccaggagttgcccatcaagtctgcacaggttacagaatccaccaatttcagtgagctagcagagaaggaaccctggcttttatcttcaaaattggttgtgaaaccagacatgttatttggaaagcgtggcanaagtggtttggttgccttgaatctagatttggcagaagttgattcttttgtgaaagggcgtc

SEQ ID NO: 3762 - DNA, 392 bp, Glycine max
  Clone ID: LIB3028-016-Q1-B1-B12
atagtctgcaaatcaatgaaagtggttttcttttctttgtaacatcaatttaatcgttgtttgttttgttaattaaggccttaatgctgctgagaaacagatcaagagctgtgacgaagccaagtttgatgggtgatcacagctcctcccagccatgtccaaatcagagttacaaaagaaccatcattccttctctattttcaccaaaattccgagacttcactgccaagtgtctctcagctggagctgaggctttgagaagtcccacatcgattcttgacaccagagccttatcatccccatttgggagtcctttgtcacatgaagcagcagcctcagaaaacacaacctcttgggactccaaatgcattggccttgctcctgttggtgca

SEQ ID NO: 3763 - DNA, 355 bp, Glycine max
  Clone ID: LIB3028-016-Q1-B1-B2
gcaaacctcatactactgctagatatgctacaaagaaattgctggaacgtagagagcagaaaccatcaagcctatcagatgctattgttgaacacacacagatattgaaaactaggtccaagtgcttgagagaggttcttcaaaaaagtgggtgggatgtgcttgaatcgtgtgcgggtgtgtctgttgtggccaagccctctgcctatctcaacaagactattaagctgaaaatttcacttgagggtgaagcaagccacaggagtgccactaaggaaataaagctcgatgactctaatatcaggactgtcattctcaaaaccactggattatgcatcaataatgggtcatggac

SEQ ID NO: 3764 - DNA, 345 bp, Glycine max
  unsure (1)..(345): unsure at all n locations
  Clone ID: LIB3028-016-Q1-B1-B3
gttcctggttgaaaaaactgaagcttaaacttatggacattgtgagttagaaaaacaagtttaaaaatggtcctagttgtggggatcattangtctaccattttgcatgtcatgttgaaaagctttgttttttatttatttctttagtttactttattattaatatattattagtatatgatggttaagtctttggttgtattatggagggtatacctacgtgtgagcacaacacttgggtccacatcagcgtgctgaccacgtggtaacatgagaaattctaagagttgtgtattgaagtgagcaagctgctgctggtgctggagtttagggatgagggtttat

SEQ ID NO: 3765 - DNA, 357 bp, Glycine max
  Clone ID: LIB3028-016-Q1-B1-B4
ctgcaagagtgagaatcatcttctgattaacctccataatatcctcaggtaacaaaaatatagaacaaccgactgaagacacggattcatttccttcacctgtcaacactgctactaccaccacgcccgaggcatccccggcaccttcggtgtgtggtgaagatgaaagttcctccattggcggtgaattctccaacttgagtgttgacgatgccacctctgacaccacagccacttcttcacagcccgagtctgacagtgtttctgctggagatgagctgttatgagtcatctagttggcataagatgagtgctaaatgttttttgttaaagggagaatataatgagtaatgacat

SEQ ID NO: 3766 - DNA, 265 bp, Glycine max
  Clone ID: LIB3028-016-Q1-B1-B5
cagatctctcttgtccatccttcagtggtgggcgttcaatgtcaccgtcatcatcgtcaacaagtggatcttccagaaattggatttcaagtttcccctatcagtttcctgtgtccactttatctgttcatccattggagcttatgtggtaattaagttgctgaagcttaaaccactgataactgttgaccctgaagatcgctggagaagaatctttccaatgtcatttgtgttcggtgagaacatggtgctggggagtgtgagc

SEQ ID NO: 3767 - DNA, 339 bp, Glycine max
  Clone ID: LIB3028-016-Q1-B1-B6
aaaacaacagggaaagaaatttctgaccctaaccgcgtgtcgttgaaatcctcaaacgcagagtagacatagaattatcaaaaagcggggaaagggagattgaattcgatcctgggacgttaacgtggtttcaattcaattgtggtcctgtcggtgccctatctgcgacgacgatgtcatctttatatagaggggaatccaggaggtacaacaataaaccaagaggacgtcagaagttgacaacgcagaggaagcacgagattaaggaggccgttgagttatttgatacggatggctcaggtacaagtgaggccaaggagctgaatgttgcaatgaggg

SEQ ID NO: 3768 - DNA, 234 bp, Glycine max
  Clone ID: LIB3028-016-Q1-B1-B8
tatcccttgacatgtcttctgccggcggcgacagcggcggcagcgctacttccggcgagcctcgccaatacttctgccaccagtgcaaccgcaccgtctcaatttccccttctggctcctggggtggtcgtctgccccacttgcaacggcggcttcctcgaggaaggcgaggtggcaatccccgacgctaaccctcctaatccttttttctccgacttccccctcggcggcgcc

SEQ ID NO: 3769 - DNA, 138 bp, Glycine max
  Clone ID: LIB3028-016-Q1-B1-B9
cggctcgaggcgatcggccgctcacgatggagaggctctctctgataccgaactgtgtctcttcattagttatcgtctgccttcacacccgatgatgaaggacgtgacggttgagacagaaggaggagcatcaccatt

SEQ ID NO: 3770 - DNA, 389 bp, Glycine max
  Clone ID: LIB3028-016-Q1-B1-C10
atttgatttgttgaacaagcttctaacttatgaccctgaaaagcggatcacagctgaagaagctctaaaccatgagtggtttcgtgaagttccccttccgaagtcgaaagaatttatgcctacattccctgctcaaaatgctcaagacaggcgaatgaggagaatattaaagagtccagatccattagctgagcagcattggaaggagatgcagcagggtgaatcatggactggtggtacttttggttaagaatggtgcaatttaattttttgttcacaataatcattctaacatgctcagctgaatggttgcacacttgaggtgagagtaagcgctggatggatgctgctaattttgattgttagagaatcacctatgtggttttttt

SEQ ID NO: 3771 - DNA, 385 bp, Glycine max
  Clone ID: LIB3028-016-Q1-B1-C11
gctagagaatgatgatgaagtctgctatgtgtgcagtggtggttgtagcacttcttcttctggcggaggtggggcccatggctgaggctgtgacatgcaccccaacagagttgagtccgtgtcttccagcaatcacttccggtgctaaaccttccaatgcttgttgcacgaagctgaagcagcaaaaaccatgcttatgtggctacctcaaaaacgctagcttgaagcagtatgttaactctcctaatgcccgaaaaaccgttgcttcttgtgggattccctttccaacttgttaattaattaagccttcttaaaattaaagtgtgggatatatatatatatatagataaacagtttaatttatacacactttgatcctacaaag

SEQ ID NO: 3772 - DNA, 356 bp, Glycine max
  Clone ID: LIB3028-016-Q1-B1-C12
gcaacgcgtgtgatgacgcattcagcaagatgtgcagtggaggctgtaccacttcttcggcaggaggaggtcgagcacaggcgtgaagctgtgaaatgcacccccacagcattgggtcagtttcttccaggactcatttacagtgctgagacttccaacgcctgatgcacggtcctgatgtatcacatatcatgcctgtgtggctacctcaaagaggctagcgtgacgcagtatgttaactctccgaacgcccgattcaccgttgcttcttgtgggattcccattccaacgtgttacttcattaagccttcgtacaattaacgtgtgcgagatatctagatctatagatccacagt

SEQ ID NO: 3773 - DNA, 314 bp, Glycine max
  Clone ID: LIB3028-016-Q1-B1-C3
tactactactgcacacactctctcgctctctctcaatgcatggccgccaattcgagtagccgagggatcaccgccttggggaaccgagtcgccaatcagatctggacttcgaatcccgcctcagctccgcggagttccaggaggggagcaataacagctgcatacagtagcagcggcgggtcagtgtatgacaacaaccctgatgatcagattcacactggggcggtcccagacgatgtgattcaggcaacacatgccggcgtgtactgggccccagagggacagactggggtatatgggccccccggaggagc

SEQ ID NO: 3774 - DNA, 235 bp, Glycine max
  Clone ID: LIB3028-016-Q1-B1-C4
gctagagctgccggagccttttagtttcagtttcacttggtgtgctgctgttcccctcattgtgtggatagctctgtcactgacaaatgccattgtaaaagactttgtgattttaaagggtccttgtcggaactgcggtactgaaaacacctctttctttgggactatggtttcaagttcaaatggtggttccaccaacactgtcaaatgctccaactgtggcactgcaatggaa

SEQ ID NO: 3775 - DNA, 358 bp, Glycine max
  Clone ID: LIB3028-016-Q1-B1-C6
acattactagaaagttagaaaacatggtagcggtggccggagcatcctcgtccgtgattaaggtggctgcactttccggatctttaaggaaaggctcttacaacagagccctcattcgttctgcgattgagctaagccaaggtagagttgaaggccttcaaatcgagtacgttgatatttcgcctttgccccttctcaacaccgatcttgaggtgaatgggacctaccccccacaagttgaagcctttcgccagaacattctcgcagctggagagtatcctctttggcttcgcctgagtacaattactctgtcgcaagtcctttaaagaatgcacttgactgggcatcaagggcacca

SEQ ID NO: 3776 - DNA, 232 bp, Glycine max
  Clone ID: LIB3028-016-Q1-B1-C8
acactttccacttgtctccgaattagttatcttgagaaacattagtcccattgctatatattatggctagcatgaaggttacatgggtggttgtgatcatgtgcatggccgtggtgggtgcagcgatgatggcgcaagccatgacatgcaatgatgtcacggtgggtatggcacagtggcgatcctacctgatgcagggaggaacagcttcggcagtttgctgcagcggagt

SEQ ID NO: 3777 - DNA, 205 bp, Glycine max
  Clone ID: LIB3028-016-Q1-B1-D10
aggttggcgtttaacatgggtcgtttagtttcggagggtgacttgttcaccgttttggccccaatgaactaagcgatggcgaagttgacaacggagcaattaagcgaaccgggggcgccggagcagagaaggtactatcacattataccggagtactagaccgacgagagcaagtacaatgcggttagaaggttcgggaaggttc

SEQ ID NO: 3778 - DNA, 396 bp, Glycine max
  Clone ID: LIB3028-016-Q1-B1-D11
cataagtggcaaccccattttcccaggtggcacatattacattatgccatcaacttggggcgctgccggtggtggattgaaactaggccggacaggaaactcaaactgcccagttactgttttgcaagattactcagaaatcttccgtggcacaccagtcaaattcagcatacctgggataagccctggaatcatctttacaggtactccacttgaaatcgagttcgcagagaaaccttattgtgctgaatcctccaaatgggtggcgtttgtggacaatgaaatccaaaaggcatgtgtgggtattggtggtcctgaaggtcatcctggtcaacaaacatttagtggcacatttagcattcagaaatataaatttggatacaaacttgtgttctg

SEQ ID NO: 3779 - DNA, 391 bp, Glycine max
  Clone ID: LIB3028-016-Q1-B1-D12
gcgtgataccatccgtacctgctcctatacttacaatcttctatgcgggcactgtgaatgtctttgaagatatctcccctgagaaggcacaagctatcatgttgttggctgggaatggcttatcagctggttctaatgaggcatcactcaatgttcaggcgccctgcttgaagttggcagtacgtgatggtgtgcctgttagtcaacccatatcaccctgctccggtctttcaagtccttcatctgtttcttcacatactggttcaccgtcagggagtggttcacgtagcagtgattagtttctcgcagctaaaacatctggaggtagcacttcctctgtttacaaagtggagactccgacagtagtcaacacaactgacatgctaacatc

SEQ ID NO: 3780 - DNA, 232 bp, Glycine max
  Clone ID: LIB3028-016-Q1-B1-D5
cagaagtacttgcacgagctacttgaggaggatcaagaaccgtgctttctaaacaagtatatttccgataggcgaacccagatgaagaggccttccccgaagacgagtctgcgagtgaggaggggcaaagtcaaccagtccaaacacaaacttcccgagagatcggggcggaagcgcttgtcgtctctctctcacagacaccccagacctcagacgggcaccactcttcgaa

SEQ ID NO: 3781 - DNA, 286 bp, Glycine max
  Clone ID: LIB3028-016-Q1-B1-D6
atttaagaacccgagaccaagagtactagagaaataaaataaaagactacatataaaattagagagaaggagagcgtgagtgtgtctgtgtctgcgcttcagaaatgtggcggtgcgtggcgcgtgcgattcgcgtaccagcttcggagagatccatacctaatcggcaaccgcgtagatctcacatttcaagatttttctctggtggtggtggtggtgggagctcctcgtacaacgtcggggatcagaagtaggaggcggtcgttgtgggcgggggcggcgcagg

SEQ ID NO: 3782 - DNA, 189 bp, Glycine max
  Clone ID: LIB3028-016-Q1-B1-D7
ctcgagccgattcggctcgagtgaacatgatgttggaggtttggctggggacgcggattctccagcggacgagcatgtttaggacgttgatggtgctggagatgtgccgcaggattttgagtgtgggccgaaccagggatccgagattcattccacgggaaatgggctgggagggtggtcgggatggcc

SEQ ID NO: 3783 - DNA, 231 bp, Glycine max
  Clone ID: LIB3028-016-Q1-B1-D8
ggttactggaattccttgctttcctggcgtgccgaaacaccataggcacaaaaagacaatacttagttggcaataaaagtaatgagttgcaaaatcaagcaatataaatgaatgaaaaagtaatgggtgtgcttctttattctttaattattttcatttcatgtaaggaactctagagttaactatatttttttatctcaagcaattaaattttgtccatagtgaagcttc

SEQ ID NO: 3784 - DNA, 120 bp, Glycine max
  Clone ID: LIB3028-016-Q1-B1-D9
gttaattgagttgcgacggtgacggctcgttgtgtagcgtcctgtcgagcgccgctcctctgttacccgtctgtgagagtagatggtgcgctgaatgcgctacgtaaccatgtcaagtaa

SEQ ID NO: 3785 - DNA, 357 bp, Glycine max
  Clone ID: LIB3028-016-Q1-B1-E10
caaaactggaaacactctctcctctacatcactttcctcctcgcaattctccacctcacgcagaaccatttctgccacaagctcttcttcgccaacgaaacggtgcgcgtcaagaagaaccccgacctccccctccggttccgttccgacggtaccttcaagatcctccaggtggctgatatgcactacggcactggaactagcgtgacacggtgcatggacgtgttggcctccgagttcgagttttgttccgatcttaacaccactcgttttttaaagcgtatcattctagcagagaatcctgaatttcctgcctttactggagataatattttcggatcaagttcacccgatgct

SEQ ID NO: 3786 - DNA, 394 bp, Glycine max
  Clone ID: LIB3028-016-Q1-B1-E11
ctagtttattggcattgggatcagtaactgcaattcccaatgcaaattttcatcgggcgccaaggagcactagtgtgcttctggttgttgtctgtgttttttgtggtaacaggattcaacaatgaagagcacaggacagtggaggtagttggcctatgagaatgcgcagactgcaggcagaacaatattaagaataaccacgctttctcagggttacgtgtgacggtagattgcaagtcacgacatggacacttcagaacgagaggggcaggtgcgcttgatgaatatggaaacttcaaagtatcacttccacaggacatggttgaagatggtgagctaaaagaagattgctatgcccagttgcatattgcatctgctgaaccttgcccttccc

SEQ ID NO: 3787 - DNA, 380 bp, Glycine max
  Clone ID: LIB3028-016-Q1-B1-E12
caaccgctaaactatcatcaactatggcaacaacgtcctaacctttgttcttaggattttccaaacacttcaactcaattgggttgaaccatcacagttacagatgctgctcaaatgctgttcctaagagaccccaaagacccagttccataagggcctgcactggagttggagctgctggttctgatcgtccattagctgaaagacttttagatttgaaagatgcatgctggagatttttaaggccacatactatacgtggtacagcactacgttcatttgctttggtggcaagagcattgattgagaacacgaatttgataaagtggtctcttttgttcaaagctttctctggtctttttgccctgatttgtgggaat

SEQ ID NO: 3788 - DNA, 343 bp, Glycine max
  Clone ID: LIB3028-016-Q1-B1-E2
gtaaagaaagaaagagaagagaagaatccaagacgaagatggaggacgcatcagcatcaaagttcattccacaccaaatcggaggggtccaaaacgacgcgcttcgattcggtctccagggagtcaagagggacatcgttggttctcaccctcttcaatcttcactccaggctacaaggagaatggatgaagcgatgaagaggcaatgcaaagttaacctgtacggaactgcttttcccatgaaggaggagcttgacaggcagatcctgtccaggttcccgcggcctcctggaccaattccttcttcaatgctgggtttggagactgttacaggaagtgttga

SEQ ID NO: 3789 - DNA, 320 bp, Glycine max
  Clone ID: LIB3028-016-Q1-B1-E3
gagtcattgaactttgactatatttttcagagttcagattattcttctcttttgaattttgattttgggggtttaagtttctgagagaaaaaaaaaaatgataaaggtcgttctttttttgttctgcgttgcctctgcactgaccctttcagtatcggagtccaaatctgcttctgtgcaacctcatgcagctgaatctttctctgttggatatattcagatgaagactgcagcgaactgttcttacctggtagttatatctacgagttgttcatcgcctaagttcactacggataagattggtattacgtttggcgatg

SEQ ID NO: 3790 - DNA, 360 bp, Glycine max
  Clone ID: LIB3028-016-Q1-B1-E4
ttgatgtttggttccccttgtgatttggcatcctttgatttcaaggaggatatgcaaggaggagtagtagggatggatgctcttcagaaacagcctgatatctctatttggtaccagtgaaaatgacagcttaaagcttgaaacctcctcatcatcttcatctatcatggactcttttattttccttctaaaagggttggcacccccctaatcatgtgaagttcctttggccgaaaaaaggtttcactgcaattttcttcacatgtaatcctgtaggcccagtagaactaaataatattttaagcttggcaggtccactatgtgttatatacataataatgataatatataataaaaact

SEQ ID NO: 3791 - DNA, 330 bp, Glycine max
  Clone ID: LIB3028-016-Q1-B1-E5
gagtgtacatgataatatttttaattccacgaaggatgtgttcatctacaagagaaagataaaaatagtgaacacacaaaaaatgaataataaaattattgaaactcacacttttacatttaacagtaattcaaaacatagatttcaatttattttcttttcatttttctcatgaataattttaatctgttatctttctcaaaagaataaaaaatgacactagacatgaagaatcaaaatcctgttaaaaaattcacgaatttgttagcggtctctcctccaaatggaatacaaaaacgcactaaagattccatccatttggaacttggg

SEQ ID NO: 3792 - DNA, 350 bp, Glycine max
  Clone ID: LIB3028-016-Q1-B1-E6
cacctttctttttcctttccacccatggctgacccctactccaagttcttctcttcctcttcacccttgttccgtttcaaccacaaccaatatttcccttcttcaaacccttcgccacaacaccagaaccacaacttcatcaaccacacaaaaaccaacgacaccaccaccaccaccgcctttttccactaccaccaacaccaaactactactgctttttcttcttttccaccctcagcgcctttgagagaagaactagccctcttgaagctgagtccaacaaagcaagatgaggaggaagtagaggacttggtgtctaattgcactggtgcagccatggacgtggaaga

SEQ ID NO: 3793 - DNA, 362 bp, Glycine max
  Clone ID: LIB3028-016-Q1-B1-E7
gttgagttgtttggtgtggggggaagcccttttgccagaagggtgcagattgccctggaactgaagggagtccaatacacttactttgaagaagatcttaggaacaagagtgatcttcttatcagatacaaccctattcacaagaaggtacctgtgcttgtccacaatggaagaccattggctgagtcccttgtgatccttgaatacattgatgagacatgggagaaccaccaccccatcttgcctcaacaaccttatgatagagccttggctcgattctggtcaaggttcattgatgacaaatgcatgccgtgcaatatcaaaggcagcatttactgcagacaaggaggaacgttgacaag

SEQ ID NO: 3794 - DNA, 325 bp, Glycine max
  Clone ID: LIB3028-016-Q1-B1-E8
ttcttcgtctcaaacctcttcgtttcttcgattcattccatttcgtccaaaatggccaaagacccagttcgcgttctcgtcactggagccgcagggcaaattggatatgctcttgtccctatgagtgctaggggagtgatgctgggtcctgaccagcccgtgatcctccacatgcttgacattcctccagcagcagagtcgttgaatggggttaaaatggaattggtggatgctggattccctcttcttaaaggtgttgttgctacaagcgaggtggttgaggcatgcactggggtcaatattgcagtgatggttggtggattcc

SEQ ID NO: 3795 - DNA, 363 bp, Glycine max
  Clone ID: LIB3028-016-Q1-B1-E9
gtttctgatggtatcaaagaactttttaatgcgtattctatctgttcaactatgattgatcaaggctcagccttgcctggcagcagtttacctagtacttgtggttccagagatatgctaaaaggctttgacagattccttcatgagacatcacagagtcagtctatcatatcagacttagacaagtacttagaagaaccaatctttccacgcaattccgattttaacatactgaactggtggaaagtccacatgccaaggtacccaattttgtccatgatggcacgtgatgttcttgggactccagtgtcaagtctggcgccagaattggcacttagccctgggggcatagtgctagattcg

SEQ ID NO: 3796 - DNA, 323 bp, Glycine max
  Clone ID: LIB3028-016-Q1-B1-F10
gatctatcgtttcaatgggtatgatggataagcttggaaagaaggttcgacttttctggagtttctttggcatggcaataacattgatccttcaagcgacatgagcaacttcacttgtatcaaacatgggagctcagtacttttctgttggtggcatgttcctgtttgtcttaacatttgctctcggagctggcacagttccaggtctccttctaccagaaatctttccgagtcgaataagagccaaagccatgggcagtctgtatgtcagtgcattgggtgataaatttcgttgttggaggactgttcctgcgtttgctgga

SEQ ID NO: 3797 - DNA, 352 bp, Glycine max
  unsure (1)..(352): unsure at all n locations
  Clone ID: LIB3028-016-Q1-B1-F12
atttgttttggtgcattcaaatggctgggattgtagtgatatttgactttgactcaacaatcattgagtgtgatagtgataattgggtgcttgatgagaccggtttaactgaaaagttctatcagcttcttcctagcatggcttggaaccctctaatggataagatgatgaatgaacttcattcacaagggaaaaccattcaagacattgtagaaattctgaataggacaccaatgcatcctaggactgtccctgctattgaggcagcttattctcttgggtgtcacctgaagattgtgagtgacgcanacattttctttagtgaaacaatcctgaagcatcatggagtgtg

SEQ ID NO: 3798 - DNA, 219 bp, Glycine max
  Clone ID: LIB3028-016-Q1-B1-F2
ttcatgcatggttggggcttgctttgtaacatggaataagatgatcgccctttacaggaaagaaaacatgggcgtctgaattgatttcaataatgttgaataacagttttgagaatgaggcagtaggcgtttgcttgcttagaaaagtgtaaccctttcttgggatgaaacaatttaacgggagaattcattttttcaaggaatttaaaatgattcatg

SEQ ID NO: 3799 - DNA, 308 bp, Glycine max
  Clone ID: LIB3028-016-Q1-B1-F3
gaaaagtacgacgtgagtggatttcctaccttgaagttcttcccaaagggcaacaaagctggtgaagactacggaggtggaagagacttggatgactttgtggcttttatcaatgagaaatctggagcgggtcgagatggaaaaggacaacttacttcccaagctggtatagtagaaagcttggatgtcttggtaaaggagtttgtagctgccagctatgaagagaagaaatccgtgtttaccccattggaagaggaagttgtgaagcttaggggttccgcctcaaggtacgggaagatttacttgaa

SEQ ID NO: 3800 - DNA, 305 bp, Glycine max
  Clone ID: LIB3028-016-Q1-B1-F4
gccgtggtagcaaagtatggtgacaagagtgtgtactttgatttggaggatctgggcaacactacagggcagtgggacttgtatggctcagatgcaccttcaccctacaaccctcttcagagcaagttcgtcgagacatttgctgctccattcacaaagaggggattgttactcaagtttctgatattgggaggtggttccacccttgcatacttcagtgcaactgcctcacgtgacattctacgaatcaggaggggaccagaactcccaccgaagctcggtcctcgtggcgagatctaatttga

SEQ ID NO: 3801 - DNA, 201 bp, Glycine max
  Clone ID: LIB3028-016-Q1-B1-F5
gttggtacaaataggtatgatgctcactcaggtggagaacgtgagattcaagggaccatgttagagttgctgaaccagttagagggttttgattctagaggagatgtagaggtgattctggcaagggggacaagtgaaagtcttgatcgagctttgctacgggggggtcgaagtgagaggaagatagaagttccgcttcct

SEQ ID NO: 3802 - DNA, 360 bp, Glycine max
  Clone ID: LIB3028-016-Q1-B1-F6
ctgaaccaaatcatcacacacacatactaagaagcaacaattcttctacaatggatctcctccttctggaaaagaccctcataggtctcttcctcgctgcggtggtcgccatcgccgtctccaccctccgcggccggaaattcaagctcccaccgggcccactccccgtcccaatcttcggcaactggctccaagtcggcgacgacctcaaccaccgcaacctcaccgatttggccaaaaaattcggtgacatcttcctcctccgcatggggcagcgcaacctcgtcgtggtttcttcccctgagctcgccaaagaggttctccacacgcagggcgtggagttcggctcccgcacccgca

SEQ ID NO: 3803 - DNA, 353 bp, Glycine max
  Clone ID: LIB3028-016-Q1-B1-F7
gtagaactgaacaagggtttctctttctctttctctgtctgcttcttcactttctctcgtttcaatcgaaaaaaatcatgggcagaaaattcttcgtcggtggcaactggaaatgcaatgggacgactgaggaggtgaagaagattgttactactttaaatgaagctaaagtccctggagaagatgttgtagaagttgttgtgagccctccttttgtgttccttccttttgtaaaaagtttgctgcgccctgatttccatgtctcgggggagaattgttgggttcgcagaggtggtgcttatactggagaggttagtgctgaaatgcttgttaatttaggaattccttgggtt

SEQ ID NO: 3804 - DNA, 342 bp, Glycine max
  Clone ID: LIB3028-016-Q1-B1-F8
ctcctcatgtgattaatgcagtgatggaagcaattgaagggatgagggtagcgttgggagccgctgttgttcttaattattgtctacaaggactgttccaccctgcacgaaaagttagggaggtatattggaagatctacaactctctctatattggagcccaggatgctcttgtagcagcataccctgccttggaggatgagcatagcaatgtttacagtaggccagagttaatgatgttcatctagtgtggattttgattacttagtttatttctatctccagtgtatttggcagtattctgtacttcctcgcatcaatgtaaagctcagttgttggaac

SEQ ID NO: 3805 - DNA, 391 bp, Glycine max
  Clone ID: LIB3028-016-Q1-B1-F9
cagacattgcaaatgtctgcatatgaattgccaatttggcaggatctatcgtttcaatgggtttgatggataagcttggaaggaaggttctacttttctggagtttctttggcatggcaatagcaatgatccttcaagccacaggagcaacttcacttgtatcaaacatgggagctcagtacttttctgttggtggcatgttcctgtttgtcttaacatttgctctcggagctggcccagttccaggtctccttctaccagaaatctttcctagtcgaataagagccaaagccatggcagtctgtatgtcagtgcattgggtgataaatttctttgttggactactgttcttgcgtttgctggagaaacttggtccacagctgctttactc

SEQ ID NO: 3806 - DNA, 235 bp, Glycine max
  Clone ID: LIB3028-016-Q1-B1-G12
gaaatccggttcaaaattaattggaacttttgggaacttggttcaagaatatgctaaaaccggcaaataagctgaaaaggttgtggttaatccttccggtctgcaattggtgaaactttttacaggatcaaaggccttggttcacaatcaacagctgggacaaaagtgtctaaatggttagccacagcaacaagggataacatatgcaattgcggatctgcttgatgcaaggttg

SEQ ID NO: 3807 - DNA, 208 bp, Glycine max
  Clone ID: LIB3028-016-Q1-B1-G3
tgactcgctaacttttcattctccaagtcaccacgcgcttcatatgcaggcacagttgttaagacaaacttgacacaagcgcaccatataatcaacatcttgaagagcttgctgtgtggttcctgtgggcccccttcaacgaaactgtactaattagataagatttgtgagttgctgttcagattaaaatctccatggaaggtcgaca

SEQ ID NO: 3808 - DNA, 98 bp, Glycine max
  Clone ID: LIB3028-016-Q1-B1-G4
cttctgcatgatgttaagttttattgttgttaagaagttgttgtagtgctgcttcttcttgttatgttcaaattaaatacacataatgaatgtttttg

SEQ ID NO: 3809 - DNA, 348 bp, Glycine max
  Clone ID: LIB3028-016-Q1-B1-G5
atcacaaccctcaatgtgttgcaagcctacacattgaagcggatccgtgatcctgactaccatgtgaagttgaggccacacttgtcaaaggactacatggaatcaagcaagccagcagcagagcttgttaaacttaaccccaaaagcgagtatgctcctggtcttgaggacacccttattttgacaatgaagggtattgctgctggcatgcaaaatacaggttaagatgccatagcagtggtgtttttcttgttatacgatgtgtgttgtgattgtgacatggatgtataagcattataacctattatgtctactagagagatttccaacaatatcaaataactgttc

SEQ ID NO: 3810 - DNA, 246 bp, Glycine max
  Clone ID: LIB3028-016-Q1-B1-G6
gttgaagatcgtgcagtaaacaggacgttggcaaaggacaagttgcgtaagcataacagattagagaatttaacgccatgtattgctggcgtaataatatttgaagggctttcaccacgcagaacaggagaatcataacatcggcagcgagaatgctccaggacctgatgacagccttaacatgtcaatcactggtattgccgcaggcattcagcatacacgttagtatgctcacgtgttggtgta

SEQ ID NO: 3811 - DNA, 330 bp, Glycine max
  Clone ID: LIB3028-016-Q1-B1-G7
cctcacttgaattgaaggaccatcctgcctttaatttctcatcagcacttcagtcaacaaaagatggtgatgatgaaatctctcgcacttcttctagatagtagctcttttcccaggctaccaccagcgtagcccagtccccggccgcggcaccgactgccccggcgacgccctcgaccgcagccgccccggccccagcaccctccgcagccccgacagacatcataagaatcctgaggagggcaggagggtggacaaggctgatccgcctcggggaggccacacaagtcgcgaaccaaatcaactcccagcgcgggaggacaagcggcg

SEQ ID NO: 3812 - DNA, 150 bp, Glycine max
  Clone ID: LIB3028-016-Q1-B1-G8
caacattaacaagtcctcaattttgttaacacactatgaaccccagatcctaaggttcatttcaaggtggcaatcggtgtcaagttttgctccttgtgaccattctgactttagtcgtgtgaggcgtgggaaccactgtgtctggggttg

SEQ ID NO: 3813 - DNA, 389 bp, Glycine max
  Clone ID: LIB3028-016-Q1-B1-G9
ctgatattttctgggatgctctcggtggaaaggcagagtatccaaagggcaaagaaattcaaggattcatagatgatccacatttgtttgcattaaaaatagcgagagggaaaccatgtctaattgatgattctgtttctcacgctcatttgttggagttttaactcaggagacttcaaggtgaaagagatatacaattatacacaggatgacttaataactgaagacatcttattgcttgattgccaaagagagatttatgtttgggttggcttacattcggctatcaaatcaaaacaagaagttcttcatcttggcctgaaatttctggaaatggatgtccttgttgaaggcctatcaatgaacatccctatttatattgtaacgga

SEQ ID NO: 3814 - DNA, 138 bp, Glycine max
  Clone ID: LIB3028-016-Q1-B1-H10
cacgcgtaaatcgaaatccggtccaaggggaaaccataattacaacggcaatggtgccgggaaccttaattggaggggcttcaaatgccaaaacaagttcaaagcacgcacaaattggccggatgaaaacaactgcgg

SEQ ID NO: 3815 - DNA, 392 bp, Glycine max
  Clone ID: LIB3028-016-Q1-B1-H11
tttggacagtatccatatggaggtttaatcctaaacaggccaaccattagcaggagattcatgcctgagaaagggtctgctgagtatgcagctttggctaagaaccctgagaaggagtttttgaagactattactggcaagaaggagaccctcattgaccttacaattatagaaatcttgtcaaggcacacatctgatgagttctaccttggggagagagatggtggtgactattggacttctgatgctggtccactagaggccttcaagaggtttggaaagaagcttcaagagattgaacaaaagcttatacagaagaacaaggacgagacgttgagaaaccgcagtgggccggctaaaatgccttacactttgctctatccttctagtga

SEQ ID NO: 3816 - DNA, 358 bp, Glycine max
  Clone ID: LIB3028-016-Q1-B1-H12
acgcgtacatcaaatctcggctcaagattgaattgacaatgaggcctgatcttgctttgcttcctcttctatttgctttcttgttagctgccactacagaatcaagaaaagatacaggggaatattggaaaatgatcatgaaagatcaggaaatgccagaaggacttcaaggtcttgtttcatttcaatctgaaaataaccctaagactcaagagcagcttggtaaaggttccaaaaaccattgtgaagagtctctagttacaaatacacaagttaatagtgacttcgaacccataccaagtgttaccaaatatgatgatttggaattcaagtcaagcattatcaagaacgaagattt

SEQ ID NO: 3817 - DNA, 329 bp, Glycine max
  Clone ID: LIB3028-016-Q1-B1-H2
tacttgatcacttttttaccgagctaagcaaaatggagatcaagcgtctgtcctcgttactgaatgaggatcctgcaattatggaacgacgtagtgcgctcgcaaagagactagagttataccggagtgcacaagctgaaatagatgcagttgcttggtctaagtagagatatgtatgtcaaatcacgtttatacgagagccagcagtgtcattatcattgttcactattttcttattcagactcatttttcagtgtcatcgtattctgttgcattgtcctcttgaatagatgagacgattctgaaaaaggaaaaaaaatgattttttg

SEQ ID NO: 3818 - DNA, 350 bp, Glycine max
  Clone ID: LIB3028-016-Q1-B1-H3
cttctgctaaagtcaacaacaccgcgttttggctcgcactaacacaactgttcctttcttcctttcctcaacttgtttcctacttaacgcgtttacgtgagccaatcgctgatatcgcgctttctataaggcgcgagtcacaaccagtggaactcaccgaactgaactcgtaagtttagtcttctctcggcgtcgccatggacgaagaagacgtgcgcaggatcttcagcaagttcgacaagaacggcgacggcaagatctcgtgcgcggagctgaaggagatgatggcggcgctgggatccaaaacgacgtcggacgaggtgaatcgcatgatggcggagctggaccgg

SEQ ID NO: 3819 - DNA, 335 bp, Glycine max
  Clone ID: LIB3028-016-Q1-B1-H4
ctacaacgcctcgaatccacacagttctacgctacgctctaaaccctcgctctctctctctctcgatctatcatggctttgcccaatcagcaaaccgtggattaccctagtttcaaactcgtcatcgtcggtgacggcggtacaggaaagacaacgttcgtgaaaaggcatcttaccggtgaattcgagaaaaaatacgaaccgaccattggagtggaggttcacccattggatttcttcacaaactgcggaaagattcgcttctactgttgggatactgctggacaagagaagtttggtggcctcagagatggatattatatccatgggcaatg

SEQ ID NO: 3820 - DNA, 361 bp, Glycine max
  Clone ID: LIB3028-016-Q1-B1-H5
gccaaagttcatattaagagagaaagagagagagagatagaagggaaaaaagcatcaaagatcatgaaacccaacttttcctttttatctaagcttttgatactgcaatatctatcagttttatgcatttctcaggaatttgatttcttctactttgttcagcagtggccaggagcatactgtgacacaaagcagagctgctgctatcctaagactgggaaacctgctgctgatttcagcattcatggactctggcctaacttcaaggatggctcatggccctcaaactgtgaccctgacagtgtctttgataaatctcagatctcagacctcattagcaacatggagaaggattggccat

SEQ ID NO: 3821 - DNA, 357 bp, Glycine max
  Clone ID: LIB3028-016-Q1-B1-H7
ctggaagatggaattcgtgagattttttgattgctggaatgattttcaagaaaaggccacaacccaagtcttgattgttttggacaagcatgagaaccgcgatacttatgtggtagctttccgaggaacggaaccctttgatgcagatgcatggtgcactgaccttgacatctcatggtacgggattcccggcattggaaaaatgcatggtggcttcatgaaagccttagggctacagaaaaatgtggggtggcctaaggagattcaaagggatgaaaatcttcccccgttggcctactatgttattagggacattctaaggaaaggtttgagtgaaaatcctaatgcaaagtttat

SEQ ID NO: 3822 - DNA, 320 bp, Glycine max
  Clone ID: LIB3028-017-Q1-B1-A1
aagcttttcccttaattctctctctaaacatcacaatggattatggaaggttgggaccctctgatcctggtggctcctcgcgcctcaacaacgttcctccgacatcttccgggaggaagaagattgtcttgctttcactctttagcgtcttgttaatagccgcgtctgctgtaactgcagttgtcgtccgctctcgtattcaacaaaatacgagagcccatgagactaggctcggaaagcccactcaagcgatttcacgcacgtgcagcaagacacgctttaagaccttgtgtgtcaaatcgcttttagactttccggga

SEQ ID NO: 3823 - DNA, 383 bp, Glycine max
  Clone ID: LIB3028-017-Q1-B1-A11
gccgaagaggaggacaacctgctgaacgccgagcaccacttcgcgagcttcaaggccaagttcgccaagacctacgccaccaaggaggagcacgatcatcgcttcggcgtcttcaagtccaacctccgcagagccaggctgcacgccaagctcgacccctccgccgtccacggcgtcaccaaattctccgatctaactccggccgagttccgccgccagttcctcggcctcaagccgctccgcttcccggcgcacgcccagaaggcgcccatcctccccaccaaggatctccccaaggatttcgattggcgagacaaaggagccgtcactaacgtcaaggaccaaggggcgtgtggttcgtgttggtctttcagtacgaccgg

SEQ ID NO: 3824 - DNA, 396 bp, Glycine max
  Clone ID: LIB3028-017-Q1-B1-A12
gtgtggtgtaggtgaagtgcaatctgtgttgatgcgttccacgttttgctgtcacttgaacctttcacccgtcatgattatgaagggcttctctgctcccatttcatcatatgtttcgcctcgagctcaagccgtcactgagccaccggcgcggattggctttttgggcctcggaatcatgggctccccaatggcccacaatctccttaaagctggtgttgatctcactgtttggaataggaccaagagcaagtgtgaccctctaatcagcctcggagcaaaatataaaccatctcctgaggaagtagcagcatcttgtgatgtcacctttgccatgctcgctgatcctcaaagtgcagtggatgtcgcttgcgggaagcatggggctgcaaatgg

SEQ ID NO: 3825 - DNA, 321 bp, Glycine max
  Clone ID: LIB3028-017-Q1-B1-A2
gacaactgtggttgagaaaactgggaagagtgatgacaaagtgaagaagatcatcactattatcatttcaatggctacccaaacccaatcacagtcacatccaaacaccagcactatcgagccaaacagcggcttctgttctcagtccagaaccttccattcactccgtccaaacgttcctctccctccggcctcccgatccctctccctcaccgactacgtcttctccctcgtaccctcagccgccaccgccacagcctcctcatccatcacctccgccatcatcgactccgtcaccgtccgccacctgtcctactccct

SEQ ID NO: 3826 - DNA, 307 bp, Glycine max
  Clone ID: LIB3028-017-Q1-B1-A3
ggctaatctctcactcttgttcttcggtctcctcctattctccgctgccgtagccaccgtcgaacgaatcgacgatgaagacaaccttctgatccgtcaagtggtgccggacgcggaggaccaccacctgctcaacgcggagcaccacttctccgccttcaagacaaagttcgccaagacctacgccacgcaggaggagcacgagcaccgcttccgtatcttcaagaacaacttgctccgcgccaagtcgcaccagaaattggacccctccgccgtccacggcgtcaccaggttctccgatttcact

SEQ ID NO: 3827 - DNA, 355 bp, Glycine max
  Clone ID: LIB3028-017-Q1-B1-A4
cagtgattaagaatacaatggatcccaaacacttgtaccaggttgctgctgtggctgtgctgtgcgtgcaaccagaacctagttaccgtccactgataacagatgttcttcattcactcatccctcttgttccgattgagcttggaggaacactaagagtttcacaagtaaagtgatacacgctaaactgtgttaaacaaggatatgatttgagattatgatgctctgccaaaacagattggttttgccaaatactcgaaattgcaaatagacccacgtcaaacgtactataaggagattcattcgggaaggatgtttagcttaaatagagaagagcattagattgttaataaca

SEQ ID NO: 3828 - DNA, 249 bp, Glycine max
  Clone ID: LIB3028-017-Q1-B1-A5
gattcatactatggctctcacgtgatgcagtatggtgatgtagggcttagcagagatgttctcttccattatttgggtacagatcctgctaatgataatttcacttttgtggatgaaaactccttatggtcaccttcaaaaccagtcaaccaacgtgatgctgatctcatccatttttgggataagttccgcaaagctcctgagggttctctcaggaaaaatacagctcagaaacaagttttggaagca

SEQ ID NO: 3829 - DNA, 348 bp, Glycine max
  Clone ID: LIB3028-017-Q1-B1-A6
gtgccaatgtgcacattagtgagggtgcccaaataacgttgcaatatgtgaaaaacatcatcattcacggtctgcacattcatgacattaagaaatgtagtggtggcctcatcagagactccatggatcactatggagtccgtgccatgagtgatggggatgccatttcggtgtttggatccacatatgtttggatagatcatgtttcctttaccaactgcgatgacggcctcatcgatgtcgttagcgcttcaactgctgttaccatctccaactgccatcttaccaaacataacgatgtattattatttggtgcgagtgatagctactcgggggataaaatcatgc

SEQ ID NO: 3830 - DNA, 340 bp, Glycine max
  Clone ID: LIB3028-017-Q1-B1-A7
gcagatacggcctgatgtgtatatcgtattagatgttcctgatgaaattctgatcgacagatgtgttggtagaaggctagacccagtgacagggaagatatatcatctaaagttttttccaccggatacagaagaaattaaagcaaggctgataactcggcctgatgacactgaggagaaggtcaaatctcgcctaaacatatacaagcaaaatgcagaagcagcatcttcctcttactccagcataacacataagattgatggaagtcattcaaaagaagcagttttcaaagaaattgaatctttattatctcaattgcaacaggataaagtgaaaata

SEQ ID NO: 3831 - DNA, 352 bp, Glycine max
  Clone ID: LIB3028-017-Q1-B1-A8
ggttgatgaatccaccccagagtttctctctctcaatcatattcctcttagtcctgatacccttttagaggtgaacggtgttaggagaagcatttactctgatggagaagagtcttcagttctgagaagggatagagtggataagaaatccgaggaagctacctttgtgaacactgatagtatacgttttaccgggagcatgaaatttgaggtttatgataaagagcattgcattctctctggggttctggagatgtctaatagcaatggttttgttggtggatcaagaagttgtgtgaagagatggagtatgatttgtcaaacagaaatgtcacctggttgtggctttttc

SEQ ID NO: 3832 - DNA, 342 bp, Glycine max
  Clone ID: LIB3028-017-Q1-B1-A9
agataaaaaccatggcaataacactcaacaatggcttcaggatgcctatcattggattgggcgtgtggcgcatggaaggaaacgaaatcagggacctaattctcaattccatcaaaattggttatcgccattttgattgtgctgctgactacaaaaacgaagcagaagttggagatgcgcttaaggaggcttttgatagtggccttgtgaagagagaggatctcttcattaccaccaagctttggaattctgatcaaggccacgttcttgaggcgtgtaaagacagtctcaagaagcttcagttaacgtatctagatttatatcttgttcactttcctgttg

SEQ ID NO: 3833 - DNA, 337 bp, Glycine max
  Clone ID: LIB3028-017-Q1-B1-B1
aaggtaggcccttccgagacccgaagcagccagggggatcgatttcaaggccggaggtaagagcaaaaagaccaaaagaacagcacccaagtccaatgatatctatctcaagctcttggtcaagctttatcgcttccttgttcggagaactggcagcaacttcaatgctgttatacttaagagattgttcatgagcaaggttaacaaacccccattgtccttgtcaaggttgattaagtatacgaaggggaaggaagataagattgcagtggtggtggggtctataagcgatgatattcgtgtttatgaagttccaccattgaaaattacagcactc

SEQ ID NO: 3834 - DNA, 402 bp, Glycine max
  Clone ID: LIB3028-017-Q1-B1-B10
ctacttctttgctaaaatccatggtggctggggatggagattgagtttgggaggtgctatggtccctgcccttataatcacaataggatcactagtccttccggacactcccaattccatgattgaaaggggtgatcgtgaaaaggccaaggctcagcttcggagagttcgcggcatcgacgatgtggaagaagagttcaatgaccttgttgcagctagtgaatcctccagaaaagtggagcacccgtggaggaacttgttgcaaagaaagtacagaccccacctcaccatggctgtgctgattccattcttccagcaactcactggaatcaatgtcatcatgttttacgcgccggtgttgttcagctccatcgggtttaaggatgattctgctctaatgtc

SEQ ID NO: 3835 - DNA, 392 bp, Glycine max
  Clone ID: LIB3028-017-Q1-B1-B11
ggggtgcaaggattggtaccatcctgcttgcgtgggcatgactattgaagaagcaaagaaattggaacattttgtttgttcagaatgttcatctgatgatgacatgaagaaaccccatgctacattttctgtatcaccaggatctgatgtcaaggttgagccaaagcggcggaagagatgaccatcacgaagaattaactcatcttgcgaatgcaactcttgctgaatttcgcgggctatgtggtagctgttgtgtgtgtattgtacagcttctaccagaggctataaaaacatcattttatgtatttgactcaggctatgtatgtattggtcttagatttatgacagacattgatctgtttcccttgtgtccagaaagagtaactcctgtc

SEQ ID NO: 3836 - DNA, 399 bp, Glycine max
  Clone ID: LIB3028-017-Q1-B1-B12
ctccggctaacgcattcatggctggtagtggtacgcaattcttccctcacacaagatcttgaaaaaggaaaaaaaaaaacaaagaaaacggggattgcgtgttggttgtgtctcactctctcacagttcttctctttcacaccaactttgtgtttctagtagcatttgatgatgatattgttgttgttgatgagaatgaggccttgtggtaaatttgacactcatattttgaagtgggagaggaaaaagaaaagacaggagagaaaaatatatatatatggatggatgtttatttttattttttttgtgcaaattattaatgcttagttcaaagatagatcattcttctccatgttgaaaaactagctctaaagtttacttgtttcttagctttgtacg

SEQ ID NO: 3837 - DNA, 352 bp, Glycine max
  Clone ID: LIB3028-017-Q1-B1-B2
ctctaccattgagcaaacaaaaagaatctttgggagatcggagaggtcatcgtcgtcatttctgcgctcgagattaacataaggaacaacagtgagcagggtattgtagctgaacgatatggagagaagcactccggtgaggaagccacacacttcaactgcagatctgcttacgtggcctgaaacaccaatttctcattccccaactcatccttcctccgccgttcgttctcaccagccgtcggatgggatcaggaaggtggtatttgggggtcaggtcaccgatgaagaggtcgagagcttaaataaacgaaagccttgttcggattataagatgaaggagataactggt

SEQ ID NO: 3838 - DNA, 374 bp, Glycine max
  Clone ID: LIB3028-017-Q1-B1-B4
aggagctagagaatgatgatgaagtctgctatgtgtgcagtggtggttgtagcacttcttcttctggcggaggtggggcccatggctgaggctgtgacatgcaccccaacagagttaagtccgtgtcttccagcaatcacttccggtgctaaaccttccaatgcttgttgcacgaagctgaagcagcaaaaaccatgcttatgtggctacctcaaaaacgctagcttgaagcagtatgttaactctcctaatgcccgaaaaaccgttgcttcttgtgggattccctttccaacttgttaattaattaagccttcttataattaaagtgtgggatatatatatatatatagataaacagtttaatttatacacac

SEQ ID NO: 3839 - DNA, 339 bp, Glycine max
  Clone ID: LIB3028-017-Q1-B1-B6
ctcaactccacgatatcgatgccctggctaaaatggttgatcctacattggaaggattataccctgtgaagtccctttctcgatttgcggatgttattgctctgtgtgttcagccggagccggaattccgaccacctatgtcagaagtggttcaagcgctggttcggttagtgcagcgtactaacatgagcaagaggacgtttggaactgatcaaggaggatccaacagagggggtgatgaccaagatacacaagacatgtaaatgggaacaaaaaaggcttgtgttgatagaatggcagaaaaggaaatgatagtcttcagatttttatcacttcttt

SEQ ID NO: 3840 - DNA, 370 bp, Glycine max
  Clone ID: LIB3028-017-Q1-B1-B8
ttgggagttaggttctgcacgctctgcttccagcgagtgttctttcttcgtttcaacaccttaatttgcacacgctgcttcttcagcttgagaaatggcacaagaaacctttctattcacatctgaatctgtaaacgagggtcaccccgacaagctgtgcgaccagatctctgatgcagtgctcgatgcgtgccttgaacaggaccctgacagcaaggttgcctgtgagacatgcaccaagaccaacatggtcatggtctttggagagatcacaaccaaggccaacgtagactatgagaagattgtccgtgacacatgccgcgaaattggattcatctctgatgatgttggtcttgatgctgacaaatgc

SEQ ID NO: 3841 - DNA, 365 bp, Glycine max
  Clone ID: LIB3028-017-Q1-B1-B9
ggctaatcctgaagaatatccaaatttgtttgaagattggcaagttgcactagctgtcgaatctaaagctgtggaaacaaggaatgtgtaccctcctgcggagcagtacgtcaaccatgctgacaaatcacacattacccttgttgaagcttttagaagcatgcagattgaggaaggagaggagcatctggagaatggggactctactcatgagttgactgaacgaaatggagaagagcactacacagaggagcaggaggaacagaatggagaggaaggaagccaagatgaggcagttgtagtggatgcagattctacagatggtgcagtactcgttaatggtaacgacgctgacgaagagtggg

SEQ ID NO: 3842 - DNA, 402 bp, Glycine max
  Clone ID: LIB3028-017-Q1-B1-C10
gatagctagaagcaataagatgaaaatgaaagtgcttgttttgtttgttgctacagttttggtagcatatgaatgccatggctcagactaccagaagttccctctccaaatgaaaactgggtttggtgggcaatacagcaatgaggtggcatgtgccagttggaggcttggcgtggaagcaaacaacgtagtcaagtggcaaactgttcctgcagcttgcggagagtacatagctgactacgttctaggagaccaatatagatcagattccaaaacagttaaccaacaagcttatttctatgctaaatccctcaaactcaccaacaaagatgtctttgtcttggacgttgacgacactactctctctaatctccagtattttgctaaccatggatttggtgt

SEQ ID NO: 3843 - DNA, 396 bp, Glycine max
  Clone ID: LIB3028-017-Q1-B1-C11
ctcaatcttcattgtcctgttcttcccctaggtgacacacacacgcagagatcatagcttgtgttagtgaggttagaagataaagaaagaatggcatttgcaggaacaacccagaagtgtatggcctgcgacaaaacggtttatctggttgataagttgaccgcggataaccgagtgttccacaaagcttgcttcagatgccatcactgcaaaggaaccctcaagctgagcaactacaactcttttgagggagttctttactgcaagccacattttgaccaactgttcaaaagaactgggagccttgacaaaagctttgaagggacaccaaaaattgccaagccagagaaaaatttggaagagaaacctgcagcagccaaagtctcaagtatgttt

SEQ ID NO: 3844 - DNA, 401 bp, Glycine max
  Clone ID: LIB3028-017-Q1-B1-C12
gtctgaagtaaatccttttgatgggcaggaggctaagccatacaagaatgaccctgaaattttggcaatgacaaacttgatagcagcctatcagcggaatgaaatattggaatttgagaaaatcttgaagagtaacagaagaaccatcatggatgatccatttatcagaaactacattgaggatctgctaaagaatatcagaactcaagtcttgctgaagctcatcaaaccatatacaaggatcaggattccgtttatatccaaggaacttaatgtgcctgagcatgatgttgagcaattactggtatcacttattttggataacagaattcaaggacacattgatcaagtcaaccggctcttagaacgatctgataggtcgaaaggaatgaaaaagtaca

SEQ ID NO: 3845 - DNA, 339 bp, Glycine max
  Clone ID: LIB3028-017-Q1-B1-C2
gaggaaatgcagaggccaggtaccccactatacaacatcaaggcatacctccctgtcatcgagtcctttggtttctcgagcacattgagggctgcaacatcaggccaggccttcccacaatgtgtgtttgatcactgggacatgatgtcttctgacccattggaggctggatcacaagctgcacagcttgtcactgacattcgcaagaggaagggcttgaaggaacagatgactcctctctccgagtttgaagacaagctttaaatttgtttcatgaattattttactttgaacttagtcgaatttattttctcttgtgaacaatgctactttagattt

SEQ ID NO: 3846 - DNA, 353 bp, Glycine max
  Clone ID: LIB3028-017-Q1-B1-C3
cttagtctccccagacggttacatctccatttgcggctacggttccctcctctccgagacaagtgccagaaccactttccccgacctcgtcaacttccgaatcgcccggttaactggtttccgccgtctcttcaactccgtcggacgcatctttttcactcaccgtgttgccaatatcaaaactcaggaaattgctggcctttctgttgaaccatgtgatggtgaattcgttgttgtagctgtttttgagataaagaacacagagattccagcatttattgaaagggagcgcgaatatcgttttttagctgttgtccctgaaacactagatgggaagccctttatcaatccag

SEQ ID NO: 3847 - DNA, 377 bp, Glycine max
  Clone ID: LIB3028-017-Q1-B1-C4
gaccgtctgaaccaagtgcttcgatgggctttaggttcggtggaaattctttttagtcgacactgtcccatctggtatggttatagtggaaggctaaagtggctcgagaggttcgcatatgtgaacaccacaatctatccagtcacttccattccccttctcatgtattgtaccttacctgctgtctgtctcctgactaacaagttcattattccacagattagtaacattgcaagtatatggtttatctctctctttctttccatctttgcaaccggtatccttgagatgaggtggagtggtgttggaattgatgagtggtggagaaatgaacaattttgggttaatggtggtgtttcgggccatccttttgccgg

SEQ ID NO: 3848 - DNA, 281 bp, Glycine max
  Clone ID: LIB3028-017-Q1-B1-C5
gatggaagcacttgcaattccacaatcaaagtgttttcaaagcgctatccagtttgccatgtctaaaaggttgatagcagctcctgaaccaattcatgctatagctacactcatttgggaacctattcattgattagaggctggagaagccaaagttattctgacagcaatgtgtgaacatggacattttgatctgccagcttacgaaaagtccttgcagagtaactcgtttgacctctcattcacaaacgaccaaatgaagccttcattggccattattc

SEQ ID NO: 3849 - DNA, 339 bp, Glycine max
  Clone ID: LIB3028-017-Q1-B1-C6
ggaacactcacccaggaatcatttggggattgctaggctggtggggaaccttaggccatgcatttggtgtctctagtatgccaggatttggtgccagtctcagcttgccacaagcactttccaacactagaactgatgggctaggagcactctacagagaagggacagcttcctttcttaactccttggtgaacaacaggttcccttatacaacccagcaagtcagagacagatttatagcatctcttgcctcaaataaggcagcagaagcgcaagccaacctcttcaagatggccaatgaggggcgaatgaagccttgagcatgatatagttaatttg

SEQ ID NO: 3850 - DNA, 363 bp, Glycine max
  Clone ID: LIB3028-017-Q1-B1-C7
atttaccagctatacttgttccttttgaaggttagaagtgctacaatacaaacaatggcagctactcaggaagatgtgaagcttttgggtattgtgggaagcccatttgtgtgcagggtccagattgcccttaagttgaagggagttgaatacaaatttttggaagaaaatttgggcaacaagagtgatttgcttctcaaatacaaccctgttcacaagaaggttccagtgtttgttcacaatgagcagcccatagcagagtctcttgtgattgttgaatacattgatgagacatggaagaacaaccccatcttaccttcggatccttaccaaagagccttgggtcgtttccgggccaaattc

SEQ ID NO: 3851 - DNA, 391 bp, Glycine max
  Clone ID: LIB3028-017-Q1-B1-C9
ggctgggcctggtctcttaaccagttccgctccttccgttggaaccttaccgccagcgctgcaaggcccaaccctcagggctcataccactacggtcagattaacatcacccgcaccatcaagttggtcggcacccgaagcaagatcggcggcaagctccgttacgcactcaacggtgtctcccacgtcgaccccgaaacccctctcaagctcgccgagtactacggtgtcgccgacaaggtcttcaagtacaacctcatctctgacgccccagacgccgccatcgcctcccgcgaccccatcatcgcccccaacgtcatcaacgccaccttccgcaacttcatcgaagtcatcctcgagaaccccaccaaggtcacccagtcctacaacc

SEQ ID NO: 3852 - DNA, 376 bp, Glycine max
  Clone ID: LIB3028-017-Q1-B1-D1
gaaaaagaggcaaaagtgtaacatctcaaccattatgcttgagatggatcggatgctaagaccgggaggacgagtgtatatacgcgacaccacacttgttataggtgagcttcaagaaattgcaactgcattgggatggtcaactaccataaatgatgtacgagagggtcgctattcaagctggaagatattaacgtctgataaacggttctgaattgctcaattgcgtcagtaacttatggaacaccatatatggtactcccaactgaaatctcattttgtgccagaaatgttggccaaaactaacccataatttgccagaaacggtagtcgtaattacaatgttcaatcccaactaacaagttttcctctaaaa

SEQ ID NO: 3853 - DNA, 404 bp, Glycine max
  Clone ID: LIB3028-017-Q1-B1-D10
caggcagccaaggaagcagctgcagcagctaataagaaagcttttgaggcaaattttgaaaactgttcggaggatttactagcagcaagagagcttgctgcatcttctgctgaagccgtggcaaaatccagaaaggaaatgagacagaaacgagcctatgaggcaaaaaatacaaggccagctcaatctgctgcagaggcctttggccaaatgtctaataaaaaaaggaatttgcagggtctcaaatctaaagtcaattttgaactcctgaatgaattgtttgatgaaatggaaaataccgatgatctcaagaaaccgaagaaagtacggtttgatctgcccctagataatgatgacaatataccgtccaaggttgaggacaaaaatgaagatgagatgggatt

SEQ ID NO: 3854 - DNA, 401 bp, Glycine max
  Clone ID: LIB3028-017-Q1-B1-D11
gcttctcactgatctccattcccattccatggcttccactgaatcatcccctttcaagaaaattcagattcaaagggatgacactacatttgacgcatatgtggttggaaaagaggatgctcctggaattgttgtgattcaggagtggtggggtgtggattacgaaattaagaaccatgccgtgaagatttctcagcttggtagtgggtttaaagctcttattccagatttatacagaggaaaggttggtctggatgttgctgaagctcagcatttgatggatggtcttgattggcaaggtgctgtgaaggatattgctgcttcggttaactggcttaaagcaaatggctcaaagaatgctggtgtaactggattttgtatgggaggtgctctctctattg

SEQ ID NO: 3855 - DNA, 367 bp, Glycine max
  Clone ID: LIB3028-017-Q1-B1-D2
acattacaggcatggttaacttatttctggagaagagctttgtttcatggtgtggaagaagatattgcagaagaacgccttcagttttggattgcccgcagtggacagtcaccaagttcacatgatgctgttgatgttgagcgaggcttgttggagttgaggaagctgagtatagaacagcaactttgggaagcatcacggaagggaattgatcagcttcaggggtcagcagatgctaatcataagcatgcctctgactctgatgcctcatcctgattgtctgagcccccattagttcttaatcgattctttgtcctatatgtatacttttgtttttgttttgttttccacacaagttttccaaacc

SEQ ID NO: 3856 - DNA, 358 bp, Glycine max
  Clone ID: LIB3028-017-Q1-B1-D3
ggacactggtggaaagatcaagaagggcgccggaggaagaaagggcggcggcccaaagaagaagccggtttcaaggtccgtcaaggccggtctccaattccccgtcggaagaattggccgttatttgaagaaaggaaggtacgcccagcgtgtcggtaccggtgctcccgtttacttggccgcagttctcgagtacctagctgctgaggtgcttgagttggctgggaatgctgcacgtgacaacaagaagaacaggattattccgagacatgtgctattggctgtgaggaacgatgaggagttggggaaattgcttgctggtgtcaccattgctcatggtggtgttcttccgaacatt

SEQ ID NO: 3857 - DNA, 350 bp, Glycine max
  Clone ID: LIB3028-017-Q1-B1-D4
ttcaagggttcatttaccaagggaagggttttgtgatgattgatgagtcagtttatgaataaaggctgttggagtgaggatgtagtcattcattgtgggaagggagtgacaaccatcattggaggaggtgactccgttgccgctgtggagaaggttggacttgcagacaagatgagccacatctccactggtggtggtgccagcttagagcttcttgagggaaagcaactccctggtgtccttgctcttgatgatgcttgagcaaaaatcattcgttcctttgaagtttgtgctttatattattattatggttgggtttcagccaacagtggattaaggtacaatgagag

SEQ ID NO: 3858 - DNA, 98 bp, Glycine max
  Clone ID: LIB3028-017-Q1-B1-D5
cagtagtagtacattatacacaggttctcactcgttatagcactacaaaattgaattcctataacgagtgagaacctgtgtataatgaactactactg

SEQ ID NO: 3859 - DNA, 348 bp, Glycine max
  Clone ID: LIB3028-017-Q1-B1-D6
atgaagacgagttgagtcacttcgttaatactggcgcacttgatgagctcattcttgccttctctcgagagggacccaccaaggagtatgtacaacataaaatgatggagaaggcttcagaaatttggagcatgatatcacaaggagcttacatttatgtgtgtggtgatgccaagggcatggccagggatgtacaccgcgccctgcacacaattttgcaagagcagggttctctcgatagttccaaggctgagagcatggtaaagaatctacaaactactggcagatatttgcgcgatgtatggtgatgatatctgaatgcaagccgtggggggtgacaagatatta

SEQ ID NO: 3860 - DNA, 346 bp, Glycine max
  Clone ID: LIB3028-017-Q1-B1-D7
attttactgtttatagaaattgtgaagctatactgttgtaattgtcatgtaaattgttccctttttcatcttacttgatttggtaaactccggttacttgtatccaaataagatgggccatttgtattgcgggggctttgtataattgtacaattatctacttgtaagaagttcagattcgggcgacaacatttgtaatgcagaattaggtcattaacattgtaaatcttctggcgatgattggaatatcaatgtgaagacgctatatgacttctgctatgacaatatcattgtggttgtcaaggtatttttgaagaaatatcgtggatttacaaagaatctggtt

SEQ ID NO: 3861 - DNA, 373 bp, Glycine max
  Clone ID: LIB3028-017-Q1-B1-D8
cttcttcttctcttaaaagttattaagagcttttgcttttctttctgcgcgcttttcccaattaagtagttcttccttttctcaaagcaaaaaaaatgttcatcgagagtttcaaggttgagagtcctaacgtgaagtacacagagactgagattcagtccgtgtacaactatgaaaccactgaacttgttcacgagaacaataatggcacttatcagtgggttgtcaagcccaaaactgtcaaatatgaatttaaaaccaacacccatgtccctaaactaggggtaatgcttgtggggtgggggggaaacaatggctcaaccctcactggtggtgttattgctaaccgagagggtagttcatggggaagaaa

SEQ ID NO: 3862 - DNA, 342 bp, Glycine max
  Clone ID: LIB3028-017-Q1-B1-E1
ttaagactggagctccatgcaggtcagagcgtcttgctaaatataaccagctcttgagaattgaggaggagcttggtgcggaagcagtgtatgctggagctaacttccgtacccctgttgagccctactaaagttttcaagtggaaaaaacctggagatccccacgagtttgagcaatgagatttggatgcgcggttttagttgtgatcaataagtcgatagttagaacaatagtcttggtataaggaccttgccaataattttttagttctgattcacagagctaagacagttccgtcttagactttaaaagttttgatatttagctttaatacttgaagt

SEQ ID NO: 3863 - DNA, 399 bp, Glycine max
  Clone ID: LIB3028-017-Q1-B1-E10
gtgaattttgcatacgctggttcaactgcacttgataaggattttttagtacaaaaaagaatcaatatagaggaagctactttttcattgagtgctcaatttgattggtttaaaggactcaaatcctccctttgtacaagcaaagaagagtgcgataattacttcaaaaactcattgtttctagtaggagagattggtgggaatgacatcaatgcactcatcccatataaaaatattacagaacttcgagaaatggttccatcaattgttgaaacaattgccaataccacctctaaattaatagaagaaggagcggtagaactagtggtaccagggaacttcccaattgggtgtaattctgctgttttggcaatagtgaatagcgaaaagaaagaagac

SEQ ID NO: 3864 - DNA, 400 bp, Glycine max
  Clone ID: LIB3028-017-Q1-B1-E11
attattagtgcagtgctcaccagcagggcaattttccaaaggatgaagaattatactatctatgctgtgtcaatcaccattcgtatagtgtttggtttcatgtttattgcattgatttggaaatttgattttgcacccttcatggtgttgattattgccatactaaacgatggtaccatcatgacaatatccaaggatcgagtgaaaccatctccaatgccagacagctggaagctgagggagatatttgccactggtgttgtgctaggagcttacatggcactaatgacagtagtatttttctggctcatgaaggataccgacttcttctcggacaagttcggtgtgaggtctataaggaacagccccggagaaatgatggcagccctgtacctacaag

SEQ ID NO: 3865 - DNA, 400 bp, Glycine max
  Clone ID: LIB3028-017-Q1-B1-E12
tttcaagtgcctaacaaaattgtattgtggaacctaactaccggggatttcaaggtcattcctccaacctagttgaatttgtaccacctaacgaggaccctcacattgttcttgatggatttggttatatgcgtggtagagatgactataaggtgattattaggcaagtacattttatccaaaatgagatcggtaccctgcaatgactccttatgggagatatatataacctaagaaataactcttgaaagaaacttgatgtccatatgctatatcattgtgttgataatgactgattatacttggatggaatgtgtcattggttgggtgaaaataatgaagataaggatgaagaatgcttggtgtcgtttgacttgagcaatgaggtgttctttccaac

SEQ ID NO: 3866 - DNA, 350 bp, Glycine max
  Clone ID: LIB3028-017-Q1-B1-E2
atatactagggtttcaagaaatagtgcctctaaaagcatcaaatgtattggggtccgaaaacaatgagatttctatgaaatggaattccataatcagggaagccttgaacaagaaaataacacatcaaagggacaaagatgctaaaaaacaggagctaaagaataattttcccaataagaaagaaaatccagctaagtgctgtgatgccccacatgatttccaatgtatcattagcaagcaaatggttggattattcatatctgtgtggattagaagagatctttgtccattcattcggcatccaagcgtgtcatgtgtaggttgtgggataatgggctgcttaagaaac

SEQ ID NO: 3867 - DNA, 400 bp, Glycine max
  Clone ID: LIB3028-015-Q1-B1-D6
aacttctggtctctactatgactgttcagcccatatgctctgggttggggaacgaaccaggcagcttgatggtgcccatgtcgagtttctaagaggagttgctaatcccttgggaattaaggtaagtgacaagatggatccaaatgagcttgttagactcattgagatcttgaatccccaaaacataccagggagaataactgtgattacgaggatgggagctgaaaatatgagggtgaagcttccacatctcatcagggcagtgcgcagagcagggcaaattgtcacctgagtcagtgatcctatgcatggaaacaccattaaggctccatgtggtcttaaaactcgccccttcgatttcatcagggctgaagtgagagcattctttgatgtgcacgag

SEQ ID NO: 3868 - DNA, 419 bp, Glycine max
  Clone ID: LIB3028-013-Q1-B1-C8
cccagatgaagatgactcgtgttcctattcatggcggattctcttggctatcattcaatgaagaaacgaccactactgatgatagttccttcaccatgactggcctgttggagcagttaaatactacaagagatttatctgactacttgtggtactccacagatgttgtgcttgatcccaatgaaggatttctgagaaacggaaaggatcctgttcttactgtgttttctgctgggcatgctttgcatgtttttataaatggtcagctatcaggaactgcatatggaagcttagaattccctaaactgacatttaacgagggagtgaagcttagagccggtgttaacaagatctctctactgagtgttgcagttggactcccgaatgtgggtcctcaatttgaaacatggaatgctggt

SEQ ID NO: 3869 - DNA, 240 bp, Glycine max
  Clone ID: LIB3028-013-Q1-B1-D10
gcaagtgacagtgatcaagtgcattttttgtctggtcaattactgataatctttcagtaaattatatatttggggatatagggtaacgacgatcattttgataacgaacccttgcatctgtaacaaatttaattgatgctgaattgaggcaaattcaatgcataatctatcctgtagaattttttgctgcaatttttgtatgacattattatcattaataaaatgttggtattgtctgtt

SEQ ID NO: 3870 - DNA, 384 bp, Glycine max
  Clone ID: LIB3028-013-Q1-B1-D11
tccaaaaccagacgacttgcacggaccttgtaaaggcagcagatcctaaaattgcacaggcaaagacattccaagagcttgcacaggcagtgctagaatttgccgtgaacaagggaatagagggccaaaccttcctcaagggcttggcactgattgagcaatcaccagccattaaggaatgtgcaaactttttctatgatggggtggttggatccttccgtagtgccttacgtgagttgaaagaagatgctcagaccgctagctatgatgccaaagcggcttatgatggccctgacggttgcaatagagccttggccgctgaaaatatcaataaccctgctattactgctcttaacagcgaaatagcgttgcttagccaaattg

SEQ ID NO: 3871 - DNA, 382 bp, Glycine max
  Clone ID: LIB3028-013-Q1-B1-D12
gctggtggacattctcgacgacgttggaatcggcgagcgcgtgagccgcacgctctcgctgaagcgtccctcggggaggccgcacgggaaggttgaggttagcgtgacaatcagggagcccagctaccgtgcgcagggtgggtacaacgcgcctccttacggcgtgagggattattcccctgcgccgcaggggtatggtgggtatcctccatatggggccccaccacaacaggcgtattattccgctccaccaagtgggtatccttataatgcgccaccgcagccttataatgcgccgcctcagagtggctacggctataatgcgctgccgcaaacggcgtcgtatgggcaggggagcggttacgggtacgcgccacaagag

SEQ ID NO: 3872 - DNA, 375 bp, Glycine max
  Clone ID: LIB3028-013-Q1-B1-D2
aggatatgctacaagaaaggagatggaagagcacactgaacgacaaaaggtagcattgagtcaaatgcttcaggcattgagggaagatctaactcttccaccgaagaccgagaaagatgggagcaatcagaagccgttcgtagcacagaggaagaaatttggattcattcaaatatcactccccttggcaaagccaaataagaaaaggggatgagatttcaatccttaatccctatgcatggatgaatagccactactcatgcatcttcatgtcttcccatgccattctttattggttcatgtgttcactttcatttatatatgtagatgtttgtgagtgtctgattccgtaaaatatgttgtgtttgaatgatt

SEQ ID NO: 3873 - DNA, 359 bp, Glycine max
  Clone ID: LIB3028-013-Q1-B1-D3
cgcaccgtcgattgcttccgtaagtagcctttcgcatgggaaacgctaacggcagagaagatggatccattcccggccccgccgatccctccgtcgccgaccccgccgcacgtggaactcacgcgccggactcccgccccccggttcgcgccttctcctccgattcaatggccaatagcccgccgcagagccctcgccgctccagatcgccgatcctcttcggtcctcaggttcctctagctccattacaaagaggtaatggccctccttttctcaatcaaatgtggcagaatgagtctcatggtattgttaatcaacttcctgagcaagggatccctgtcatgattacatggaactat

SEQ ID NO: 3874 - DNA, 396 bp, Glycine max
  Clone ID: LIB3028-013-Q1-B1-D4
acaaaatgtgtcttgttgtaaaggagaaatccatagtaatttggagcaatcagatcagaaattatgcttggtatcacttttaaggtattagttattataaacaccaccaacaaagggctacataattatcatccacgacaatttttaattggttgcacatgtgaaaatccttgagactgtttgtacgtatgtagtatttgcttaataatattacatttctactcagataaatttcttaccatcatgtaatgttgttgttgagacatttttgaatgaataaatgcaggcagttacacctgcaagacctacacctacaagacctgcagctcctacaaaacctgcacctgcagtacgacgtcaaaaatggtgtgtgccaaaggcagattgcaaccatcc

SEQ ID NO: 3875 - DNA, 341 bp, Glycine max
  Clone ID: LIB3028-013-Q1-B1-D5
gtgagctataagctagtttatcgtgaggagaatatgaagttgtttgttttctttgttgctgcagtagttttggtagcatggccatgccatggcgcaggctaccaaaggttccctctccgaatgaaaactggctatggtgagcgttcttcggaggtaaaatgcgcaagttttaggcttgctgtggaagcacacaacatccgagcctttaaaaccattcctgaagagtgcgttgaaccaacaaaggactacattaatggcgaacaatttagatcagactctaaaacagttaaccaacaagctttcttttatgccagtgaacgcgaagtccatcacaacgacat

SEQ ID NO: 3876 - DNA, 415 bp, Glycine max
  Clone ID: LIB3028-013-Q1-B1-D6
gtttgttgttgtaactcgttcttcttcttttgttgttctgtgtttgtgtttgttttttctctcacctgaaaatgtcttgctgcggtggtaactgtggttgcggaagctcctgcaagtgcggcaacggctgcggaggctgcaagatgtacccagacttgagctacactgagtcaaccaccaccgagaccttggtcatgggagtggcacctgttaaggctcaatttgagggtgctgaaatgggtgtgcccgctgagaacgatggctgcaaatgtggaccaaactgctcctgcaacccctgcacttgcaagtgaggtgttgggagagcaagcttcaagcagagatagcccttaattaggaataatgataaactattaatgtgtacctaaaaacttaggttttaggtctgtgatggttt

SEQ ID NO: 3877 - DNA, 399 bp, Glycine max
  Clone ID: LIB3028-013-Q1-B1-D7
ttaatactcactaataaaaagcgaaggggtttccgagttttgaaggagagagagagagacatttgtaacgacaagaagcagaaggtatagagggagtggtcaaattacggatcaggattcaggaatttccattctgagacacacagaagcacagaaagaaactccttttaatttttcaattttcaagtcaagatctgacatcatagaaaaatgaccatggatgtcgttcagctgcagaggaagctgcgcgaacaccaagccgctatgtttcaacagggttttttggatgatcagttcagccagcttcagaaactgcaagatgagagcactccagattttgtgattgaggttatcactatgttctttgatgaatctgagaatctcctcaaaaacatggca

SEQ ID NO: 3878 - DNA, 418 bp, Glycine max
  unsure (1)..(418): unsure at all n locations
  Clone ID: LIB3028-013-Q1-B1-D8
ggagtctaaaggtgggaaaaagaagtctagtagtagtagtagtaaatcattgttctacgaagctcccctcggatacagcattgaagacgttagaccaaacggtggaatcaagaaattcagatctgctgcttactccaactgcgctcgcaaaccttcctgatatccatccagattgatagttcattgcatgcaaccatagttttattaggttttttcttctttgttttcaattaggtttttgctgctctccttcaaactccgtctttccgaatcctctctttgtgattgtgttctgttctgcttcctaccgcgatagtttctcttctgaagcatggccatggcggtttctgcaattggttctgaaggtttcgagaagaggctggaaatatcctttttnangccgggactttttgctgac

SEQ ID NO: 3879 - DNA, 199 bp, Glycine max
  Clone ID: LIB3028-013-Q1-B1-D9
agaatttgacattttatctttcgcatgggttacctagtttagtcgggcaatgactgagacatttgtcaccacatgaagcatctcgttgggatgggagttgttatcttactgttcaggatgcagggtgttccgttctgagacccacagaatctcagagcgaatctccttttagtttttcacttttcatgtcactatcaga

SEQ ID NO: 3880 - DNA, 339 bp, Glycine max
  Clone ID: LIB3028-013-Q1-B1-E1
attccgctcgagctgctttgtgcacttcctgtcagatgcttgtggtttggattcagaatcaactataacacaagaacaccatcgagatagtattcacctgggtggatcagctgtcacaaagcttgccatgtcgatctttgatagtcattattagattgtacatagcatttatggattgccaaacatcacgtttactgttggtcacaaacctttcaccctcacccctgagcagtatattctgaaaactggacaaggcattgctcaactttgccttagtgggtttattgcttttgacattcctcctcctcaaggtcctctctggattcctggagatgtttt

SEQ ID NO: 3881 - DNA, 379 bp, Glycine max
  Clone ID: LIB3028-013-Q1-B1-E10
ctcaaggagcatgtgatcaagccggtgatcccggagaagtaccttgatgagaagaccattttccacttgaacccctctggccgttttgtcattggaggtcctcacggtgatgctggtctcaccggccgcaagatcatcatcgatacttacggaggatggggtgctcatggtggtggtgccttctccgggaaggatcccaccaaggttgataggagtggtgcttacattgtgagacaggctgctaagagcattgtggcaagtggactagccagaaggtgcattgtgcaagtgtcttatgccattggtgtgcccgagcctttgtctgtctttgttgacacctatggcaccgggaagatccatgataaggagattctcaaca

SEQ ID NO: 3882 - DNA, 376 bp, Glycine max
  Clone ID: LIB3028-013-Q1-B1-E11
ctgttcgccttttcgtgactttctcaaactccatacaacacactgcttctgcttttattttcctttctttctcctttcctttcctttcctttctctccattttccccgtaccaccattaaaaccactcccaaacacactcacacagacactcaaacgaaaccctcgtcgcaatggcggaggaggaaaaacacgagcagctccaagaagagcaagaccctcacaagctcttccgctcctacataggcctgagcttctccatgttcctcgcaatgctggccaacaactccgtcccggcgctgcagggcaaggtacgctcactctccctgcgcgcggcggatgcggccgaggagctccggcagatgaagtcgcggcggc

SEQ ID NO: 3883 - DNA, 376 bp, Glycine max
  Clone ID: LIB3028-013-Q1-B1-E3
aagcaaagtttcttcctttctctgccctttgtcttctctgacacatttggggccttgttgattgtgtttttgcaaaagggtatggcgaaggacgttgaggttgctgagcgtggctccttctctgggaaggactaccaggaccctccaccagcaccactcattgatgctgaggagctcacaaagtggtccttttacagggctcttattgctgagttcattgccactttgctcttcctctacattactgtgctcacagttatagggtacaagcaccagacggatcatgctgatgcgtgtggtggggttggcattcttggcattgcatgggcctttggtggcatgatcttcatccttgtctactgcactgctgggattt

SEQ ID NO: 3884 - DNA, 337 bp, Glycine max
  Clone ID: LIB3028-013-Q1-B1-E5
cagagaggcatgatgtacaaccaaaactaccccacctaccctcagttcaagaacttgcacatagataacaccaaagggggtagcaaggacaataagtctcagaatcacaagggtggtgctcagaaaggtggtggtcaactagcacacttccaaagtgctaatggagggtcaaaagtaccccccaagaatcagaaatctgtcgacttcaacttatctgaagatgaacttgatgagagtgattttgatgaatttgatgatgactatgatgagtttgaagatgattttgatgaagaggatgaagaggaagagtatggtcaaggtcatggtcatggccatg

SEQ ID NO: 3885 - DNA, 397 bp, Glycine max
  Clone ID: LIB3028-013-Q1-B1-E6
taaccattgaagaagtgcaatttcgtcctctaacactcttccaaatcatggctagctcactgcttgtgagggttgccagctgcatggttgtggtgtggatgtttagttttgggcacataattcccttggcagaagctgaaattccatgtggcagggtgcaaatcactgtggctccatgcatagggtacctaaggggtcctggtggaggtgtccctgcaccatgctgcaatggggttaagagcataaacaaccaagccaaaaccaccccagatcgtcaaggggtgtgtaggtgcctcaaaagcactgttttgagcttggctggactcaatcttgcaaccctttcagccctccctagcaagtgtgggatcaacttgccctacaggatcacccccaccat

SEQ ID NO: 3886 - DNA, 343 bp, Glycine max
  Clone ID: LIB3028-013-Q1-B1-E7
ccctgttgacggaccctaatcctgacgatcctttggtccctgaaattgcccacatgtacaagacagacaggaacaagtacgagtcaactgccagaagctggacccagaaatatgccatgggttaagtgaccttgtggtatgtttgagggagagcctttctactctcagtgtttaggtctctcagcccttgtaggaatatttgtcgttttaaatcatgattaaggcccctccagttgaagatgaatgggggaaaacgtttctcctgctgtttgtattgcaaatgttcatggtaatttagaacagtgaaatgttgccccaattaaatgttatgcccaagttttta

SEQ ID NO: 3887 - DNA, 422 bp, Glycine max
  Clone ID: LIB3028-013-Q1-B1-E8
cgaggagttagagcatcagattttggtcccaaagcaagcttttggatggattttcctaaagaaggttctcaattaacacctactcatcagtcagatgattttaaatggaaagattattgtcccatggtgtttaagaatttgagaaaactggtcaagattgatgctgccgattacatgatgtccatttgtggaaacgatactctgagggaactatcttctccggggaaaagtggtagtgtcttcctcctgtctcaagatgatcgtttcatgatcaagacactgcgaagatttgaagtcaaagtcctttcaagaatgcttccagactatcatcatcatgtgaagtcatatgaaaatacacttatcacaaaaattttttggtctgcacaggattaaaacttcaagtggtcaaaagtttcgctttg

SEQ ID NO: 3888 - DNA, 337 bp, Glycine max
  Clone ID: LIB3028-013-Q1-B1-E9
cgaggagttagagcatcagattttggtcccaaagcaagcttttggatggattttcctaaagaaggttctcaattaacacctactcatgagtcagatgattttaaatggaaagattattgtctcatggtgtttagaaatttgagagagctgttcaagattgatgctgccgattacatgatgtccatttgtggaaacgatactctgagggaactatcttctccggggaaaagtggtagtgtcttcttcctgtctcaggatgatcgtttcatgatcaatacattgcgaagatctgaattcaaggtccttctattaatgcgtccagactatcatcatcatg

SEQ ID NO: 3889 - DNA, 173 bp, Glycine max
  Clone ID: LIB3028-013-Q1-B1-F1
aggtttaactgccaaagtgattgaccccacaatgattatggatgatgtttatggtgatttttttgattttgcatctatgttggtatccaacgttgacaataactatcccaatgcatcaaatagatttatcaagctgctagctattgagaaaacttgcagacaatctggtctct

SEQ ID NO: 3890 - DNA, 375 bp, Glycine max
  Clone ID: LIB3028-013-Q1-B1-F10
cttccatttctctcgcggtctctcttgtcttccatgccgtgacttgcttcaacgtctatatgctgtgactgtcactgctatagcgacaaatttcacacaaatggcgtgttgctataagtaccagtttttgtttcttcactctcattccttctggaggaagcttccgttcccgcgccacgttaccgcctcgggtttcacttgcaatcttcaaaccccgtcgctgcttctttcttcgcgctcgcgcgcgctactctctaagagctacttcagaatcgccgggagccgttcccgcaactccgcgaagtgccgccgcgtcggggacgttgattcccgaagccggaatcggaatcggaaccggaaccgctcaagcgctgc

SEQ ID NO: 3891 - DNA, 383 bp, Glycine max
  unsure (1)..(383): unsure at all n locations
  Clone ID: LIB3028-013-Q1-B1-F11
cgggccgtgctcgacgatggcggccccggcccagcctccaacggggacgcggcggtggctgcaaggcccaagaccaagccgaaggacggggaaagcggtggcggtggtgacggcgaggaccccgagcaggccaagctccgggccgggctcaactcggccatcataagggaaaagcccaacgtgaagtggaacgacgtcgcagggttggagagcgccaaacaggccttgcaggaggctgtgattttgcctgtgaagttccctcagttctttactgggaaaagacgaccctggagagctttcttgttgtatggacctcctggaacgggaaaatcatatttagccaaggcagttgcaacagaagctgagtccacgtntttcagtgt

SEQ ID NO: 3892 - DNA, 380 bp, Glycine max
  Clone ID: LIB3028-013-Q1-B1-F12
aaacaagctgtggctgtaaaaagtcagttgcagctgattgctagacccatgtacagtaacccacctctccatggagcacttatagtttctactgtccttggtgatccagatttgaagaagttatggcttaaagaagtcaaggttatggcagaccgcatcatcggaatgaggactacactacgagaaaacttagaaaagaaggggtctactttgccatggcagcatataactaatcagattggtatgttctgctacagtggattgacacctgaacaggttgatcgtatgacaaacgagtttcatatttacatgacccgtaacggtcgtatcagtatggctggtcttaatacgggcaacgttggatatgttgctgacgctat

SEQ ID NO: 3893 - DNA, 417 bp, Glycine max
  Clone ID: LIB3028-013-Q1-B1-F2
ttatcatttctccatttccattttctctctcacttttcaagaatcgtaagctatgggaaagtcttacccaactgtgagtgctgattaccagaaggccgttgagaaggcgaagaagaagctcagaggcttcatcgctgagaagagatgcgctcctctaatgctccgtttggcatggcactctgctggaacctttgacaagggcacgaagaccggtggacccttcggaaccatcaagcaccctgccgaactggctcacagcgctaacaacggtcttgacatcgctgttaggcttttggagccactcaaggcggagttccctattttgagctacgccgatttctaccagttggctggcgttgttgccgttgaggtcaccggtggacctgaagttcattccaccctggaagagaggacaag

SEQ ID NO: 3894 - DNA, 383 bp, Glycine max
  Clone ID: LIB3028-013-Q1-B1-F4
cttacttaaactcaggaattcggcccaaaaaataaggcaatgaacctgatccaggcggttccctacaacccctacgggggaggtcctgccggcctcaagcacgttgaagttgccgttcccagtccaaaggcaaatgaggttttaatcaaactggaagcagttagcattaaccctattgattggaagattcagaagggtcttctccgtcctttatttctccccagaacctttccccacataccttgcactgatgtggctggagaaatagttgagatcggaactcaagtcaaagatttcaaagttggcgaccaagtccttgctaaactcactcatcaatatggaggtgggtttgccgagtttgctgtggctagtgagagcttaac

SEQ ID NO: 3895 - DNA, 388 bp, Glycine max
  Clone ID: LIB3028-013-Q1-B1-F5
aattctttcatcatcaatgatataaactccttgctcctcttgactcattcattcactcccaatatgatggaattggaagccaccgccgctacttccccaccttctcgcgttctcctcatctccgccggtgccagccacaccgttgcccttctctctgggaatgttgtgtgttcgtggggtcgcggagaggacggacagttaggccatggtgacaccgatgataggcccttacccacgcagctcagtgcattggatgcccaacacattgattctattgcctgtggagctgatcatacccttgcgtattccgaatcacgcaatgaactctatagttggggatggggtgattttggaaggttgggtcatggcaattctagtgatttgctca

SEQ ID NO: 3896 - DNA, 387 bp, Glycine max
  Clone ID: LIB3028-013-Q1-B1-F7
tccagcagcaatggtgtacgtcaaggctcagaaatcaaaagcctacttcaagagatatcaagtcaagttcaagagaagaagagagggaaaaaccgattaccgtgccaggattcggttgattaatcaggacaagaacaaatataacactccgaaataccgatttgtggttcgctttagcaacaaggacattgttgcacaaataatatctgctagcattgccggcgatttagttcttgctacagcatattcacatgagctgccacgatatggtcttgaagtaggacttacaaattatgcagcagcttattgcactggtctcctgttggcccgaagagtcctcaaaacacttgaaatggatgaggagtatgaaggaaatgttgaggctac

SEQ ID NO: 3897 - DNA, 193 bp, Glycine max
  Clone ID: LIB3028-013-Q1-B1-F8
taggttaacaccaatgacactgataccgttctgacccggatacccatctacgctccgccattgccttcttcttccagttccagggctgtgggggcatcggacggtcagtccttcccgatatgcgggaatttggcactttggagcactctcttgggtttcgtgttcagcatagtagtcgtcgttcgttaattct

SEQ ID NO: 3898 - DNA, 388 bp, Glycine max
  Clone ID: LIB3028-013-Q1-B1-G11
gcagagtagagcagcacagaagagggaaaacggcaccgccgccgtagaagaaaacaaccatggtgcacgtctccttttacaggaactatgggaagacattcaagaagccgcgtcgtccgtacgagaaggagcgtctcgacgcggagttgaagctggttggtgagtacgggcttcggtgcaagagagagctgtggagggtgcagtacgcgctcagccgcatccgcaacaacgcgcggaacctcctcaccctcgacgagaagaacccgcgccggatcttcgagggagaggcgctgctccgaaggatgttccgttacggtctcctcgatgagacacagaacaagcttgattacgtcctcgccctcaccgtcgagaactttctcgagcgccg

SEQ ID NO: 3899 - DNA, 381 bp, Glycine max
  Clone ID: LIB3028-013-Q1-B1-G12
agctgctgttcttgcgcgtgaacaagcctcaggtaagccaaaaccatggttaagcataacaatgttatcccaaacggacacttccgtaagcactggcagaactatgtgaagacttggttcaatcagccagcacggaagacaaggagacgattggctcgtcagaagaaagctgtgaagatattccccagacctacggctggacctctcaggcccattgtacatggtcaaactttgaaatacaacatgaaagtgagaggtggaaggggattttctcttgaagaactcaaggcagcagggattcccaaaaagcttgcaccaaccataggtattgctgttgatcatcgtcgcaagaaccgttctttggaaagtctgcaagctaat

SEQ ID NO: 3900 - DNA, 391 bp, Glycine max
  Clone ID: LIB3028-013-Q1-B1-G2
atccggcccaaaatcaatcctggtccaacctttttttttccttttaaattttccttaaaaattcccaaccgaacaaagatcttcaacaaaccggttaagtttgtgtagtttggtaagatgggtggtggatttagagtgcttcacttagttagaccatttctctcgtttcttcctgaagttcagactgctgacaggaaagtgccatttagagagaacgtcatatatactgtgatctctctgttcattttccttgtttgcagtcagcttcctctgtatggcatacactcaacaacaggtgctgatccattctattggatgcgtgttatccttgcttcaaaaccgtggaactgttatggagctgggaatcacccccattgtgacttctgggctg

SEQ ID NO: 3901 - DNA, 363 bp, Glycine max
  Clone ID: LIB3028-013-Q1-B1-G3
tttgccttcaaatctcactgccagcagaaaccccagcttggattatggattcaagggagctgaaattgccatggcatcttattgttctgaacttcaatatttggcgaatccggtgacaagccacgtgcaaagcgcggagcaacacaaccaagatgtgaactctctggggctgatttcatcaaggaagactcatgaggctattgagatcctcaagctcatgtcctccactttcctggtcgccctttgccaagccattgacttgaggcatttggaggagaatttgaagaacacggtcaagaacgttgtgagtcaagttgctaagaggactctcaccacaggtgtcaatggagagcttcacccttc

SEQ ID NO: 3902 - DNA, 357 bp, Glycine max
  Clone ID: LIB3028-013-Q1-B1-G4
tccaaccccaatcttaagaagaatttcaagccaattccttgaaccaactttaaccacaaaaggttaaaaaatacgaaaattccaacccaacttcttcttcctcttccggaaaaattccatcacaaccctcctaaaccccttcaagttcctccaaccctccattgcctcactctccggtgcgcacgccatcaccaatgctaactcctcctgtgaagcctttgaagcaaccaaagcctaaggccaaggaccctaacaagagggacatgagtcttgaatagaaacacaagttggggttagggttgcagagtttgccgcctgagaaaatggaacatgtgctgcacattattatgatgagaa

SEQ ID NO: 3903 - DNA, 391 bp, Glycine max
  Clone ID: LIB3028-013-Q1-B1-G6
gtgccgcagaagttcgcatttacggggatcctgattttacttttccgtatgttccagctcacttgcatcttatggtatttgagttggttaagaactcgctgcgtgctgtccaagagcgttttatggactctgacgaagttgctcctcccattagaataataatagcagatggaatagaggatgttaccataaaggtctcagatgagggaggtggaataccaaggagtggtcttccaagaatttttacatatctctacagtacagccaaaaactcatcgtcagttgaacatgaaccttctgatattggaacaatggaaaatgtaactatggctggatatggttatggacttcctatttgccgcttgtatgctaggtattttggtggtgatct

SEQ ID NO: 3904 - DNA, 346 bp, Glycine max
  unsure (1)..(346): unsure at all n locations
  Clone ID: LIB3028-013-Q1-B1-G7
cacaacccatggccaccacctccgcattcctcctccttcccctcctcctgctgctccacctcgccatcgccgctcacggcatcggcatcaactacggcacgctcggcgacaaccttccaccgcccgcggcggtggcgaacttcctgaagacgaagacgaccatcgaccgcgtgaagatctacgacgtgaacccggacatcctgcgggccttcgccggcagcggcatctccgtgacggtgaccgcccccaacggcgacatcgccgccttaaccaaaatcgactcggcgaggcagtgggtggcgacgcacatcannacctttcnaccctcagacannattaattacat

SEQ ID NO: 3905 - DNA, 374 bp, Glycine max
  Clone ID: LIB3028-013-Q1-B1-H10
tagttagcctcttcttgtttctcctgcaatcaacgacacccccccaaaaatgacaggagagacagtgaacccaaaagcttaccctttggccgatgcgcaactcgcaataacaatactggatcttgtgcaacaagctgccaactacaagcaactcaaaaagggtgctaatgaagcgaccaagacactgaacagaggcatctctgagttcgttgtgatggccgcggacactgagcctcttgagattcttctccatcttcctctcctagctgaggataagaatgttccctatgtattcgtcccatcaaagcaagcccttgggcgagcatgtggagtcacacggccagtgattgcatgttctgtaacaactaatgaag

SEQ ID NO: 3906 - DNA, 383 bp, Glycine max
  Clone ID: LIB3028-013-Q1-B1-H11
gttgtgggtacttatacatctcttgtagatatagttcataatttgtaagtgttagtggattggatagtgcatttggaagaagctgctataacctgaaatcttcaagtagcacactgatggcattactaagtgtctcaacttcaattttaatgccatcagtgtgctacttgaagatttcaggagcttacaagagatttgggtctgaaatgatcatcaattattcaataataataatgggggttactattgctgttgtgggtacttatacatctcttgtagatatagttcataatttgtaagtgttagtggattggatagtgcatttggaagaagctgctataacctgaaacttttgaacatgcatgtacttaaatgtgcaaaga

SEQ ID NO: 3907 - DNA, 385 bp, Glycine max
  unsure (1)..(385): unsure at all n locations
  Clone ID: LIB3028-013-Q1-B1-H12
agaaaatgaaagtcattgttttcttcgttgctataataattttaggtgcagaatggcaatgcaatgggtcagagcatgagcatgagcatggccacagctaccaaattttccctttgcgaatgaaaaccggccccggtggccactacattccggaggtatcgtgcaaaagttggaggcttggtgtggaagcacacaacgtcattgactggagaaccattcctcaagattgcgagggatatataggaaactacatgcttggccaccaatatagatcagactccaaaacagtttgccgtgaagcttatttttatgctaaaaccatcaacatcactgccaaaaccacatgggtgtntgatgtagatgagactacactctctaatctccc

SEQ ID NO: 3908 - DNA, 417 bp, Glycine max
  unsure (1)..(417): unsure at all n locations
  Clone ID: LIB3028-013-Q1-B1-H5
agaaaactagtaatatggcttcaagaactatatgttttaccattcaagtgactcttgtagtagcttttctaacaacaaaggttgttttatctgatgacactgtgccaattcccgcgaacaaagcacaattaggtgaatggtataatactaatgtggggcctttagatcaaagaaagagcaccatggacccagcattggtgactgctgaagaaggcgctaaggttgtaaaggtgatgcaagatggcagtggggaattcaagaccatcactgatgccattaaaagtatacctagtgggaacactaagcgtgtaattatttacattggagctggaaattataatgagaaaatcaaaattgagaagacaaagccttntgtcaccttgtatggggttacagagaaaatgcaaaacttgactt

SEQ ID NO: 3909 - DNA, 287 bp, Glycine max
  unsure (1)..(287): unsure at all n locations
  Clone ID: LIB3028-013-Q1-B1-H6
gttttggatttggttccctctattgatctcatccctgccaaattggggagaaagggtcatgtttgttttggccagttttgctgtttgctccatccaacaccttcaattttgtttgaaccatttcgcagcagatgtgtatgagggcccaccaaatggcaatgactggtttgagaagcaaactggtggcacattggacatctcttgctctacatggatggattggttctttggcggcttgcaattccaacttgagcaccatttgttccctangctcccaaaggcacaat

SEQ ID NO: 3910 - DNA, 307 bp, Glycine max
  unsure (1)..(307): unsure at all n locations
  Clone ID: LIB3028-013-Q1-B1-H8
gttttctctctctacactcctttcagcacagcacaacacaacacaaaaccctttcccaaaaaaataaaaaataaaaaatggaggaatccaaattcggccaaaccgacaagcgaaagcgagttcgcgacgagtcggactcggccctcaactcgcccgactcgttaaagcatccccgagccgagtctaactcgttcgagtctctccgagttgactcggacgagtttgaactcgcccggctcgaaccggttcntctcaacatgctgaatgacgcggaaaatgtggcggagcgtgaacccaccgtgcttga

SEQ ID NO: 3911 - DNA, 382 bp, Glycine max
  Clone ID: LIB3028-013-Q1-B1-H9
gttttctctctctacactcctttcagcacagcacaacacaacacaaaaccctttcccaaaaaaataaaaaataaaaaatggaggaatccaaattcggccaaaccgacaagcgaaagcgagtgcgcgacgagtcggactcggccctcaactcgcccgactcgttaaagcatccccgagccgagtctaactcgttcgagtctctccgagttgactcggacgagtttgaactcgcccggctcgacccggttcttctcaacatgctgaatgacgcggagaatgtggcggagcgtgaacccaccgtgcttgactctgttattaagagtttcgaagaagaaatactttctccggttccgaacccgaacctaacatccgaggcagatgt

SEQ ID NO: 3912 - DNA, 311 bp, Glycine max
  Clone ID: LIB3028-014-Q1-B1-A1
cactcgcaagcaaaaagaaagaatcccaggcgaggagaaagatggaggggaaggagcaggatgtgtcgttgggagcgaacaagttccccgagagacagccgattgggacggcggcgcagagccaagacgacggcaaggactaccaggagccggcgccggcgccgctggttgacccgacggagtttacgtcatggtcgttttacagagcagggatagcagagtttgtggccacttttctgtttctctacatcaccgtcttaaccgttatgggagtcgccggggctaagtctaagtgtagtaccgttgggatt

SEQ ID NO: 3913 - DNA, 359 bp, Glycine max
  Clone ID: LIB3028-014-Q1-B1-A10
acccagcatatctctctattcctatttattagcacccctcacattaccttgtgtcaccatctactttgactcctttaccataccattagagggggtatcaaacctaaccagtaaaaatggtgaccgtggaggaaatccgcaacgctcagcgttcccatggacccgccaccagcttggccttcggcaccgccacgccgtccaactgcgtctcccaagccgattaccctgactactacttctgcattaccaacagcgaacacatgactgatctcaactaaaagttcaagcgcatgtgtgagaagtccatgataaagaaccgatacatgcacctgactcgacgactttctgaacgagaaccc

SEQ ID NO: 3914 - DNA, 385 bp, Glycine max
  Clone ID: LIB3028-014-Q1-B1-A2
cttggatagaaaaaattacttgtatcgtaacctggacttggagaactcaatggcctgcatctctctcccaagagaatcctctttttgcatagttctctgtcttcatcttcagctctctgttcaaactgctttggcgctttctttataatcaggcactttatcatcttcaacttgaggcgaaggaccagtattttagagggaaccctaaccaagcggcgtaaacttgccttcctcttcacttgtccgaacttggtaacaacattactgccatcaccatgcacaccactactaaatctagccctcatgaaattgttccatcctctcttctttttcagaaagctcatcaaaggaagattcattttcacacgttgcctatcctttctgt

SEQ ID NO: 3915 - DNA, 362 bp, Glycine max
  Clone ID: LIB3028-014-Q1-B1-A3
gacgggaaacatatcatctcagttagcgaggattcaaatgtatgtatatggaattacactggccaagatagaaatacctccaaagcaaagaaaatttggtcttcagagagttttctctcccacaacgcagccatcgctgtaccttggtgtggcattgaatcaatgccaggaacactcttatccccatcgctaggagaggatgtaaatcagaggtgttctctgccttctcctgattgcttcttcttgagtcgcggatttctgtctgagttgatcccaaaggtttctgcaacatggcccgaggagactcttgtggactcatcgtgtcaaactcaaactgttgtttctcctacaatgtgtaaatc

SEQ ID NO: 3916 - DNA, 394 bp, Glycine max
  Clone ID: LIB3028-014-Q1-B1-A4
caagcaaacaacgcaatgggtattccgtcggaactgagggacatgttgttgcccaacaaaaagggcgtcctcgttgcctctcccgcagaggacaggaagactttgaggtccaagcaatgcactatggaaagtgtgcgagctggattcaaggctgcttccattgctggtgttgccagtgctgtgcctacattggctgcagttcgtatgattccatgggcaaaggcaaacctcaattatactgctcaggcacttatcatatctgctgcatccatcgcctcatacttcatcactgctgataaaactatcttggagtgtgcaaggaaaaatgccaagcttgaagatgctttgagacacaatcaacaatagttgtcttagaaactgaaagaagtaccat

SEQ ID NO: 3917 - DNA, 335 bp, Glycine max
  Clone ID: LIB3028-014-Q1-B1-A5
gcactatgctacaagcccaacaaacttggctttaattggtataggcgtgccaacgtcttgttaattttgagcgttaagtgctgcaactaatcagatcccaagaccttggcctaccttgccatacagaaaaacagaaagcaaatcaaaaaagccaaggtttggagccaacacaaataatcacaaagcacaagtcatggaaagaataatggttggaactgcaacaaaggttgctttcaccctcttggccactttcgccattgtcattccatgccttgaggctggcattgctgagtttgacgattttctcaaagcccaagctgatgaagcccataaaa

SEQ ID NO: 3918 - DNA, 383 bp, Glycine max
  Clone ID: LIB3028-014-Q1-B1-A6
gccactttctgagtacaatacaacactgccatggctgcctcagtctccactattggagctgtcaacagagctccactgagcttgaacagctctgaagctggagattcggttcccagttcagccttctttggcacaagcttgaagaaggttactgcctcaagggtccctaacgtcaagatttcttctggaagtttcaaaatcgttgcggcggagaaagagattgatgagcaacaacagacaaacaaggacagatggaaaggtcttgcctatgatatttcagatgaccagcaagacatcacaagaggaaagggtatggttgattccctcttccaagctccacaggagactggaactcactatgcagtcatgagctcttttgagta

SEQ ID NO: 3919 - DNA, 332 bp, Glycine max
  Clone ID: LIB3028-014-Q1-B1-A7
aatgaaatgactatgctaccattttttatgtcattataattcttgtttccaaaaggcaacatagagtagcacaattttcctcctcaacacctcaatgctaagctgaagacaaaaatacctataaggtttgtacaggacagctttccccttattgggtcattcaccttaaataatccacaatcacatgtttgatcccaaaggagttaattctaagtaaaattgattgactttaaaacaattatcaagtaacttgtgtgttagataaacaaatttattccgaattttacttcctttaaaataaaggaaatctaaattccaatcacttcaaattc

SEQ ID NO: 3920 - DNA, 375 bp, Glycine max
  Clone ID: LIB3028-014-Q1-B1-A8
tctcactaggaggtagtagaggtaacaccaatccccaagaggaaatccctcctccggataccttattctggtgtaacaagaatgatgacgtttcctcttaccaccgaggtagtagcggctttgagctatggaaccagcaacagcttcaacatcagcaacaacagctcatgggccatgaccctcctccgcagccgcgccctctctttcaccaagatctctactccgcgttgggcgttgggcccagcaggcccatctctgacgatcagtcgtcttcgagatccagtttccttcttggagcaagcggtggcggtagcgcatgatgagggattagctgtcaggactgcgggaaccatgctaagaaagactgccctcaca

SEQ ID NO: 3921 - DNA, 396 bp, Glycine max
  unsure (1)..(396): unsure at all n locations
  Clone ID: LIB3028-014-Q1-B1-A9
tngggctnnngggnaggatttgtgtttagggggggtgtttggggggttctcttcagcttcggttaagcgagtacttttcgttcttgatctgttggttacgatgtcgtattcaaggagatctaggtattctccttctccttctccttctccatacaagcgatacggtaggtctgtgtccaggtctctctcaatatcaagatccagaagccgttcaaggagtttatcaagagatgcagaaaatccaggaaacaatttgtatgtgacaggattgtctcctaggattaccaagagagaactggagaaacattttgctgctgaaggaaaagtgatagatgtccatctgatagttgatccttggacaagggaatcncgtgggtttggctttgtgacaatgga

SEQ ID NO: 3922 - DNA, 362 bp, Glycine max
  Clone ID: LIB3028-014-Q1-B1-B1
tctgcccaaagctaaggagatcgtgtcgtccaattccgtcgtcgttttcagcaaaacctattgccctttctgcgtcgatgtgaagaagctcttcggtgacctcggtgccaattacaaggccatcgaactcgacactgaatccgatggaaaagagctccaagcagcattagttgagtggacggaccagcgaaccgtgcctaatgtgtttattggtggaaaccacattggtggctgtgactcaacaactgccctgcacactcaggggaagctggttcctctgctgatatctgctggagctgttgccaaatcaactgcttaaaggatctcccatttctaggttatgcagttaaataaaaataaaa

SEQ ID NO: 3923 - DNA, 384 bp, Glycine max
  Clone ID: LIB3028-014-Q1-B1-B10
ctcttggcatcttgtgttgtgtccctcttttaagctaattccttctcttaacacaattggttgtgccaattgccatagtcaccaaccaattaacaaaggtatatatatcatcatatcatcaccaaatgaaaaatattgggttgttttttcttgtggtggtggctacttttgtggtggcagccacagctggtagcttttaccaagactttgaaataacgtggggtggtgagcgtgccaaaatctatgagaatggaaaccttctcacactctcccttgacagagcctctggctctggctttcgttccaaaaaagagtacttgttcggaaaaattgacatgcagctcaagcttgtgcctggtaactctgctggaacagtaactgcct

SEQ ID NO: 3924 - DNA, 317 bp, Glycine max
  Clone ID: LIB3028-014-Q1-B1-B11
ttcggctcgtgctcttggcatcttgtgttgtgtccctctttttttctacttccttctcttatcacatttggttgtgccatttgccatagtcaccaaccagttagcaaaggtatatatatcatcatatcatgaccaaattaaaaatattgggttgttttttcttgtggtggtggctacttttgtggtggcatccacatctggtagcttttactaatactttgaaataacgtggggtggttagtgtgccataatctatgataatggaaaccttctcacactctcccttgacagatcctctggttctggctttcgttcca

SEQ ID NO: 3925 - DNA, 395 bp, Glycine max
  unsure (1)..(395): unsure at all n locations
  Clone ID: LIB3028-014-Q1-B1-B2
gtgccaatggtgggttcagatatatgtggcttctatccacagcccactgaagagctatgcaatagatggattgaactatgggctttctaccccttttcaagggaccatgcaaactactactcccctagacaggagctttaccaatggcagtcagtagccgagtctgcgagaaatgctttgggtataacgtataatctactcccattccattacaccctgaactatgaagctcatgtcagtggagccccaattgccagacctcttttcttcgcatttccaacttacaccgaatgctatggccttagcacccagttcttgctaggaggcagtctcatgggttctccagtgcttgagcanggaaaaacacaattgaaatcactctttccccctggtag

SEQ ID NO: 3926 - DNA, 308 bp, Glycine max
  Clone ID: LIB3028-014-Q1-B1-B3
gtcctctcgacatgagtcacatttggctaccttcagatactgggatactaagcagtcatgtccagtgcagacacagctactcgcatagcgctgctatgctatgacagtgagacatcctctgatggctgttggcactgctgatagatatcatactgtttacaacttgcagaaacctcaggttgatttcaagagaaatgtttcacccttgaagtatcaaataaagtgccatgctgcattccctgaacaacaaagtttcatggctcgattcatagcatgtacagttggggtggatcacttgggccatagtc

SEQ ID NO: 3927 - DNA, 429 bp, Glycine max
  Clone ID: LIB3028-014-Q1-B1-B4
cccttacttaaaccccggaatccggcccaaggaatcccccttattcacgattttggaaaaactgttgatatagaaaggtaggatataccactggccacagaatatatggcgcttttctatggtttcattgttagcaacattatgctgcttttcagttcagcatttgccaaaactgctactcctccctctctgagcccaactccatcaccagccccggcacccgactacgtgaacctcaccgagttgctcagtgttgctggtccatttcacaccttccttggataccttgagtccatcaaagtgattgacactttccaaaaccaagccaacaacactgaagaatgaattaccatctttgttcctaaggacagtgccttcaatgctgtaaagaaaactgtcctatccaacctcacctccgaccaaccaaag

SEQ ID NO: 3928 - DNA, 278 bp, Glycine max
  Clone ID: LIB3028-014-Q1-B1-B5
gaagccacatagagacacaatacagagtgagttgttgctccttcgccacaactctctgccaacatgggtatctccagagattctatgcacaagaggcgtgccactggtggcaagaagaaggcctggaggaaaaagagaaagtatgagcttggtcgccagcctgctaacactaagctgtcaggcaacaagacagtcaggaggatccgtgttagaggtggaaatgtgaaatggagggcattgagattggatactgggaaattactctgggggaagtgaac

SEQ ID NO: 3929 - DNA, 365 bp, Glycine max
  unsure (1)..(365): unsure at all n locations
  Clone ID: LIB3028-014-Q1-B1-B6
cggagagctcccgctgactgcgatcggatttcatggctcctaagaaagacaaggctcccccaccttcatccaagcccgccaagtctggtggtgggaagcagaagaagaagaagtggagcaagggaaagcaaaaggagaaggtgaataaccaggtgctgttcgatcaggctacctatgacaagctcctctccgaggcacccaaatacaaactcattactccttccattctctctgaccgtttgaggattaatggatcacttgcaaggaaggctattanggaattgatggccagaggttcaataaggatggtgtctgcccatgctagtcagcagatttacactagagcgacaaacacctagatgtac

SEQ ID NO: 3930 - DNA, 356 bp, Glycine max
  Clone ID: LIB3028-014-Q1-B1-B7
cgatcatttccagactcaaaccttaagagtctcatgcaccaaactatgcaagcgtctctcatccgaaccggctccgtgccggtccagaacacggttctccccggttcaccgcgagtctcactcacgcgccaagcctccttctccggcgacaagagccacgcgcattcgcccaggttttcaatccattcttcccagtccaacaaccgcagatcctcgtcggagcgcgacgacgagaatttcggcgttcgccgggatctgaaccgaaccggatcgccctcgttttcaccaatcgtagctcacgaagaagacttcctctccgaggccgttccgcgcatgctcggaaaccggccggaaga

SEQ ID NO: 3931 - DNA, 318 bp, Glycine max
  Clone ID: LIB3028-014-Q1-B1-B8
gagcagtggagccctgcgctaactatttcaaaggtgttgctctcgatttgttccctgttgacggaccctaatcctgatgatcctttggtccccgaaatagcccacatgtacaagacagacagaaacacgtacgagtcaactgccagaagctggacccagaaatatgccatgggttaagtgacctgtggtatgtgtgaggaagagcctttctactcgcagtgtttaggcctctcagcccttgtatgaatatttgtcgttcttaagaaggcccctccagttgaagattaatggagcaaaacgtctctcctgtcgtttgta

SEQ ID NO: 3932 - DNA, 362 bp, Glycine max
  Clone ID: LIB3028-014-Q1-B1-C1
ggaaccaaagtcagcttcacctaataagaagacttccaaaccagcaaaaaaagtcaagaaggagagcgaagacttgaacaaggttatgtttggcaagtcacatgagtggaagagtggtcaggaaatggtcaatggaggtgatgatcttaacaagcagttaactgtgtcaaaggctgattggaaaggacaggacttggggttaaaccaagtggcgtatgacgagtcaaccatgccagctcctgtgtgctcttgtactggtgtcctgaggcagtgttacaaatggggtaatgggggttggcagtctgcctgttgcacaactactctgtcaatgtatccacttcctgcagtgcccaacaagagac

SEQ ID NO: 3933 - DNA, 384 bp, Glycine max
  Clone ID: LIB3028-014-Q1-B1-C12
attttcttgccccaatcccaatcccaattccaaaccctaaccaatttccatggcttcctcggagatcgaggtggtttcatcatcatcatcggtctccaaacccaacaacgaccagcctccaatcctcgacgttttcaccgcctctgctcacggcgacttcaacaaattgagaaccttcgtcgaacaagacggtgcctccgtctctcttcccgattttagcggctattacgctcttcagtgggcctcgctcaacaactttcacgacattgcgcactatctcattcagcatggggcggatgtcaatgctaaagacaacatgcaacaaacggcattgcactgggcagcggttcacggttcaactctagctgctgatgtgcttgtgga

SEQ ID NO: 3934 - DNA, 380 bp, Glycine max
  Clone ID: LIB3028-014-Q1-B1-C2
ttcactctcaaactcttccacaagaacatcaccttcctcattggccctgaggtttctgcacacttcttcaaggcctcagagactgatctcagccagcaagaggtgtatcagttcaatgtgccaacttttggacctggggtggtctttgatgttgattactctgtgaggcaagaacagttcaggttcttcactgaggctcttagggccaacaagctcaagggttatgtcaatcagatggttgcagaagctgaggactatttctcaaagtggggaccaagtggtgaggttgatttgaagtatgagcttgagcatctgatcatcttgacagccagtagatgtctcttggggcgtgaagttcgtgacaagctctttgatgatgt

SEQ ID NO: 3935 - DNA, 366 bp, Glycine max
  Clone ID: LIB3028-014-Q1-B1-C3
cgagaaaaaaaatcttaatttgtttcttgttcttcttcttctctctgtcgtttgttctcttgatctttgatctctgtgttatatgttgtagcaaaagaagtaaacaacacacacatatataaatatttgtaagatatatatatatatatatatgatcatgggttttcttcacaagctttgggacgaaacgctggcgggtccggcaccggaaacgggtctggggaagctccgaaagtacaattcgttctccggcggaatctccgtccggtcaacggttgcggaggcagttccgataagtcgcagcatcaccattgttcggtcccagtctggtttcggaagcaccaccacctcggcttcttcttctcc

SEQ ID NO: 3936 - DNA, 400 bp, Glycine max
  Clone ID: LIB3028-014-Q1-B1-C4
gtcaaggaacgatcatggcttatatctcctctctatcatctttctccctctccaatttctctgcacctcttcccatttccatttgttcctcatcttccgcattcctaacttcccaaataccatgcaaaccctccaaacgtagcagaccaaaatgccatcatgtttccaaagtgtcatgcaacagtaaccaaaacaccccaacaccaaacccagaagaagaaaaacgatcgtcatacaacattctaggaaaacataggagggatattctccttggcattgggggcctttacggtgcttctgctcttagcaacaccaaccctttagccatggctgcagctcctattctagagcctgacctagaacattgttgtataactgatgatgtacctaaaagggaaat

SEQ ID NO: 3937 - DNA, 363 bp, Glycine max
  Clone ID: LIB3028-014-Q1-B1-C5
agcaagagtaattctgtttgacattccagcacctgaggctgatgctgctcttgttagaaggtcaagttcactgttatcacatgccggggatcatcctcatagatctttccgtcgaaaacatagtggtcttatgagttggcctgaacatttctacaaacaagaccataagcagagatctgaaggagctgggcgacaaaccaatagtttatctgcaagggcaatgcagctgagcatttatgggagcatggtggacatccctccccggagtagaagtttgttaaccaatgatggtagaccacctcatagcttgtcctatccaaccattgtgtcacatcaaggtcgtcctcttgtttcagtcaaatc

SEQ ID NO: 3938 - DNA, 378 bp, Glycine max
  Clone ID: LIB3028-014-Q1-B1-C6
agagaatggctcccaagggtttaacctttctggctgtgttaatatgcgtttcagcactgtcactgagtccttctgttgcgggggaagggcaaaataatggccttgttatgaacttctacaaggaatcatgccctcaggctgaagacatcatcacagaacaagtcaagcttctctacaagcgccacaagaacactgctttctcctggctcaggaacatcttccatgactgtgctgttcagagttgtgatgcttcactgttgctggactccacaagaaggagcttgtctgagaaggaaacagatagaagctttgggttgagaaatttcaggtacattgagaccatcaaagaagctttggaaagagaatgccctggagttg

SEQ ID NO: 3939 - DNA, 363 bp, Glycine max
  Clone ID: LIB3028-014-Q1-B1-C7
atttatattgggtgctagtgagtgatggcgatgagggtgtgaattctaaaaggaaagaacagctgagctggtcagaaaatcaatggcatcatccttgggttttgagttcctgacgaagaagccttacagtcctccatcctgggcatcccatctccaccctttaccttcccacttcttctctcttgcccatcttcccactccaattcacagatggaaccttcccaatctgcccaccaataccgagctgtggatcaagcgagacgacctttccggaatgcagctgagtggtaacaaagtgaggaaattggagttcctgatggccgatgccattgcgcaaggcgccgactctatcatcacaatccg

SEQ ID NO: 3940 - DNA, 68 bp, Glycine max
  Clone ID: LIB3028-014-Q1-B1-C8
gtcgactcgctctcagcgggacacctatgctgggtgtgtttgtgtgcctctgatctcggtgtcccctt

SEQ ID NO: 3941 - DNA, 400 bp, Glycine max
  Clone ID: LIB3028-014-Q1-B1-C9
attcggcccaagctcttcttcccttgcggctagggttttagcgcagcttcttctaaatttaaggaagatgggtaaggaaaaggttcacatcagtattgtggttattggccatgttgactctgggaagtccactaccactggccacctgatctacaagcttggaggcattgacaagcgtgttattgagagatttgagaaggaagctgctgagatgaacaagaggtctttcaagtatgcctgggtgcttgataagcttaaggctgagcgtgaaagaggaatcacaattgatattgccttgtggaagtttgaaaccaccaagtactattgcacagtcattgatgcccctggacacagggatttcatcaagaacatgatcactgggacatcccaagctgactgt

SEQ ID NO: 3942 - DNA, 364 bp, Glycine max
  Clone ID: LIB3028-014-Q1-B1-D1
agaaaatgtccaatcatctgacttgaacactggaggttctcatgttcttagtcatgtgtctccaccaaagtcatcaagcttctttgcagactttggaatggatggtggctttccaaagaaatctgggccaagttcctccaaagtgcaagtaagccatatgcttgcaactttggtctctgcaatgttatctcttatgcatccagttagcatacaggattaagttatatataaatatctagtctacattcacttcaacatttttttacatcatacagatccatggaacaaaacatggtcaacattgggagaaagtgttttcaagtgttttgtaaaaaataaatgctagcatacacatagaatgata

SEQ ID NO: 3943 - DNA, 384 bp, Glycine max
  Clone ID: LIB3028-014-Q1-B1-D2
ctcgagccgaatcggctcgagcccaaaccctagttttgtcagtagcacacttcacccatggcagtagcagcagctcgccctatcgtctccgtccaaaccctatagggcgatgcaacccccaccgttcctcttcccgacgtcatgaaagcctccattcggcctgacatcgtcaatttcgtccactccaacatttctcgcggccaccgcatcgagtccgtcccggaactccccctcgtcgtcagcgacaccgtcgaaagcgtcgagaaatccaaagaagccgtcaaaattctccagaaaatcggcgcattcacagacgcggagaaagctaaactcagtcacggaattcgtcccgggaagggaaaaatgaggaatcgcaagtatatc

SEQ ID NO: 3944 - DNA, 376 bp, Glycine max
  Clone ID: LIB3028-014-Q1-B1-D3
gaaaacgaaaaggagaagatgaaatgggatatgcagatggaggaaatcgaagcgattatggagaaaatttgggacctccacgataagctcagcgacgccattcactccgtctccagatcccactttctcacttccgtcaaaaccctcaaactcaacaactctccaccgcaccttcccaacgccgccgtcgccgctgccgatgaccgctcctccggtttcgttttcgtcaaggactttagaccgctcgccgtcgccgataacgacaacgatgacgatgactccgccgtccgcgaagccaagagcctcaacgccatccggaccgccctcgagaacctcgaagaccagctcgagttcttccatactattcaaacccagc

SEQ ID NO: 3945 - DNA, 390 bp, Glycine max
  Clone ID: LIB3028-014-Q1-B1-D4
atcctctctttgcgattgtgttttgatctgcttcctactgcgatagtttctctactgttacatggccatggcggtttccgcaattggttttgaaggtttcgagaaaaggttggaaatatcctttttccagccgggactttttgctgaccctgaaggaaggggtctaagggctcttacaaaatcccagttgggtgagattctaacaccagctgcttgcaccattgtttcttcgctcaaaaacgataatgtcgactcctatgttctatctgagtccagcctctttgtttatgcctacaagatcatcatcaaaacctgtggtactactaagctattgcttgcaatcccacccataattaagttcgctgaaatggcttcccttaaatgttaagt

SEQ ID NO: 3946 - DNA, 324 bp, Glycine max
  Clone ID: LIB3028-014-Q1-B1-D5
gcctacaggacgtgcaccagcgcaccgccgagctcaagaactggttgggagccgttgttgcctaccagcaatcgtgcctggacggcttcgacaccgacggcgagaagaaggtgcaggagcagctgcaatctgggagcctggacaacgttggaaaactcactggcttggcactcgatgtcgtgtcagggaatttcacacattctccaatccttggacttgaaccttgctctcaagcccgcctctcgccgccttctggaggtggaccaggaaggctaccccacttgggtctccgctgctgatctcaggctcttggctcagctcaac

SEQ ID NO: 3947 - DNA, 399 bp, Glycine max
  Clone ID: LIB3028-014-Q1-B1-D6
gaaagatccttcgtcctcactcatactcaagtgacaatgtaaaaatgaaggcacaaatagatttggaagcccctgctcttcccgagacagaagaggatgctgttcttgaagaaaagctgcttgaaacttctctagcatcactgcaagtcccacaagacacagttgaactagcaaaggatgaacttatgacaaatgcagcagaggcaattgttgtcctgtcatctcttacctgtgatcaaggggatgattgtgtgatcagcaaaagtccatcagaaagtccaaaggtggacctgctaaattggtttgcagatgttgtttcctcatgcaaagataatgtagaaggaaactgtgatgtttcaagggaaaaagatggcgaagacaacgaagggcattcctctg

SEQ ID NO: 3948 - DNA, 182 bp, Glycine max
  Clone ID: LIB3028-014-Q1-B1-D7
cacagtactgtcatatgcgcttcgcttctcgggagcacttatgcctaatcgcacagtcatcctctacactaggatctgcggtcactctgatcgctacaacctcattgagctctagtccgacgtctctccccgcaacgccgagatcttccgcgcgctttgctctggccaaaagggcgtagggc

SEQ ID NO: 3949 - DNA, 267 bp, Glycine max
  Clone ID: LIB3028-014-Q1-B1-D8
ggaagtttgaaattttgcattctgtctggtttgtcaggtgtgtaaagattttttttttctttcttgaatgtgtgtatagatctatactatcagaaagttgataccgcatttgcatttgtgtaataccacatgaaaaattttgatgacctgaacatgtgctgccaaagatagagtacatttacattttagcaggaacaacataatttatatctatataaaaattatctagccgtcaaaaacccgaaacagaccaccagagcggggatc

SEQ ID NO: 3950 - DNA, 384 bp, Glycine max
  Clone ID: LIB3028-014-Q1-B1-D9
agaaattgagggcttatgctgaaagaatcaggcttgctgagcttgagaagtgcttaggtaagatgggtgatgatataccaaagaaaacgcggagagctgtggatgaccttagtcggggtatagtgaataagttgcttcatggtccaatgcaacatttaaggtgtgatgggaacgacagccggactcttagtgagacactggagaacatgaatgctttgaataggatgttcaaccttgagacagaaatatctgttttggaggagaagattcgagcaaaggtcgaacaaaaccagaaatgaaatctaacaccaatcagactgatttattttctcctttagaataagaggaaacatcctcaccttttagtattaatcatcctgcaat

SEQ ID NO: 3951 - DNA, 374 bp, Glycine max
  unsure (1)..(374): unsure at all n locations
  Clone ID: LIB3028-014-Q1-B1-E1
cccccaactccaacctctgttcatcgtctaccgcgctttcttttcaaccagaactatgattaagctttttaaagtaaaggaaaagcagagagaacttgcagaaaatgcaagtggcggaccacctgttaagaagcaaagtgctggagagttgcgtcttcacaaagatataagtgagctgaatctaccaaaatcatgtaccatgcaattccccaatggcaaagatgatctgatgaactttgaagtttcaattcgacctgatgatggatattacttaggtggcacatttttgttttcctttcaagtgtctcccatctatccacacgaagcaccaaaggttaagtgtaagacaaaggtctatcatccanatattgact

SEQ ID NO: 3952 - DNA, 277 bp, Glycine max
  Clone ID: LIB3028-014-Q1-B1-E12
aagaatatgaaattggtctcttgtcttcctcctcatctctacagtactccacatagagcccagcctctcaagcccaagcgcaagcccgggcgcaagcccgttcatagaatcctcctgcagcagcagccagtagccagccctctgcgtctcatcgctctgcgtctacgcctccagcatttaagaggagcctcagtaactggttcagacagcagtctccctctccctgaattgcagccaagccacgagagccttcgtggctaagtgctacagattcaga

SEQ ID NO: 3953 - DNA, 400 bp, Glycine max
  Clone ID: LIB3028-014-Q1-B1-E3
gagaagaacagaacaaaatcgcgatgaaccctaattgatttattgattcattttcattcccatggcgtctcgaataggtggagtctcactcccagacagacctagcaacaactcaagctccgtcctcgcgaagatctcgcgctcctccatcgtcactcgcggcaaggaagccgccggcgacgccgcattcgtcgccaagaagctcctccgcagcaccggcaatgccgcgtggatcgccggcaccaccttcctcgtcctcgttgttcctctcatcgtcgagatggaccgcgagcagcagctcaacgacctcgagctccagcaggccagcctcctcggcacccccgcccccaaataaaatttgaggttttctctctgatctgatttaccctgtttggacact

SEQ ID NO: 3954 - DNA, 299 bp, Glycine max
  Clone ID: LIB3028-014-Q1-B1-E4
tccaagctgctttgtgcacttcctgtcagatgcttgtggtttggattcagaatcaactaaaacaaaagaagaccaaggagatagtattcaactatgtaaatcagctgtgcgagagcttgccaagtccaaatggagagtcagtagtagactgtaatagcatttatggattgccaaacatcacgtttactgttggagacaaacctttcaccctcacccctgagcagtatattctgaaaactggagaaggcattgcagaagtttgccttagtgggtttattgcttttgacattcctcctcct

SEQ ID NO: 3955 - DNA, 403 bp, Glycine max
  Clone ID: LIB3028-014-Q1-B1-E5
aggtcgacactagaggatcccctcggggaattccaattccacattttcaagaaataaggaggcaaaaatgttcatatatgaattggaattatttgttttcttattaggcctatcctgaagccaaaggaaatgagatcggaattcctcggggaattccaattccacattttcaagaaataaggaggcaaaaatgttcatatatgaattggaattatttgttttcttattaggcctatcctgaagccaaaggaaatgagatcggaattcctcggggaattccaattccacattttcaagaaataaggaggcaaaaatgttcatatatgaattggaattatttgttttcttattaggcctatcctgaagccaaaggaaatgagatcggaattcgtcgggggtaccg

SEQ ID NO: 3956 - DNA, 340 bp, Glycine max
  Clone ID: LIB3028-014-Q1-B1-E6
gagctttcttcaattggtttaatgccagaagactggggcggtgacatcccaatggttccgataagtgctctcaaaggaaagaacataaattattttttggaaactgttatgcctgttgcccaatttccaaaactgaaagctaatcctgataaaaattccaaaggaaactgtgttgaggcggggctagataaatcaaagggaccattcgcttcatttattgtgcagaatggcaccctcagacggggagatatagtagtttgtggagaagcttttggaaaggtgcgggctttatttgatgatggtggaaagcgggttgatgaagctacaccctctatacctg

SEQ ID NO: 3957 - DNA, 329 bp, Glycine max
  Clone ID: LIB3028-014-Q1-B1-E7
atcactgcgtctgatgagagagagcggaagagataggaaggaagagcacagcagtgatcagctccgtcatacgagggggagaaattttgtaggtcttggagttcgtgtatcgcatgttgccacattgctatcactcaaagcttgtcccgagtgcaatttgaatggatcggtagtcaatgcgtcgcggtctgcatctagaggatgattcccttcaattagattgtggcattggacgcacaggtcgtgacatctactcgattctcaccacacttctgcgtttatggtggactcattagatgcatgagcacttcgtgtatactatggctcac

SEQ ID NO: 3958 - DNA, 342 bp, Glycine max
  Clone ID: LIB3028-014-Q1-B1-E9
ctaatactatatgtctagctgatggagtccaattcagagttcgacgtgattatcatcggagctggcgtcatgggcagcaccaccgcctagcaggccaccaaacgcggccttaaaacacttctcctggaacagttcgacttcctccaccactgtggctcctcccacggcgaatcccgcaccatccgcctcacctatcgccaacagtagtactaccctttagtcatggactcttaccgcctctggcaagatgcgcatgcccaagtcggctaccagatctacttcaaggctcatcacatggacatggcccatcactaggagcccgccatgcgcgccgtcatcgac

SEQ ID NO: 3959 - DNA, 398 bp, Glycine max
  Clone ID: LIB3028-014-Q1-B1-F1
ataaaaataaaaacttttctttgtttctcttttctttgtattagccttttgttgtagatggcattggggagaaggagtggactctttgctcttgaaaagcattttgctttctatggagcataccacagcaacaaaattaacatagcaatccacgtgttgtttgtttggccaatttttttctcggcccttcttattctctattttgtccctctccctcccttattcaaccttcaaaacttggagttttccatgtgggagaactatgtgatattggtttggaatgttgggtttttggttgctttgctctactcagttttctatgtttctttggatctgaaagctggctctttggctgctttgctttgtgctctttgttggattggtagtagctttgttgc

SEQ ID NO: 3960 - DNA, 192 bp, Glycine max
  Clone ID: LIB3028-014-Q1-B1-F11
tggttttttttttgttgtttttgttttttgtttttgttgtttttttgtgttttttgttgtttttgttgtttgttttgttttttttgtttttttttttttttttttgggggtgttttttttttgttttgttttgttttttgtgttgtttttgttttttttttttttgttttttttttgtttttttgttttttt

SEQ ID NO: 3961 - DNA, 384 bp, Glycine max
  Clone ID: LIB3028-014-Q1-B1-F12
cccaaattcttgtaggaggcttaaagttaacgaaaaatttttttggggttaaacacctgaacacacctttaacctgcctttcaaatccgtgcattgcttgaacgattgaaccctaatggctgctctcttgaggaggtttgcgagcgccactccgatcccatccaattcctctcacaccaatctccgccttcccttcaccgccatcgccgccatttccggcggagtctccttccttttctaccattcctctcccaacttcgctcattcacaagaagcagaacaagtggaaagtaaaaacatcgcactcgttccggataaatgggtcgagtttaagttgcaggatactgctagggttagtcacaatacccagctattcaggttttc

SEQ ID NO: 3962 - DNA, 397 bp, Glycine max
  Clone ID: LIB3028-014-Q1-B1-F2
gaggtttaactgccaaagtgattgaccgaacatagactatggctgatgtctacggtgctttttttgattttgcttctatgttggagcccaacgttgacaaaaacgatcccaatgcaacacaaacattgagcacgctggaagctatacagaaaacttgcagagaatctggtctcttaagtaaaaggaaatcttacattgtgaatgatgaaagtggatatggctcaaccatgattgtcatattggtcatcatggtttccatcatttttgcttatctgtctgctaaccaccataatagctagttgaaacactgatagcacgcctcgttcatggaatgcgaatttgcatgcatgcaagcaatagtatgatggctgcagttgactatcgtgtattttaaatg

SEQ ID NO: 3963 - DNA, 372 bp, Glycine max
  Clone ID: LIB3028-014-Q1-B1-F3
cactcggttgcagaacagaacaaacttctttcactctttcgcttctgaatcttcaacaatggtgctcgaggcgacgatgatctgtatcgacaattctgaatggatgcgtaacggagattactctccttctcgatttcaagctcaagcagacgctgtcaatctcatatgcggtgctaaaacgcagtctaatccggaaaatacagtgggagttctcacaatggctgggaaaggcgttcgtgttttggttacccctaccagtgatctgggcaagatcttagcctgcatgcatggactagatataggtggtgagatgaacctagctgctggcattcaggtggcacaattggctcttaagcatcggcaaaataaaaa

SEQ ID NO: 3964 - DNA, 361 bp, Glycine max
  Clone ID: LIB3028-014-Q1-B1-F4
taactcaggattccggtccaaaaaataatttccattaattgaccgaaaacaaaagttttccccaaaggctttctccaaaatggtccaatgcatgagaataatttaatcaacgtttcagaacactataaaattattctcatgaaagtgacacacaagtgttgcctaataccttaagttaccttcctgtgtaaattaatgcaactaaaactgttaatactgttggtttgtgctttgttgaagaacagctctaatgtttcttgtgaaagatcaatctttcgttaaatcatttgcaactggcagtgtatatgttctgaaattggtaagtattttcattaataaaattgttggaattttattaaaa

SEQ ID NO: 3965 - DNA, 382 bp, Glycine max
  Clone ID: LIB3028-014-Q1-B1-F5
gtaagctagctttggcatctttttcccctttttcctccaagcctataactatattcaacccaatctgcactggaccaagtgtaaaaagacattttcctgatcttctgctgtgccaagaaagcagtaatctccatgagcttctattgaattgatactttgatcaagatggatgggaaaaactctcttcaaataactagaagtggtattggtgcttatgatgatgatggacatgccaaaaggactgggaatttgcagagtgctgtagctcatatcattactgctgttattggttctggtgttctttctcttgcatggagcacttcccaattaggatggattggagggccattttccttgctttgttgtgcaattgtcacctata

SEQ ID NO: 3966 - DNA, 375 bp, Glycine max
  Clone ID: LIB3028-014-Q1-B1-F6
catttgggtgggtaattcagagacacagtgcccgggtcaatgcgcgtggccgttccaccaacccatttacggtccccagaatccacctttggttgcacccaacaacgatgtgggacttgacggcatgctgatcaatgtggctagtctccttgctggcactgtcactaacccttttggaaatggttactttcaaggacccaaagaggctccgttggaagcaggttcggcttgcactggggtgtatggtaagggcgcgtaccctggctatgcagggaacctcttgcttgaccccaccactggtgccagctacaacgctaatggagtcaacggaaggaagtatctgttgccagctcttgttgaccctgaaacctcagc

SEQ ID NO: 3967 - DNA, 162 bp, Glycine max
  Clone ID: LIB3028-014-Q1-B1-F7
catttgggtgggtaattcagatacacagtgcccgggtcaatgcgcgtggccgttccacgagcccatttacggtccccagaagcgagcggtggttgcagccagcacctatgtgggacgtgacggcatgccgatcagtgtggctagtctccttgccggcactgt

SEQ ID NO: 3968 - DNA, 352 bp, Glycine max
  Clone ID: LIB3028-014-Q1-B1-F8
gttaacactaaggacactgacaaggttctgaacgggatgccaagctacgctcctccattgccttcttcttccaattccatggccatggaagcaactaatgctcatccttcccgtatttctgaatttggaaccctggagcaatctcttggatttcgtgttgaagataccattaatcttagcagaaatccgatgtttaaatcaaatgaaatcaaataaccaacctcaggtgctgataattcaatttggtgcttttaaataagtcaattgcaaaatcggatataaacctctctgctgcaattgctgcatctcaggcactggtattccaaaaagattcgcaaccaattctggcttc

SEQ ID NO: 3969 - DNA, 265 bp, Glycine max
  Clone ID: LIB3028-014-Q1-B1-G10
tttgccttctgctctccctgcccccgcggttccccgtcttggtgtgtcgctctccgcggagctgtgtttgccttgccctcgtcttgttcggtgggtccgtttttggcgactcccgtgactcgccgggtgctctccccggcgcgtcgcttgctcggtgtgggctctctggggctgatttcatcgctgaccattccccgccgctattgcgattctcaatcgcatgtcctccactttcttgctcgtcccttgcccctcccgtgacttg

SEQ ID NO: 3970 - DNA, 295 bp, Glycine max
  Clone ID: LIB3028-014-Q1-B1-G12
gccggtgcttatcttagctattctagcttctgttgtgggaagccaagcaatcatcagtggaacattttctatcataaaccagagccaatctctgggttgcttcccaagagttaaggttgttcatacatctgacaagatacatggtcaggtctacatccctgaaattaactggttacccacgatcctctgcattgctgtgaccattggatttagggacacaaaacacatgggaaatgcttcagggttagcagtgatgaccgtgatgctggtgacaacattctttacttccttagta

SEQ ID NO: 3971 - DNA, 384 bp, Glycine max
  Clone ID: LIB3028-014-Q1-B1-G2
gaatccggtccaatcccccccaacctttcccaatcccaaaaaccctttgaatttttaaaaggaaaccaacatggttattaaggccaacaacccaaaatccatggcaaaggttctggtcaacccaaccccttcctggccttcaccggtattaaaagttatatggagcctaccgccacccacctatgtaccaaagacccccttttggaaattacccaaaggcggcattgcatttcccggtaatgcccaaattcaaagctaccatggatttgtccgcaactgcaaaatctgccacaccgtctttgttgctgctccagcagaaaaaggccattttcttttaaactttctcatgggaagtgtttcagcagctgtctccaaaactgctgc

SEQ ID NO: 3972 - DNA, 392 bp, Glycine max
  Clone ID: LIB3028-014-Q1-B1-G3
gaattcggtccaagcaacctcaaaccttcggtttcccaacaacaattcacatccttcaaaatctcaaactctccatggctcccagcacagaacataacccttctctctccaaacaaaaacttcactgcacgcttctttcccctgccaaactcttcaaatgtcttcactttctccatttggtactccaaagtgcctccaagtgcaaacccttttgtttggaatgccacagtccaagtcacaatcattgccagaatgcaccacctcaacttggtgaggctgtggggattctgtgctgagaaaggccaaaggatacttgtctatgaacacatccctggtggatcattggacaagtacctcttcagggtcaataagtctcataacaataaccatct

SEQ ID NO: 3973 - DNA, 135 bp, Glycine max
  Clone ID: LIB3028-014-Q1-B1-G4
tctggtttctctgtgtgagacaataattatgttcacgggtgccaggtggtacaccacaatgtatcaaactggaacattttttgtttggacttccacagtcttagtctcattcattgccagcatgtagttactcat

SEQ ID NO: 3974 - DNA, 372 bp, Glycine max
  Clone ID: LIB3028-014-Q1-B1-G6
ttcattttaacgtcagcattccaaacaatctgacagagagacagcgggaattgattgaagagtttgccaaggaagagcaaggagattttgataaacagagagttgcatctgcttctggttgaaaacattgcaagagttattatcaaaatcatatgctcaactaggcggttgttgaagttttgtaggattaaggattggtaattcttttcttaattccttccactttttccagtgtatgtaatatttatttctcgtcccaagggatgatcacaattcaaaatttttttgttagaacttagaaggcaatcccctcatgctcctctaggctagaattctagtcagtgctgtatatagtttccttataacataaga

SEQ ID NO: 3975 - DNA, 186 bp, Glycine max
  Clone ID: LIB3028-014-Q1-B1-G7
ttcatttcaacatcaccattcgacacagtctgacagacacatcgagggaattgattgatcagtatgcctacgaacagcaatgagatcttgacagacagagagttcctactgcttctggttgtaatcattgcaagagttattatcggtctcatattctcaactacgcagttgtcgacgttttgtacg

SEQ ID NO: 3976 - DNA, 387 bp, Glycine max
  Clone ID: LIB3028-014-Q1-B1-G9
ggatgcagagccatggttcagcaagccgttcagggtgctcctgctgcgtatgccaaagaaatggaacgactttccgccaaagaatcgcttcttctcgcttttaaagatgcagggggtttcgaggccttggtctctgggaagactactgaatggcaaaagattgatgtgaatgaaaggataactggtcttgagcggctcaatccaacacctcgccccacaacgtcacccttcttggaggggcgatggaactttgagtggtttggttctggaagtccaggcttgtttgctgctaggtttatatttgaaatctttccttcaactttggctaatttgtcaaaaatggattttgttattaaggatggaaatgcgaagattactgcgaacatg

SEQ ID NO: 3977 - DNA, 105 bp, Glycine max
  Clone ID: LIB3028-014-Q1-B1-H10
attcggctcgtgcttctatctggcggcgtctcctctttcgctagtttctctcttctctctctcttttttctcttgttgtgcgcgctctttcctgtttttggttgt

SEQ ID NO: 3978 - DNA, 386 bp, Glycine max
  Clone ID: LIB3028-014-Q1-B1-H12
attctcccatttcctctcagaaccctcgatcactcccacgcgctcctatatcctctccttcaccgtcgctctctccaacgatcacaacaacatcgtcatcccatggcaaacgccgcatctggtatggcagtccatgatgactgcaagttaaggtttttggagctgaagacaaagaggacacaccgtttcatagtttttaagattgaggagcagcagaagcaggtcattgtggagaagcttggtgagccagcccaaggctatgaagatttcactgccagccttcctgctgatgagtgccgttatgctgtttatgattttgagtatctgactgaagggaatgtccctaaaagcagaatttttttcattgcatggtcccctgacacatc

SEQ ID NO: 3979 - DNA, 292 bp, Glycine max
  Clone ID: LIB3028-014-Q1-B1-H2
ctcgagccgattcggctcgagttggcatcttgtgttgtgtccctcttttaagctatttccttctcttaacacaattggttgtgccaattgccatagtcaccaaccaattaacaaaggtatatatatcatcatatcatcaccaaatgaaaaatattgggttgttttttcttgtggtggtggctacttttgtggtggcagccacagctggtagcttttaccaagactttgaaataacgtggggtggtgagcgtgccaaaatctatgagaatggaaaccttctcacactctccct

SEQ ID NO: 3980 - DNA, 205 bp, Glycine max
  unsure (1)..(205): unsure at all n locations
  Clone ID: LIB3028-014-Q1-B1-H3
aaatattacttgcttgcaaaaatatatttgctttaataaagattgatgaacaactgatgtggcatgtgatgtatcttagtgagcaaataagacaaatgacaattaaatgctcacatgaaagttgcaattgtattagatttattgggaaattttactttgggagtaaatagtataaatcgcaaaacnggatgtatagctgcatatt

SEQ ID NO: 3981 - DNA, 389 bp, Glycine max
  Clone ID: LIB3028-014-Q1-B1-H5
ctctgagagagatgtgtggaggcgctatcatctctgacttcattctcctttttgagacttctaatatcctcagggttttttgggagaattggctaaaaaatggttatatgatccgtgtttgtgctatgatgttatttttattttttctttgtttaatggttctgaatgtctctgttcttactgcgatttttacacttttccaattatattaaagggtctaccacagcgaaatctgtggcattccaagttcgagctgagaaatttgcaaataggaagaggaaaaatcagtatatgggaatccgtcaacgcccttggggaaaatgggcagctgagattcgggatcctagaaagggggttcgtgtctggcttggaaacctcaacactgctga

SEQ ID NO: 3982 - DNA, 354 bp, Glycine max
  Clone ID: LIB3028-014-Q1-B1-H7
gtagtttcgttttcatcatccattgaagagaagctgaatgcatttagagaaccatgtctgcaactagcacatcgactactttgtcaccgtcattctcttgcagtaaaacatcagcactctctctgccgtcgaaatacagattctggaatttggttccaatgacacaagcttcatctccggagcacttggccttagcctgacacgatccatgtagaggacttgacgtgtcctgtggcccaacagcaccacatgcttcacaaacatcatcaattcaggggggtgaatctatgttcaggggtgtgttggaaagtatgcaatccgtttacttgcacagaaatcgtactgccaaggcca

SEQ ID NO: 3983 - DNA, 269 bp, Glycine max
  Clone ID: LIB3028-014-Q1-B1-H8
cttgtttgaagcttcaaacaagatcaaggttttgatggccacaaatcggattgatatcctggatcaagccctccttagacctggacggattgaccggaagattgaatttccaaaccctaatgaagagtctcggctggatattttgaaaatccattcaagaagaatgaatttaatgcgtggcattgatctgaagaagattgccgagaagatgaatggagcatctggtgctgaacttaaggctgtttgcaccgaagctggaatgtttgcat

SEQ ID NO: 3984 - DNA, 389 bp, Glycine max
  Clone ID: LIB3028-014-Q1-B1-H9
aaacgaagaagcgaaatctcctagaaagcgagtttctctcttctctctctcaattttcacatagtcagcgaaaacaaacaagactattggaacacgaaacacaaacatcataacataagcagcagcagcagcaccacccaccttgttcagtgttttgaattcaactgagaaaaacgacaaacgaggatgtttcaagagagcagcgcgacacggtggccgactcagccgactcagtggactcgctaccacgacaagctcttcgaacgggctctgctggtcgtgccggaggacctgccggaccggtgggagaagatcgccgaccaggttcccggcaagtcggcggtggaggtcagggaacactacgacgccctcgttcacgacgtcttcga

SEQ ID NO: 3985 - DNA, 309 bp, Glycine max
  unsure (1)..(309): unsure at all n locations
  Clone ID: LIB3028-015-Q1-B1-A1
gtaatttcagccgagaaggctcaccatgagcagctatcagttggtgaaatcaccaacagtgcattcgagccatcatctatgatggccaagtgtgatccccgccatggcaaatacatggcgtgctgtctcatgtacagaggtgacgtagtgcctaaagatgttaatgcagctgttggaattatcaagaccaagcgcactattcaatttgttgactggtgccccaccgggttcaagtgtggaatcaattaccagcctccgactgttgtccaggtggtgatcntgccaaggttcagagggccgtgtgcatga

SEQ ID NO: 3986 - DNA, 369 bp, Glycine max
  Clone ID: LIB3028-015-Q1-B1-A10
tgacgctggaagcgtgcacgcacgctgcgcacaatgagaagcttccgctgcgcacggtggttcaggttcagtgcttcgagcagcttcagctacgacacgccatcgccggaacgctgatggcggctgacgcagccgcagaacctgcgcggcagtctgcggcactggaacgggaaacggagggcggccgacgagaaggattagggttatgacttacagcacgtgtaggaatagaacggcatgtggaacgtgccagtaagggagaatcacgtactgcccttggagattgatcgcatgatgacgcgagtacatctcatggaacacgaatgttcatctatggttagattcatcggcaagtttgataagtccgac

SEQ ID NO: 3987 - DNA, 370 bp, Glycine max
  Clone ID: LIB3028-015-Q1-B1-A11
gcgaacaaagagtctaaacgaacacagaacgcgttgtgaagaatcgccgaagagggacaagtcatctgtgtccacagccgtacacgactggaaggaacatctcacgaagggagaagagtccacgacattgactgtggtggattttactgcgtcttggtgcggtccatgccgtttcactgccccaattcgtgcagagtgtgcaaggtagttgccaaatgtcatcttcgacaaggtcgatgtgtgatgaattggagactgtgtacaacgagtgcggaactgaggctatgccaaccttcctgttcgtgtacaacggcaagctggtgaataatgttctaggtgccaagtcagaggagcttcaattgactctaac

SEQ ID NO: 3988 - DNA, 372 bp, Glycine max
  Clone ID: LIB3028-015-Q1-B1-A12
agaaatttaaattcggaactaaaaaataatgcgttgttctgcattgtgtgcaatggatagttgtatcagttctacatcttgcaggagtggggcgaatagctgaagctgggacatgcatccaagcaatttagtgtcgttgactttaatgattcatgtcgcgggctataccgtctcattgctgtatgctcgagcactaattcgctaaaaagtagccgaatgtcaccatcttcaaagtgcaagtttgtgacattaagacagttcccatagagtgcggaattgagtggcttcttgtctgattgtccttgaaacatggcaagcaggtaaacattgttataagtaccgtgtgagatgaacatctattgacagttaccc

SEQ ID NO: 3989 - DNA, 211 bp, Glycine max
  Clone ID: LIB3028-015-Q1-B1-A2
ctacaagttcattggttctgcttttataatacaccaaagaaaaattttctatattgggttgtttcaataaccgtgtgtggaatatttagatgttttagcatgctctgtgagcaattgattcttcctcaacccctctccccttatttttcccaactcctgttttccctaatgaatgttgtatctttgcggctttgccgcaatccttattgat

SEQ ID NO: 3990 - DNA, 257 bp, Glycine max
  Clone ID: LIB3028-015-Q1-B1-A3
cggatcggctctaattaatgatatgcggctacactagccacatggcagctgtctatacagggttgattcatggcccgtctgtagattacctagatgtattaacacgctctgtgagcaattgactcttcattatcccctctcacattattatgactaattcctgtgttccctaatgaaggttgtagctttgcagctttgccgcagacgatatgtgataaactacaagggcagtgggacatgtggcggtcacatacaac

SEQ ID NO: 3991 - DNA, 410 bp, Glycine max
  Clone ID: LIB3028-015-Q1-B1-A4
gattgattactatgtttataggtatatattataacttatgttggatttataatccttagaatagctgctgtcccaatatttgctatagtgcttttgggactagcttctctgctgctatccaagattgataactgtggtaatagaaaagggaatttgcattatttcacctacaggtgcataatcagccaactgatatgacattttctgtggaatggacagaatcattattatcatggtgatgttaatcagtagatcattttccatgtggcttccagatgttaatctcttaatagaatttttcattgcctagtattgagaataaaacagagtagagatttaaggttctgtatgcaatacaatgaattgtttattagcattgtctatttcttgatgccgatggttgtcattcc

SEQ ID NO: 3992 - DNA, 361 bp, Glycine max
  Clone ID: LIB3028-015-Q1-B1-A5
ggtgttttggctttgtcaattttgaaaacccatatgatgctgccaaagctgttgaaggacttaatgggaagaaagttgatgataaggagtggtatgttggaaaagcccagaagaaatctgagcgtgaacaagaactgaaaggacggtttgatgcacagtataaaggaatctgctgacaaatatcaaggtgtgaacctgtatctcaagaacttggatgatactatcagtgatgacaaacttaaggaaatgtttgctgaatatggtacaataacttcatgcaacgttatgcgaaaacccactggaatcggtagaagattaagatttgttgcagtttcaaatcctgaagaagcatctcgttctc

SEQ ID NO: 3993 - DNA, 405 bp, Glycine max
  Clone ID: LIB3028-015-Q1-B1-A6
ctcgagccgaatcggctcgaggacaagcctctaaggcttccattgcaggatgtctacaacattggtggtattggtactgtgccagtgggacgtgtatagactggggttgtgaagcctggtatggtggtgacttttggtcccactgggctgacaactgaggttaagtctgttgagatgcaccatgaggctctcacagaggctcttccaggtgacaatgttggatttaatgtgaagaatgttgcagtcaaggatctcaagcgtggttttgttgcatccaactccaatgacgaccctgccaaggaagctgccaacttcacatcccaagtcattatcatgaaccatcctggccagattggtaatggatacgcaccagtccttgactgccacacttctcacattgctgtg

SEQ ID NO: 3994 - DNA, 350 bp, Glycine max
  Clone ID: LIB3028-015-Q1-B1-A7
gcgttccgcggaacagacaaagagaaagtaccaatttctttagatagtcatggcttccaccttcgacgccttcaccgtctacgacgaccacttcgccgcccccgccgccgccgacaccttcactggctaccccgacgtctcctccgtcccctccgacgacgtccccgtcgattacaccgacaccgcggcgtcgccggagatcctcggattcagcgatcccggtccagtttactcccagtctcccttcgagcaatgtgcaccataatgggaatggaaatggaaccgaagacggctactgcgacggcgttttcgtcttcaacggaccggtgcttccgccgccgggagaaatg

SEQ ID NO: 3995 - DNA, 371 bp, Glycine max
  Clone ID: LIB3028-015-Q1-B1-A9
atgaagtaccacgtactatgcctggttatttcagttgagatgcttcttctagcatgaatattcaggatcacggtaaatactacactgaatcatcctttaccattgatcaaatatctgcctggaatgcacatgcagaatcagattccgtctgtctacaatcacaccacatacttattaggcaagatcagggctaaagaaacataattgagtacatgaactgtacattgatgtctacatgtagaactcgggagcatgtctagagggcagagttgctggcttgcctagtcggaaagttcacggcagagatttcactaatgaagcatggggatatcatgttgggttgctaggagaaatattgcaaatctacacag

SEQ ID NO: 3996 - DNA, 279 bp, Glycine max
  Clone ID: LIB3028-015-Q1-B1-B1
gaagaataatcgagacacagatcatagtgatcattttttaatttctcagatttatccgacgtcgctgcagatccaccaaccgttatggctgccttcagcggtgatgaaacggcaccgtttttcggcttccttggcgccgcagctgccctcgtcttctcctgtatgggagctgcctatggcacagcgaagagtggcgtgggcgtggcttccatgggtgtaatgagacctgagctggtgatgaagtcgattgttcctgttgtcatggctggagttttgggc

SEQ ID NO: 3997 - DNA, 354 bp, Glycine max
  Clone ID: LIB3028-015-Q1-B1-B10
taagattaatggacaagagtgttcgacggaccttgagaagatcaagcaagtggggttgtatgatcccatatccttcactctatcagacatatgccgtcggtactatcataaggaaacaggtcttgatgtagtcatgattatggccattacatcatagcgctcactgcttccttcaagattcagtgcatgcatggctgtggctgtcagagtacgaaggagtcgcagacagaccgatgatgacttctttattgcaaccgcacacctcaaagacgaaccaatggcacatattgtagcactttatatctagatgtcatcatgacagtactagtgtgtagacactaatcctcatatcag

SEQ ID NO: 3998 - DNA, 378 bp, Glycine max
  Clone ID: LIB3028-015-Q1-B1-B11
gaattttatagagagagagagtttttagagagagaaaggatgaagatcacggcattgttggtgcttaaatgcacaggtgagggttccgatcccgttattctggcgaacgcttccgacgtcagccacttcggttacttccagcgttccagcgtcaaggagttcatcgtcttcgtcggtcgcaccgtcgcccgtcgcacccctcatggccaacgccaatccgtacaacacgaagagtacaaagtgcacacatacaacagaaatggtctttgcgcgttgggatttatggatgatcattacccgattcggagtgcgttttctcttctcaaccaggtaatagatgaatatcaaaaaaactttggcgagtcatggagaaatgct

SEQ ID NO: 3999 - DNA, 376 bp, Glycine max
  Clone ID: LIB3028-015-Q1-B1-B12
gaattttatagagagagagagtttttagagagagaaaggatgaagatcacggcattgttggtgcttaaatgcacaggtgagggttccgatcccgttattctggcgaacgcttccgacgtcagccacttcggttacttccagcgttccagcgtcaaggagttcatcgtcttcgtcggtcgcaccgtcgcccgtcgcacccctcatggccaacgccaatccgtacaacacgaagagtacaaggtgcacacatacaacagaaatggtctttgcgcgttgggatttatggatgatcattacccgattcggagtgcgttttctcttctcaaccaggtaatagatgaatatcaaaaaaactttggcgagtcatggagaaatg

SEQ ID NO: 4000 - DNA, 409 bp, Glycine max
  Clone ID: LIB3028-015-Q1-B1-B2
atgatatctcaccctagatgtctggttcaccagtaagattgcaggtaagctatggattccatattttgaatataagctgggcaaagcagaagattgctcaagtgctacatgttgtacttgaggaaacatggaactaagaatctcaactcccttgtagaattttatgagagaaacacaggattagaagccaaggacaatgctgttgttggtcaaccgagcaactttttgagtgatgaacattcaactatgaagggcttctccctcaaagaaatatttaacagggaaccttacttggcattatctatattgtttctctgtttaaggattattctctttgtatttcccacgattatgccacgcctcaaagcattctggacttcctatgcttctcatttgaacttgcaaatat

SEQ ID NO: 4001 - DNA, 392 bp, Glycine max
  Clone ID: LIB3028-015-Q1-B1-B3
gcccctcctcttcttctaagatctgaaactacttgttttaactttttctattcaacgactccgttccgttctctttcttcctcttcgaaaccctaataagcttctgcacttccttctgattccacttttgcttcaactgggaagatactgtagggcctgggccacctaatgatgagatatccaatttctacataagttgccattgatacttttttaatcaaatggattcagtgcctgctgatgtgtctaattcacatactattaatgacccgtcgaagtcacctccggctaaagagactgacagacaagcttctgcttctgtagcctccgggcaagataattctccacatgaggcatcacctaggctatctcccacgggcatatcatcctgg

SEQ ID NO: 4002 - DNA, 214 bp, Glycine max
  Clone ID: LIB3028-015-Q1-B1-B5
ccggctagataatctgcaaatcaatgaaagtggttttcttttctttgtaacatcaatttaatcgttgtttgttttgttaattaaagccttaatgctgctgagaaacagatcaagagctgtgacgaagccaagtttgatgggtgatcacagctcctcccatccatgtcgaaatcagagttacaaatgaaccatcattccttctctattttcacca

SEQ ID NO: 4003 - DNA, 407 bp, Glycine max
  Clone ID: LIB3028-015-Q1-B1-B6
aaagaaaaaaaatgggttcttctctgtggacctgtctgattttgttatcacttgcttctgcttccttcgccgccaacccaagagcaccaattgatgtgccatttggcagaaactatgtgcctacctgggcctttgatcacatcaaatacctcaatggtggttctgagattcagcttcatcttgataaatacacaggtactggcttccaatcaaaagggtcctacgtgtttggtcacttcagcatgtacatagaattggttgctggtgattcagctggcacagtcactgctttctatttatcatccacaaactcagaacatgatgaaatagactttgagttcttgggaaacagaagcgggcaaccttatattttgcaaacaaatgtgttcaccggtggcaagggtgac

SEQ ID NO: 4004 - DNA, 414 bp, Glycine max
  Clone ID: LIB3028-015-Q1-B1-B7
ggaggaagaagagaggagaaggagaatgaaagatgcgcaagtctttcaaggattcactcaaagctcttgaagctgacatccagtttgccaacacactagcttctgagtatccaagtgctggtgcttgcttccaaatgagattgtcctacagcccagctgctcaattcttcctttttctggttaagtggactgactgtcaccttgctggagctttaggattgctcagaattcttatatacaaggcatatgaagatgggaagacaaccatatccatttatgaaaaaaaagccagtctgaaggaattctatggtgtggtgtttccctctttattgcaacttcacagaggaatcactgatgttgatgaccggaaacaagaacatctatgtgctactaagtataagcattaagattgac

SEQ ID NO: 4005 - DNA, 412 bp, Glycine max
  Clone ID: LIB3028-015-Q1-B1-B8
gtgagggccttccatggcttccgcttgtgcttcctctgcaattacagctgttgccatctctacgccgagttccgggcagaagaatggatcaggaggttgttttcttagtggaaggaaattgagggtgaaaaaggagagagcagcaattggaggacgatcgatgggcactacagtgtgcgcagttgctgagcctgacagacctctatggttcccaggcagcacccctcctccatggcttgatggcactctacctggagacttcggctttgaccctcttggtcttggatctgacccggagagtctgagatggaatgttcatgcagagctagtgcactgcagatgggcaatgttgggtgctgctggcattttcattccagaattcctaacaaagattggtgtcttgaacactcct

SEQ ID NO: 4006 - DNA, 340 bp, Glycine max
  Clone ID: LIB3028-015-Q1-B1-B9
aatgtagcctactcagaagggccctcacagatgaacgaggatctaaaaggtataaacaacggattccttatccttcctagttttgaacattttgccgccgtgagagcatgaggcagattacctttgtaaattgagatttttggtcattttatgcaaaccgtgagttatggcgtcgaagttttgtgactggaaggcaaaagccttctgatgaggaaggaatcaagggccctaagctgatcaatatttacgtcattgctgattgcgtagaaagatgctaatcctcactttgtataattgtctgtgtatatgtaatccttgcactaagattttgcatgcaatt

SEQ ID NO: 4007 - DNA, 398 bp, Glycine max
  Clone ID: LIB3028-015-Q1-B1-C1
gtcttctgcttggtcaaagcccggcgcgtgggccctagattccgaggaacacgaagccgagctccttcaacagaacaacaacaaccccaacgacaagccactcgccgacttcccctcccttgccgccgccgccgccaccaagcccaagaagaagaaggcccagacctactccctcgccgaattcaccgccaagcccgactccgccttcgccgaccaagatcccgtcgtcctccccaccggcccccgccagcgcaccgccgaggagctcgaccgcacccgtctcggtggcggcttccgcaactatggcgaccgccccaacaggaataactcctccggcggcgacgagtcttccaattcccgctggggttcatctagggtttctgacgagcccaggagaa

SEQ ID NO: 4008 - DNA, 385 bp, Glycine max
  Clone ID: LIB3028-015-Q1-B1-C10
ggagaagatccagcacagtgaggtggaagtgaagggactgaagcttcacgtggcagagattggaagtggctccaaaacagtggtattcttgcatggattcccagagatctggtacacatggaggcaccaaatgatttctgtggcaaacgctggttatagggctattgcctttgatttcagaggctatggactttctcagcaaccagcagagcctgaaaaggaaaccatgtttgatctggttcatgaaattgtaggccttttggatgctttgaacatctccaaggccttccttgttggaaaggattttggtgccattccaggacatcttactactgcagtgcacccagaaagagtagctggtatcataactttaggcattcctttc

SEQ ID NO: 4009 - DNA, 259 bp, Glycine max
  Clone ID: LIB3028-015-Q1-B1-C11
ggcaaaagaagcatgtcaagattcttaccttggcagggcacattgcataaatgagaaaaagggctgtccttgagttttgttatgaattcaaatgtcacatctaccatttttatatttggatattttgatgtgatgtgcaagtttgagttctttatcaatttatgaggagtaaaacaggtgtagaaggcttctacttaaataactagtatatgatttggtttcttgcctaaaaaataggaaaaaaaaaaatataagacat

SEQ ID NO: 4010 - DNA, 298 bp, Glycine max
  Clone ID: LIB3028-015-Q1-B1-C3
caatttctctctcgtctgctcacactctctcacttgggggttgaagatgagaatttgtggagcaccaatcatcagcagctacaccaccacgtccaactcgcttttagtgtttgcttcctcttcactctctaatcctgccaaacccaagttcctgccctcactttctggattttctgtgaaacgtctctgcttcctttcccaaactcgtccgcacatttccgtgaagaagccctccatgaacctgttgaacacactccggttttgcaacgcaagaacaccagacaagatggattcaacc

SEQ ID NO: 4011 - DNA, 296 bp, Glycine max
  Clone ID: LIB3028-015-Q1-B1-C4
ggatacggagacatactgacagtgacttggattgcatcgctctctgtgtgttggaataggggaatcgtcaatatgagctccttcattcgttctaatacgcttgtgatgtgagctacttcgccgaacccaaacatggggattgtgggaagcgtttccacattggctacgcacccttttttttcacgcatgaaattgacttatccctcagaagacttcagtatgctgggaatacatgacttggtaatgtagttgctactggtggatatcatgaggacatgattccatctgttggattc

SEQ ID NO: 4012 - DNA, 357 bp, Glycine max
  Clone ID: LIB3028-015-Q1-B1-C5
gtcaaagcacttcgcgaagcgtgacaagcagtcaataaagaacctggcgtcgtcgccgaagctctaggaggctggcaacgccccctcactggccattaaagccagcgtggataagaccaatatgaggttcgacagttatgcgaagcaggggttgctgtgcagcggtgcatggttgccgcacctgatcgtgaacggataccagacgcactcaggtgagttcatcacacccggtatactaatcctgtacatctccggatggatctgcagggttggtcggacccacttgattgctatcagggaccataagaatcacaccatgaatgagatcatcatcgatgttcctctggcttctcgctt

SEQ ID NO: 4013 - DNA, 404 bp, Glycine max
  Clone ID: LIB3028-015-Q1-B1-C6
cttcgtcctctcgctcgctcttctcactcgtcatcttcgaattcgtctgcgctctaagaaaattcatttcacttccaactcctctgatcaggatcctaggctcgttcttgaatccctaattcgatgtcctcctcctcctccgaacaatagtaggaggatcgatgtgagcagcatcttgcctggagtcttactgcgcagcctgcgcattcgagtcatgtaagaccgtcgtttcgggaatcagccgtcgttccgcgaggattgcgtactgcggcttcgtcgccttcgaccttgacgacgcatgaatcgtccgcgaggtcgccgctcatcacaaggaatcacttccctggatcactcatgttattcacacgtttaacctagaatggttttacacagatgcaattctg

SEQ ID NO: 4014 - DNA, 420 bp, Glycine max
  Clone ID: LIB3028-015-Q1-B1-C7
aagtgatcatgaagatggtataaaggattctgaactaacggacaagataaaatcctcagagatgattgatgctttggaggaggcgcgaatggctatagagcatacagtgattctaaagggagaacctgtggatctactcccaagatcatcacacataatatctctgcagctggaacttgttcgcaaataccaactagaaacaaggagaatcagtggagattcaggtgtacatttgcgcatacttccatcccattatgaaacggatgaagtaaaaactagtgaaacttctgagtttgatagtgaattattagatgactttgcctccaatggcagtgtgaatggctcattcaacagcttggatagattgcccctgctacccgagtaataactacgttcacttaattgtatactcataatgga

SEQ ID NO: 4015 - DNA, 404 bp, Glycine max
  Clone ID: LIB3028-015-Q1-B1-C8
gttggtgcaatagcacctgaaattcgaggcaaggctggtctgatccctcaggacacagcactcccatggttcataacgggtgtgttcccacctgcaggaacctacaactactgggcagactcctacacactgttcgtgtttgagatggcactgatgggatttgcagagcacagaacattccaacactgggccacaccaggctctatgggccaacaatacttcctatgactagagaagggtcttggaagttctggtgagccagcttatccaggaggacctttcttcatcccactatgctttggtaaggatgagaagtccttgaacgatttgaagctcaaggaactgaataatggactgttggctatgttggcaatcttgggtgactttgttcaagctcttgtcac

SEQ ID NO: 4016 - DNA, 327 bp, Glycine max
  Clone ID: LIB3028-015-Q1-B1-C9
gtgtgtacaccacaagtgccatctctacgcagcgctcgcataattgttgttgatacagaatttgtatcattgataattcgagtgttcgcctcttcaagaacttaggtaactgtacatcatcatacatctgtacgttgttatgatggtctcctaggtgaattctgatcacacaacatactaagactggcacaccatagtcgctacgctcacacacctggtcctacgactatatattagtcctacaggttcttgttagccatgttacctacttacgacatttcatcaacacacttcgacaagagtaggatcaaacgtgcttaaaggact

SEQ ID NO: 4017 - DNA, 342 bp, Glycine max
  unsure (1)..(342): unsure at all n locations
  Clone ID: LIB3028-015-Q1-B1-D1
gaaaagttagggttcacaacttttccttttccttttgcttgcgaatctgaatcaaataatcaatcatccattcattattcatcatgtcgtcggcgaagaaaatcacgctgaagagttcggacggcgaggctttcgaggtggaggaggcggtggcgctggagtcgcagacgataaagcacatgatcgaggacgactgcgccgacagcggcatccctctgccgaacgtgacgagcaagatcctggcgaaggttatcgagtactgcaagaagcacgtcgaggccgcgaatcncgaagacaaaccctccgaggacgatctcaaggcctgggacgctgaattcgtca

SEQ ID NO: 4018 - DNA, 391 bp, Glycine max
  Clone ID: LIB3028-015-Q1-B1-D10
tatagcttcatcccaaaaagctcttttccttctaaatttgattccttagttcagcattctattattatatatggcttcttcaccttcctcagaaaacaaaaacctagagggagtagctggtggtgccggagagaaacccattccacttggtgagaacgttctgcagaagcatgctgcattctttgacttgaataaagatggtgtcatctacccatgggagacttttaaagggttgcgtgaaatcgggactggggttttgctgtccgttggaggtgctattttcatcaatgtgtttctcagtcagaggaaagtttccatctatactttttccaattgaaattaaaaatatccaacgcggcaaacacggcagtgacactggagtctacgatac

SEQ ID NO: 4019 - DNA, 384 bp, Glycine max
  Clone ID: LIB3028-015-Q1-B1-D11
caaaaacaaaaggttgaagaatttgacagagtgagagtgtaaggtagagtcagtcagagatatagaaatggcttcgtggtgcagtgttcgaagcttccaggttccggcgatggaaggcagcgcactgcgcaaccgtgcttcattggccgccagagtggggtgtttgtccgtggccggcacctccttctggcgttcctcatcgtcaccgaagcactctttgtcattcacatgcgtgagcatttcttccgaaactcgtattaaggaaaatgttcagacagaaggggcacctgcggctctgggatcatattctcaagcaatcaaatccaacaaccttctttttgtgtctggtgttcttgggcttgttcccgaaatcgggaagttcgt

SEQ ID NO: 4020 - DNA, 361 bp, Glycine max
  Clone ID: LIB3028-015-Q1-B1-D12
ggcagagaggaggggttgtggttgctgtgcatgaggatttggggttgcttagtcagaggttgaagaatcatgtctttgctcagagtgttagcattcgaggaaccgccgatgaagagcatcgtacagggtatacgcgtgtctctagtcgccatcttggtgtgagagacggtatcaggcatttcacgtcggcgtaccacatcatcactcaagcactcgatggcactcaaattcctgagcgagacttctgaagagcatatgcatgtcaatgtggatctacatcgggcacctacagttcagcgcttatcctcgcacaccttggacttcatcactctacccgttgtgtcaggcgccccttgcctgg

SEQ ID NO: 4021 - DNA, 348 bp, Glycine max
  unsure (1)..(348): unsure at all n locations
  Clone ID: LIB3028-015-Q1-B1-D2
ctcgttctctgaaattttaattgacctttcccccctcattgcgaatctctatcaattgctcacgcatccgctcattattcaccctctgataagaaaccggcatcaaacggcccaacttgagaagaagccggcttgtcgangtgaaggtatcgatggaacgaggatcccagaagatgaagcagataataaaggacaacgtgtgagacctacaagattcacatcgtcaaagtgttgaagcaagttcatcccgacatctggatcttcatcaaggctatagggatcatgaacaatttcataaacgacatcttcgagaaactctctcaagagtcatcacgtctcgctaggtac

SEQ ID NO: 4022 - DNA, 178 bp, Glycine max
  Clone ID: LIB3028-015-Q1-B1-D3
tatacatggactacagtttattatccaatccacagtagagtctcctggaaacattgagcaaacggtcaaggcatttctccaaatgtttgagaacaaactcctcgagatgacagttgatgaattcaagagtaatgtaaatgctttgatagatgtgaagctagagaaacacaaaaatttg

SEQ ID NO: 4023 - DNA, 345 bp, Glycine max
  Clone ID: LIB3028-015-Q1-B1-D4
aataattgtgaggcgacggtaaggtcgcgttgtgttgcgtcgtgtcgtgcgctgttccactgtttcacgtttttgtgttcagaccgaaacctaactccgcatcgtaaccatgtcgaccaagcaacgtggaaaagctaagcccttgaacagaaataagtctgacaacaaggattacgacgagattgaagtggctagcattcataagataaacgaagacgagaatgcgctaaacgagttgaaagccaaggcccatcaaaacggagactttggaggttctgggctcaagaaaagtggagagacctaacggctctttatcatgattgtatgcattcaatattgagccct

SEQ ID NO: 4024 - DNA, 351 bp, Glycine max
  Clone ID: LIB3028-015-Q1-B1-D5
cttggcggctgcgagacccgttgtgttctctcttctctctcttttttttcactttcactctcttcttcgacgctctttttaaggttttctcaactcttcgatttggggcttaaaccctcgcttccgagtcacattcggatttacggcttccgtttctggattctgcctcacatgagaaatcagatatcgtgattgagtaatcatcatggccactgttgctactcgcgcggatcatgcaactgatttgctgcacaaactatcgtaggaatctcagatcaagcccttggagattcatgagtcatccaagaaggcaactgggaatcattatggatcagttgattcaggaaatgc

SEQ ID NO: 4025 - DNA, 336 bp, Glycine max
  Clone ID: LIB3028-013-Q1-B1-C7
atgagaaccagttatgcagtgatgatcctgaaagtgatgatgaagccaaagatagtgatgttatatcagacgatgacgacgagagaagttctgatgacgaagctgatgttagtgatgctgatgaagttaagggggatgacattgaagacaatgaacaagctgatggagaggatagtgatgtttcagaacatgaagaagatggtgatctgcattctttaagtgatgatggacttgtgacaaaaagtacaatgaaagactcagcaaaaaagaggaagtttactgattttaatggtcaactgatagctgctgatacaagtctccgggctctgaagaaat

SEQ ID NO: 4026 - DNA, 386 bp, Glycine max
  Clone ID: LIB3028-011-Q1-B1-B12
gcctcacgtcaacgctgttgggtctgggcctggacacgggcccgggccaggacccgggccaggcggacttctccttgtccccaagtctgaagaagtcggtcggcccatggactttgtcggctcacgaattggactcaatctcggaggacgaacttacttctcgtcctctgaggatgacttcgtgagccggctctaccgtcggtctacgcccgtggaaccgggttcgactatctcgtcgaactcgccgcgatgccaggccgacggttgcaatgctgatctgtcgcaagccaagcactatcaccgccgccacaaggtgtgcgagtttcactccaaagccgccatcgtcatcgccgccggcttgactcagcgattctgccagcaatgca

SEQ ID NO: 4027 - DNA, 414 bp, Glycine max
  Clone ID: LIB3028-011-Q1-B1-B2
aagacacagtgttggaggtgcagactatggttctgttagaattggcgcctttatgggtatgaagatgataaaggccaaggcatctgaggaattgtctgagagttgggctgctaatgggttgaactatgatgaagtggaacaagatgacatagaactacttaaacaagaaacctccttagattacttatgtaatttgccacctcatagatttgtgactctttacgctaagacaattcctgagtccattgtcggtgagacatttttggagcaatatcaaaatcataatgatcctgtcactactattgatccgaagcgtacttacggagttagagctcccacaatgcatcgcatatttgaaaatttccgagtcgtgaccttgaaagcacttttaacatctgcagcttcaacctatca

SEQ ID NO: 4028 - DNA, 325 bp, Glycine max
  Clone ID: LIB3028-011-Q1-B1-B3
gtcatcttcgtctttacgcttttcttcaccgaagcgaaaaagaaaacgcttgacttgagagaaatagagcttcgaatcgaaactcagaattataacaaaacacaaatcataatcacaatggcaaggtacgaccgatcaatcaccgttttctcccccgacggccacctcttccaggtcgagtatgccctcgaagccgtccgcaagggcaacgccgccgtcggcgtccgcggcaccgacaacgtcgtcctcggcgtcgagaagaaatccaccgccaagctccaagactccaagtcggtgatgaagattgtgaatctggacaaccaca

SEQ ID NO: 4029 - DNA, 216 bp, Glycine max
  Clone ID: LIB3028-011-Q1-B1-B4
agcagacgagcttctcgagaatccagccttccaattcttaaacgagtagacacgggaagcttagtagtatgcttctatatttgtcttctcaaggctgacaacaaaattagttattggtccttgccattggtggttgtaattgtaaatgcagtcttatatttattttctgtacatctttaaaggggggaagaaaaaaaaacttagatattttttgcc

SEQ ID NO: 4030 - DNA, 358 bp, Glycine max
  Clone ID: LIB3028-011-Q1-B1-B5
gatcactgccccgtttcatgagttttccccttgccatattacctgatttctgagttcactatcaagcaagctaggttggtttacaatggaacaaaaaccattactagcctgcgtttgttttgaaagatttttctgaagttcacgaaattaagccaagtcactgatttgctgtcgccaacggctgaagttgtttccatctgaaggaataattatagatgatctgcacggttgaagatgtacggcatagaactgatctaatgaagtttacagtgttcgtcctgtaaagcagtgttaccttgaattgtactggttatatagcaccatctcgtatcaaagtcacatcaaatgtaatgatatt

SEQ ID NO: 4031 - DNA, 407 bp, Glycine max
  Clone ID: LIB3028-011-Q1-B1-B7
cttcgtggcgggagatcctctcgcagcttctggtgtactttctcgtagaggattacaccaattactggatccacaggtttctgcacaacgattgggggtacgagaagattcaccgcgtccaccacgagtaccatgcgcccattggattcgccgcgccctatgcccactgggccgagatcttgatcctcgggattccctcctttcttgggcctgccatggttcctggccacattatcaccttctggctctggatagccttgcgccagattgaagccattgacacgcacagcgggtatgactttcctaggagtatcacaaaatatattccattttatggtggtgctgagtatcatgattaccatcattacgttggaagacacagccaaagcaattttgcttcagttttc

SEQ ID NO: 4032 - DNA, 408 bp, Glycine max
  unsure (1)..(408): unsure at all n locations
  Clone ID: LIB3028-011-Q1-B1-C1
atcaattataagcatgggtttgtggaacacaacgaatgcagtgtcttgccgctttcacaagtttggtgatgaccaaaagaatctggtcttccaaggtgatgccacgtcttcttccaggggcatagaactcacaaagttagacggtggaggaaaaccagtgggtggcagtgtggggagagtgttatactcttctccagtgcacctttgggaaagctctacagtggtcgcaagctttgaaaccgacttcaccttttccatctcatcagactctactactccaggtgatggccttgccttcttcattgcaccatttgacactaaaatccctccaaactctggtgggagcaaccttggactcttcncatcagacaatgttgttgctgtcgagtttgacacctaccctaatcg

SEQ ID NO: 4033 - DNA, 382 bp, Glycine max
  Clone ID: LIB3028-011-Q1-B1-C10
ttagtttgttccatttcttgcttcttaatttcttgatcatgtcacttgctggtaaaatcagcattgaaattggggtgcatgcaagcgctgcaaagtggttcaacctctttgcaacgcaactccatcatgttcaaaaccttaccgaaagagtgcatgaaaccaagctacatcatggtgatgactggcatcacaacgaatcgatcaaacactggacttgtaccatagatggtaaggttacaacatatcacgagagtattgaatccgttgatgaacctaacaaaacaatcacttacaagatcttcggtgaagatatcgatcaccagtataaggtctttaaggtcatctttcaagcaattcataaggatcatgggggtgcattcat

SEQ ID NO: 4034 - DNA, 368 bp, Glycine max
  Clone ID: LIB3028-011-Q1-B1-C11
caaagagacaattcaacttaagagatcaatatggccaccaccactacccagcctccctctaatatctgttttttccttctgttgttgcttctagcacactttcatttgggcataagccaacttgagctgaattactactctaaaagctgcccaaaagctgaagagatcatcaaggaacaagtcacacaactatataacaagcatggaaacactgccgtttcgtgggtcagaaatctcttccacgattgcgtggttaagtcatgcgatgcatcattactgttagcgacggtgagcgatgtagtgtcggagcagacatcggatagaagttttgggatgagaaacttcaagtacgtaaacactatcaaagc

SEQ ID NO: 4035 - DNA, 379 bp, Glycine max
  Clone ID: LIB3028-011-Q1-B1-C12
agagaaaaaaaaaaaaaaaacagaacaacacagaaactcaaaaccaaaataaaattattatggatcacattcataggttacgttgttttgggacaatacccaaaattccttttctattgctactttccctgcttctcttcagtttcgttaacgcatccttcgacctcgctactatacccttcaacgacggctattctccgctcttcggagctagcaacgttgttcgctccgaggatggatacggcgtacaactccgcctcgatcgctacacaggttcgggtttcatttcctccagtatgtaccagtatggattcttcagcgcgagaatcaagttaccatcgaattatagtgctggtaattgcgtggcctttttaacatc

SEQ ID NO: 4036 - DNA, 333 bp, Glycine max
  Clone ID: LIB3028-011-Q1-B1-C2
gtaacccttcttttctctctctctctctcgtgttctgagctgctagaagcaatggagaggaaaagaagccatgcttctttcaccatgtttgcaatgcttgttggattgctctctcagagccttgtcattcctgtaatatccaccactgttgcagatcagaagaactactacaccccagatccacatgctggaagtccccccacaggctcacacaatagtagtcctccatctcatggtcatgggagctctccagcctcacatcacaatagtccaagtactccatcaacaccctcaggtggaaactgtggatcatcacccccacaacatcatgat

SEQ ID NO: 4037 - DNA, 411 bp, Glycine max
  Clone ID: LIB3028-011-Q1-B1-C4
gctccgtaccagtttcactgcataaatttgagagaaaactctgcaaacatgttggtttatcaggacctccttacaggtgatgagcttctctcggactccttccgttacaatgaaattgagaatggaatgctgtgggaagttgaggggaagtgggttgttaagggagcagttgatgttgacattggtgcaaacccttctgctgagggtggagaagatgagggagtcgatgacgcagctgttaaggttgttgacattgttgatacattcagacttcaggagcaacccgcttttgataagaaacagtttgttaccttcatgaagaggtttatcaagaatttgactcccaagctcgatgcagacaaacaagagttgtttaagaagcacattgatggagcaactaaatacctggct

SEQ ID NO: 4038 - DNA, 391 bp, Glycine max
  unsure (1)..(391): unsure at all n locations
  Clone ID: LIB3028-011-Q1-B1-C5
cgtttcccagatctgctccttccgttccccctcagaaatcagttgaagagcatgggtcgtggagttagcagtggtggtggtcaaagttcattgggttatctttttggcagtggagaggcccctgccccaaaaccagcaacaaataatgccccagcccaacctgaagtgcaggctgtaaataatgtgcctcctccaaaagcatctcctcctactaaaacaatagaccctaacaaggctgctggtatcaacagtcattctactgatggccagaacaccggcaacttcatcacggaccgaccctcaaccaaggtccatgctgcccctggtggtggttcttccctaggttatctctttggtgaacctgnggaggggaaatgataccttgtttgca

SEQ ID NO: 4039 - DNA, 412 bp, Glycine max
  Clone ID: LIB3028-011-Q1-B1-C6
cctagctagtagtctcagttcgtttgagagagaaaaaatggcagagggtctcgttctccgcggaaccatgcgcgcccacaccgacgtcgtgacggcgattgccactcccatcgacaactccgacatgatcgtgacggcgtcgcgcgacaaatccatcattctctggcacctcaccaaggaggacaagacctacggtgtcccccgccgccgcctcaccggacattctcacttcgtccaggacgtcgtcctctcatccgacggtcagttcgccctctccggctcctgggacggcgagctccgcctctgggacctcgcggctggcacctctgcccgccgcttcgttggccacaccaaggacgtgctctccgtggcgttctccatcgacaacggtcagatcgtgtcggcctctcgt

SEQ ID NO: 4040 - DNA, 366 bp, Glycine max
  Clone ID: LIB3028-011-Q1-B1-C9
caagctgggaagcaaggaattatggtggcgtctcagagtcaaaaccccattgagcaaatccaagcgcgcttcaaggacttggaaactggattccgcctctggctctccaagcagtccctccccgtcgaggccgccgtcgtcaccaccaccagcgccgcccagggcgccgccatcggcgccttcatgggcaccctcaccgccgacgcctcctccaccttccccacccctcctcccaacgcctctctcaatccccaagccatggcgtctcttaaacaagcgcaggctctagctggaggtcctttaattcaggcgcgaaactttgctgtgatgacgggagttaacgctgggaattcctgtgtcttgaaa

SEQ ID NO: 4041 - DNA, 381 bp, Glycine max
  Clone ID: LIB3028-011-Q1-B1-D1
caagggttgccttgtccggaaaacaacctcaactgattaacgttggaatctccaagggattggcgggttaaaaacttttaagggaataggaaaaaccaatggtgttggatgctgcccaacggaaccccgggattcaacttcctccaattggaattgttgcggctgtaaaatttgcaaatctttgtcactgttttcctgaatgggcagatgtaatagcagtttccacaagtgcatctttgcatttcattgatagagcagcaatgcccaaggatgtaattctatacacggatgacaatgaatggtctacttggaagaaattaagtgatagcgtgcttcacattgagcttcgcacatgggctgatatcatggtcatcgctccat

SEQ ID NO: 4042 - DNA, 384 bp, Glycine max
  Clone ID: LIB3028-011-Q1-B1-D10
catcgtgctagtccttacactccaatatcaccagcagctgctgaacaacctccttgtttcgattgtgaagtaccctcacctgcaccttctatggtgcctgcgcatcctccagatccctgtctatatagtggcttccttcatcatccaatcccttcgccaaaatcttattctaaaccatcctttccccctgattattcacctgctgctgcccctacctcaaattctgctagccacaccagtgaggaagcttctgatccgtctcgtgaagccgaggtgtcccatggatccaagcttcggcagggtgaagagacgtctaataaactggtgtctcatctacttgctccatcctctttatcttcagcgagtggtgatttccgtggggaa

SEQ ID NO: 4043 - DNA, 378 bp, Glycine max
  Clone ID: LIB3028-011-Q1-B1-D11
ctcattttcattatcttaccactttcaattccaaattcactctcagaaattagaatggctagccaatcaaacactaaatcagttcacgatttcacagttaaagatgccaggggaaatgatgttaatctcgccgattacaaaggaaaggtccttctccttgtcaatgttgcctcacaatgcggcttgactaattcaaactacacagagcttaatcaattgtatgagaaatacaaagggaaaggacttgaaattctggcattcccgtgcaatcagtttggggctcaggagccaggaactaatgaagagattgtggagtttgcttgtactcgcttcaaagctgagtttcccattttcgacaaggtggatgtgaatggtgac

SEQ ID NO: 4044 - DNA, 382 bp, Glycine max
  Clone ID: LIB3028-011-Q1-B1-D5
gagcttgctgtgccacctctgtgttcataccttcttttcacaattaccgtatttggtcttttctgggacttggaatgaccacttacactgcttggtacttggcaatagcagcccttattcatggccaggcagaaaatgtgacacacacgggtccaacgaagctagtgctgtacttcacaggagccaccaacatactgtacacgtttggtggacatgcagttactgtagagattatgcacgccatgtggaagccacagaagttcaagtacatatacttgctggccactttgtacgttttcacactaacgattccttctgctgctgccgtttactgggcttttggtgatgaacttctcaatcattccaatgcattctctctcct

SEQ ID NO: 4045 - DNA, 408 bp, Glycine max
  Clone ID: LIB3028-011-Q1-B1-D6
gaaaaaaaatgggttcttctctgtggacctgtctgattttgttatcacttgcttctgcttccttcgccgccaacccaagagcaccaattgatgtgccatttggcagaaactatgtgcctacctgggcctttgatcacatcaaatacctcaatggtggttctgagattcagcttcatcttgataaatacacaggtactggcttccaatcaaaagggtcctacttgtttggtcacttcagcatgtacataaaattggttgctggtgattcagctggcacagtcactgctttctatttatcatccacaaactcagaacatgatgaaatagactttgagttcttgggaaacagaaccgggcaaccttatattttgcaaacaaatgtgttcaccggtggcaagggtgacagag

SEQ ID NO: 4046 - DNA, 235 bp, Glycine max
  Clone ID: LIB3028-011-Q1-B1-D7
cctctacattgcttccatttgctacggacgcacagtttcttgaccccgtaaacgtggctgctgagaagcacgatccgccgaaatatttcaagtccaggccccaagaaattttgatgacaaaagttttaatattttgtatgtagcagaatgaatgtctatactgaaacaaactaaaataaccgaagtgccattcgtgtgcaatttgttttatgttaatgattagtttaagttatac

SEQ ID NO: 4047 - DNA, 382 bp, Glycine max
  Clone ID: LIB3028-011-Q1-B1-D9
tcttccaattttctcctccaatttcaatttctcgtcgtccctcattatggctcgtctctcgatcgtcgccatcgtcgccgccgtgctcctcctggccctctccgccacccccgcgacggcgcgtccctgcaggagcttcataatctcctcctactccttccgcaaccctaactccaacacgttcgccaccatcaccgagatccgatccttcacccctctctacatcaccgacaaacccccctcctatgcccttttcttcccccacgcgactcagctccctcagcatgagagcgtgcgcccacgcgcccctctagggttcgcctccgcctacgatttctcttcactccgcgaccgcaccaaggacatcctcagcgtcgcccta

SEQ ID NO: 4048 - DNA, 409 bp, Glycine max
  Clone ID: LIB3028-011-Q1-B1-E1
ctcccaatttttcccaatcaaaacgacacacgcattccccccaaacgccgtcgttttccaaagcttcgcgcctttaaatccaatccaaattcccaacaatcaacaacggggtccctccaagtggtggagcctccctccccctccgccgccggccagattcgctttcggctcccttcctccgccgaactcctcgccaccgccgagctggatctcgaaaccaccaaaatgctgaaacgctccggccggcccccgccgccgacgccggagtcgctcaccgacaagatctaccacctccggggtgcgtttctgatggtggcggtgccgctcctcctcgtcacgctcgtgctctacgccatgccttccgcctcctccagcgagtccgtggaggactacgccctcacgcaaacgc

SEQ ID NO: 4049 - DNA, 386 bp, Glycine max
  Clone ID: LIB3028-011-Q1-B1-E11
gatcgagataactagaaacagtgtgatgaaaatgaaggtccttgttttcttcgttgctacaattttggtagcatggcaatgccatgcgtacgatatgttccctctccgaatgaacactggctatggtgcccgtactccggaggtgaaatgcgcaagttggaggcttgctgtggaagcacacaacatctttggctttgagaccattcctgaagagtgcgttgaagcaacaaaggaatacatccatggcgaacaatatagatcagactccaaaacagttaaccaacaagcttacttttatgccagagacctcgaagtccatcccaaggacacatttgtgttcagtatagatggcaccgtactctctaatattccatactaacaaaaac

SEQ ID NO: 4050 - DNA, 220 bp, Glycine max
  Clone ID: LIB3028-011-Q1-B1-E12
cattcctttactgaagtcttacttgaaggatgggtgagaccttgttttcctcgtcactagaattttcgtagcatggaaaggccatgcgtacgatatgtgccctctccggatgaacactggctatggtgccagtactcctgaggtgaaatgcgcaggttggtagcgtgctgtggatgcacacaagatctttggctttcagatcaatcctgaccattgcgtt

SEQ ID NO: 4051 - DNA, 402 bp, Glycine max
  Clone ID: LIB3028-011-Q1-B1-E3
agcgccgtctccgatttccgacaatgggcgaaccaaaataagcaaaaaaaaaaatttcgtacctgatggattgttcttccctgaactgaacgaggttctgacaagagagttggccgaggacggttactccggcgtggaagttaaggttacgccgatgcgcaccgaaatcataattagagccaccagaacccaagctgttctcggtgagaagggaaggagaataagggaacttacctctgtggttcagaagaggttcaagtttcccgagaacagtgtcgaactttatgctgaaaaggtcaacaataggggtctttgcgctattgctcaagctgagtctcttcgatacaagctccttggtggactcgctgtgcgcagggcctgctatggtgtttttgaggtttg

SEQ ID NO: 4052 - DNA, 277 bp, Glycine max
  Clone ID: LIB3028-011-Q1-B1-E4
atatagccagaacgagcatttaaggagatgtttggtctcaacgttaccccacaagctacgattaggaaatcttttacctggacaaccagtgtgaggcacattttgtgactttggagtttacattttaggtaggtagattgggatggcacatgtcaaaatttcccggctctatcgataacgtacataattagttttctccccttatcggataaacaaattgctttctgtcgtctgcatccaactctgattgccattgattgaacagtgggttgtacaa

SEQ ID NO: 4053 - DNA, 378 bp, Glycine max
  Clone ID: LIB3028-011-Q1-B1-E5
cacagttagtacaaaaaagggttacttcagcttccacatatcttgaagaattgatcaatgggcaagtctgtagttgagaagctactttggatggcaattgtgtgcttggtgctgggtgtaatttccattactcccaaggcccaagcagcagtgacatgcaaccaggtggtgagcaacctcaccccatgcatttcttatgtgctcaatggtggcaaaaccgtgcctggcccttgctgcaatgggatcaagaccctctttaacctcgctcactccacaccagaccgccaaaccgtttgcaagtgcataaagaacgctgttagtgcgttccattatggcaagtccaatgtggaccgtgctgctgctcttcccaagcagtgt

SEQ ID NO: 4054 - DNA, 407 bp, Glycine max
  Clone ID: LIB3028-011-Q1-B1-E6
ctcgagccgcggatcttgcccctctcttctctgtgccctctgtgtttctgtctctctgttcctttctttcttttcttattttccatacacatattatatataatatatcctctctgcttatactcctagtattatataaggcctagagacaacattcattgcaattggcagcacataattcaaagggcaatggcctcttggaagaagaccatcacaactccattcaaaaaggcttgcactgtatttaaacagcagcaaccaccaagggattaaaagaagtctcaaacagagcaagagaggcaagtaatggatctgcagggtgaagtgatggcatgtgggtatgaagatgttcaagtgatgtggtctattctggataagtccaaatccacaaactgcaatataacctc

SEQ ID NO: 4055 - DNA, 406 bp, Glycine max
  Clone ID: LIB3028-011-Q1-B1-E7
caccgttcctcattcgcatggagaacgacactgccgccgccgttaacaataacaccaccgccaccgccaccgctaaagcaggttctggaggagtgaaatcgaacaaccataacctagaagaggagcattccaatttgaatggcgaggagcacatggcagaacaagtggaggcagaagaagaggaagatcgagaagccgatgatggtgaaggagaacaaactggatctcgtcaaccttccagaacccctttcactaatctcagccaggtcgatgctgacctcgctctcgctcgaacccttcaggaacaggaaagggcatatatgatgctgagaatgaataatgaacgaagtgattatgggagttgggaaagcggaagctaattgcatgataaaggagatgattttga

SEQ ID NO: 4056 - DNA, 415 bp, Glycine max
  Clone ID: LIB3028-011-Q1-B1-E8
gagagtgatttcagtgagtgatcggtgttcacttgatctcatcataatcgtcagcgtcaattgaagaagatgccgatcagaaacatcgccgtcggaaggcctgaagaggcgactcaccccgacacgttgaaggcggctttggctgagttcatctcaaccttcatcttcgtgttcgccggctcaggctccggcatcgcctacaacaagctcaccgacaacggcgctgccacccctgccggcctcatctccgcctccatcgcccatgcattcgccctcttcgtcgccgtctccgtcggcgccaacatctccggcggccacgtcaaccccgccgtcaccttcggcgccttcgtcggcggcaacatcaccttcctccgcggcatcgtctacgtcatcggccacctcctcggctcaatcg

SEQ ID NO: 4057 - DNA, 386 bp, Glycine max
  Clone ID: LIB3028-011-Q1-B1-E9
gtctaacttttgaagaattctttaaccaccctttccttgctcagaagcaaacagaacgggatgagtcattgaggaataaaagttcttcaaggatggatggtgggttttgttctacagtgtctgatttgagaagaaccgaggaaaattatcaagaagattgtttgcctttcatgttagatgacgactctagtggccccgaggggagttcatccttttcaaggaagaagtcctcaatgaagtcgacctatggatttgatctaaatgctaaactagataaagcagagtcatcatctcctatttcaggatttggtagtatgacacaaagatctgaaaacactactaaaagattggacaaccatacaatttcaagaaatctcactgaatct

SEQ ID NO: 4058 - DNA, 373 bp, Glycine max
  unsure (1)..(373): unsure at all n locations
  Clone ID: LIB3028-011-Q1-B1-F1
caaggtggcaaattttggtcctgcaaaacctgttggaaaggaatttaacaaggtcctcaacaacaataaaaggaaaagaaggcatcctgctccctgagtggatttcaggtgtggctatcactgccaaagctgatgtctacagctatggaatgatgctttttgagtttgtgtcgggtaggaggaactccgaggcatcggaagatggccaagtgagattctttcctaccattgctgcaaacatgatgcaccaaggagggaatgtgctaagccttttggaccctaagttggaggaaaatgctgacattgaagaggtcactagagtcatcaaagtagcttcatggtgtgtccaagatgatgaatctcatangccttc

SEQ ID NO: 4059 - DNA, 359 bp, Glycine max
  Clone ID: LIB3028-011-Q1-B1-F10
catcaatgcccctcaatggtatgatgctgggaaatcggagtactttgcttcatcgtcgaccctctttgtgatcgagttcatcttgttccactacgtcgagatccggagatggcaggacatcaagaaccctggctctgtcaaccaagaccccatcttcaagcaatacagcttgccccaacatgagtgtggataccctggtagtgtgtttaaccccttgaactttgcacctactttggaggccaaggagaaggaacttgccaatgggagattggctatgttggcattcttgggattcatagttcaacacaacgtgacaggcaaaggaccatttgagaacctattgcagcacctctctgacc

SEQ ID NO: 4060 - DNA, 331 bp, Glycine max
  Clone ID: LIB3028-011-Q1-B1-F12
tcccctcggggaattccaattccacattttcaagaaataaggacgcaaaaatgttcatatatgaattggaattatttgttttcttattaagccgatcctgaagccaaaggaaatgagatcggaattcctcggggaattccaattccacattttcaagaaataaggaggcaaaaatgttcatagatgaattggaattatttgttttcatactaggcctatcctgaaaccaaaggaaatgagatcggaattcctcggggaattccaattccacattttcaagaaataaggaggcaaaaatgttcatatatgaattggaattacttgttttctt

SEQ ID NO: 4061 - DNA, 410 bp, Glycine max
  Clone ID: LIB3028-011-Q1-B1-F3
acattctccattccacaacatcaatgttctgatcatgtcggggaagaggccccggccaatgatcggaaagttgtcggagttgttggtctcgagaggccgcacggtggcacttttggacaccactggaagcccaagaggcccattagacatgaagatgatgcaatcaccaagaggcttaaaaaattatgatcttggtggcgttggtcttggaattgtggtggctcttgataaatccaataacgaggttgctgcacgtgaagttttgcccaaacacaccgtttgcacctccaatttgaaccggtccggcccaattccggttcactacaccaaaaacccagatgaatttgatgtcgaggaatacacctatgtgacatgccgcgtacctaacaaaacgttcactaaggtatact

SEQ ID NO: 4062 - DNA, 82 bp, Glycine max
  Clone ID: LIB3028-011-Q1-B1-F4
attacatttttgttaagcgcagcgagtttcaggactttgctgcgttgtgttgctttggtttattaaatgtcaactttctatt

SEQ ID NO: 4063 - DNA, 412 bp, Glycine max
  Clone ID: LIB3028-011-Q1-B1-F5
cggctcgagcggctcgagcggctcgagagggaatcgaaggatctctctctctcatcacatgatcattcagcgagcaatagcatagtgtgaaatttgagtgagcgagcgaggaatcggaagaaaacgaaaccctaagaagaagatgccgaagaagatgggggtgaacacgaaggcggatgcggcaagggcacgtaagagcgcggtggatacggagcgcaaggagaaggagactcgagagaaggaggaccagtactggcgagaggcggagggttcaaagtcacgcgccgcgaagaagaaggaggaagaggccgaaaagagggcggaggcagccgcgcggaaagcggaggcgcgtcggttggcggagcaggaggagaaggagctggagaagtcgatgaagaaagtggacaagaag

SEQ ID NO: 4064 - DNA, 412 bp, Glycine max
  Clone ID: LIB3028-011-Q1-B1-F6
tgaaaaggaaaaccctaagagatgaagagaactcctatcttgttccctctcttctttcttctttgtgccttcacctcatatctaccttcagccaccgctgatgatgatcatgtgtacgacactgacggcgataagcttcaatacggtgtcaattatttcgtgttgccagtgataagaggaaatggcggtggaatacaagtagcaaaagcaggaaacgaaacttgccctctgactgtggtgcaatctggcaacgagctctctgaggggttaccgataaagattgcatctcgatcagcaggagtcgctttcatcacccaaggccagcttttcaagagcattcagttcggtgtgtttccatccacactcagaccaggggtgtccccaggtccaattccttctaagtgggacccac

SEQ ID NO: 4065 - DNA, 361 bp, Glycine max
  Clone ID: LIB3028-011-Q1-B1-F7
gagctgagagcatcaaggaatcgaagaatagaagattcatttttttttctttttgatatggaagctgatgtttctattatttttgttgcgttttcaaaaccctaaattggagaaatcccaatttctccttctgtctttctgctttggatgtttttcaaccaaaaaattgtgcttttcaaatcttttgctctgatgggtacttcaaatcttctcttgtttttctctctgatgagcctgtgtgctatggcggcttccaaggtggtgcttattgggaataatatcactctctcctttgatgatattgaagctaattttgccccagcagtcaaaggttctggaaaatatggggtcttatatttgg

SEQ ID NO: 4066 - DNA, 411 bp, Glycine max
  Clone ID: LIB3028-011-Q1-B1-F8
aaggacctttctctttattgcagctgtataagtgggatgcatttggatattttcctccagatctcagaatatggagtgtagatgagacacaggataactctatattcttaactgatgtgctgagtgggaagtgtacaaataatgtgtcgctgccaaacaacagccaacagctgtctttgggaaccaatagtacattggaaaataaagataatggtcaggatggtggtgagaatgagaacaatctgtctaggaatgaaaattctgcaaaccatcaaattgttgagcgctgtgaggagcaaaaagtgtctgatacttgtacacaatctaatggtaaagatgaatctgttaggagcaatggttggaactctcagtctccaggtttgactatacaagcagatgggaataacaatg

SEQ ID NO: 4067 - DNA, 368 bp, Glycine max
  Clone ID: LIB3028-011-Q1-B1-F9
tggtggttgtagcacttcttcttctggcggaggtggggcccatggctgaggctgtgacatgcaccccaacagagttgagtccgtgtcttccagcaatcacttccggtgctaaaccttccaatgcttgttgcacgaagctgaagcagcaaaaaccatgcttatgtggctacctcaaaaacgctagcttgaagcagtatgttaactctcctaatgcccgaaaaaccgttgcttcttgtgggattccctttccaacttgttaattaattaagccttcttataattaaagtgtgggatatatatatatatatagataaacagttaatttatacacactttgatcctacaaagcatcttgacacaagcattca

SEQ ID NO: 4068 - DNA, 409 bp, Glycine max
  Clone ID: LIB3028-011-Q1-B1-G1
attagtttcaattatacaggcaagaaataatgcccggatattgatctctggctcattgagcttgttcagcaaccgatttttcaggtcaggtgtgcagaaggctgggagtccaaccaaacatgagaagtcaggtaatgagcagttcttgaatgaacttagcacatggattttccatgaacgaggtcacctcaaggcggtgaatgtgcaacaccacaaagttggggaagctaatgaaccagccatctatcggatcaatgataatttggaatactctgttgaagtttatgagtggtctgggacagcatgggaaccttacgtagctgatgatgttcaagtgcaattttacatgatgagcccctatgtcctgaagactttatcaactgatggcaagggccgttatttcacatca

SEQ ID NO: 4069 - DNA, 358 bp, Glycine max
  Clone ID: LIB3028-011-Q1-B1-G10
gttcttcttctttgtcttccatttccaattctctgtgtagaagccatgtctaagggtcctggtctctactctgacattggcaagaaagccagagatctcctgttcaaggactaccacagtgaccagaagtttaccatcactacctactcacccactggagttgctataacatcctcggggaccaagaaaggtgacctttttgtggcggatgttaacacccagttgaagaacaagaacatcaccactgatatcaaagtggacaccggttccaatcttttcacaactatcactgtcaatgagcctgctcctggtctcaagactatttttagctttagagttcctgatcaaaggtctggaa

SEQ ID NO: 4070 - DNA, 388 bp, Glycine max
  Clone ID: LIB3028-011-Q1-B1-G11
cggctcgagccaattatgacagacaaacatttcatgttgatgctggttttattgatcttacaatgggaagtggacaagggcatcacaagcgtaagagccctggaattccttcagtctacgagggaggcagtactagtagatactttaatgctgggagttcaactgatcttcctatatcttcagaattgtggcaggagaagccaaatattgattctcaatatatgccctgggatcattttactatgacacccacattcagaggtactggcctttcaattaagggtgagggttctttgcggaatgtgaggagccgttctacacttgatttggattccaatctgtctaggacccatttatcaagtaatcattcacacaattcctaccctac

SEQ ID NO: 4071 - DNA, 392 bp, Glycine max
  Clone ID: LIB3028-011-Q1-B1-G12
aaaatgcccactttttttcttccaacgctcctcctccttctcatagccttcgccacctctgtctccggccgccgtgacctcgtcggagactttctccggctgccctccgaaactgataacgacgacaacttcaagggcacccggtgggccgtcctcctcgccggttccaatggttactggaattacagacatcaggctgatgtttgtcacgcctatcaaatattgaggaaaggtggtctgaaagaagaaaatattattgtttttatgtatgatgacattgcattcaatggggaaaacccaaggcctggagtcatcattaacaaaccagatggaggtgatgtttataaaggagttccaaaggattacaccggcgaagatgttactgttgataa

SEQ ID NO: 4072 - DNA, 303 bp, Glycine max
  Clone ID: LIB3028-011-Q1-B1-G2
cttttcagctttcattggtgtggcctagctgttttctcaatgagaaagccttcatctctgcaaagcgcacttttgcgctttggggttcccttgttgcttgttatcaccttctgttatgctacttctactgctgcagcaacaactcaagtttcacggaatgaatagctgccaaagacaaacctacatgggcatgatgaagaagcacaattcggattttttcatcataaaccagtattcaagaaacatattctaattccagtatataaacctgtaccaaagccatttccagtgtctaaacctata

SEQ ID NO: 4073 - DNA, 406 bp, Glycine max
  Clone ID: LIB3028-011-Q1-B1-G3
atagaaagcacatagaagagaaagaaagaaaacaaagaggagaaagaaagtagttgaggaagatacaaacaatttttgcagattgttgagaatgcctttcaagaagcctcatcacacctcagacaagaactacataacaggggacgacggaggcaagttcgagatacaacctagaggactcaacattgtgtggggaaatgattctcgatactggaaaattccagaacaaggtcctgcggagctgatccaagtttcatggttggaggtatccggcgtggtaaacttaccaggtgtcaagaaatatagggttgaattcgaagtgagagttaaagacgatgggttcggttggagtggcacggacgtgctagtgatggctaagattgggaaaacgggaaaatatacgtat

SEQ ID NO: 4074 - DNA, 407 bp, Glycine max
  unsure (1)..(407): unsure at all n locations
  Clone ID: LIB3028-011-Q1-B1-G5
ctcctacccactgaagtcgaacccctatttttcctctccctaatggcttctcaagttcttcttcaggcactgtttgcccccaagctaagtttcccttcttcttctcgtaacgtggcgttaatttctagggttccttccaccccaatttcatggcgttgcactcccctcattgctaagcctagtttcgtagtgagagctgacaccaacctcgatggcggtggtgaagccaccgaggatgttccttcggataatgctgaaaaagtttcggaaggcgaagcagaacaagtttcggattctgaagctccgaaatcgcctagaaaaccccgagtcaaactcggagacattatggggatattgaatcagagggcaattgaggcatccgagaagcanagaccaactccagacat

SEQ ID NO: 4075 - DNA, 412 bp, Glycine max
  unsure (1)..(412): unsure at all n locations
  Clone ID: LIB3028-011-Q1-B1-G6
atccataatttaggtgccacactttggtgttcttctttgcaattccccatcctgtgcctcatgactctgactactcaatcaccatggtggtccaaactttgtcccttcccctctagtaaattttttagctggaccctcctccctcgctttgtcgcatcgcatcgggatatggtctctttaacatgtatgtatgttaatgttaatgtcatcactaaaagtaaaaacagaggcttcgagccattttatatatagtgtgagatcatgaaagtaagccttagttattattctctattctatgatctattcaagccaagagttagacaacttctgttcccaagataagggggaaaagatagagaaaaaaaaatgcaagtgagtctcaaagggttntggtttcttcttcattttgtga

SEQ ID NO: 4076 - DNA, 411 bp, Glycine max
  Clone ID: LIB3028-011-Q1-B1-G7
gtccgaagatcaaaaccctctgatggggcatcgtatttgattggtcggtcatagcaattagcaactccacccttcaaacttgaaaggaaaaaaggactttggttatccacgccacaccacgctgtaattaactaaactttctagaatcttcttctctcgccatggccgcgccgtcgtcctccgccgcggcaaacatcatgctggcgatctccgagaagaagacgaacagtgtagatctgtatcgccctctccgcaactacgtggccttccactactcggagcgagaggcgcagaacctcgaggatgatctccaaaccctgaagcaactccgctccgatgtggagcgccactccgattcatcgctcccggcgcgccgtgatcccctccaatcctactacaaatctctctgcc

SEQ ID NO: 4077 - DNA, 296 bp, Glycine max
  Clone ID: LIB3028-011-Q1-B1-G8
agcaggtgtttgaaggaaccaacattcaagattctggaacagaggcagctgttgttgctgctgctgtggctgcggctgcccgtttgactgatgcagacttagtaagatgaatttagatctaaaagccatagcaatgtcttttaacggtacccagcacaagtgcaaggcttgtgacaaaacggtttatcccgttgatcagctttctgctgatggtactgcttatcacaaagcttgcttcagatgctctcactgcaaaggaatattaatgctgaataactattcctcaatggaaggtg

SEQ ID NO: 4078 - DNA, 371 bp, Glycine max
  Clone ID: LIB3028-011-Q1-B1-G9
tggggtttgaggaaactgagctaaggcttggactgcctggaaacgtaggaggcactggcactgaagaagtgctcatcaggaagagaggtttctctgagactgaaactgaaactgaggaggatgagtctgctaccactgtggatttgatgcttaatctttcttctaaggaagctgctgctgctgcagatccaactgataagcacaagactttgcctaaggagaagactcttctgcctgcagatcctgctaagcctccagccaaggcacaggtggtaggttggccacctgtgcggtccttccggaagaacatgttagctgtacaaaagagcgtcggagaagagaacgagaagaacagcagcagccctaatgca

SEQ ID NO: 4079 - DNA, 424 bp, Glycine max
  Clone ID: LIB3028-011-Q1-B1-H1
gctcaaatttctcaaacaaatgggccactaacacaacaactttcacttaccccctggattcaaattcaatccaacagatgaagaactcgtcatccactacctttgtcgcaaatgcgcttcgcaacatatcgcggttcccataatcgccgaaattgatctgtacaagtacgacccttgggaccttccaggaatggctttgtacggagagaaagagtggtattttttcacgccgagggaccgcaagtacccgaacggttcgcggccgaaccggtccgcgggaaccgggtactggaaggcaaccggagcggataaaccagttggtaaaccgaaaccggttgggatcaagaaagcgttggttttttacgctggaaaagcgcccaagggagagaaaactaactggatcatgcacgagtatcgtcttgca

SEQ ID NO: 4080 - DNA, 313 bp, Glycine max
  Clone ID: LIB3028-011-Q1-B1-H11
aagaaatggaagcaaagtttccgcgttttgtctttcataaaaaaaatgttaaattattattttctatgataggattggtttcttgtcttttttctcttgtttaagaatttcggtgtattttaacagttgtaaagcactctgcgctctctctgcatgatcatgtacaactacaagcatgctctctgtagttttcaacctgctgcgcttgcaggggttgtaaaactaatcaatataattaaataaattacattctgtctctctaaaacaaaaaaaaaaaaaaaaaaaaaaaaaaaaaaaaaaaaaaatagggaag

SEQ ID NO: 4081 - DNA, 385 bp, Glycine max
  Clone ID: LIB3028-011-Q1-B1-H12
ctcaaattgaattcctatctagtacttaacataatgcagtgagattcacactcccaacgcttccactttctcccttaaatatcttcattcatctcaacaccaccaccacttccccacttttgttactcagtatgcttggagcccttctcctcaacgctaacttcaagattcatttctcactcatatcatgctaagcccgtgtccccttacccgtcatgcccgcatcgctcagaatgccctctccccaatactcccactgggcctccttgcaggccgacattgaagcccacctcaaacaaaccattcccctcaaagaacccctcgaggtcttcgagcccatgctccacctcgccttctccggcccccggaccaccgttccgggcct

SEQ ID NO: 4082 - DNA, 211 bp, Glycine max
  Clone ID: LIB3028-011-Q1-B1-H2
attctcccatttcctctcagaaccctcgatcactcccacgcgctcctatatcctctccttcaccgtcgctctctccaacgatcacaacaacatcgtcatcccatggcaaacgccgcatctggtatggcagtccatgatgactgcaagttaaggtttttggagctgaagacaaagatgacacaccgtttcatagtttttacgattgaggagc

SEQ ID NO: 4083 - DNA, 412 bp, Glycine max
  Clone ID: LIB3028-011-Q1-B1-H5
aaggatttcaactttaggctccatctaaaaaaaatggctggtttggctagcaatcttcctctaattgttatgataggtctgcaaattcattatgcagcacttgccatattcacaagagccgctctcttagatgggttgagtacaacggtgtttgtagtatacaggcaaggcatagccactttggctttggcgcctatatttttctctcctaagaggagacaatcagtgaaagattctttgggattcaggagcttctttttgatgtttgtgaccgctcttgttggagtcacggcaaatcagaatgcatacttcaaaggattattttatgcatcttctactgcagctaccgctatgagtaatctgataccggcattaacgtttgtaattgcagcaattgcgggatttgagaaag

SEQ ID NO: 4084 - DNA, 347 bp, Glycine max
  Clone ID: LIB3028-011-Q1-B1-H6
ctcgcactttttctcattcacaccgacacacgcattccccccatacgccgtcgttttccaaagcttcgcgccttcagatcgaatccacattcccatcaatcagcactggagtcgctccaagtgctgaagcctccctccccctccgccgccggccagattcgcttcggctcgccttcctccgccgaactcctcgccaccgccgagctggatctcgaaaccaccaaaatgctgaaacgctccggccggcccccgccgccgacgccggagtcgctcaccgacaagatctaccacctccggggtgcgtttctgatggtggcggtgccgctcctcctcgtcacgctcgtgct

SEQ ID NO: 4085 - DNA, 407 bp, Glycine max
  unsure (1)..(407): unsure at all n locations
  Clone ID: LIB3028-011-Q1-B1-H7
aaacgacattcattcatctatggctacccttattgctcccagcaaccactctccccaagaagacgctgaggctctcagaaaggcttttgaaggatgggggactgatgagaaaactgtcatagtaatattgggtcatagaactgtttatcagaggcagcaaatcagaagagtctatgaggaaattttccaggaggatcttgtgaaacgcctagagtctgagatcaaaggagactttgagaaagccgtgtaccgatggatactagaacctgcagatcgtgatgctgttttggccaatgttgccatcaagaatggcaaaaactacaatgtcattgtggaaatcgccactatcctctcnccggaagagcttttggccgtgagacgtgcttatctcaaccgctacaagcact

SEQ ID NO: 4086 - DNA, 339 bp, Glycine max
  Clone ID: LIB3028-011-Q1-B1-H8
gcctcatgtttccgtttccgtttcaatttccactcacaggctttaaccttaccagctcgagataagacatggaccggatcaagcgcccaaggagtccgggagaggacgaagctctgcagaagctggtggagaaacacgggcccaggaactgggcactgatcagcaagtccatcccgggccggtccggcaagtcgagcatgctccggtggtgcaaccagctgtccccccagatggagcaccgggccttcacggccgaagaggacgacaccataatccgggcccaggcccgcttcggcaacacgtgggccaccatagcccgcctcctcaacggcagaaccg

SEQ ID NO: 4087 - DNA, 353 bp, Glycine max
  Clone ID: LIB3028-012-Q1-B1-A10
cttcagcaactgcgattttggatcggaacctcttctgcggcgtagcaatgggacactccaacgtttggaattctcacccaaaaaactacggtcctggttctcgcacttgccgagtgtgtgggaatccacatggattgatcaggaagtatggccttatgtgctgcaggcagtgcttccgtagcaatgccaaggaaattggcttcatcaagtatcgctaaaagagctgttgtcacctacggaccaatattatgttctggcactaggatgttttgaagatgttatgtttgaagaaacttgagacttgtttttttcatctattttattatcagacataatgtgtggaacgaagaata

SEQ ID NO: 4088 - DNA, 330 bp, Glycine max
  unsure (1)..(330): unsure at all n locations
  Clone ID: LIB3028-012-Q1-B1-A11
cagactgcaattgacaacttaatggttcaacaccttgatggaactgttaacaaatggggttggtgcaagcaaaagctaggagcaaatgccatattggcagtgtctcttgcagtctgcaaagctggtgctagcgtcctgaaaattcctctttacaagcatattgctaatatcgcgggtaacaaaaagttggttttgcctgttcctgctttcaatgtcattaatggtggatcacatgctggaaacaaacttgctatgcangagtttatggttcttcctgtgggagcttcctcgttcaaggaagccatgaagatgggtgtagaagtgtatcac

SEQ ID NO: 4089 - DNA, 342 bp, Glycine max
  unsure (1)..(342): unsure at all n locations
  Clone ID: LIB3028-012-Q1-B1-A2
atttgtttttctatagagaaccagaggaggctaagcaacaagaggaggaggaagctccggcaggtgattatgccatcacagatttcaatgcaggtgctattgctgctgatggccagtggcctggtacaattgatcaatcatggagtgatgcagttccacaacctattccagcagcacctggtgtcaactggggggcacctgcagaagcacctgctgctgttgcagaaggagattggggtgaagctgttccaccaccacaacaaatccctgttcctcnctctggaattgactctgtccaaccaactggctgggaataaactagtgttttttgatgctatgatt

SEQ ID NO: 4090 - DNA, 313 bp, Glycine max
  Clone ID: LIB3028-012-Q1-B1-A3
gtgatggcgcagagagctcaaccagtattggccacagatgttttcaagatgggaaacatccaatggaagcaattcaatgtggatacaatcattgcttcattctcacctcaaaaaccattgctaatttttacaccaactgttcctgtcgcataccctgtaatattgttcgtccatggctttttcattcgcaatttctactactcaaagctcctagcccacatagtctcacatggattcataatcgttgctcctcaactgttttccaatgggcttcctatgtatggacccactgaagtggaatatgcaggaaaag

SEQ ID NO: 4091 - DNA, 348 bp, Glycine max
  Clone ID: LIB3028-012-Q1-B1-A4
cggctcgaggccgaaccttggcagattacaacatccagaaagaatctaccctccacttggtgctccgtcttcgcggtggtatgcaaatctttgtgaagacccttactgggaagaccattactttggaggtagagagctctgacacaattgacaatgtgaaggcaaagatccaagacaaggagggtattcctccagaccagcacaggttgatttttgcgggaaagcagcttgaagatggacgtacgctggcagactacaacattcaaaaggagtctacccttcaccttgtccttcgtctgatgggaagtatgcagatctttgtgaagaacttgacagggaaaactatca

SEQ ID NO: 4092 - DNA, 378 bp, Glycine max
  Clone ID: LIB3028-012-Q1-B1-A5
gtttaccgcagcaaacactcttctgagttctgagctagcgaggttgcaatggcgattatctccgatttcaacgaagaggagcagaaacccactcactcttcaccaccgcaaccccaatcctcttcctcttcctcttcctcttcgttcagtgctgcttttgaccggtcaaaccctatcgcttttctggagagagtcttccagttcgtctccgaacacagcgactttctggcgacggagagcgccgagaaggagatagcgttgctggtgcgcgccgccgggaagaagaagagggagtttctcaagtcggagagagaaaaggccgagaagaagaagagagaggacctcaaggcctcggaggagagggaaaaatccgacaag

SEQ ID NO: 4093 - DNA, 350 bp, Glycine max
  Clone ID: LIB3028-012-Q1-B1-A7
ttcagggtcagctccagctccgggttcagggccaccaccaggtaagacgcctctcaacatccccaaatttaatcaagcttcatttatgcagtgatagatcatagtaacagagatttcatttgatagactttcatcacctgtccaaaatctcatgaataacatttccaataatctgactaaagaatgttttattattttttcagataagtttatttaatttcttttaataatttttcgaagaattttagtctattacaaaaaaaataaaaaattcaaggttaaatttcagaacaaaattttcatatcatatgcttccattaaattaaaagtatctctattttattgaaaat

SEQ ID NO: 4094 - DNA, 361 bp, Glycine max
  Clone ID: LIB3028-012-Q1-B1-A8
atccgcagctgctgttattcgcaccgcaaacaaacagtgagccatggccgtcggaaagaacaagcgcatctccaaagggaaaaagggtggcaagaagaaggcagctgatccctttgccaagaaggattggtatgacattaaggccccttctctttttcaagtgaaaaatgttggcaaaaccctcgtctctcgtacgcagggtaccaagattgcttctgaaggacttaaacatagagtgtttgaggtctccttggctgatcttcaaggggatgaggatcatgcattcaagaagattaggttgagagctgaagatgtgcaagggaagaatgtcctgacaaatttccctgggaaatggattcac

SEQ ID NO: 4095 - DNA, 349 bp, Glycine max
  Clone ID: LIB3028-012-Q1-B1-B1
attcgttccaagtatgtggagaaaagatgggcttcaaaaggtggactacagccagcttcaaagtcagctgaaataatctttaactcgaatgaatcaccagctgctagggccaagagtgccactcagaggaataggagattgtctcttgaggaaagcattcttgtgaaacatgtggcacaaattcggcctccagtcacgagatatcatgagggctcctcagattttcaaaagaattcaccaccaccaccattaaggaagccatctgcatcatttgattttgactacactaggggaaagaacaatggtattgttgatcattttgacttgttttccatccatgatgataaac

SEQ ID NO: 4096 - DNA, 392 bp, Glycine max
  Clone ID: LIB3028-012-Q1-B1-B10
gtgaaacagctggacaatctaatttgtttggaactattacgaaaggcctggtcgactcttctaagaatgcagtgaaagctgtgcaggttaaggcacggcatgttgtttcacagaataaacgcagataccaggaaggaggttttgatttagatatgacatatatcactgaaaacattattgcaatgggattccctgctggcgacatgagctctgggtttttcggctatgttgaaggattttacagaaatcacatggaagaagtgattaagttttttgaaactcaccataaggataaatacaaagtttataatctttgttctgagcggttgtatgatgcatcattgtttgaggggaaggtggctagcttcccatttgatgcacacaattgccca

SEQ ID NO: 4097 - DNA, 356 bp, Glycine max
  Clone ID: LIB3028-012-Q1-B1-B11
ctctctcatcactacctctgcatttttctctcgctctctgccttccatcaccctcgccatttcccttcccaagatagtagaagatggcagacgctgaggatattcaacctcttgtttgtgacaatggaacaggaatggttaaggctggttttgctggagatgatgccccacgtgctgtgtttcccagcattgtaggtcgtcctcgtcacactggtgtgatggttggcatgggccaaaaagatgcatatgttggtgatgaggcacagtctaagaggggtattttgactctcaagtaccccattgaacacggaattgtgagcaattgggatgatatggaaaagatttgggatcataac

SEQ ID NO: 4098 - DNA, 373 bp, Glycine max
  Clone ID: LIB3028-012-Q1-B1-B12
aataaatgctcacaaatcaatcaaagactgtccttattagttattacctttttctctctgtccatgtccttccctcaaaactcaaatgcagtccatgcgaaaccttcgtgcaactcatggccttccactttgtctctctggaattactcaccctcgtgctctccctaaagagatggcagatcatgagcgtaggaggaaggccatgaagaggcaaagaggtgctatgcacacaaatcaacaaaagggtatccacagaaacaactttgaaagtgattttgtggaatatggagatcttgatgacgtcatcctgcatgatctgtttcatacttacctggatttaactgcaaaagctgcatagcgccataacctgtta

SEQ ID NO: 4099 - DNA, 351 bp, Glycine max
  Clone ID: LIB3028-012-Q1-B1-B2
gcgcccagatcaacgaactggctctcgggttggaaaatagccagcaacggttcttgtgggtggtgaagagcccaaacgatgcaatagccaacgcgacttacttcaacgcggagagccacgaggatcccttgcagttcttaccagaagggttcgtggagagaacaaaaggaaggggctttttggttaagtcatgggctccgcagccacaggttctggcccatcaatcaacgggaggattcttgagccattgcggctggaactctatactggagagcgtggtgaacggcgtgcctttaatagcctggcctctgttcgcggagcagatgaccaacgcgtttatgctcatgcatg

SEQ ID NO: 4100 - DNA, 254 bp, Glycine max
  Clone ID: LIB3028-012-Q1-B1-B3
aatggcacatgggaatcggtcattcagcaacttgaagctatatgagaccactggaaagacgatcacttggaatgctgacgtgttagatagtcctgaagagccctttgttgtggaaaacgttcttgttcagcctccatcatagtaatgagaggtgtcgatagcatggatctctttacacattgcacgttgtcacatgaatattatcgcatggtcaagcctcaactaagctcaacgtgcatatcctcggatttttg

SEQ ID NO: 4101 - DNA, 382 bp, Glycine max
  unsure (1)..(382): unsure at all n locations
  Clone ID: LIB3028-012-Q1-B1-B5
cgctaaattactttctttccattttccttcgttttctctctctttctcagtttctcagtttctcagtcatcaccatcgcagcagcaagatgtggaaccaaccattcggaaaaaccgatttggaaagcggttctcggcctctgtatccgatgatgctcgagagccctgaactgcggtggtcgttcatcagaaaagtgtacgccataatcgccatccagttgctcgtaaccatcgtcgtcggcgccgtcgtcgtcaccgtccgcccaatcagtgtcttcttcgccaccaccggcgccggactggctctctacatcgtcctcatttttgttccctttataacgttgtgtccactttactactattcccagaagcatcncgtcaat

SEQ ID NO: 4102 - DNA, 356 bp, Glycine max
  Clone ID: LIB3028-012-Q1-B1-B7
caaatataaagacagaggtcttgagatactggcatttccatgcaaccagtttctgaaacaagagcccgggagtagccaggaggcagaggaatttgcctgtacaaggtacaaggctgagtatcccatttttggaaaggtacgtgtcaatggacctgatacagcacctgtctacaaattccttaaagcatataaaacaggatttctgggtagtaggataaagtggaatttcactaagtttttggttgacaaggaagggcatgtcctcgctcgttatggtccaaccacctcaccgttgtccattgaaaatgacatcaagacagcattgggggaggcttgaaagactctacaatcacttc

SEQ ID NO: 4103 - DNA, 363 bp, Glycine max
  Clone ID: LIB3028-012-Q1-B1-C1
gagaaggcaagatgtcgaagagaggacgcggtggttcggcggggaacaagttccggatgtcgctgggtctgccggtggcggcgacggtgaactgcgccgacaatacgggggcgaagaacctctacatcatatcggtgaaagggatcaaagggcgtttgaaccgtctcccctcggcttgcgttggcgacatggtgatggccaccgtgaagaaggggaaacccgatctgaggaagaaggttttgccagctgtcattgttcgccagcgcaagccatggcgccgaaaggacggcgtctacatgtatttcgaagataatgctggtgttattgtcaatcccaaaggagaaatgaaaggttctgctatca

SEQ ID NO: 4104 - DNA, 358 bp, Glycine max
  unsure (1)..(358): unsure at all n locations
  Clone ID: LIB3028-012-Q1-B1-C10
acttganataatgccaagtatactaaatgtcttagtcttaagaagggggaaaaactggaattccaatgattcttaatttcttacaatccaatctgcaaactgagtgagatatataacttgtttttgatttcttcctcatcattttgcatatacaaagattaaaatggaagggttttttggaaattgcttcaatatgattttgctgatgttgtgcttcaccaacttgagcatagcttttgctcaaagtcatatgaatggatttggagagcagccactggccaagattgccattcacaagaccgttttggcgctacacagttctgcttccattatagcagtcccttttgtgctangaact

SEQ ID NO: 4105 - DNA, 274 bp, Glycine max
  Clone ID: LIB3028-012-Q1-B1-C4
attgaaaagaagaagaacctgttttcggaactaaccgacgacatcgttctgaacatcttctacaaactcgaagacgatcctcgccactgggctcgcttagcctgtgtctgcaccaaagtctcttccctcgttagggatttctgttggaagatcaaatgctccctcaccatccctcaagatctcctctccgccgccgcctctgagccccctctcgcgctccacaaactctccttctgctgccccggcctcggccatgccgggcctcctgttcgac

SEQ ID NO: 4106 - DNA, 386 bp, Glycine max
  unsure (1)..(386): unsure at all n locations
  Clone ID: LIB3028-012-Q1-B1-C6
ttccctcttgttctatgctttcaagtagtaccaattgggcactttgtttagtgtcttcattttttttttcatcctcatcaaattaaccccctaaacatcatttagctagctagccaaattaattattaattaggcaaataatgggaaacccagaatccaatttgccacccggttttaggttccacccaaccgatgaggagctcattcttcactaccttagtaaaaaggtagcatccatacccttgcccgtttccatcattgcagaggttgatatctacaagttagatccatgggacttaccagctaaggcaacctttggggaganagaatggtattttttttagtcctagagacggaaagtaccctaatggtgcaaggccaaacag

SEQ ID NO: 4107 - DNA, 288 bp, Glycine max
  Clone ID: LIB3028-012-Q1-B1-C8
acctgatcaagcgcttcacttatgatgagtacattggagcctccgtcactctttatcttgacatactcaacctcttcctttccatcttgaggatcctccgggaagcaaataattagtcatcttgaggttgagaggttgagttatgaatcaaattcaaaagactatgttgcttctttatagtataccgtaggggaagtattgtgaaatatctgtgcttctcttgtactcctttacagcttatgatgatacttttaatgacatgaaatttaaagctttacaattgtatgt

SEQ ID NO: 4108 - DNA, 258 bp, Glycine max
  Clone ID: LIB3028-012-Q1-B1-C9
agacagaaagaaagacactgttcacggttaaggtttgagtctcaaacactctttctttaaagcacagtctcgcattcctccttgcctctttgttctctctttttctctctccttctttctttgtttctgtgtgttcgagattgaagaagatgatgcaggctggacccggcggcatgggccaacaagcgaaccaacaatacgcacagcaacagcaacaaccctacatgatgatgccgccgcagcctcagccccctcaga

SEQ ID NO: 4109 - DNA, 363 bp, Glycine max
  Clone ID: LIB3028-012-Q1-B1-D1
tctctctctctctctctctgaagatggcttcacgcaggctcgtatcttctctgattcgatcctcccttcgtagatctcaatcgaagccctcaatttccgcatcgacatcgaggctcacgtcatccaaccgtgcctcaccgcacggatacttgctgaaccgcgtcgccgagtacgccaccgccgcggctgctgctaccactcctccctctcctcctcctccggggaagaaggagctcggcggcggcgggaagatcaccgatgaattcaccgggaagggcgcgatcgggcaggtctgccaggtcattggtgccgtcgtcgatgtcagattcgacgagggtttgcctccgatcatgaccgcgctgg

SEQ ID NO: 4110 - DNA, 384 bp, Glycine max
  Clone ID: LIB3028-012-Q1-B1-D3
ggagctggaaaaggtataaatctagatttggacgagatgtggatcaaaggattcagtttttggattaaaggtttctcattgctggcctaaatatctgtaatttccgctctggaacccgaactgggatcgacccgcgtcgtctttcagacaaagtatggagatattgaatttggtttctatccaactgttgcacctaaaactgtggaccacatttataagcttgtgcgacttggaggctataacactaaccatttctttcgggtggataaaggattcgtggcccaagtagcagatgttacaaatggaagatcagctccaatgaacgaggaacaaagaatggaagctgtaaagactgttgttggtgaatttactgaagtcaaacat

SEQ ID NO: 4111 - DNA, 385 bp, Glycine max
  Clone ID: LIB3028-012-Q1-B1-D4
atttggccagaaagcttgcaggtgatcctaacttgcactttgtggagtctccagcattggctccatcagaagttctaattgatttagctgcacagcagcaacatgaggccgagcttcttgcagctgctagtcagccccttcctgacgatgatgatgaatcttttgagtaaaattatgccttttgagtcgtgctactgcttatgctacagtatgtaatttggggggtgtaatgttgagagttttggatgccggatttgagtgtcagaaatttaatcattttgctttaatcttaaaagaatctcccaatagtttgacatatccttgtagccaacggctgtagtacgtgcttttgtgttagttggctctcttgaagagacagcggggc

SEQ ID NO: 4112 - DNA, 388 bp, Glycine max
  Clone ID: LIB3028-012-Q1-B1-D5
gaggagtgcaacagagaagaatcacattcgcattctcaatcacatccattcattcactcatccatatcccttctttccagtaacttctctctctagttgatacaaataaaaaacagagtttcatactttacgacacccttttctgcaactgatgatggaaggaagctgaaacagtgaaaaacagcaggaacgaccaccctgtctttgttttttgtatgttgagttgaaactttagagaaagtgaatagtgatatggaggcaaagggtgtgcggttcttagcgtatcaatcaatattttcgagcgttggatctggggacttcgatggggtgaagaaactggtggaggaagtgaataaggaagaaaggtcatcgctctctgatgttatgt

SEQ ID NO: 4113 - DNA, 393 bp, Glycine max
  Clone ID: LIB3028-012-Q1-B1-D6
aattacatagcctcagtaatctgagagagaaacaaaaacaatgaaggtttccattgccaagttccactcccttcccctatgttttttccttctcttggccttcaacacaaaacccctcctagcagcagaaccagagccagtggttgataagcaagggaaccctttggagccaggagtagggtactacgtgtggccactttgggctgatgaaggaggcctcacactaggccatacaaggaacaagacatgccctctttatgttatccgtgacccttcattcattggcaccccagtttcattcttagcaccatgccttgaccatgttccaacactcactgatctaaccattgatttccctgtggtgacagtgtgtaaccagccaacagtgtggag

SEQ ID NO: 4114 - DNA, 392 bp, Glycine max
  Clone ID: LIB3028-012-Q1-B1-D7
cagaaatgttactgcaaacattagctatccctacaatagtccttgtgatattcatatgggtggtacaaccaaagcaacgtcatgggaagattgcaccaggtcccaaggcgttgccaattattggtaacctccacatgctagggaaactcccgcaccgcacccttcaaacctttgcaagaaaatatggacccataatgtccttgaagctagggcaagtccaagccatagtggtttcctcccctgaaaccgctgaactattcctcaagacccatgacactgtttttgcaagcaggccaaagattcaagcctctgaatatctctctcatggcaccaagggcttggtgttttccgagtatagcgcctactggcgcaaagtgaggaaagtgtgcacc

SEQ ID NO: 4115 - DNA, 397 bp, Glycine max
  Clone ID: LIB3028-012-Q1-B1-D8
gccaaacacacatgggattgatccagattcttctgacaatgtatgcactgacgactgttacataagcactggtgatgatctgattgccatcaagagcgggtgggatgactatggcattgcatatggtcgcccaagcacaaacattatcatccacaggctacttggtagaactcaaacaagtgggattgctattggaagtgagatgtctggtggtgtatctgaagttcatgcagaagatattcaattctatgattcatatcatgcaatcacaatacagacttctcctggcaggggtggttacgttagaaacatctatgtctctaacgtgaccttggctaatgtatatattgctattacgttcactggtttatatggggagcatccagatgatgcttat

SEQ ID NO: 4116 - DNA, 381 bp, Glycine max
  unsure (1)..(381): unsure at all n locations
  Clone ID: LIB3028-012-Q1-B1-E1
cctcccaccgattcattaacttcacacacagacacggtgtttccaccacaccatagcacatagtactagtagattaaacgccaaagaaataaattactcactttcacgtaaaccataacgtgcttccaccgcaaccaaccacaatgggtgccgttaggtccataacggtgttgctactagtgttatttatggccatgagctccggcgtgcgctcgtgtccgccgtcggacagggcggcgctgctggcattcaaggcggcgctccacgaaccctacctgggaatcttcaactcgtggaccggcgccgactgctgccacaagtggtacggcgtgagctgcgnacaggagaaccgccgcgtcgccgacatcaaccttccgcgcg

SEQ ID NO: 4117 - DNA, 361 bp, Glycine max
  unsure (1)..(361): unsure at all n locations
  Clone ID: LIB3028-012-Q1-B1-E10
tgagaatcgttcgagactgcaaaatccaaaaccaaaaccaaacacaacacagcattcgtcattcaccgccttgtctcgtcttcttctgtctccgaacacggaatctctctgaatcgcgggattaagagaggaatatgcaacagaggcttaagttgcagcaacaacaacaagccctcatgcagcaagctttgcttcaacagcagcagatgtaccaccctggcatgctcgccgctgctatgtctcagatggagcctgttccaagtggaaatttgcctcctggttttgatacgtctgcatgccgtantgtttatgtaggaaatattcatgtaaatgttcacgataaacttcttgcagaagtttt

SEQ ID NO: 4118 - DNA, 381 bp, Glycine max
  Clone ID: LIB3028-012-Q1-B1-E11
ctcgagccgcggctctttcaacaatccaaacactagcacgcggcagccgttcgttgctgtctgagaacagcaactccccagttgcttctctagacaaagctgatggccttccttcttggatgaaccatgaggaccgaagggtattgaaggctatggataacaaacctgcacctaatgtcaccgtggctaaagatggcagcggagacttcaaaaccatctctgaatgtttaaatgctgtccctcaaaattttgaaggacgttatgtgatttttgttaaagaaggagtatacgatgagactgtgaccataacaaagaaaatgcaaaatataaccatgtatggtgatggatcccaaaagagcatcatcactggcaacaaaaact

SEQ ID NO: 4119 - DNA, 340 bp, Glycine max
  unsure (1)..(340): unsure at all n locations
  Clone ID: LIB3028-012-Q1-B1-E12
gcanaattccctataacgttgttttggttgaaacaacagaacttgtttgttgggggcagggaaggcatttatgtacatggggcagttggactttttccttagagagtgtcccaaagggatgaaaacaatgagcacgggattgttcttgagcacactctctttggggtttttctttagcaccttgttagtgtctatagtgaacaaaatgacagcacatggtaggccatggctcgcagataatcttaaccaagggaggctctatgacttttactggctcttggctatattgagtgctataaatgtggtcttatacttggtttgtgctaagtggtacgtctac

SEQ ID NO: 4120 - DNA, 387 bp, Glycine max
  Clone ID: LIB3028-012-Q1-B1-E2
ctgcacttccttctgattccacttttggtaatataagcccctcctcttcttctcagatctgaaactacttgttttaactttttctattcaacgactccgttccgttctctttcttcttcttcgaaaccctaataagcttctgcacttccttctgattccacttttgcttcaactgggaagatactgtagggcctgggccacctaatgatgagatatccaatttctacataagttgccattgatacttttttaatcaaatggattcagtgcctgctgatgtgtctaattcacatactattaatgacccgtcgaagtcacctccggctaaagagactgacagacaagcttctgcttctgtagcctcggggcaggataattctccacatg

SEQ ID NO: 4121 - DNA, 385 bp, Glycine max
  Clone ID: LIB3028-012-Q1-B1-E3
ttccttttctcttctctgtctaatgggtgccctgagatcacattgaacaatggtgaatgctgtggccgttcttggcagcagtgagggtgtcactggaactattcacttcgttcaggagggaagtggtccaaccaccgtaactggatctcttgctggtcttaagcctggtctccatggtttccatgtccatgccttgggggacactaccaatggttgcctctcaactggatcacatttcaatcctaataacaaggagcatggtgcccctgaggatgagaatcgtcatgctggtgatcttgggaatgttaatgtcggtgatgatggtactgtcagcttcactattactgacagccatattcctctcacggggacaaacaacatcata

SEQ ID NO: 4122 - DNA, 398 bp, Glycine max
  unsure (1)..(398): unsure at all n locations
  Clone ID: LIB3028-012-Q1-B1-E6
gcaggaggctcatcccgccttggacaagctcacctccaagatcagtactctcaatttggaacgcgttcgtcaaattaagagccgattagtcgccatcaccggtcgtgttcagaaggtcagggatgaattggagcacctgctcgatgacgacgaagatatggctgagatgtatctctctgaaaagctagccgaacaacaggtcttggatggcgacgtcgtcgtcgtcgacgacgacgatgacgacgacgatacctcttctgccgacaacggcgatcttcttcaacctcacaggaccgctcctgaattatcgttcgacaatgttctcggtagggacagcgcctccttcagtgccgtcnacaagcaacttgatgtcgaggagcttgagatgctcttggagg

SEQ ID NO: 4123 - DNA, 392 bp, Glycine max
  Clone ID: LIB3028-012-Q1-B1-E7
ggcgactgctgctagaaccttcttttgttatctcgcaatggctgacttaagccccaagccattaccaaacctataaatacacgccttctttttattcttcttcttcaattcatattcataatccacatttattcatcagtttttcgttcccttcacaaaactcagaaccctaactatatccatggcatcgggtggaacagaagcttttccagatttgggtaaacactgccagcaccgcgattgcaaccagctcgattttcttcctttcacctgcgacggttgccaacagatcttttgtttggaacacagattctacaagtcccacgcgtgcctgaaatccgaccacaacagcagaaaggttgttgtttgccaaacatgttccatgtccatcg

SEQ ID NO: 4124 - DNA, 321 bp, Glycine max
  Clone ID: LIB3028-012-Q1-B1-E8
cacgcatctcggaatcccctttcttcatcgcatagatactttcgctagcccaccaagtaacccttattccaattcaccctcgccactccttagatcgaaatcattttttttcgcccggcacaagttgggtttttttttatataactgataatgggtgatagcagtgttcaatctgggtctccaaatgcataaccagatcttgttgacggagactcggcggtttccaataacgcgacatgggacaccactgttcacagtttccaagattcattgtctcctggtaagagactcaatttctgggaaattcagcctgtggggcat

SEQ ID NO: 4125 - DNA, 298 bp, Glycine max
  Clone ID: LIB3028-012-Q1-B1-F1
tttctcccctgaatctcaccactctccgatctttcattctcccctcttttctagctcccgtggagtctggaagcgttctcgagccttctcgctttccacgtgttttgctttgttcaagttcgctctcggcagtggggtttagaactgtgcgttcagggacattatcgcgttccacttctctgtcaaagtgtggcttgcgacagatggtgcgctgggaggtcttcatagacatcggctgcgctgcaaaagcgcgcatcgttgtagaggctggtacctgggcagtcatggcccttgagcg

SEQ ID NO: 4126 - DNA, 126 bp, Glycine max
  Clone ID: LIB3028-012-Q1-B1-F11
ctctaagttgctccttaatttctatgaaataagatcctgagtattattacttagtcatgtaggggcactgaacaatgttgttttcccttttcgaggctttcatgaattatgagctcttgttccatt

SEQ ID NO: 4127 - DNA, 296 bp, Glycine max
  Clone ID: LIB3028-012-Q1-B1-F12
acaccttcaattacctcgtcgacaatggctacacatattgtgttgttgcagatgaatcaattggaagacagttacccatggcttttctagagcgtgtcaaagatgaatttgtgtcaaaatatggtggtggaaaggctgccacagctcctgcaaacagccttaacaaggaatttgggccaaagttgagggaacatatgcagtactgtgttgatcatcctgaagagataagcaagcttgcaaaggtgaaagctcaggtttctgaagttaagggtgtcatgatggagaatattgaaaag

SEQ ID NO: 4128 - DNA, 180 bp, Glycine max
  Clone ID: LIB3028-012-Q1-B1-F2
aaagacttgggtcaacgtgtaaattcttgttttctacatagtcaatgttttagcatattgatatcaataaattgtggaaatagaatattattacttttatttataacttttgagaacaagaatgtttgacctgtacatgtattattatttttgattaagagttgttcgttttgagggttt

SEQ ID NO: 4129 - DNA, 335 bp, Glycine max
  Clone ID: LIB3028-012-Q1-B1-F4
catctctcttcccagttctcacctcaccgctgcatcttcacgtcgtctctaacgagggaaaatgagtcgaggaggtgcagcagcagcgaagggaaagaagaagggtgctacattcaccattgactgtgcaaagccagtagaagacaagatcatggacattgcttctctcgagaagtttcttcaagagaggatcaaggttggtggcaaagctggtgctcttggtgactctgttaccgttacacgtgagaagactaagattattctcacctctgactgtaacttttccaaacggtatttgaagtacttgacgaagaagtacttgaagaaacacaatg

SEQ ID NO: 4130 - DNA, 359 bp, Glycine max
  Clone ID: LIB3028-012-Q1-B1-F6
aatgaaacaaaagtacacaaccctagtactaaatgtgagtgagtaaatcccaatcttaatggttgttgtccaaggctccaaggtccatctcccacacccttcctccctctctccctctccccaccctctcccaacaacctccatcctctttgaaccctcctccctttctcttgccctcacccactctgactcctccctctctctctacccttccttctccccccaaaccctaaccctagccctaaccatcccctcctcttccaaaaccacccataccctacctgctcttcctcctctgtgggtcccaccgtcatatttatagtctcctccccacatagagccggcatcctccttcgcct

SEQ ID NO: 4131 - DNA, 391 bp, Glycine max
  unsure (1)..(391): unsure at all n locations
  Clone ID: LIB3028-012-Q1-B1-F7
tacgttgttgaatcttctagctggtgatttggttccttctgagggtgaagttcgaaggagtcagaagttgaggataggaagatattcccaacactttgtggaccttctaacaatggatgaaacagctgtgcagtatcttctgcgtctccatccagatcaggagggacttagcaagcaggaggctgtccgtgcaaaacttggtaagtttgggctaccaagtcataaccatcttactcctattgccaaactatcaggagggcagaaagctcgggtggtcttcacatctatctccatgtcaaatccacacattttattgttagatgaacccaccaatcatctggacatgcanagtattgatgcattggccgatgcactggatgaaatcaccggt

SEQ ID NO: 4132 - DNA, 342 bp, Glycine max
  Clone ID: LIB3028-012-Q1-B1-F8
attcatccaaatttctcaaactcaagctagcctttgggggatatgatagagaagaagacacagtgtgagaaaaaggaaaaaatggaaggtgaagaaactgagatgaaacaacaatccaggttcaaaaggatttgtgtgttctgtggcagcagccctgggaacaagagtagctataaggacgctgctattgagcttgggaaagagttggtgtcaagaaatattgatctggtttatggaggaggaagcattggtttgatggggttggtttcccaggctgtttatgaaggaggtcgccatgtaattggagttattcccaagacactgatgccaagagagattact

SEQ ID NO: 4133 - DNA, 359 bp, Glycine max
  Clone ID: LIB3028-012-Q1-B1-F9
gaaataagagagagagagaaacagaaaacttcagaagaagagcatcaattgctagctccaatatattaccacaccactgcaaaattttctgaagcagagatcattgtccattatcacagaaatgggtgaagaagaagaaaagaaagaagagaccacagaggaaaagaaggaaaaagagcctccagagatagtgctcaaggttgatatgcactgtgaagcttgtgcaaggaaagttgcaaaagcattgaaaggatttgaaggagtggaggaggtgactgcagatagcaaggcaagcaaagtggtagtgaaaggaaaggcagcagaccccataaaggtgtgtgagagactacaaaagaaaa

SEQ ID NO: 4134 - DNA, 348 bp, Glycine max
  Clone ID: LIB3028-012-Q1-B1-G1
tggctgcgcttggggaacaatcagaagaacaagccatggctgcccaacctaaacctcagaaccgacgacccatttctaacatcgtcatcgtcgttgctatgcagacggaggcacttcccattgtcaacagatttcagctcaccgaggaccctcactctccgtttccgcgaggggttccttgggttcgttatcaggggacatacaaagatcttaatataagcttgatttggcctggaaaagatccaactttgggggttgatagtgtaggcacgatatcatctgctcttgtaacgtatgctgctattcaagcattacaaccagacttgatcatcaatgcaggcactgctg

SEQ ID NO: 4135 - DNA, 296 bp, Glycine max
  Clone ID: LIB3028-012-Q1-B1-G10
aataaagcacagaacagttgaagtgaatggcataaaaatgcatgttgcagagaaaggagatggtccagtggtgttgttcctccacggcttccctgagctctggtactcatggcgccatcagattctctctctcagctccctcggctaccgcgccgtcgctcccgatctccgtggctacggtgacaccgaagcaccaccttcaatcagcagctacaactgcttccacatagtgggtgatctcgttgcgcttattgactctctgggtgtccaacaagtgttccttgtggctcatgact

SEQ ID NO: 4136 - DNA, 375 bp, Glycine max
  Clone ID: LIB3028-012-Q1-B1-G11
caattcaaaaaaaataaaaaaaaataaagtgtttggtaccggcaactaacccaggaatagttgtttttcaattagaattagagtttccttacctccgtaaaattccaattctaattagagaaagcaccgacaatactgcgtttgtacaatatgacaatgacaattaattcaaattgccacagatctcgttttgggtctgtcctaataaaatagtagacacttgtagtttgcactttgcactcactatatatagtccagcaacatcgtcaatttcgactttgcacattttaatcttaatcaatccagcatggcctgattataacctagggctgccaatggagccgctaagatctctatttgtctactgcactacag

SEQ ID NO: 4137 - DNA, 359 bp, Glycine max
  Clone ID: LIB3028-012-Q1-B1-G12
gaaatttggaaaaagggttctgaaatcttagctactgactgcgtaatcactgagatctgccgtcatcctgggttggttttgttgacgggtgcttgctggagtaataggattaagtctgtgagtccttccaatacagggatcacttctagaagtgtcagcaggagtggccatgacgtcagcttaaatagcaggagctcatcagcctccatatccgtcgcttctcggagtgagggtgagatcttgcaatcttccaacttgaaaagcttcagctataatgagctaagagcagccacaagaaatttccgcacggatagcgtcttgggggagggtgcgtttggttcagtttttaagggctggat

SEQ ID NO: 4138 - DNA, 359 bp, Glycine max
  Clone ID: LIB3028-012-Q1-B1-G2
ctccggtttccatcgatcgggaccgccccaaccacgtgctggcaaaatcgcccgctcagtgtcagttagggctcgatgcgtccatcaggacggtgaaccacgcctccaaatccagctcctccacgcaggattcctccgtcgccgtcgactctgtcaaggccacctccgccgtcgcggatctcccggaggaggaggagccacgcgattccaaggccttctccggcgggaacggcggcggagtggctgggagtgtcgccgggatcctgtacaagtgggtgaattacgggaaggggtggagatcgaggtggttcgtgttggaagatggagtgctttcgtattacaagattcacggaccggac

SEQ ID NO: 4139 - DNA, 177 bp, Glycine max
  Clone ID: LIB3028-012-Q1-B1-G3
cgattatgtatactataggtttaatttgtcctgtgttgtatcatgtatgtacagattgggttttaggaacggggagttcaattcatcaaatgtgtaattattgattctttcttcacccactggtcactggaggtgaataatgcatgtgaagaatcgagtttgtcatgttgatatgtc

SEQ ID NO: 4140 - DNA, 339 bp, Glycine max
  Clone ID: LIB3028-012-Q1-B1-G4
gtggtaacaccgaagaatactgttccccttctaagaactgccatatcaactgctggggaggctgcggcagtggcagttgcagctcgccgcggtgaaagtgcttcgaatgtctccgccacatatcatcactatgagccagagcaacacgggtgggacctgaacgccgtgagtgcttattgctcaacttgggacgctggcagaccttactcatggcgcactacatatggctggaccgctttctgtggtcacgttggtcctcgtggccgttattcttgtggaaagtgcttgcaggtgacaaatacaggaacatgagcaaacacaagtgtgagaatcgtacat

SEQ ID NO: 4141 - DNA, 368 bp, Glycine max
  Clone ID: LIB3028-012-Q1-B1-G5
gaaatttggaaaaagggttctgaaatcttagctactgagtgcgtaatcactgagatctgccttcatcctgggttggttttgttgatgggtgcttgctggagtaataggattaagtctgtgagtccttccaatacagggatcacttctagaagtgtcagcaggagtggccatgacgtcagctcaaatagcaggagctcatcagcctccatatccgtcgcttctcggagtgagggtgagatcttgcaatcttccaacttgaaaagcttcagctataatgagctaagagcagccacaagaaatttccgcccggatagcgtcttgggggagggtgggtttggttcagtttttaatgggcggattgatgagca

SEQ ID NO: 4142 - DNA, 398 bp, Glycine max
  Clone ID: LIB3028-012-Q1-B1-G6
caaccatgggtcaatactcaattcatcatcagcttgtggccatagtctcattatttatccttttgcttccaaatatccatgggtggggagacgatgggcatgtcattgtttgcaagattgcacaggctcgcctcagtgaagcagctgcagaggctgtgaagaaactgctgccaatatccgcaggaaatgatttgtccacaaagtgttcttgggcagatcatgttcatcatatctatccttgggcctctgctttgcactacgcaaataccccagaggccctctgcagttacaaaaacagcagggattgtgtagattacaaaaaaggaattaaggggcgatgtgttgtggctgcgattaacaattacacaacgcagctccttgaatatggcagtgacact

SEQ ID NO: 4143 - DNA, 326 bp, Glycine max
  Clone ID: LIB3028-012-Q1-B1-G7
gccaaactgttctgtctcaacctgatgtgatatcaatgtcatttgtaccaattacatctctacttggtggaataaatgggagtggataattaactcatgccatgaatctctatttacgcgataaagcacgaattgatgaactgcatcaatttttggagttccagcttccaaggcaatgggcccctgtatttggtgagcttgcccttggtcctgaaatgaagccacaaaatactgcttctttacagttcagtttcatgggtcccaagctctatgtagacacaacaccggttgatgtgggaaagaacccgtgacatgccttcgattgt

SEQ ID NO: 4144 - DNA, 374 bp, Glycine max
  Clone ID: LIB3028-012-Q1-B1-G8
aatttggcgttcctgctttgcacatgagaaggaatgttggcctgagagttaggtccatggctaaggaagaacaaccaagtgagcctgcaaccccagttacaccgccaccatcagtagaacccaagccacagccagtctctgctccttcaccaaaggtgagcactaagttttctgatgtgttggcattcagtgggccagcacctgagaggatcaatggaaggttggccatgattgggtttgtggctgcaatggcagtggaagtagccaaagggcaaggtgtgttagaacaaatatccaatggtggcatcccatggttcttggggacaagtgtggtccttacccttgcttccttgattccactcttccaaggtgtc

SEQ ID NO: 4145 - DNA, 327 bp, Glycine max
  Clone ID: LIB3028-012-Q1-B1-H1
aaaattgagtgagtctaagattggagaatgtcaaagagacatatcagaggcaaaagccttggtggaggaagcagaacgctctctgttggtaaatgtgggaggtcctgaaaatggcagtacatccatggggatgaaaagtgaagacatcgatagagatgaagagagatgggagtcagtaaaagcagcatcaatttctgcccttgttggtactttttcagggctccccatatgcttcactcaggtcaccaacacaactcagctgcttctccctttagcaatcaacttcatttgctgtgcattgtttggagtgacttttcggtacactat

SEQ ID NO: 4146 - DNA, 192 bp, Glycine max
  Clone ID: LIB3028-012-Q1-B1-H10
tccaacgattaacctgccgaacccggtaaaaaaaaagcctggggccaaggcaacaaacttcgtccccggaaagtgaccgtcaaagaacgaaatgacttttgaaagttttaagatttgtgtttggtgaagtacttcagataatgtgaattatcttgtgtatccgaatccaacttaatgttacttgctttttac

SEQ ID NO: 4147 - DNA, 369 bp, Glycine max
  Clone ID: LIB3028-012-Q1-B1-H11
acgagtggggtttcttccaagtaacaaaccatggagtgcccctcactctaaggcaaaacattgagaaagcctcaaaattgttctttgcacagagtgcggaggaaaagagaaaggttagcagaaatgagagctctccagcgggttattatgacacagaacacaccaaaaacgttagggactggaaagaagtctttgattttctagccaaagaacccactttcattcctgtcacttctgatgaacatgatgatcgagtcaatcagtggactaatcaatcccctgaataccctctaaactttagggttgtaacacaagagtatattcaagagatggaaaagctgtcctttaagattttagagcttatagctt

SEQ ID NO: 4148 - DNA, 319 bp, Glycine max
  Clone ID: LIB3028-012-Q1-B1-H12
taagccggaaggaaaaaaacccgtttcaaaacttggacgaacaaaccccttccgtccaaaccaaaaacgaagccccccttaaacccttttccgtttccgggaaccaaaaccaagaaaccaaggaaaaccaaaccgcaagccaattgcacttctcctcctcctcctcctcctcctccttgggaaacccaaaaccccttaaacaatgacaaaggataccaccgtaagggttccttcttcaaacgaaacctccgcggccaacaaggcttccaaaacccggcagaaaaggaagaaaaagtgggatcaaccggcggagtcattg

SEQ ID NO: 4149 - DNA, 348 bp, Glycine max
  Clone ID: LIB3028-012-Q1-B1-H2
gtagcattcagtgaaacactagctagggtattgggagctctcgttgtttcggagttagggaccttacgcagccatggccactgctacgaatgccgccgccgccccaccacgccagctctcccagaaggaagctgacatccagatgatgttggccgccgacgtccacctcggcaccaagaactgcgacttccaaatggaacgttacatcttcaagcgccgcaacgacgggatttacattattaaccttgggaagacgtgggagaagcttcagctagcagctagggttatagttgcaattgagaacccccaggatatcattgttcaatctgcaaggccttatgggcaaag

SEQ ID NO: 4150 - DNA, 362 bp, Glycine max
  Clone ID: LIB3028-012-Q1-B1-H3
cagcattgcaattattttttattcaaataatgtgtaaccggcctctaaaacatatgaatatgaatatctaacaccagctgttgtataagtaatgctatttatggatttatctcttttagttatgatgtggtttagttaagaagcgcagatatggggtcatgtacgaatttgtgtttaactgtattaactagaacaaatgtgtaaatgtcattcttcatgttgtatattctagtgctttctagtttagtctttcttatataattattttagcatgttgatcatcaaaaagagtaaattacacttttaaaatacatgagtggtatatttatttatcttgccatgcatcataacagtcctagagc

SEQ ID NO: 4151 - DNA, 359 bp, Glycine max
  unsure (1)..(359): unsure at all n locations
  Clone ID: LIB3028-012-Q1-B1-H5
tgcatcgccgacgcttccaacaataacaatggccgataatgcaacaacgcaaggaagcaacaccctattttctccttacaagatggccaaattcaacctctctcatagggtggtgttggctcctatgacaagatgcagagcgttgaactggattccacaggcagcgcttgctgaatactacgctcaaagatcaacaccaggtggatttctcatcagcgaaggcaccttgatctcccccactgctcctgggtttccccatgttcccgggatatattcagatgaacaagtggaggcgtggcgaaacatagtggatgccgtgcatgccanaggcagcattatcttctgtcaactttggcatg

SEQ ID NO: 4152 - DNA, 378 bp, Glycine max
  Clone ID: LIB3028-012-Q1-B1-H6
caagctcagaaaactcaccaccctcaaaactattgatgaaggagaaagtagcaagctgcagaagacgttgtcgatgccgtcgacaccaacaaccccgatgactccgacgactccaacgacaccgggatcggcccgtaaagctgacaacgtttggaggagcgtcttccatcctgggagcaactccgccacaaagaccatcggtgctcagatgtttgacaaaccacttcccaacactcccactgtctatgactggctgtacagtggggagaccagaagcaggcaccgctgaagctgaagtctttagctaagatgaccgtgggttgcatgtaaatattgtcgtttttcgttaagcatctgccacgtttgcagctactaata

SEQ ID NO: 4153 - DNA, 358 bp, Glycine max
  unsure (1)..(358): unsure at all n locations
  Clone ID: LIB3028-012-Q1-B1-H7
aaaaatgaaaacccaaagtgcttctctcctctgtctttttctctctcttgctatccttttggctagtggcactgctgcaagtgcaactccaagaagcgcagtgccaagccaccatgtttcaacattcaacagaagcctttttccttccacttttctctttggaattggttcttctgcttaccaggcagaaggagcagcaagtgtagatgggagaggaccaagcatatgggacacctacactagacagcatactgaaaagatttgggatcatagcaccggtgacatgggagctgatttntatcatcgatacaagggtgacatanaaatagcgaaagaaattgggctggactccttcaga

SEQ ID NO: 4154 - DNA, 396 bp, Glycine max
  Clone ID: LIB3028-012-Q1-B1-H8
gaaccctcgccgactacaacatccaaaaggagtccacgctccacctcgtcctccgcctccgcggcggcatgcaaatcttcgtcaaaacccttactggcaaaacaatcacgctagaggtggagtcctccgacacaatcgataacgtgaaagccaagattcaagataaggaagggattcctccggatcaacaacgtttgatcttcgccggaaaacaactcgaagacggcagaaccctcgccgattacaatatccagaaagaatcgactctgcatttggtgcttcgtctccgcggaaggatgcagatcttcgtgaaaaccctaaccggcaaaacgattacgctagaggtagagtcctctgacacaatccataccgtgaaagcgaggatccaggataagg

SEQ ID NO: 4155 - DNA, 365 bp, Glycine max
  Clone ID: LIB3028-012-Q1-B1-H9
agcagcaatggtgtacgtcaaggctcagaaatcaaaagcctacttcaagagatatcaagtcaagttcaagagaagaagagagggaaaaaccgattaccgtgccaggattcggttgattaatcaggacaagaacaaatataacactccgaaataccgatttgtggttcgctttagcaacaaggacattgttgcacaaataatatctgctagcattgccggcgatttagttcttgctacagcatattcacatgagctgccacgatatggtcttgaagtaggacttacaaattatgcagcagcttattgcactggtctcctgttggcccgaagagtcctcaaaacacttgaaatggatgacgagtatg

SEQ ID NO: 4156 - DNA, 371 bp, Glycine max
  Clone ID: LIB3028-013-Q1-B1-A1
ccccggagactctgctggcacggtcactgcattttatttgaactctgacacgaactacgttcgcgacgagcttgatttcgagttcttgggcaaccgtactgggcaaccttacacagttcaaacaaacatctacgctcatggaaagggtgacagagaacagagggtcaacctctggtttgaccctgctgcagacttccacacctattcaattctctggaaccatcaccatattgtattctacgtggatgattttccaatcagagtatacaaaaacaacgaggctcgggggattccatacccaaagatgcaggcaatgggagtgtattcgacattgttggaagcaaattactgggccaaaaagggttgaattg

SEQ ID NO: 4157 - DNA, 383 bp, Glycine max
  Clone ID: LIB3028-013-Q1-B1-A10
ggagattcatgcctgagaaagggtctcctgaatatgatgcgtcagctaagaaccctgataaggagtttttgaagactattactggcaagaaagagaccctcattgaccttacaattatagaaattttatcaaggcacgcatctgatgagttcgaccttgggcagagagatggcggtgactactggacttctgatgccgggccattagaggcctttaagatgtttggaaagaatcttgaagagattgaatagaagcttatagagaagaacaatactgagacattgagaaaccgctatgggccggctaaaatgccttacactttgctctatccttctagtgacgagggattgactttcagaggaattcccaacagtatctctatc

SEQ ID NO: 4158 - DNA, 364 bp, Glycine max
  Clone ID: LIB3028-013-Q1-B1-A11
ccaagccccagtcaaccaacacaccactctcactgctcttgatcgatctttcaagtcttcagggtattatgatggcaaatacattcatacttacctcagactcagtcaccgaaggacaggctgacaagctctgcgacgaaatctccgacgctgtcctcaatcgcttggcgtgaacaggacccagacagcaaggttgccagcgagacatgcaccaagaccaacttggtcatggacatcggagagatcatgaccaaggccaacgttgactacgagaagatcgtgcgtgacacctgcaggatcatcggcttcatcacaaacgatgtgggacttgatgctgacaactgcaaggtccctgtgtacattg

SEQ ID NO: 4159 - DNA, 385 bp, Glycine max
  Clone ID: LIB3028-013-Q1-B1-A12
tattggagctgctaggggattggcttttcttcaccacaattgtatcccccacatcattcatagagatatgaagtcgagcaatgtgttacttgatgaaaacctggaagccagagtctctgattttggaatggctaggcttatgagtgctatggatacacatttgagtgtgagcacattggctggcacaccggggtatgttcctcccgagtactatcagagcttcagatgctccacaaaaggtgatgtctacagttatggtgtggttttgttggagctgctaactgggaaaaggccaacggactcggctgattttggagataataatcttgttggatgggttaaacaacatgccaagctgaaaatcagtgatatttttgacccggag

SEQ ID NO: 4160 - DNA, 371 bp, Glycine max; identical to SEQ ID NO: 4156
  Clone ID: LIB3028-013-Q1-B1-A3

SEQ ID NO: 4161 - DNA, 361 bp, Glycine max
  Clone ID: LIB3028-013-Q1-B1-A4
gcactaccactgtacttgatcatgaagtctagacttccgactcagagaaaatgttcagatctctggtttaattgcattactagcagctgttgatgcactttctcatttggatggtcttggtgaccttagtaaacagcttgtttttgcagttttcactggagaggcatggggttaccttggaagtaggagatttttggtagaacttgacatgcactcagatgctgttcatggccttaatcagacattaattgaaacggtcattgaaattggttctgttggaaacggtctcagtcaatgtgttaaaaacttttttgctcatacaaaatgggattcttctgccacatatcagacagttgctgcc

SEQ ID NO: 4162 - DNA, 371 bp, Glycine max; identical to SEQ ID NO: 4156
  Clone ID: LIB3028-013-Q1-B1-A5

SEQ ID NO: 4163 - DNA, 384 bp, Glycine max
  Clone ID: LIB3028-013-Q1-B1-A6
ctcttttatccctcaaaaaccaaaaccctaatggcagagcgcggaggtggcgaccgtggcagcgaccgtggcggtttcggacgcggctttggtgggcgagggcgcggaggtgacaggggccgaggccggcgccgaggtccccgccgcgaggaagaggagaaatgagtcccagtgaccaaactgggccgcctggtgaaggagggaagaatccgaagccttgaacagatctacctccactcgctcccgatcaaggagcaccagatcatcgacacgctcgtgggtcccaccctcaaggacgaggtgatgaagatcacgccggtccagaagcagacccgggccgggcagaggacccggttcaaggccttcgtcgtcgtcggagacaac

SEQ ID NO: 4164 - DNA, 348 bp, Glycine max
  Clone ID: LIB3028-013-Q1-B1-A7
caaactcgtccccggagactctgctggcacggtcactgcattttatttgaactctgacacgaactacgttcgcgacgagcttgatttcgagttcttgggcaaccgtactgggcaaccttacacagttcaaacaaacatctacgctcatggaaagggtgacagagaacagagggtcaacctctggtttgaccctgctgcagacttccacacctattcaattctctggaaccatcaccatattgtattctacgtggatgattttccaatcagagtatacaaaaacaacgaggctcgggggattccatacccaaagatgcaggcaatgggagtgtattccacattgtggga

SEQ ID NO: 4165 - DNA, 345 bp, Glycine max
  Clone ID: LIB3028-013-Q1-B1-A8
ttttcttttttcttttaattttcctctcaagtggagcattcaggttgttagagcgtccattgagctttcaatctgtggctggattttgatctctctgagtttaaaatggatccaaaaggaagcttatgtgctacaaggtcctcttccttaacctctcctgggaatggactacaaacaaatttgtcgtcagatcctccctctttctatggggtcaggattgaatcacctttcgaagaattcatccaaccctctcctccaacccaatctgtacttccaggtgaatctaacacagatattgatatccctgaccaggaaaattgtccactgagtgactcctcacatacc

SEQ ID NO: 4166 - DNA, 383 bp, Glycine max
  unsure (1)..(383): unsure at all n locations
  Clone ID: LIB3028-013-Q1-B1-A9
atcttgtcattcaccgagaaagtcgtactgattcctcttcatctttcgttaaagcgagtacttttcgttcttgatctgttggttacgatgtcgtattcaaggagatctaggtattctccttctccttctccttctccatacaagcgatacggtaggtctgtgtccaggtctctctcaatatcaagatccagaagccgttcaaggagtttatcaagagatgcagaaaatccaggaaacaatttgtatgtgacaggattgtctcctaggattaccaagagagaactggagaaacattttgctgctgaaggaaaagtgatagatgtccatctgatagttgatccttggacaagggaatcncgtgggtttggctttgtgacaatgga

SEQ ID NO: 4167 - DNA, 303 bp, Glycine max
  Clone ID: LIB3028-013-Q1-B1-B1
tcggctcgaggaaatcctcttattcatgaatttggatacactgttgatatagaaaagtaagatataccattggccaaggaatatacggcgttttctatggtgttcattgttagcaacattatactgcctgtcagttcatcatttgccaaaactgctactcatcgctcactgattccaaatccatcacgttcccctgaagtcgactatttcaacctcaccgtagttgctcaatgttgctgggtcattttcatccttccttgggtatcttgagtcgatcaatctgatttacactttccataaccc

SEQ ID NO: 4168 - DNA, 367 bp, Glycine max
  Clone ID: LIB3028-013-Q1-B1-B10
ttgtttgttgttgtaacacgttcttcttcttttgttgttctgtgtttgtgtttgttttttctctcacctgaaaatgtcttgctgcggtggtaactgtggttgcggaagctcctgcaagtgcggcaacggctgcggaggctgcaagatgtacccagacttgagctacactgagtcaaccaccaccgagaccttggtcatgggagtggcacctgttaaggctcaatttgagggtgctgaaatgggtatgcccgctgagaacgatggctgcaaatgtggaccaaactgctcctgcaacccctgcacttgcaagtgaggtgttgggagagcaagcttcaagcagagatagcgcttaattaggaatcatgat

SEQ ID NO: 4169 - DNA, 385 bp, Glycine max
  Clone ID: LIB3028-013-Q1-B1-B12
tgatgatgaagtctgctatgtgtgcagtggtggttgtagcacttcttcttctggcggaggtggggcccatggctgaggctgtgacatgcaccccaacagagttgagtccgtgtcttccagcaatcacttccggtgctaaaccttccaatgcttgttgcacgaagctgaagcagcaaaaaccatgcttatgtggctacctcaaaaacgctagcttgaagcagtatgttaactctcctaatgcccgaaaaaccgttgcttcttgtgggattccctttccaacttgttaattaattaagccttcttataattaaagtgtgggatatatatatatatatagataaacagtttaatttatacacactttgatcctacaaagcatcttgaa

SEQ ID NO: 4170 - DNA, 269 bp, Glycine max
  Clone ID: LIB3028-013-Q1-B1-B3
ggggagaagagagaaacgttgtattcagagatatggggaggggtaagattgagatcaaaacgattgagaactcaagcaacaggcaagttacctactcaaagaggaagaatgggatccttaagaacgcaaacgaaattagtgttctatgtgatgctcaagtttcccttatcatccttggtgtctctgggaagatgcatgagtacatcagcccctccactacgttgattgacctcctggacagataccacagagcctctgggaagaccctg

SEQ ID NO: 4171 - DNA, 330 bp, Glycine max
  Clone ID: LIB3028-013-Q1-B1-B5
ctcgagccgtgctttcattgccgctgctggctctttcaatggctttggcacaaccggtgatgacaacactcgcaagaaggagattgctgctttcttggctcaaacttctcatgaaaccacaggtgggtgggcaagtgcaccagatggtccatatgcgtgggggtattgttttatcaacgaacaaaaccaggcaacttattgtgatggtgggaattggccatgtgctgctggtaaaaaatattatggccgaggaccaatccaacttacacacaactacaattacgggcaagctggcaaagcacttggtctggatttgataaacaatccgga

SEQ ID NO: 4172 - DNA, 392 bp, Glycine max
  Clone ID: LIB3028-013-Q1-B1-B6
cgaagagcagtagaaagaaactagaatggccactttagacgaacgcccttctgcgaaaaggtggcttcctcttgaagctaaccctgaagtcatgaaccagttcctttggggtcttggccttccactggacgaggcagagtgctgtgatgtgtttggcttagatgaagagcttctggaaatggttccgaagcccgtcctcgccgtgctttttctttatccaattaccgcagagtccgaagaagaaaggttgcaacaggaaaacgataaacaggattatagcagcagagtgtattttatgaagcataccgtgggtaatgcttgtggtacaatatggttgcttcatgcacttgggatcataacctccgaagtcaagcttgtttagggggtcattc

SEQ ID NO: 4173 - DNA, 356 bp, Glycine max
  Clone ID: LIB3028-013-Q1-B1-B7
ggtctcaacagggggacactagatcttactcgcaatgggtggggtcatcgggttggtctgaaaggtgagggcaagaaagttttcagcgaggaaggatcaacaagtgtaaagtggaaaccacttggtgcagttccgagggctctgagctggtacaggacaagatttggcaccccagagggaacaggccctgttgccataaggatgagtggtatggcgaagggaatggtgtgggtcaacggtaacaacattggtcgctactggatgagttacctctctccacttggaaagcctactcaatcagagtaccacatcccaagattcttcctgaacccacaagaaaatttgcctgtgaattt

SEQ ID NO: 4174 - DNA, 406 bp, Glycine max
  Clone ID: LIB3028-013-Q1-B1-B8
ctcatccttccttcgagacatgagatgaggccgatgcaactgccaccgccttccgcttccggggccaaccctgcccctgcaaccaccagcaacaacaacaaggagcagcgtccccagcgccgccgcaaggacctcacgctgccgctgccgcagcgagacaccaacttggcggtgccgcttcctctgccgccatcgacggcgcctgctgcggcggcgagcggcggagctagccagcaggcggcgcagcaggtgatccctttctcggagctggagagactgaaccgcatcgggagcgggagcggcgggacagtgtacaatgtggtccaccgcacgagcgggcgcgtgtacgcactgaaggtgatatacggtcaccaccaggagtcggttcagtggcagatccaccggg

SEQ ID NO: 4175 - DNA, 382 bp, Glycine max
  Clone ID: LIB3028-013-Q1-B1-B9
gtcggcgacagcgaactacttccgtgtaatggcgacctccgtcgcagtcgccggcgctttgacggcgcatgatcgccggattctgacagcggtgaacgtcggagcgtcgagcctgtcgttggccggttccagcttcattgtagtgtgctacctcctcttcaaggagctccgcaagttctccttcaagctcgtcttcgacctcgctctctctgatatgctttgcagtttcttcggcataatacgggacgcgtccaaaggtttcttttgttatgctcagggctatagcacacatttcatttgtgtggcatcgtttctatggactacaacaattgcttttacccttcaccgcactgttgtaaaacataaaacagatgttgaagat

SEQ ID NO: 4176 - DNA, 192 bp, Glycine max
  Clone ID: LIB3028-013-Q1-B1-C10
gagagatttgaaatgtaaatgccaagtgaaagtgaaaagtacagtccagttttagtgatctctttaatttatttgttcatagattaatatgatggtgtatgattgcttttctatttattgtggcatttttgtgttgtaccctgttgttgtgtttgcaataagtattagtaataaagcagcaaattcaatttc

SEQ ID NO: 4177 - DNA, 381 bp, Glycine max
  Clone ID: LIB3028-013-Q1-B1-C12
gagaggagctgtactacacttcaatggaaactccaaaccatggttgaagattgggattgagaagtacaagcccctatgggaaaaatatgttgaatactctcatcctttgttgcaaaaatgtaacttccattgattttgaattgcatttaaattgatacttcaaaccttggtggaagattaagattcacagttagcctctgttggtggggtcggcaaatatatcattgtttgtttggggaactggcaggcttggtgatccttaccagaccagcgaattgaggtcttgatttgtagtcagaaaatgctggtacaattttaaaaggccaagcatgtgtggtggctttaacttggtgccttattgaatccggctcttctattgta

SEQ ID NO: 4178 - DNA, 397 bp, Glycine max
  Clone ID: LIB3028-013-Q1-B1-C2
attccagtctccactggactctacatgaaccctcccactcctggtagcccctctggatcagatgtgagtgagtccagcgtactggttgcatcctcctcacatgttttccgacccgtgcctagaacaggcgcggttctaccacccgtagaaacaacaacgactttgtcttccaatgaccctccaacctcactttccctatccctccccggtgttgactcatccgaagtttccaatcgaacaactgagccgattcatgccgcacctcctccgccgccacagccacagccacagccacagccgttgaatactatccctttgctcccaatgatgacggtgccctcggtttctccgacggggatggcgccgtttaattttagcgcagagtttctggcggtga

SEQ ID NO: 4179 - DNA, 325 bp, Glycine max
  Clone ID: LIB3028-013-Q1-B1-C3
ataagcttatttatattatttaaaaatcctaaaaaaatattacaagaaattcttttataaaaaaattcttttaaaatccttctaaaattctaatccagtacatcccattaaacttttattgctttcacagatatgtcaagacatcctaataatggagtggaaactaaggaaaccgctgctccgatctgaggccatggctgggtctgggagttccatgctgtattcctttcttctcttcacagtcattctctcacttcaagaaatgtaccgagggaaactagcatcatcagaattatacactatacttggagggtttgttagctct

SEQ ID NO: 4180 - DNA, 360 bp, Glycine max
  unsure (1)..(360): unsure at all n locations
  Clone ID: LIB3028-013-Q1-B1-C4
atcggagacatgcaacggccatttgcatcctccgaagaagaccgcatccaaactctgagattttgaattaaaggtgccgccgggatggaacagttccggcatataggagaggtggttgggagtctgaaagcgcttatggttttgcgcgatgaaatccaaataaaccaacgacaatgctgtttgatcctggacatcttcggtttggcgatggagacgatcgcggaggagataaggcagaacctgaagctggaggagcgtaacacgaaatggaaggctctggaatttccgctgcgtgagctatgcanggttttgaagganggagagctttacataaggcagtgtttggattccaaagactgg

SEQ ID NO: 4181 - DNA, 389 bp, Glycine max
  Clone ID: LIB3028-011-Q1-B1-B11
attgcggccttgatgatgccaaaaatactgctcgcctgttggcgcttctcatgcaccggggttttaaattttccattaccaattccataatgtggcagacagctgatcgaccactgatgtggaaacagtcaccagaacaaccaatcgttttccctcattgcccctacaaagcaaaggatatcactacccccgttgttcagtatcaccctttctgcttctgtggggtgaaaagcagcaggggcatggtgaggaagccgggtcccaagcaagggagcctcttctttggatgtggaaattggactgcgactagaggtgctcgctgccattacttcgaatgggcttctaactgaatgcaccttttgatctactatgattaaaatcctaaattt

SEQ ID NO: 4182 - DNA, 373 bp, Glycine max
  Clone ID: LIB3028-009-Q1-B1-A7
cttcagatcaacgatgatgaggtggaactatgggtggttagaggattaactgctaagttaattgactgtaagatggaccaaatgaatcaagttgtagttgtcagtcatcctactgagcgtgtgtttggtcagcaccaatggcaagcactgagaacaaagctagtgacatggaggggaaatattgtaaatgttatcagtaccattcaggccaacaaaataacggaagatgggtcccaggcagcccaaggtttggttgttcgttgaggacaattgagtgaagcaattatctgagtatctagattttaatcaggtggaattttttgatcttaaacagaggataagagtgtaaattgttttgttaagaattaatttt

SEQ ID NO: 4183 - DNA, 397 bp, Glycine max
  Clone ID: LIB3028-009-Q1-B1-A8
caacaagttaacctgaatagaacacattcgtcttgtttcaaaacggtgcgcttttgaaagaatcgttgttcttctctctttctcctcttcagtgaaaaagtggattcatttgatcatttaaagggttgcaataccctagatcaaatgatggagactggagacattaatcagcctgaaccactgaaacaggtgtggtgtgagaaaaaacaggctgccgttcatgaagaaatgaatagaatgaaccaactgcctgcaaacagtgcatatgctacacatcgtatgaaggttctaaataaaattttgcaactcatgtcagttcagagaactgtatcacaagagcaggaattggagttgctttttgctggcctttctttgtgaaagtattattactggcgat

SEQ ID NO: 4184 - DNA, 325 bp, Glycine max
  Clone ID: LIB3028-009-Q1-B1-A9
aaagaaggatgttccttgtgagactgaccaacttactcatgtttacacatttatcctccgtccggatgcaacctacagcatcctgattgataatgtggagaagcaaactggtagtctctactctgattgggatcttctccctccaaagacaatcaaggatcctgaggctaaaaaaccagaagattgggatgacaaagaatatattcctgatcctgaggataagaaaccagaggggtatgatgacatcccaaaagagctcccagaccccgaagccaagaagcctgaagattgggatgatgaggaagatggtgagtggacaccccct

SEQ ID NO: 4185 - DNA, 314 bp, Glycine max
  Clone ID: LIB3028-009-Q1-B1-B1
ccctacctctcctttcaagatgcagatcttcgtcaagactctcaccgggaagaccatcacccttgaagtggaaagctctgacaccatcgacaacgtcaaggccaagatccacgacaatgaaggaattcccccggatcagcagcgtctcatcttcgccggaaagcagctcgaggactgccgtaccctcgccgacgacaacatccataaggagtcaatccttcaacttgtccttcgtctccgtggtcggcatgcacatcatcgtcaagacgctcactggcaagaccataatcctagaagtcgaaagctctgagacc

SEQ ID NO: 4186 - DNA, 393 bp, Glycine max
  unsure (1)..(393): unsure at all n locations
  Clone ID: LIB3028-009-Q1-B1-B10
actgaaaaaggttactggcagattgaaatgggagattttttcgttggaggtgtttcaacaggtgtttgtgagggtggctgtgctgctattgtggattcaggaacatctttgcttgctggtccaactcctgttgtggctgaaatcaaccatgccattggagctgaaggagttctcagtgtagaatgtaaggaagtcgtttctcaatatggagagttgatatgggatctcttggtatcaggggtgaaaccagatgacatatgttcacaagttggtttatgttcttccaaaaggcatcaatctaagagtgctggaattgaaatggtgactgaaaaaggacaggaagagttggcagcgagagatactcctttgtgttcntcttgtcagatgcttgtt

SEQ ID NO: 4187 - DNA, 361 bp, Glycine max
  Clone ID: LIB3028-009-Q1-B1-B11
gagagagtcctgaaacttgggtgcgattccttcactcacaacaacaacacatcactatggctcttctgagtcgagcctcttcacgcttccctcagctggtttcccctcaaagggtagtttcactccacacaacgctcccatctctgaacgcatccccatccacagccacgcctacaccatatgccccgccaccgcctccgtccgcttcctctcccgccggcgtttctaaggcggcggagttcgtgatctcgaaggtggacgatctgatgaactgggcccgccgcggctccatctggcccatgaccttcggcctcgcctgctgcgccgtcgaaatgatgcacaccggcgccgcccgctacga

SEQ ID NO: 4188 - DNA, 369 bp, Glycine max
  Clone ID: LIB3028-009-Q1-B1-B12
gccatcctgaagttctgtgggcacaacgttctgatacggtttacctcactgttgctctagctcatgccaatgatgtttttgtgaactgtgagcctcagggtttgtttgctttctctgcttctggggttcaagatacagcctacagctttagcttggaactttatggatccattgaacctgacggttgtaaaactaaatctggcttaagaaacatactatgctcaattcagaaaggagaacatggttggtggaataggctattgaagtctgaagagaaacctgctccatacttgaacgttgattggaacaaatggtgtgatgacgatgatgaatagtcaacctctgatttcgtatctaaatatcatgctc

SEQ ID NO: 4189 - DNA, 331 bp, Glycine max
  Clone ID: LIB3028-009-Q1-B1-B2
taaatataaccagctcttgagaattgaggaggagcttggtgctgaagcagtgtacgccggagctaacttccgtacccccgttgaaccctactaaagttttcaagtggaaaaaacctggagatccacacgagtttgagcattgagatttgggtgcgcggtttttggtgtgatatataagttgatagttggaacattagtcttggtatgataaagaccttgccaataatttgagttctgattcacagagctaggacagttatgtcttaagactttgaaaggtgtttaatgatatttagctttaatacttgaagcctacttacagtttatttcc

SEQ ID NO: 4190 - DNA, 395 bp, Glycine max
  Clone ID: LIB3028-009-Q1-B1-B3
cagaaaacggtggaatttcagacaggccagatgatgccgtggatgtctttcatacattcttcggggtggctggactttcacttcttgaatatccagggctgaaaccggtagatccagcgtatgctttacctgttgatgttgtaaatagaattttctttactaaagaaggacttaagtagttaagttcgatgataattttccagtaatgacaaaatcttgggtttgtaagactcactcttgggagttggaccccctcctcccatctccagtccaaaaacagttgatttcttaaaaacagtgtgaacattttgagcatcttttagttaaattgcagtgatacgacatgttaagattgatcagtattgtagtcaaccatcaaatttatcctactagtt

SEQ ID NO: 4191 - DNA, 397 bp, Glycine max
  Clone ID: LIB3028-009-Q1-B1-B4
gtggagaaaagcagtcacctcccgccacgaaaatttctttggctctgtgctttgagtccgagtctctcccacagcgacaccatccatcttctttcacattttccactacgttagggttcgtcttcatttcgaattgaaggattcaacaacttagcaaaccacgccatggcaactctgcaatctctgccaccttctttccgtccatcaatcccacccccaaattcccactctttcccagccactccctttaactattcccccaaattgattgcctcaaagggtgtcagcgttaccctcaggaactctatcacttctcccagggtttcggtttccaattcggagtatagtccccaatttgcggaaaatctcggtgacgttacaattttccacgctgccg

SEQ ID NO: 4192 - DNA, 397 bp, Glycine max
  unsure (1)..(397): unsure at all n locations
  Clone ID: LIB3028-009-Q1-B1-B5
cttatgctttcgtttttaaatcatgagtggtgtggattggactgttgttgattctgaaaacacataaggaaatcctgttgtaactctggagctgaaggatggtccttatagttgtactgtgtgggatttcagcttccatgctttattcaaggtcacactaaatgctaaaagtctagcgactgagttaacagttaaaaatacagacaataaagcattctcatttagtaccaccttgcacacatattttcaagcttctgtgagtaatgcatcagtaaaggggttgaaaggttgcaaaactctgaacaaagatccagatcctaaaaatccagtgtanggtaaggaagaaagggaagttgtcactttccctggatttgtagattgtgcttatcttgatgct

SEQ ID NO: 4193 - DNA, 224 bp, Glycine max
  Clone ID: LIB3028-009-Q1-B1-B6
gtattccattcgctcccaaaatcttttcgaagttgttcataactcaagagttctcagcatgggctccttgattgttgtaggtgaacatgatcataaacgatggcttgtattctcttccctttgtatgatttagtcatctcattctcgtactaggacatactaggctctttgcgactcatggtgttgatgtcactataatctacaccacatccactgtcgcaatt

SEQ ID NO: 4194 - DNA, 327 bp, Glycine max
  Clone ID: LIB3028-009-Q1-B1-B8
aataattattcgcaaaaaagaagaaaacacgttgaacagataccatcatcattcatcttcagccccacatcagcaggatttcaagactcagtttttgactcactaagtaagtagcgaaacaatttctcgggttcctgttcaagttgattcctttgataagttaccaacttcactcgatgaaaagccattaacataccaaacagagtgacagagtttgcaattacaagaggttcaattatcaaatctggtcagtggtgatacggaacaccagggagagtctgccatggttgacgccagtcctagaactgatatttctacagatgttga

SEQ ID NO: 4195 - DNA, 363 bp, Glycine max
  Clone ID: LIB3028-009-Q1-B1-B9
tgggaatcacggttgttacttcctcacaacgtcctgctttaataccatttcattccatggaactgcggctgattgatggtgaaggtaattggaagcttcgattgatcaagcagtgagttcactaaaacagtgttgctgcatggacttggtataccatttgagatgttgtcgagtctatcacaagctggctgtttgcgagcataaattaggtttgccaacaaaggtcaatcctatatgcttttattttaagttttccatattctccaagattcaatgtttactacgggactaacaaacagctgaaacagccaaaattgttgataataagttcgagcacacaaccattgcataatctctgcagtg

SEQ ID NO: 4196 - DNA, 360 bp, Glycine max
  Clone ID: LIB3028-009-Q1-B1-C1
ctgaactctttctctctctctcagtctcaccactgaaattctgaacttggatgcttccattccctctctctttccgttcccaaaattattattccatattcccgatttgcccttgatggggaaaggaggcggctgcgttcccagcaagaagaagcccccgccggtcgccgacgatgctcccgctcccacgccgccgccgatctcgcctccggataacgcccacgcccgcaaacccgacgctccagcgcaagtagcgcgtgaagcagcgtcgtcgtcgtcgtcgcttccgggcggtgcgagattgaaggtcttcgtcgtgttctattcgatgtacggacacgtggaggggctggcaaaaag

SEQ ID NO: 4197 - DNA, 365 bp, Glycine max
  unsure (1)..(365): unsure at all n locations
  Clone ID: LIB3028-009-Q1-B1-C10
tagcaactagctagctagagtccctctgatctgataatacaaatttcttggagggatatggacaataacgaggaaataccctcaacacccgcaacaccaggcactcctggtgcacctctttttggtggcttcagtaatggtaggaacaataatagcaagaagtccctcctgaagagttgtaggtgcttcagtgtggaggagtggagcttagaagatggagggctaccggcagtgtcatgctcattgccactgccatcgcctccaccggtagtccctcttgcaagaaagattggagcggagttcatagggaccttcatcctcatgttcgcangcactgccgctgccattgtcaaccaaaagacaaa

SEQ ID NO: 4198 - DNA, 360 bp, Glycine max
  Clone ID: LIB3028-009-Q1-B1-C12
gtgatggacacgcttaacatgcttggccttgcgaaaagaattggggctaggtttctgcttactagtactagttaggtttacggtgatccgttggagcatcctcagaaagagacttactggggaaatgtgaatccaattggtgagaggagttgttacgatgaagggaaaaggattgtggagacgttggccatggattatcatcggggtgctggtgttgaggtcaaacatatgagaggcaatccatccaaaagtggcttgatcatgggttgaatgtttgtccaaaaactcatcagagacttactcttacaaatgtcattcctaattacactgtcaaatctcatgttattagattgattgaag

SEQ ID NO: 4199 - DNA, 309 bp, Glycine max
  Clone ID: LIB3028-009-Q1-B1-C2
ggcagcgacgatccggctcacggtgccggccggaggagctcggccggcgccaccggttggaccggcgctgggtcagtaccggctgaacctgatggcgttctgcaaggacttcaacgcccgcacccagaagtacaaggcggagacacccatggccgttacgataacggcgtacaaggacaacaccttcgagttcaccgttaagtcgccgccggtgtcgtggtacctgaagaaagccgccggcgtggaatccggtagcagccggcccggtcacgtgaccgcgtcctcgttgtccgtgcggcacgtgcacga

SEQ ID NO: 4200 - DNA, 364 bp, Glycine max
  unsure (1)..(364): unsure at all n locations
  Clone ID: LIB3028-009-Q1-B1-C3
gctaaggattcaactccaggagaagaagaaacttaatcgattatcacttcacttcaccaatacatcatgggacacttacaccaaaacaagtttgaaaactctgacgtttaaggccaaggatcgtggtgttttttgactttcccgcgggtaaaaaaacgatgaacaagacattcctcatcctcangaggatgtcatcaccaccgagttttataaagtcactgtctcagaccatggagagaactatcacacccgcttaaattagcctcaccgttttgacatcagctcaaactcttcaagtgaggatgaatgagaagatggagagaaaaggaagaacaacaagaaggaaaagaaatggctgaaagac

SEQ ID NO: 4201 - DNA, 349 bp, Glycine max
  unsure (1)..(349): unsure at all n locations
  Clone ID: LIB3028-009-Q1-B1-C4
ttttgcactactgatgcctttttgggcacccagatttccaccattctgagtaacttcacacactatataacagaaaatgagggggggcttatggcaactcgggcaatcaatcactcgccgtcttgcccagggtgataagaaggctgttgctcgtaggtattttgcctcagatgctgagctgaaaaagacagtcgtttatgacttccatgttgctaatggagggaagatggtgccatttgctggatggagcatgccaattcaatataaggactcaattatggactcaacccttaactgtanggagaatggtagcctttttgatgtttcccatatgtgcgggctaagcctc

SEQ ID NO: 4202 - DNA, 385 bp, Glycine max
  Clone ID: LIB3028-009-Q1-B1-C7
aaagaaccagtttggaatatatttttattccttctttgtttcttcactttcttccatacacataaccatgtcttctcagaccgttgtcctcaaagttggtatgtcatgtcaagggtgtgctggagctgtaaacagggttttggaaaaaatggaaggtgttgagtcatttgacattgatctgaaggagcagaaggtgacagtgaaaggaaatgtgcagccggacgaagttctgcaagccgtttccaaatccggaaagaagacggcattctgggtggatgaagcacaaccacctgaaaacaagccttctgaaactgcacctgttacctcagctgagaatgataacaggacttcagaaagtggacctgttgcctcagaaaacaagcct

SEQ ID NO: 4203 - DNA, 416 bp, Glycine max
  Clone ID: LIB3028-009-Q1-B1-C8
tgggtctccaaagagagtttgagcaaagccattaagttagtgatggatggagacagtgaggttggtgctagagtgaagaagaatcacatggagtggaagaaaactgggggcagtcctaatttaatgaatggttacatggataggtttgtccaaaatcttcaagattttcctctccatgggtgattgaaggatttttttcagagggatggaattcatcgtttgcccaccaaatgaaaatgaaattgtttagaaaataagttaagagataaaatatctagagtttaatgctcagtctactttatgaatggtgcagtttgactcttatttagtagttgaattcagtagttcatgtgatactttatatttaaatatattttttagttttaataaatatttaatgttatgtttggtttttt

SEQ ID NO: 4204 - DNA, 349 bp, Glycine max
  Clone ID: LIB3028-009-Q1-B1-C9
gtgtagtggaagaatcactcccttatccatttccacaccacaccatggcctcaaccaacgctctctcttcagcctccattctacgctctcccaaccgccagtctctgacccgaagagcgaaccataatggaagagtaaattaccggaaaccgaataaccgtttctccgtgaaagcctccgccaaagagattgcctttgaccagcattcccgctctgctatgcaggccggcattgacaagctcgccgacgctgttgggctcactcttgggcccagagggaggaatgttgtgttggatgagtttggaagtcctaaagtggtcaacgatcgtgtcaccattgctcgcgcaat

SEQ ID NO: 4205 - DNA, 303 bp, Glycine max
  Clone ID: LIB3028-009-Q1-B1-D1
gcatgtcatccaggacatgcttgtccctttgtaaaaggtgggacaggctttagaatgggttcaccgtgagatggaggtataccccatttggctctgcccacacaaattgttcaagctgcctgtcaaaactatgatttacccagagccagggttcgaactacatcgcaggcaaggagacacccaaactgctcaaatgtacacagatgttggagtttactatgcaccacgtcctgtttttaggggtgaggtatttgatggggcagaagcagtgcgtaaaatggagaactggttgattgaaaatca

SEQ ID NO: 4206 - DNA, 389 bp, Glycine max
  Clone ID: LIB3028-009-Q1-B1-D11
gcaagcaaaaagaaagaatcccaggcgaggagaaagatggaggggaaggagcaggatgtgtcgttgggagcgaacaagttccccgagagacagccgattgggacggcggcgcagagccaagacgacggcaaggactaccaggagccggcgccggcgccgctggttgacccgacggagtttacgtcatggtcgttttacagagcagggatagcagagtttgtggccacttttctgtttctctacatcaccgtcttaaccgttatgggagtcgccggggctaagtctaagtgtagtaccgttgggattcaaggaatcgcttgggccttcggtggcatgatcttcgccctcgtttactgcaccgctggcatctcagggggacacataaaccc

SEQ ID NO: 4207 - DNA, 373 bp, Glycine max
  Clone ID: LIB3028-009-Q1-B1-D12
tcccttttcagctttcattggtgtggcctagctgttttctcaatgagaaagccttcatctctgcaaagcgcacttttgcgctttggggttcccttgttgcttgttatcaccttctgttatgctacttctactgctgcagcaacaactcaagtttcagggaatgaagagctgccaaagacaaacctaaatgggcatgatgaagaagcaaaattcggattttttcatcataaaccaatattcaagaaacatattccaattccagtatataaacctgtaccaaatgccatttccagtgtataaacctataccagagccagttccagttccagtgtacaagcctattccaaagccagtgtataagcctattccaaag

SEQ ID NO: 4208 - DNA, 349 bp, Glycine max
  Clone ID: LIB3028-009-Q1-B1-D2
aagaggtgccggagcaagtttcgtcacgccggaacgatgaccggcggcggatccacggggaggttgccgacgtggaaggagagagagaacaacaagaggagagagagaagacgaagagcgattgcagctaagatctacactggccttcgagcccaggggaactacaagcgtccagagcactgcgacaacaacgaggtcctgaaagctctctgcgccgaagctggctggatcgtggaagaagatggcacaacttatcgaaagggatgtcagagacccacgagtgagattggaggaacaccactgaacttaagcgcgtgttcttccattcaggcaagtccacaatcctcgt

SEQ ID NO: 4209 - DNA, 375 bp, Glycine max
  Clone ID: LIB3028-009-Q1-B1-D3
tgggaatcacggttgttacttcctcacaacgtcctgctttaataccatttcattccatggaactgcggctgattgatggtgaaggtaattggaagcttcgattgatcaagcagtgagttcactaaaacagtgttgctgcatggacttggtataccatttgagatgttgtcgagtctatcacaagctggctgtttgcgagcataaattaggtttgccaacaaaggtcaatcctatatgcttttattttaagttttccatattctccaagattcaatgtttactaagggactaacaaacagctgaaacagccaaaattgttgataataagttcgagcacacaaccattgcataaactctgcagtgtatacgtgggga

SEQ ID NO: 4210 - DNA, 398 bp, Glycine max
  Clone ID: LIB3028-009-Q1-B1-D6
aagaaatagagttagaaatgaagataaatatgtatccaccatgtccacagccacatctagctttgggagttgaacctcacactgacatgagtgcccttaccatactcgtcccaaacgaagttccaggcctccaagtttggaaggagaatagttgggttgcggtcaattacttgcaaaatgcactcatggtacatgttggtgatcaacttgaggtgttgagtaacggaaagtacaagagtgttctgcatagaagcttggtgaataaggaacgaaatcgcatgtcatgggcagtgtttgttgcgcctccacatcaggcagtgatagggcctcttccttctctcatcaatgatcagaacccacccaagttttcaacaaaaacctatgctgagtatcgttat

SEQ ID NO: 4211 - DNA, 371 bp, Glycine max
  Clone ID: LIB3028-009-Q1-B1-D7
cttggttgagagtgagtttggaacttgaaagaaactagaatggccactttagacgaacgcccttctgcgaaaaggtggcttcctctcgaagctaaccctgacgtcatgaaccagttcctttggggtcttggccttccagtggatgaggcagagtgcggtgatgtgtttggcttagatgaagagcttctgaaaatggttcccaagccagttctcgccgtgctttttctttatccaattaccgcgaagtctgaagaagaaaggttgcaacaggaaaacgtaaaaaaggattatagcagtaaagtatatttcatgaagcaaaccgtgggtaatgcttgtggtacaatagggctgcttcatgcacttgggaacat

SEQ ID NO: 4212 - DNA, 396 bp, Glycine max
  unsure (1)..(396): unsure at all n locations
  Clone ID: LIB3028-009-Q1-B1-D8
cacaaagcaaagctcatccttgagttaaaaaatggcagcagcttcttccatggctctctcatccccatccttggctggcaaggccgtgaagctgggcccatcagccccagaagtgggaagggtgagcatgaggaagaccgtcaccaagcaggtctcctcaggaagcccatggtacggcccagaccgagtcaagtacttgggcccattctctggcgagcccccgtcctacctaaccggtgagttcccaggcgactacggctgggacactgctgggctttccgcagacccagaaaccttcgccaagaaccgtgaactcgaagtgatccactccaggtgggccatgctcggagccttgggctgcgtcttcccggagttgctgtcncgcaacggggtgaa

SEQ ID NO: 4213 - DNA, 391 bp, Glycine max
  Clone ID: LIB3028-009-Q1-B1-D9
ctgatattttgtttcatatttcctcaaaccactgcattgggcttcttggatttctcttacaagagtgatgataacttggttcacaccaccttaaaaagtgctgagaaaacccctatgctacatcatgaccagggaaagagtaagctctctatatctagtgagatgaatcatctaatggaggcctctagtggcaaatattcctatggtcaaggcaatccatctgaacgggaaatatctcagcatttgacacaaaaatctgaaaatcatgaacagactaatcatgcatgggatattcaaagtgaaagaaaattgtcatcctcagcagttcagtgctctgacccaatgaaagcatctcagttgggttatctcacggtcaaaactggtaaagaaa

SEQ ID NO: 4214 - DNA, 376 bp, Glycine max
  Clone ID: LIB3028-009-Q1-B1-E10
ggtttctgcgtttatgcgaagatgactaagttcaggaaattgggtcgacccaccggtcaccgaatgtccatgctcagaaccatggtctcgcagttggtgaagcacgagcgcatcgaaactactgtcgccaaggcgaaagagatcagaagactcgcggataatatggtgcagcttggaaaggagggatcccaacatgctgcgagacgtgctgctagttttgtgcgaggagatgatgtccttcacaagctgtttacagaactggcttatcggtacaaggatagagctggaggatacaccagattgcttcggacccgtattcgagtgggtgatgctgcaccgatggcctatattgagtttattgacagagaaaatgagc

SEQ ID NO: 4215 - DNA, 363 bp, Glycine max
  Clone ID: LIB3028-009-Q1-B1-E12
gctgttgaaaagagctatgagctacctgatgggcaggtgatcacgattggcgctgaacgattccgatgccctgaagttctgttccagccatccatgattgggatggaatctcctggtatccatgagacaacatataactctatcatgaagtgtgatgtcgacattaggaaggatctctatggtaacattgtcttgagtggtggttccacaatgttccctggcattgctgataggatgagcaaggagattacagcattggcaccaagtagcatgaaaattaaggttgtagcaccaccagagaggaagtacagtgtctggattggaggctccatcttggcttccctcagcaccttccaacagatg

SEQ ID NO: 4216 - DNA, 432 bp, Glycine max
  Clone ID: LIB3028-009-Q1-B1-E3
gcatattccaattcgcaattcccaattcgaaacccttattcctttcaaagaagcaaattgagtgatcgtgatggcaccaaaggcagagaagaagccagcggagaagaagcccgcggaggagaagaagtcgacggtgggagacaaggctccggcggagaagaagccaaaggccggaaagaagcttccgaaggagggaggcgccggcggcgaagggaagaagaagaagagaaacaagaagagcgtggagacatacaagatctacatcttcaaggttctgaagcatgtccaccctgacattggtatctcaagcaaggccatgggaatcatgaacagcttcatcaacgacatcttcgagaagcttgcccaggaatcttctagacttgcccgttacaacaagaagcccagcatcacttcaaaggaaattcagaccgc

SEQ ID NO: 4217 - DNA, 419 bp, Glycine max
  Clone ID: LIB3028-009-Q1-B1-E4
ctcgagccgatttccctcatggagtttcaaaaacctctatggctattcttgcttctcctcactctcctctcaagctcccaagccaacaaattcaacgttggtggaagcaaagggtgggttccaaacccttccgagagttacaacaattgggctggaagaaaccgattccaaatcaatgacacaatagttttcaagtacaataagggttcggattcggtgttggaagtgaagaaggaagattacgacaagtgcaacaagaccaacccaatcaaaaagtttgaaaacggtgacactgaattcaagtttgatcgatcaggaccattctacttcattagtggaaaagatgggaactgtgaaaagggtcaaaaattaatcgttgttgttttgaccccaagaacacaacaacaccattaacacca

SEQ ID NO: 4218 - DNA, 176 bp, Glycine max
  Clone ID: LIB3028-009-Q1-B1-E6
gtttttactcctgacttcgttcctgcgccttgatagcttctacattgatggcttcaggagacattagtatatacgactatactttgaaactcaatgtaattatgtcatttaaataattggttccgaatgttatttgaataattatttggaaggaaacccttcccttcctgatgtat

SEQ ID NO: 4219 - DNA, 419 bp, Glycine max
  Clone ID: LIB3028-009-Q1-B1-E7
ctagtagtaatccaagagaaaggcttggtggaactccaactagtactgattcaaagaggagactctcattccctttgtcacaaggaattgggtctttcaagtggtctaaagggttctcaaacaaggatcaaagagtcccagataaatttcagtcacttgaatctataggaaacgtgagtgtggattcaacggtgtctttgcccgcaagggtggtgggaagaaagccttttacaagatttgtgtgatttattttgttttattcttttttttaaccattttattttgtcaatgctggtggtgttatcagttacattatgattatgatttcagtgtattggtgatagtttgatgacaggtatacccgttgtaaactaataaaaacaaaataagaaatgatggtttggtaacttccattggac

SEQ ID NO: 4220 - DNA, 409 bp, Glycine max
  Clone ID: LIB3028-009-Q1-B1-E8
gtgcggtgcggcgatcctagcactctcttctgcagctttcgccgacagcttcattcaccatggctgagcaaaccgagaaggcttttttgaaacaaccaaaagtgtttctcagctcgaagaaaactgggaagggaaagagacccggaaagggtgggaaccgcttttggaaatccattgggcttggatttaagactcccagggaagccatcgaaggaacctacattgacaagaagtgccccttcactggcaatgtttccatccgtggccgtatcttggctggaacatgtcacagtgctaagatgaacaggactattattgttaggaggaattatctccattttatcaagaagtaccagaggtacgagaaaaggcactccaacattcctgctcatatatcacctgctttccg

SEQ ID NO: 4221 - DNA, 400 bp, Glycine max
  Clone ID: LIB3028-009-Q1-B1-E9
caaacctaacgcagcatcgctattctcttcattccatggctttgcccaaccagcaaaccgtggattaccctagtttcaaactcgttatcgtcggcgatggtggcacaggaaagacaacctttgtgaaaaggcatctcaccggagaattcgagaagaaatatgagccaaccatcggtgtggaggttcacccattggattttttcacaaactgtggaaagattcgattttactgctgggatactgctggacaggagaaatttggtggcctcagagatggatactatatccatggacaatgtgctattatcatgtttgatgttactgcccggctaacatacaaaaatgttcccacctggcaccgtgatctttgcagggtctgtgagaacatcccaattgttct

SEQ ID NO: 4222 - DNA, 366 bp, Glycine max
  Clone ID: LIB3028-009-Q1-B1-F1
gacctgtatgaccagtatggtgaagatgcccttaaagaaggaatggagggaggaggctcgtttcataatccatttgatatatttgaatcattttttggtggagcaagctttggtggtggtggtagttcccgacgtagaatacagaagcatggtgaagatgtggtgcattctttaaaggtttccttggaggacgtctataacggcacaacaaagaaactatctctttctagaaacgtattctgctcaaaatgtaaagggaaaggttcaaaaagtggaacagctggtacgtgttttggatgccaaggcactggtatgaaaattacaagaaggcacattggactacgcatgattcaacaaatgcaacat

SEQ ID NO: 4223 - DNA, 336 bp, Glycine max
  Clone ID: LIB3028-009-Q1-B1-F10
gttcatggtttttacggcctagccaacagtggcaatttagcttgatgctacagagatataatcaacagcagtatcagtaggagtagcagcagcagcttataaatcggaattcaagcaattatcagtcacagcagcgtcggttatattgtagttaaagagtcaggatataagtctgctgtggtactgttgacctaatcgggataattacgacttgagtatatggtaaggctaatatgtctgcatcgaagatagctgtgttgaatagatttgttattagtctttcaagtgcaagtgacttaccctaggttggttgcatttgagtgtgcataatttccc

SEQ ID NO: 4224 - DNA, 349 bp, Glycine max
  Clone ID: LIB3028-009-Q1-B1-F11
aaaatttgggaaggatggaagatatatacttagtcgtgattacatgaccttaaagttatgggacatcaatatggattctggtccagttgcaacgttccaggttcatgagtatttaaggccaaaggttagattcccatgtttggatgagcaatgaatttctgctgctttatcaagttatagtaactggctcttttttttttggccagctttgtgatttatatgaaaatgattcaatttttgataagtttgagtgttgtctaagtggtgatggattgcgtgtttcaactggctcttacagcaatctattccgtgtgtttggttgtgttcctggaagtactgaagctacaac

SEQ ID NO: 4225 - DNA, 365 bp, Glycine max
  Clone ID: LIB3028-009-Q1-B1-F12
ccgaaattaaaaaattaactcttttcacaaactctaattatctttacattttgttttcttaatttattgttttgttatgaattggattgaacttgatttcaggcttcagagaagaaactttcgaacccaatgagggagataaaagtgcagaagctcgttctcaatatctctgttggcgagagtggagatcgtctcaccagagccgccaaggtgttggaacaacttagtggccaaaccccagtgttttccaaaggttagttctcaataattttctaaatgggtagttcagtgatgctggtaatggccatagatctcacatctgtgttcattggttttgttgatcatttttgtgattctatcacttt

SEQ ID NO: 4226 - DNA, 413 bp, Glycine max
  Clone ID: LIB3028-009-Q1-B1-F2
ctcgtgcatcttctggtgttaccctacaatttggtgatactgaaacgcagacaatagcagcaggaacttcatccccatctaatcttgaatctgatgatccttttgctgattggcctccacgtcctaatggctcagtatcaggtggatctggaatatccaacaatggtactttaggaatgccactgaacaaagttgggtttaattcaatgagaagcacttcaagcaatatgggtccccaaactagcaacagttggcctgttaattcccaaagttctgcagagtccattagtttgaactcaaggaatcctatttcaacaatgggtagcctgaatagtggtggccttggacaacagaaatctcttgggtttgtaaaacaaggccaagctttcccagcatcaattgtttcatataat

SEQ ID NO: 4227 - DNA, 253 bp, Glycine max
  Clone ID: LIB3028-009-Q1-B1-F4
tttttctctcacctgaaaatgtcttgctgcggtggtaactgtggttgcggaagctcctgcaagtgcggcaacggctgcggaggctgcaagatgtacccagacttgagctacactgagtcaaccaccaccgagaccttggtcatgggagtggcacctgttaaggctcaatttgagggtgctgaaatgggtgtgcccgctgagaacgatggctgcaaatgtggaccaaactgctcctgcaacccctgcacttgca

SEQ ID NO: 4228 - DNA, 426 bp, Glycine max
  Clone ID: LIB3028-009-Q1-B1-F5
atcgaaagccttaaacttgctcgcagggtctggaaagactattatgccaaggtggatgctgtcgtgtacctggttgacgccttcgataaagagaggttcgcggaatctaagaaggagctcgatgccttgctttctgatgaatccttggcaaatgttccatttcttgtgctaggcaacaagattgacatcccttacgcagcttcagaagacgagctacgatatcatctaggcctgaccaatttcaccacaggcaaaggaaagattaacctcacagactccaaccttcgaccccttgaagtgttcatgtgcagcattgtgcgcaagatggggtatggtgaaggcttccagtggctttcccaatacatcaagtagagagtccttattcattcttagttcccctttctcttgtcaactagcactgtctgc

SEQ ID NO: 4229 - DNA, 348 bp, Glycine max
  Clone ID: LIB3028-009-Q1-B1-F6
aaagaaaaactcagcacagcacccctcgcaagcctctttttctcttaatttctcatcatatcatatctattaatcttacacatatattaagacatagatataatttttttcgtttgatttttccttgcatgggctgttaagataagatgtctcgcacgtgctcacagtgcgggaacaacggccacaactcgcggacatgcaccgacggtggcgccgccgcttcctgcggggggtctcccagggagaacgggatcatgctgttcggcgtaagagttatgaccgaagctaactcctccttccggaagagcgccagcatgaacaacctctcagagtacgacgcggaatcca

SEQ ID NO: 4230 - DNA, 434 bp, Glycine max
  Clone ID: LIB3028-009-Q1-B1-F7
ctgaggatgactatgatagtcagcaagaaatggataccagtggtgaattgagagagaccaagtcagatgatgatcatgatcatgatgttaactacagtcatgccagtgaagaagaaggggaagctgatgcatcagtaagcgatatagtggaatgcttcttgaagcgtttggatgagaaaacaaaaagattctcagaagaacctgcagggtatttgcaagagaagttagagagccccaagagttgctccggctacaacttggaatctgctttaacatttactgatatcaaaactgtggattcgtgctcgagtccctcctatgaaaatgactcaagaacaactttgactgctgaggaatcaaatgctgacacaagtagtccatcaatagaaagtacaagcaccaatgatgtggagatgattgataagtttacagat

SEQ ID NO: 4231 - DNA, 174 bp, Glycine max
  Clone ID: LIB3028-009-Q1-B1-F8
aaaaaaagtcctttccaaaatttcattgtcatccatcttcatagctgcccttaagcctgtgtaatgcagttctagtagtaacagcactttgcctgtgatgatttgtatcttcttgatgatggatgacacaggcttaagggcagctatgaagatgttccaaaaaaaatgttgatg

SEQ ID NO: 4232 - DNA, 353 bp, Glycine max
  Clone ID: LIB3028-009-Q1-B1-F9
gaatgggttccctagaagctatgactaaagggagtgatgcaaggtacttgggtgatacagcaaaactaaaaattgctcagggggttgttggagctgttaaagataagggttctgtcttgaatttcataccatacaccttgcaagcagtcaggcaagggtttcaggatatcggtgcctcctctctacagtctgctcatgaccttctaagatccagggagttaagactggaggtccggagtggagcagcacaggttgaaggtggagttcatgggctggtttcttatgaaaagaaatacttttgaagtatgaaaccatccaaaatcataagcggtgctataatcccttgctgcaat

SEQ ID NO: 4233 - DNA, 366 bp, Glycine max
  Clone ID: LIB3028-009-Q1-B1-G1
attgatatgagtgagcttgatgaggattctgatggtttccttcagccacatgaaatggaggcctatatacgaggtctgatacccaacttggcacagttacgtgacatgccagctgcctttgttcaaatgtattgtcgtattgctgcacacaaattcttcttcttttgcgatcctcatagacgaggaaaagcttgcatcaagaaagttttgcttagtaattgtctccaggaactcatggagcttcaccaggaaagtgaagaagaagtcacggacacagagcaagccgaaaactggttctctttgacttctgctcaacgcatatgtgacatgtttcttgctcttgataaagatacaaatgggacatta

SEQ ID NO: 4234 - DNA, 374 bp, Glycine max
  Clone ID: LIB3028-009-Q1-B1-G10
cccggttcatccgaagcccttcaccgaaccatgtcgaggagaaaggttagagagccaaaggaggaaaatgtgactctgggtccagctgttagagatggtgaacacgtttttggcgttgctcgcatctttgcctccttcaacgacaccttcatccatgtcactgatttgtctggcagggaaacccttgtccgaatcactggtggtatgaaagttaaagctgacagagatgaatcatctccttatgctgctatgcttgcagctcaggatgttgctgccagatgcaaggaactgggcataactgctcttcatatcaagctccgtgctactggtggaaacaagaccaaaacacctggtcctggtgctcaatcagctct

SEQ ID NO: 4235 - DNA, 356 bp, Glycine max
  Clone ID: LIB3028-009-Q1-B1-G3
gcttaagaagttacctacttatagcaagagaatctagctctattggttgtgtaaggtaaaaaaaaaaaacgcataaccatgtcaaccaaattgattgaaacaagccttagccttatggtatggcttgtaattgcaacatcagcaatagcacaatctgataacccccaatttcttgacacagaaggccaccctcttgaccctggcagagattactacatcacaccaccggtaacagacattggaggccgtgccactatattagacaacggcacatgccctttatttgtaggtcaagagaacacttttgtaaaaaagacctttgccgttttcttcaccccttttgcaaaggaaaatga

SEQ ID NO: 4236 - DNA, 313 bp, Glycine max
  Clone ID: LIB3028-009-Q1-B1-G4
ctcgagccgaatcggctcgaggttccttctccttgtgatcttcttcaaccttcagagtgagaaaacacattcagaaaccacgtttctctcttcttcttcttcttcttctttttcttctctcgaggtcattattaagtattcaccatggaggcaccatctcccaccaaacccaacgacccaacagaaccttccaacacttccaccacccttagtctggaggccggcccggcccaagcgagcccactccgaaaaatgtttgccgtggcgtccatcgccgccggcatacagttcgggtgggctctccagctctctc

SEQ ID NO: 4237 - DNA, 421 bp, Glycine max
  Clone ID: LIB3028-009-Q1-B1-G6
tggagcttcaaagccagaacaaccctttctctattcacttgattaccttctttttgtttctcttgttcctgttattcaaattagttaagaaatcgagttccaacaacaccagcaaattacctccaggaccaaagacactacctctcatagggaacctacaccagcttgttggttcaaagagtcatcactgctttaaaaaattggcagacaagtatggtcctctaatgcacctaaaactgggagaggtatccaacatcatagtcacttcaaaagaattggcacaagagattatgagaactcaggatctcaactttgcagatagaccaaaccttgtatccacaaaaatagtttcctacaacgccaccagcatttccttcgccccacatggagactattggaggcaactgcgaaagttgtgcac

SEQ ID NO: 4238 - DNA, 431 bp, Glycine max
  Clone ID: LIB3028-009-Q1-B1-G7
ctgggatatgcgatatggttgcagtggcaaaaataatgaatgccacccttgtccttccttctctagaccatgattcattttggactgatccaagtgactttaaagatatctttgactggagacacttcgtgaaagttttgaaagacgacattgagatagttgagtacttaccggtccagtatgcgtcgctgaaacctcttgtgaaggcccctgtttcctggtcaaaggctagttactacagaggtgagattcttccattgttgaagcaacatactgttgtacagtttactcacacagattcgcggctcgccaacaatggccttgcttcctcattgcagaagctgaggtgccgtgccaattaccatgctctcaagtacacggcagaaattgaagagcttggaaaggtcttggtgaataggctaagaaacaat

SEQ ID NO: 4239 - DNA, 422 bp, Glycine max
  Clone ID: LIB3028-009-Q1-B1-G8
gctttagccatcactaacactcagtctctgaattggggctgagggtttcgagtaacgtttatttttcacgagtttaagatatcatgggtaaagagaaggttcacattaacattgtggtcattggccatgttgactctgggaagtcaaccaccactggccacttgatttacaagcttggaggtattgacaagcgtgttattgagaggtttgagaaagaagctgctgagatgaacaagaggtcattcaaatacgcctgggtgcttgacaagcttaaggctgagcgtgagagaggaattaccattgatattgcattatggaagtttgagaccaccaaatactactgcactgttattgatgctccaggacatcgtgatttcatcaagaacatgattactggaacttcccaagctgattgtgctgtc

SEQ ID NO: 4240 - DNA, 338 bp, Glycine max
  Clone ID: LIB3028-009-Q1-B1-G9
caacaactcaattcctaacttgcctccatagcaatctttgcttaattcttctgttcaattaccacattcattatagctctctcattcacaaactttcaatttctgcttccaaatctgaattcaacccatttggcattattgttacatataattaattaaggaagatcgaatggagagggtgacaaagatggtatcagaaaggccagtggtgatcttcagcaagagctcgtgctgcatgagccacaccatcaagaccctcttctgtgactttggggtgaatccagcggttcatgagctcgatgagatcccaagaggcagagacattgagcaagctcttt

SEQ ID NO: 4241 - DNA, 420 bp, Glycine max
  Clone ID: LIB3028-009-Q1-B1-H1
tttgacatttctattgaaggcacgcaaatatattctctgaaaccgggttggaacaagcagaatgatcaagtatttgttgaggcgctagtgtttcttacaaatgattcagtatcaatctgtttccacagcactggtcatggggatccagcaatcctttctattgagattcagcaaattgatgacaaggcttattattttggcccctggtggagtcaagggataatacttagaacagttaaaagactgagttgtggttttgggcagtcaaagtttgatgtagattatggaggggattccaggggaggggaccgattttggcaacggattaaaacttttggcgatgaatctgatcaacctagatcagttgaaacaagaatcaaacaagcttcacatccaccaaacttctatccagaaaccctt

SEQ ID NO: 4242 - DNA, 368 bp, Glycine max
  Clone ID: LIB3028-009-Q1-B1-H10
gtttatggcatattcaatgggaggccaaatgcagggttcaggcaaatgatggttcagcttcttggcattgtgtttgtgatacttctcaatgtcaccacaactagcattgtgtgcttgttggttaggatcatagttccacttaggctgagtgaagatgacttgcaagttggggatgaagcagtccatggcgaagttgcatatgcattgtggggtgatggagagaagcttgagactgctactgagcctttgacatctgaaaagaatcttgaatggccaactgtggaactaagaacttaattcgagtgatgctcaattaatggaatgaactcaatgaaggataaaatattctagctcttttgttggttttg

SEQ ID NO: 4243 - DNA, 377 bp, Glycine max
  Clone ID: LIB3028-009-Q1-B1-H12
ggaacggatccaaggtttaacaaggttttcaacaaggggatggctgatcactctaccattacaatgaagaaaattcttgagacctacacaggctttgagggacttaaatccctggttgatgttggtggaggaactggagctgtagtcaacatgattgtctcaaagtatcccactattaagggcattaattttgatttgccccatgtcattgaagatgccccatcttatccaggagtggaacatgttggtggagatatgtttgtcagtgttccaaaagctgatgctatttttatgaagtggatttgccacgattggagtgatgagcactgcttgaagtttttgaagaactgctatgaggcactaccagataatgggaa

SEQ ID NO: 4244 - DNA, 377 bp, Glycine max
  Clone ID: LIB3028-009-Q1-B1-H2
aaaggaaccaaccactcttttctttcaccgatcatacatacaatgtcgacttacagagacgaggatccccgtcttcatgacatcaaaactaagattcgtgttgtccctaatttccccaaacctggaattgaagctcggggtttcatttttggttctcccattgctctggcaataggagcaaagtttgtaccattgaggaaaccaaaaaaaattgcctggcaaagttatttctcaagagtatattctggaatatggaagagactgtcttgagatgcatgttggggccgttgaacctggtgagcgtgctttagtggttgatgatttgattgccactggtggaactctcggtgcagccatggacttactaaagcaattgg

SEQ ID NO: 4245 - DNA, 408 bp, Glycine max
  Clone ID: LIB3028-009-Q1-B1-H3
cgtaggccagctaggaattcaactcgagaacattttccccttcaacactccaaccaccaaagaagcataccactatagaatgatatttgagaggttcttccctcagaactcagcaaggctcactgttcctggaggaccaagtgttgcatgtagcacagcaaaagctgttgagtgggatgctgcttggtctaacaaccttgatccatcaggtagagcagcacttggagtgcatgcatcagcttatggaaaccaggtcaaagctgtagaaccagagaagatcataccaaagatggaattttctcaactaggagttgcaatataaaccttgtatgacccataccagggataattatttgcccaaaaaccaccatatattattattatcctatccaccataaattgaaaatt

SEQ ID NO: 4246 - DNA, 399 bp, Glycine max
  Clone ID: LIB3028-009-Q1-B1-H4
tattcaactcgaggctctttctgatctctctccccctctctctaacaataaccctcgctgtcgctggttccaattcaccatgaccgtgatgatgcccgctcccattgatcagcaagaggacgaggacgtgctcgtgccggacgcggatttgcctgagaacaatcaccaacccatggaagttgtagctcaacctgaaaatgccaatactgtggagagtcagcccgttgaagatcctccgtcatctagatttacatggagaattgataacttttcaaggctgaatacaaagaagctctattcggaaatatttgttgttggtggctataaatggcgtgtgcttattttcccaaaaggaaacaatgtggactatttgtccatgtatttggatgttgctgattc

SEQ ID NO: 4247 - DNA, 436 bp, Glycine max
  Clone ID: LIB3028-009-Q1-B1-H5
ctttcaaaagggagaagaaaaggaaaggaaacaaaacgcacaaaggattattatagcaatggcagaacaaaaccaaaaccagacaactgaagctggaaggcaccaagaggttggccacaagagccttctccagagtgatgctctttaccagtatattctggagaccagtgtctacccaagagaacctgaatccatgaaagaactgagagagttgacagcaaaacacccatggaacatcatgacaacctctgcagacgaagggcaattcttgaacatgctccttaagctcatcaatgccaagaacaccatggaaattggtgtctacactggatattcacttcttgccaccgctctcgctcttcctgaagatggaaagatcttggccatggatattaacagggagaattatgaattgggtttgccagtaattaagaaa

SEQ ID NO: 4248 - DNA, 428 bp, Glycine max
  Clone ID: LIB3028-009-Q1-B1-H6
ctgttctcccacaccacacccatgacactcctcctgctccttattctcctctttcacgcggcggaagccaagggacagtggcagctcctccacaaaaacatcggcattgtcgccatgcacatgcagcttctccacaacgaccgcgtcatcatcttcgaccgcaccgacttcggactctccaacctaaccctccccgacggaagatgccgcaacaacccaaacgagttggtcgtcaaacgcgactgcaccgcgcactccatcgaatacgacgtcgcagccaacacattccgcgctctctttgtccaaaccaatgtctggtgctcctccggttcggtctctcccgacggaacattagtccaaaccggtggcttcaacgacggctaacgtgcggtcagaaccttcaccccgtgccgctcgtgcgactgggc

SEQ ID NO: 4249 - DNA, 432 bp, Glycine max
  Clone ID: LIB3028-009-Q1-B1-H7
gcaatgtgattgaggcagatagtgaaatcctaagattgtttagttggaagatggaggcagtggaatcaatagcggttccggaaccggacgaagacgatccttcatcgacgcttctggatctctcgagttaccagctccacgaccttgactcggtcgagttgccacccagcctcaccgagttggacctcaccgcgaatcgcttgtccacgctggacccgcgcatagggaacctctcccatctcaagaagctctccctccgccaaaacctcatcaccgacgccgccgttctccctctctcttcctggaacgccatttcctctctcgaggagcttgtgctgcgcgataatcaattgaagaacattcctgatgtcaccgtatttaagaaacttctggttttcgatgttgcgttcaacgagattagttcgctacatg

SEQ ID NO: 4250 - DNA, 374 bp, Glycine max
  Clone ID: LIB3028-009-Q1-B1-H9
ctcctctattctcaccactcaatttctcactccctcttcattttcttctctctttctcaaaaccctcactttaaggtcctccacgccgtttcagcgtctttcttttgcgtcacaaccactgcgcaggctcatggctcgcgccaccctcggcctcactctcccagccaacaccgaatcccttaaggtttctttcgcggcaaaggagcttgacgtggcggaatggaaaggggaccttctcgccgttggcgtaacggagaaggacgtcgcgagaaacgtggaatcgagattcgagaacgcgattctgagcgcgttggactccaagctgggcgggttgttgggccaagtctcgtccgaagaggacttcagcggcaaac

SEQ ID NO: 4251 - DNA, 134 bp, Glycine max
  Clone ID: LIB3028-010-Q1-B1-A1
tccgtctcaatgagagaaactctctctccaaaaaccccaatgcacgttttgcaatccaactcgacaatgggcaacagcaacctccctcgaagaatcatcaagggaacgcaacgtttgctcaatgagccaacacc

SEQ ID NO: 4252 - DNA, 327 bp, Glycine max
  Clone ID: LIB3028-010-Q1-B1-A10
aaactcaaaatcttctagctgtgtgcaagagggaaagcatggctgagtatccatcacctgaaaaggatgataataattgtaagcacatggatgactacccttcacctcaaacagataatccaaagcctttctctcaaatatacaaacgaaggcgtcataacttgaactccaacaactctaatgtttctggagattcagtccgaaccagccagtatccgtgctcctctacaagaactatcgctgcaactgcactcccaaccgcaactgttgctggcacggccaccaacactgcaccgaaaaaacattttctgtctgcactggtggagt

SEQ ID NO: 4253 - DNA, 368 bp, Glycine max
  Clone ID: LIB3028-010-Q1-B1-A11
atcttatccttagcagttagggaagctattgatctggttggaggaccttcttggcctgttgcattaggccgaagagatgcaacaaaagccaatcggatggaagctaatcaacaaattccttcaccgttcgagcctctagataacatcattgcaaagtttacttcaaagggtcttaacttgagagatgttgtagccctttcaggggcacatacaattggttatgcccgatgcttgaccttcaaaaggagactttttgattttcaaggctctggcagacctgatcctgtgcttgcctcttcacttctctcaaaattgcaaagcacgtgtccaaatggagacacttcaaacagctacattgcacctcttga

SEQ ID NO: 4254 - DNA, 310 bp, Glycine max
  Clone ID: LIB3028-010-Q1-B1-A12
atatgtcctaaactttctgcagcatcgttctccatttttggctttacagaatgactgtgtctgattaagggttctttagtatttccaatatttcttgtagtgaataagttgttagctaaatcaagatcaagtttttggtgttgtagaaggaagagaagaattaacatgagtattcactgtgaagtgtgtgagacagctccaggagcagtgatttgttgcgcggatgaagctgctttgtgtgccaagtgtgacgttgaagttcatggctcaaacaagcttgatcgcaagcatgaaacacctcttcttcaat

SEQ ID NO: 4255 - DNA, 265 bp, Glycine max
  unsure (1)..(265): unsure at all n locations
  Clone ID: LIB3028-010-Q1-B1-A3
attcagctcgagaaaattcagcanaaaatcccaaaaaaactgcaaatggtttttaacaactaacacaggtcaaacattgctggcccagagcaaaatgtacattgcaagtgctagatagatttatttacacatccattgtgcttggacccttgtctcaattggtaagggtaggtttctaaggactgtaattgtttcacttatgttaaagctgtacagttttgacatgctatggtcacctcacatctcaaacttgcctattttattt

SEQ ID NO: 4256 - DNA, 393 bp, Glycine max
  unsure (1)..(393): unsure at all n locations
  Clone ID: LIB3028-010-Q1-B1-A4
ctttcaagcgcaggaatggaggtcgcaacaaacacggccgcggccacgtcaagttcattcgatgctccaactgcggcaaatgctgccctaaggacaaggctatcaagaggtttctggtgaggaacattgttgaacaggctgcagtcagagatgtgcaggaggcttgtgtctacgaacaatacacgcttccgaagctgtatgtgaagatgcagtattgtgtttcctgtgctatccactctcatgttgtgagggttcgatcccgcactgataggagaaagcgtgagcctccacagcgattcatcaagcgcanggatgatgcaccaaggcctggtcagcctggtcaagccccacgtcctgctggagtaagagctcctgcccgagcttaaaagaaaa

SEQ ID NO: 4257 - DNA, 430 bp, Glycine max
  unsure (1)..(430): unsure at all n locations
  Clone ID: LIB3028-010-Q1-B1-A5
atcttatccttagcagttagggaagctattgatctggttggatgaccttcttggcctgttgcattaggccgaagagatgcaacaaaagccaatcggatggaagctaatcaagaaattccttcaccgttcgagcctctagataacatcattgcaaagtttacttcaaagggtcttaacttgagagatgttgtagccctttcaggggcacatacaattggttatgcccgatgcttgaccttcaaaaggagactttttgattttcaaggctctggcagacctgatcctgtgcttgcctcttcacttctctcaaaattgcaaagcacgtgtccaaatggagacacttcanacagctacattgcacctcttgattctaatactactttgaccttcgacaatgagtattatagaaatcccttatacaacaaagggc

SEQ ID NO: 4258 - DNA, 385 bp, Glycine max
  Clone ID: LIB3028-010-Q1-B1-A7
gcagaaagcaggctcatcctagagttttaaaaatggcagcagcctcctccatggctctctcttccccatccttggctggcaaggccgtgaagctgggcccatcagcccccgaagtcgggagggtcagcatgaggaagaccgtcaccaagcaggcctcctccggaagcccatggtacggcccagaccgcgtcaagtacttgggcccattctctggcgagcccccgtcctacctcactggcgagttcccaggtgactacggctgggacactgctgggctttcggccgacccagaaaccttcgccagaaaccgtgagctcgaagtgatccactccaggtgggccatgctcggggccctgggctgcgtcttccccgaactggtgtcccg

SEQ ID NO: 4259 - DNA, 185 bp, Glycine max
  Clone ID: LIB3028-010-Q1-B1-A8
attaaattccgatacagagatgcattgtaatcaatcccatttccaggcttataatattattatgaagtgcctatataagggtctacaaccaatgaaataaaatcagacatatccccaaattacaagaattagcaccaacctaacggtgagtttggccaaaaccagattggaaaggacccatttcc

SEQ ID NO: 4260 - DNA, 349 bp, Glycine max
  Clone ID: LIB3028-010-Q1-B1-A9
gtaaattaatttctcgtatcgaaaatcatttccaccaccacaatttttttttatttccgtttactaaagattagtaattgtttggtttgtgtgtagattttgattcgattcgattcgattcagtcgaggttttaagcagcagcaagatgtctgggcgtggaaagggaggaaagggattgggaaaaggaggagcaaaacgacatcgtaaggtgctccgcgacaacattcagggaattacgaagccagcgattcgtcgtttggctcgcaggggtggcgtgaagcgtatcagcggtttgatctacgaggagactcgcggtgttcccaagatcttcctggagaatgtcaaccg

SEQ ID NO: 4261 - DNA, 425 bp, Glycine max
  Clone ID: LIB3028-010-Q1-B1-B1
catgcacacaatgtaatggacaaaaaaccatgcaactcatcatcccaagattcctaaattaaaaaaggaacaatggacaagggaaaaagacttgatcttgataaactatattgcaaatcacggtgaacgtgtttggaactccttagccaaagcttctggtctcaaacgaacgggaaagagttgtcgactccgttggctaaactaccttcgtcctgatgttagaagaggaaacattacacccgaggaacagcttttgatcatagaacttcatgcaaagtggggcaatacgtggtccaaaattgcaaagcatcttccaggaagaactgacaatgagattaagaacttctggagaacaaggattcaaaagcacattaagcaagctgagacttcacaacaacatggtaattcagagaataatgatcatc

SEQ ID NO: 4262 - DNA, 326 bp, Glycine max
  Clone ID: LIB3028-010-Q1-B1-B10
ctctttcttaacttctacgtcagaatgcacgtggttcacaagaggaggaaagttagggatgttgtcgttgctcctgcactgtcttaagaagcgcgtgagtgcaaaaatgttcaagttcaattgtaaaaatataatagaagacacgaggtggttgctgcaatttggggtcgcaagtgtgttccctttttaatgttcatcatttttagcatggaacatgtgaatagatattatagtataggattgctggaaagcaataattatagactgattctgattttgttgtaatatatgattagttaattagttcatttctatactacataaaa

SEQ ID NO: 4263 - DNA, 330 bp, Glycine max
  Clone ID: LIB3028-010-Q1-B1-B11
tgtgtttgttattcactatcgtcattcctgttcctcaagctttgtagtgagcagatataatggctgttgaaaggtctggaattgccaaagatgttacggaattgattggtaaaacccccttagtatatctaaataaacttgcggatggttgtgttgcccgagttgctgctaaactggagttgatggagccatgctctagtgtgaaggacaggattgggtatagtatgattgctgatgcagaagagaagggacttatcacacctggaaagagtgtcctcattgaaccgacaagtggtaatactggcattggattagcctttatggcagcag

SEQ ID NO: 4264 - DNA, 352 bp, Glycine max
  unsure (1)..(352): unsure at all n locations
  Clone ID: LIB3028-010-Q1-B1-B12
atccagggttggtgttgagcggtgagacgatgggggagaacgagaaaggagagcgatggagcggagcgatgacaaatctgacggagatggcctccaatctcgactctctccagaagcttctcctcaccaaagccgtcttcgtcgacgacgacaccttctccaaagcctccctcgccgccgaccaggcccgcaccatcaagctcctccagcaacgagtccagaccttggagagagaggtcgacgccgccatcaccaccgccgcccgcgctcgctccgagaagcgccaggccgaggctgctcagaaatccgccgaatcgcgcgctcatcagctcancgccgaactcgaaaacac

SEQ ID NO: 4265 - DNA, 301 bp, Glycine max
  Clone ID: LIB3028-010-Q1-B1-B3
ccaacacatcatattcttggtggataacattcccataagggtgttcaagaatggtgagactattggcgttcctttcgcagagaagcaacccatgagaatttattctagcctgtggaacgctgatgactgggccaccagaggtggtttggtgaaaactgattggtccaaagcaccctttacagcctactagcgcaatttcaaagccacagagttcaccatcaattccttctctgatgctgcatggcagagcaacgagcttgatgcctatgggagaagaaaactgagatgggttcagaagtac

SEQ ID NO: 4266 - DNA, 390 bp, Glycine max
  Clone ID: LIB3028-010-Q1-B1-B4
caatgcaatgctcgtgtcgttttggtgtcactgagtcagtctgagtaggaagaggaagccatgggcaacacatcctccatgctcacccaatacgacatcgaagaggttcagcaacattgcaaaaacgcttttacgcaacaggagatagtttctctgtaccaacgcttctgtcagctggatcgcaacaactgcggtttcatcccttccgatgaattcctctccattcccgaattcgccgtcaatcctctctctcagagtttgttgaggatgctggatgggttgaacttcaatgaatttgtggccttcttgtccgccttcagtccccgtgccactctccaccacaaaattgaattcattttcaaggtctatgacaccgattgcaatggaaaa

SEQ ID NO: 4267 - DNA, 400 bp, Glycine max
  Clone ID: LIB3028-010-Q1-B1-B5
ctttcaccgaagaataacttgactttcccgaactccacctgagaaaaagatacccttaattcgcaggcgcgtcttgtgttggacaacaaccacaagatgattaacttcgaagaaaccgagttgcgactcggcctccctggcaacgactcagcactcaagggaagtgctgccaagagaggcttctctgaaactgcttctgttgatttgaagcttaatctttcttcttgcattaacgactctgcctcggattcaccctcatctatgtctacagagaagcccaaagagaacaagactaccactgctgaacctcctccagctaatgatccagcaaaaccacctgcaaaggcacaagtggtgggttggccaccagttaggtcatttagaaagaacatagttcaaa

SEQ ID NO: 4268 - DNA, 425 bp, Glycine max
  unsure (1)..(425): unsure at all n locations
  Clone ID: LIB3028-010-Q1-B1-B6
cagaaacaaaagtggcagtattaggtggcatcaccgaagtgcagggagctgccaacagcgtcgagatcaacaatctcgctcgctttgctgtagaggaacaaaacaaaagagagaattcagttctggagtttgtgagggtgattagtgcaaagcagcaagtggttgctggagtgaattactacataacattggaagcaaaagatggtgagattaaaaatgagtataaagcgaaggtttgggagagggaatcccaagagttgctagaattcaagccaacattaggtgcaggaggcatcatcgatgtgcctggagctgccaacagcatcgagatcgaccatctcgctcgctttgctgtagaggaacanaacaaaagagagaattcggttctggaattggtgagggtgattagtgcaaagaaacaagtg

SEQ ID NO: 4269 - DNA, 409 bp, Glycine max
  Clone ID: LIB3028-010-Q1-B1-B7
ctaactttcacacgcagcggcttcttcttccgttttcctgaatcggtgtgaacaatggcgacgtacgctgcgatgaaacccaccaagccagggttggaggagtcccaggaacagatccataagataaggatcaccctttcttccaagcacgtcaaaaacctcgagaaggtttgtgcggacttggttcgtggtgcaaaggacaagcgcctcagggttaagggacctgttaggatgcccactaaggttcttcacatcactaccaggaagtccccctgtggtgaaggtaccaacacatgggatagatttgaacttcgtgtccacaagagagtgattgacctctacagttccccagatgtggttaagcagattacctctatcacaatcgaacctggtgtggaagttgacgtga

SEQ ID NO: 4270 - DNA, 425 bp, Glycine max
  Clone ID: LIB3028-010-Q1-B1-B8
gagagaatggggaaaagacaaatcccagaccctccgaactttaagaaatacggcgttcctttctactccgttgcgtggattccccaacacgttgtcaaatcgcgccaaatcgaaaccgccgatgagtcctcggactccgatcacagcacttcgccggcgaccgaggcggagaaggaacccgcgacggtcgccggtaactacctgctgttcgccggcggcggcggagcaggccacagcggtatccccaatgctttggttattgcgcacttcgatgtcgcgtcgaattctctctctgatcaaccggtgtgtaagctaggaactgattctgaattgccttataggatggcacttaactctaatggtgatggccttatttgtgcaatggaaacgcccatggtttgcagatgggttgacggggataaaac

SEQ ID NO: 4271 - DNA, 357 bp, Glycine max
  Clone ID: LIB3028-010-Q1-B1-B9
ttgatgttgaagctgggatctttgctctccatgcatggatgttaccaacatcttaaaaaagctagtggtgataaggttggaaatgtagatggagatgcagaacaaggaatttatgatgcttctacacccccacagggttctaatccatcaaaccatgagaaaggtttaggagctccacaagaacatcttgttcgccaacctgcaagcacctggggttatatctttcaaatattattccagatgattgcaggcgctgtaatgctcacagattgtgtgttttggttcataattgttccgttcctaagcatcaaggattacaacataaatttgctaataatcagtatgcacaccatcaat

SEQ ID NO: 4272 - DNA, 391 bp, Glycine max
  Clone ID: LIB3028-010-Q1-B1-C1
caattactactttctctctctttgtaacttgtaagcatggagtcctcaaagatctatgcttacctcttcctttgcatgctcttcctctcctccgccactcccattctcggttgtggctactgtggcaaaccccccaaaaagcacaagcctggtaaaacaccaaagacacccacagtacccgttgttaagccaccagtcacaatccctcccattgttaagccaccagtcacaatccctcccattgttaatccaccagtcacaatccctcccattgttaatccaccagtcacaatccctcccattgttaatccaccagtgacagttccacccgttgtgcttccaccaatagtgaagcccccgggttttctccctccaattcttaacccaccaa

SEQ ID NO: 4273 - DNA, 375 bp, Glycine max
  Clone ID: LIB3028-010-Q1-B1-C10
caagaagatctgacccaactctacgatggaatccggtcgaattacaaagcatggtgttcggggttcgctccgctggtgatcggcggcgacatggactcggtggcggtgcaggagttcagccgaacgctcttcaacatgcggccagacatagccttgagtttggcgcagaccatattccagttcgacatgaggccaatcctatgccacgtcacggtgccgtgccacatcattcagagcaccaaggacctggctgcgccggttgtggtggcggagtatctgcagcagaatttgggagggaagaccatcgtggaggtcatgcccaccgagggccacttgccgcagctgagctcgccggatattgtggttccgggtttg

SEQ ID NO: 4274 - DNA, 337 bp, Glycine max
  Clone ID: LIB3028-010-Q1-B1-C11
aaaaaaaaacccttagccaacacaaccatcatggccacctctgctattcagcaatcagcattcactggtcaaactgctctgaagcagctcaatgagttcgtccgcaagaccggtggcgccggcaaaggtcgcactaacatgcgccgcaccgtcaagagtgctcctcagagcatttggtatggccctgaccgtcccaagtacttgggtccattctcggagcagattccatcatacctgaccggagaattccctggtgactacggatgggacactgctggattatcagctgacccggaaaccttcgccaggaaccgggagctggaggtgattcacagca

SEQ ID NO: 4275 - DNA, 341 bp, Glycine max
  Clone ID: LIB3028-010-Q1-B1-C12
aattgcagccgcaaaaaacctaacaccctattcaccaacctctaccttctcacctttgctacctttctttgtacccttttcaacttcctcggcctctggcgccactaccccagcagcaccgccgctgctatcgccgctgtcgcagaatcctcctccctatgcttccaccccaacaccaccgccacacccgattcatccaccaatcgcgacttcgccgcccagcatctcctctcggagctgcctcccacggtggctcgtgggccctatctcactccttgcgcgtcacccttcaccgagcacaccccctgcgacgatcaacaacgattcctttcattcccgag

SEQ ID NO: 4276 - DNA, 403 bp, Glycine max
  Clone ID: LIB3028-010-Q1-B1-C2
agcaacctcaccccatgcatttcttatgtgctcaatggtggcaaaaccgtgcctggcccttgctgcaatgggatcaagaccctctttaacctcgctcactccacaccagaccgccaaaccgtttgcaagtgcataaagaacgctgttagtgcgttccattatggcaagtccaatgtggaccgtgctgctgctcttcctaagcagtgtggggttaacattccttaccagatcagcccttccaccgactgtaccagagtgcagtgaggttaatgatatatggagcggtaactcgagaagagaaggatatacaatatatagctagtgtgtgaataagtggctggctatacgtacgccacacattacattaatgactggtggctgcttattattacatccatcaact

SEQ ID NO: 4277 - DNA, 370 bp, Glycine max
  Clone ID: LIB3028-010-Q1-B1-C3
aaaatgaattattggagagagatagaaagaggctcaagagggagcttccaggaaggatacacagcgaatgactggcattcaagttagcttagctatgatgaatgaagaggagtatagatggtcaacgtttttggtaagcaagcaagaatcacaaattggaaccatgtttctcaaatgttttggcttcggcgctcggggacagtatccaacggtgatagaagacggcgctcggagacagtatccaacggtgatagaagagttgtgccatcgattttctctcgcagatctaaggaaatcaaccaacaatttcgatcaaaacacagcaattgatcgtggtacagtatataaaggttgtctccaacacaatgaa

SEQ ID NO: 4278 - DNA, 412 bp, Glycine max
  Clone ID: LIB3028-010-Q1-B1-C5
aaagaaaacaattatcagcaataataaaattataggcacgattctggcatgtccaattctcaacagaatgagcttcattattcaaccgccaacggggacgagaggtcaaacccttgtttagccaacacgcgctgcagcttctgctttccctgttgcttcggttcccgtcgcgactcggccaccctcgggttcgggtggtgggagcgcgtgcgagccacgtcgtcatggtccgagtcgcgctccgaggcgcaaccggtgaccgggagtcccggtgggcggtggtggtctggcggcgtgagggcctttatgaaggtgcgcgagtggtcggagctcgcggcggggcctcggtggaagactttcatccggcggttcagccggagcccgagtggcgggtcgcggcacgccgcgggga

SEQ ID NO: 4279 - DNA, 415 bp, Glycine max
  Clone ID: LIB3028-010-Q1-B1-C8
gaaaaaaaatgggttcttctctgtggacctgtctgattttgttatcacttgcttctgcttccttcgccgccaacccaagagcaccaattgatgtgccatttggcagaaactatgtgcctacctgggcctttgatcacatcaaatacctcaatggtggttctgagattcagcttcatcttgataaatacacaggtactggcttccaatcaaaagggtcctacttgtttggtcacttcagcatgtacataaaattggttgctggtgattcagctggcacagtcactgctttcgatttatcatccacaaactcagaacatgatgaaatagactttgagttcttgggaaacagaaccgggcaaccttatattttgcaaacaaatgtgttcaccggtggcaacggtgacagagaacaaag

SEQ ID NO: 4280 - DNA, 294 bp, Glycine max
  unsure (1)..(294): unsure at all n locations
  Clone ID: LIB3028-010-Q1-B1-C9
cacggttcctcccccgctgccgctgactctcacatccatattcatcccgccngtcaatcataagactcaacgaaggtgatcccattctgattcatctgaagcacagatcacctagtggaactggaatcctttcagctgctggcctaaccaggtgggcatgctgcaacaccaaacccaaggaccgtgagtcatgctcccgcagcaattggcgctgggaaaatcaggtctcctcgtcaacccccaccaaatgctaccattgctgctccgactgcttccaccggttgcgctacaggt

SEQ ID NO: 4281 - DNA, 191 bp, Glycine max
  unsure (1)..(191): unsure at all n locations
  Clone ID: LIB3028-010-Q1-B1-D1
tttctcactccctgtgtatgcngctgaggattccgaacgagtcgaccttcttcgtttcccgcaaagtttaagttaacacgggtaaggaaaaggtcacaacaacattgccgtcattggccatgtcgacccgggaaagtcaactagcactggtcacctgatctacaaactttggggtattgacaagcgtgtga

SEQ ID NO: 4282 - DNA, 375 bp, Glycine max
  Clone ID: LIB3028-010-Q1-B1-D10
ctacaacgtgttgcttcaggccttcatcatcaacaacatcatcatcatcatcatcatcccaatgaagctttctatgattcaagttcttcaactttgttctcatcatcgtccactacttcttctatggctgtgtctgatcaacagcagattggagatgagacgagtactgctcccaaaaggggagaatattatgactcttgcttttttagagggaatgattttcatgacaagaattgaacattatgttaagtgtaagtatgatgttttctgttcaaaacctactttttttctgtctatggttttcataattcacataatacttcttaaacttcaggtaaactcacatttcttcacatcagaagtgatatgtttccg

SEQ ID NO: 4283 - DNA, 352 bp, Glycine max
  Clone ID: LIB3028-010-Q1-B1-D11
ctttacttaattagcacatccaaatatggcactttcttcttcatcatcttcaacatccatatttgctttagctttgttcactcttttgcttataggaagttcttcagctcaactctctgagaacttctatgatagtaaatgtcccaaggttttctatgccgtaaaatccgttcatcaatctgctttggctaaagaacctcgccagggagcatctatcgttcgcctcttctttcatgactgctttgtcaatggttgtgatggatcagtagtacttgatggcccttcctcagagatgactgcacctctcatcaataactctttgagaggttatgaagtcattgatgccatcaag

SEQ ID NO: 4284 - DNA, 70 bp, Glycine max
  Clone ID: LIB3028-010-Q1-B1-D12
gcaaccataggaaatgtttttccttttttgttttttctttcccttatctaaggaattctcacataatgtg

SEQ ID NO: 4285 - DNA, 362 bp, Glycine max
  unsure (1)..(362): unsure at all n locations
  Clone ID: LIB3028-010-Q1-B1-D2
aacccttcttcctcagaacaacanagacggatacccctttccccaaaacccaaaaaccgcaaaaacagttctcaaccgtcccaaagcaaatgccaaaaaattcctttcatccgaaacaccgttgaccagaaacacccgagtttttatccataaaagtaccgtcttttgattcctgggcccctttttttctccttctcttttattgggcagaggaatgttgggtactggggtgaacttcgggcgcgctcgcggcgaagattgaatcgattctccggcgaaggctcgccggtcgcttcacaccatggagaatgacaagcctcgtaaggtccacagcgatgtcgccgcgtctcgctccgtcagag

SEQ ID NO: 4286 - DNA, 351 bp, Glycine max
  Clone ID: LIB3028-010-Q1-B1-D3
ctcgagccgctattatcgttcttcttcttcactaagaatccaaaaaaaatgaacgatcttatgacgaaatccttcaccagctacgtggagctgaagaaggtcgcaatgaaagaagacgttgatttggaagccggtggtcctggtgattgcaaagtggaactgagctcttccacgacccacttggacacagacatgggcctcttcctagaagagggcgagaaagtgaaaggcgacatggggtccctccgagacatcctgggccggctccaacaaggcaacgaagagagcaagtccctccacaagcctgaaacccacaaaggcctcacaagcccgatcaaagctgaaatccct

SEQ ID NO: 4287 - DNA, 243 bp, Glycine max
  unsure (1)..(243): unsure at all n locations
  Clone ID: LIB3028-010-Q1-B1-D4
tggagactgttcttttcaatcactccccacctttggaattcaagggtttgagcaaggaggacgaagactcattgctagggcaagtggaaatatggacgtacatgacatgcttcacggactccgtggccttganagctgtcatagagcttcgtatagcggacatactagaccgttatggtaaaccactatccttgtcgcaaattgtggagaacatagaagacgcaccctccccagatgcctctc

SEQ ID NO: 4288 - DNA, 370 bp, Glycine max
  Clone ID: LIB3028-010-Q1-B1-D7
cttccaggaaccaccacaaaacattctcatcattcacccaacaaaatggctctgcttctgatagtacccatttcactggtaaccctctggctcggttacaccctataccagcggctacgcttcaagctccctcctggcccacggccctggccggtagtcggtaacctctacgacataaaacccgttcggttccggtgcttcgctgagtgggcgcagtcttacggccctatcatatcggtctggttcggttcgaccctaaacgtcatcgtttcaaactcggagttggccaatgaggttctgaacgagcacgatcagcagctggcggaccggcaccggagccggtcggcggcgaagttcagccgcgacggga

SEQ ID NO: 4289 - DNA, 389 bp, Glycine max
  Clone ID: LIB3028-010-Q1-B1-D8
aattagttcattctctttgcgcagttccctacctctcctttcaagatgcagatcttcgtcaagaccctcaccggaaagaccatcacccttgaggtggaaagctctgacaccatcgacaacgtcaaggccaagatccaggacaaggaaggaattcccccggatcagcaacgtctcatcttcgccggaaagcagctcgaggacggccgtaccctcgccgactacaacatccagaaggagtcaacccttcaccttgtccttcgtctccgtggtggcatgcagatcttcgtcaagactctcactggcaaaaccataaccctagaggtcgaaagctctgacaccattgacaacgtcaaggccaagatccaggaccaagagggaatccccccaga

SEQ ID NO: 4290 - DNA, 374 bp, Glycine max
  Clone ID: LIB3028-010-Q1-B1-D9
caacccccaattcttccccctccacccacccagcatatctctctattcctatttattagcacccctcacattaccttgtgtcaccaactactttgactcctttaccataccattacaataattatcaaacctaaccagtaaaaatggtgaccgtggaggaaatccgcaacgctcagcgttcccatggacccgccaccatcttggccttcggcaccgccacgccgtccaactgcgtctcccaagccgattaccctgactactacttccgcattaccaacagcgaacacatgactgatctcaaagaaaagttcaagcgcatgtgtgaaaagtccatgataaagaagcgatacatgcacctgaacgaagaatttccg

SEQ ID NO: 4291 - DNA, 402 bp, Glycine max
  Clone ID: LIB3028-010-Q1-B1-E1
gaatatctctccgcaatggaaactgtgtgtgaaaggattggtgtaacagaaaactgtacacaagagggattccaaaaccaagtgctgagaaaagggtgtcaaaatcttggcctcaaagttgactatgtgccaagaaactcctcagggaatcactactgtggctcatgtggttatggctgtccgaaaggagagaaacaagggactcaagctacatggcttgtagatgcagttgaaagagatgcagtaataataacaggatgcaaagctgagaggttcttgttggaaagcaacaggagtggaaatggcagaaagaagaaatgtttgggagtgatggcaaaagcattaaacagcatagtcacaatgaaattacaaattgacggccaagggacaatttctgcaagt

SEQ ID NO: 4292 - DNA, 373 bp, Glycine max
  Clone ID: LIB3028-010-Q1-B1-E10
gaaagagtgacgtctgcttctttagctgctatacctttcctcagttatctttaaaatgctcttatctgttgagatagtgtggttttattgggtatataccatagtttgggttcttatcatagcgttttgctttcggcctatataatgggcgtagctgtggttagtgtccaagtttgaatgtgacgccgcatgcatggagagtgttttttagtttctccttttagattttgctgttgcctcttgcaatgtttgcatattgtagcaatgaagacactagacagtgggcaggtccaattctttcattttatcaagtttgtattttatatctgtggcttttttttctctctcttttttaatgttattggttaaaaag

SEQ ID NO: 4293 - DNA, 358 bp, Glycine max
  Clone ID: LIB3028-010-Q1-B1-E2
gaagagtgttgaagaaactgttataagacttgaaaagttgcttcaagagttgcatgtatcaagctctaattctggaaaagagcatttgaaagcagcctgttctgacttggagaaaatacggaaactttggaaagaagctgaattcctgaaggcatcgtttagagcaaaagctgattctctgcaagagggggttgacagtggtcggacctacacaccagttggtgaagaggacgagtatataaaagggaaaagcagagaagaatgctaatgtaagggtggacaggagcacaagaaatgttggaaaatcacgtggattctggagcatcattggacgtcctgtcaccaaaaagcctggctt

SEQ ID NO: 4294 - DNA, 343 bp, Glycine max
  Clone ID: LIB3028-010-Q1-B1-E3
attcactttgcgcagttccctacctctcctttcaagatgcagatcttcgtcaagagtctcaccggaaagatcatcacccttgaggtggaaagctctgagaccatcgataacgtcaaggccaagatttaggacaaggaacgaattcccccggatcagcaacgtctcatcttcgccggcaatcagctcgaggactgccgtagcctcgccgattaaaacatccagaaggagtcaacccttcaccttgtccttcgtctccgtggtggcatgcagatcttcgtcaagactctcactgggagtaccataaccctataggtccaaagctctgacaccattgacaacgtcc

SEQ ID NO: 4295 - DNA, 346 bp, Glycine max
  Clone ID: LIB3028-010-Q1-B1-E4
agcccatttatgtcttcaatgtagaaacttgatttggacaagctcaagagcattccatcagtgtcttgagctccaaatggagaagacctggatcctgacttttcaccttctcctcctcctgctctatccaaatgcagcagaaggggccattggtgttggtgttggtgttggtggcagaggtggcataggtgttggcattggcattgggggcagtgttaacaccccagggccctctggatcaaacctcaagagtgccttcacagcactccatgcatggcaatctgccatgaccgatgacccattgaagattctggatacctgggttggtcccaatgtgtgttcctac

SEQ ID NO: 4296 - DNA, 411 bp, Glycine max
  Clone ID: LIB3028-010-Q1-B1-E5
tggaggtggcataatcgcttgtcatggatttgcaaagatctctcagatttggatcctccgaatctatcgcctttattattttctttaaccctttacttttcatctcaccatttattatttattacgcgtccttccttctctctccctttcccatctaaataaaacccaccattttccacttccatctacttgtgttctgttgtgtactttctattctcataagataactaactcactttgtgtgatagagttctcattctcatggctattaccggcgatattttccggcagagcataacggaaatgcttgcggagtccccttccggtgcgccagaacttcacgttctcgccgtcgatgacagcctcgttgatcgcaaggtgatcgaacggttgctgaaaatttcttcctgc

SEQ ID NO: 4297 - DNA, 413 bp, Glycine max
  Clone ID: LIB3028-010-Q1-B1-E6
gtgttacccctccaaatgcaaggagttgaggagtttccaccaagcaatttctcaggttatacttctggaaacgtctcacaatggcccattgaagaatttctcggattaaatgaactcagtcagtattataattacatggatggatcatctaaggctgacagtggtaaacttggggattctgattcttctgttttgaggtctggtgaagaggatatggatgatgacggcttcttgggacgtgttccagattcatcctggacagttcctcagatcccttcacctcctacagcttcgggtttatattggccgaaagtccctcaatatacatctgacagtgccatgtctgttcctgacatatgcttttctcatgtgcgacagccccaccatgcccagcataaatctaatgtttcaaa

SEQ ID NO: 4298 - DNA, 403 bp, Glycine max
  Clone ID: LIB3028-010-Q1-B1-E7
caactatggacagccacaaggccaggattatggtcatcagacaacttattctcaggcaggacttccccaacaaggttatggacagggatatgatgagtcaaagtatgaaaatcgtgctcctactcaacattcttatggaggacatgtaaattctcaatcgacctaccctcaggctggtgctcagcctaattaccctgcaccgcagcagtttggcaagccaccattatatggcatgccatcgggacagcctccacaatcttatggtccccctagagctactcaaccaggggatatgccatatcaaggttccactcctgcccagtcatatggcacgaatatgccaacacaacaaccatacccatatgcactatctgggccatcacaaacagcatatccaagttat

SEQ ID NO: 4299 - DNA, 426 bp, Glycine max
  Clone ID: LIB3028-010-Q1-B1-E8
gtgacggtagattgcaagtcacgacatggacacttcagaacgagaggggcaggtgcgcttgatgaatatggaaacttcaaagtatcacttccacaggacatggttgaagatggtgagctaaaagaagattgctatgcccagttgcatagtgcatctgctgaaccttgcccttcccacggaaactccaaaattgtgaccaggtcagtctctgaagacacacacacccttgcacctgctgctggaaaactcagattctcatcagcattgtgcacttcagccttcttttggcatttcttcaaacaccacccagaattcccttaccctcctaaagatgactactctctccctccccctgtgccagtctataaggaacctcttcctccagtgccagtgtataagacacccccagcaccatattagaaacct

SEQ ID NO: 4300 - DNA, 373 bp, Glycine max
  Clone ID: LIB3028-010-Q1-B1-E9
ggaaaatggctcttcttggatttcttctgggacttttctacatgatctcacatgtcaaggggtatggttttggaggttggaccaatgcacatgccaccttctatggagggggtgatgcttctgggacaatgggtggggcttgtggttatggaaatctgtatagccaaggttatggaactgatacaacagcactgagcactgcactgttcaacaatggcttaagctgtggtgcatgctttcaaattaaatgtgcgaatgacccacaatggtgccttcctggctccatcatagtcactgccacaaatttctgtccacctggtggttggtgtgaccctcccaatcaccactttgatccttcccaacctggtttcca

SEQ ID NO: 4301 - DNA, 374 bp, Glycine max
  unsure (1)..(374): unsure at all n locations
  Clone ID: LIB3028-010-Q1-B1-F1
gtttgtaacccctctgctttggttatgctggattgtatacaaaggagagcatcatgttggtgagcacaagccggagcaccatggaggagaagagcacanagaggggttcctagacaagatcaaggacaagatccacggcgaagagggtggcgccaccgccgagggcgagaagaagaagaagaagaaggagaagaagaagcatgaacatggccatgacagcagcagcagcagtgacagtgattagattatctcccactgctgcatcacctatatatcttataaggtgtatgggaccatagtagtgagggctgtgtccttctctttttttcctacttgtcatttatatttatgagcgagagaaatagtgcgtgtat

SEQ ID NO: 4302 - DNA, 352 bp, Glycine max
  Clone ID: LIB3028-010-Q1-B1-F10
ccaatatattccattctctctgtgtatttccctacctctcccttcaagatgcagatcttcgtcaagaccctcaccggcaagaccatcacccttgaggtggaaagctctgacaccatcgacaacgtcaaggccaagatccaggacaaggaaggaatccccccggaccagcaacgtctcattttcgccggaaagcaacttgaggacggccgtacccttgctgactacaacattcagaaggagagtactcttcacctcgtcctccgtctccgtggtggcatgcagatcttcgttaagacactcaccggcaagaccataaccctagaggttgaaagctccgacaccatcgataacg

SEQ ID NO: 4303 - DNA, 352 bp, Glycine max
  Clone ID: LIB3028-010-Q1-B1-F11
cttgttttctaaagatgtttgcttcctgcggacttcattaacctcggacctcaaaacagcattgtccctgagtagatgatccaactgcatggaagcaaacatctttagaaaacaagggtgtgctagtgttcttagtgtgttgtattttttcattgttagttatattacggctgtctctagatatggctacgagcgtctatagagtagtactgagtgttaatagaacagattgctccaggaaattttgtgccgttagctcatcctggtttctcctattattgaattgtatcattgttatttttatattaactttgtgatagtccattttttaaatatgttgttaacttgtgtt

SEQ ID NO: 4304 - DNA, 363 bp, Glycine max
  Clone ID: LIB3028-010-Q1-B1-F12
caacaatccaccaaccatcaagcagactcttccacaaatttgacaagttgatccttcttggaaaagggagccttctttactttggaaaagcctcagaagcaatgacttacttccagtccataggatgttcaccacttatttccatgaacccggcagagtttttgctagaccttgctaatggaaacataaatgatgtttccctaccttcagagttggaagataaagtgcagatgggaaatgcagaagctgaaacacaaaatgggaagccatcaccagctgttgtacatgagtatctggtggaggcatatgaaactcgagtagcagaaacagaaaagaaaagactaatggttcctaaaactcctg

SEQ ID NO: 4305 - DNA, 424 bp, Glycine max
  Clone ID: LIB3028-010-Q1-B1-F2
gctttctcccctgaatctcaccactctccgatctttcattctcccctcttttctagctcccgtggagtctggaagcgttctcgagccttctcgctttccacgtgttttgcttttttccatttctctctctcccgtggagtttagaagtgtgcgttccggagccttttcgctttccatttctctctctcccgtgctttctagagttggtgctctgggaggagtaacgattcagcggttgaattgcgagaatggaaagcgttttagagagtgtcatgggggcacaaaaaaagttttatttttgttgataaagggttttactcagttgaaatgttgctgcttctgctcgctcttaaggattaaggtcctaatggtaattaaagagaccatgagttgatttcagatggggaacaactgaagatgggga

SEQ ID NO: 4306 - DNA, 389 bp, Glycine max
  Clone ID: LIB3028-010-Q1-B1-F3
ggctataatcacttttgttggagggaacgatcaagaagaaacagaacgatcaatggacatgatgtggcgagtgattaatcccaaattaggttccaatgtagttgctgtcaaaccttctgcttcattaattgccaatgtggtgtctgcgtggtccttcctcctctctactgtgagcaatttgaagctaaatacaaaaaattggcaaaattcaatatcctatttatctagtcttctagacaaggaagataggtctgtacgaattgctgctggtgaagcactggctctaatttttgaaattggagttatagataaattttctgccaagtcagacagtgcaagtgatacaacgcaagaagggagtacaccacttgaaagctacatatttttac

SEQ ID NO: 4307 - DNA, 134 bp, Glycine max
  Clone ID: LIB3028-010-Q1-B1-F4
atttcaacgataaaaggtaggttttagctctaccaggtttcatgccatcaaccccctttccattttttttttctgtttttcttttcggcctgtctgtgcatatttgttaatttggtcggacaaaaatttttatc

SEQ ID NO: 4308 - DNA, 409 bp, Glycine max
  Clone ID: LIB3028-010-Q1-B1-F7
gacagaagttgaaaattttggttgagtgagaggcttgtctttgttccgctaccatgtctcatgagacatgcccttctgtaaagaatgtccttcttttggattccgatgggaaacgtgttgcggtcaaatacttctctgaagactggccgacaaatagtgccaaggaaaattttgagaaagttgtattcaacaagactcagaaaaccaatgcccgcacggaagcagaaatagcaatgtttgagaataacattgttctttacaagtttgtccaagatcttcacttctttgttaccggtggtgattatgaaaatgagcttatcttagccacagttctgcaggcattttttgattctgtgggccttctgctcataggcaatgtagacaagaaaggagcactagagaaactgga

SEQ ID NO: 4309 - DNA, 404 bp, Glycine max
  Clone ID: LIB3028-010-Q1-B1-F8
atacgatccaatggctgcgacccttttccagggattgggagttgtgaccccatcattctcttcttcccactccaacaagttcatgctttcttccctctcagagaggaaagatggcatatttgtggtcagatctgatgctgatgcaaggattctgaagactggagctcgtaagcatgaattgttggttactaatgcagttgcaacaaagggagccagttctgcggcctctacatcaaaatctggatctgggcatgaacttctcctttttgaggccctacgcgaaggtttggaggaagaaatggagagggatccttgtgtatgtgtcatgggtgaagatgtaggtcattatggaggatcttataaggtgactaaaggccttgccccaaagtttggggaccttagag

SEQ ID NO: 4310 - DNA, 343 bp, Glycine max
  Clone ID: LIB3028-010-Q1-B1-F9
ggtaatatgggcagttggaatcttggacaaggttgtcttacgatggaggagaaaaggagctggtttacgaggtttccgacaagagatggacatcaacgaaaatgaaaatgaagatgaagatattctcaaggtgttccgaaaacagaaagttgatgtagaaattgaagaggctgtttcaagggtgctgtccatggtcgactcaccagatgctcgtgagcaatatcatcgcatgcttgagaaatatcgtcaagctaaggctgaacttgcgggtacgagtgacgaggcatcattatcaacttctgtaggagatgacttatttattgatgatttttatccatttccc

SEQ ID NO: 4311 - DNA, 370 bp, Glycine max
  unsure (1)..(370): unsure at all n locations
  Clone ID: LIB3028-010-Q1-B1-G1
aaatanacanagaaagagagaaagaaactcaaactcgttcgtttccttcctccaagaaataatgggttccgtttccaatttctgtttcgttcccctcctcctcctcctcctcacaaaatgctggttcctaacttcagcanaganaactacatagttcacatganacaccacganaagccttcggtttaccccacacacactgactggtacagcgccagtcttcaacaatctctcactctcaccactgccgattcagattccgattccaatccgttactctattcctacaccaccgcctacaacggtttcgccgcgtcnctcaacgacgaacaggcggaacagcttctcagatccgaggatgttctcggag

SEQ ID NO: 4312 - DNA, 343 bp, Glycine max
  Clone ID: LIB3028-010-Q1-B1-G10
atcaaaaggtaacaaacaaattaaaagaaaaagggaaaagtatactacgcagaataggtggttcaaagttcaatggctgagaagaaggaaatgattccgcaacaatttgacatcgatgccaaatgggacgcctgcattgatctcaccgtccgtcgcttcgtctactccgcaaccgccggtgcatttggcggtctcctatttttcaggagtcctgtgactcgatgggcatctattgcttttggtgctggagttggaattggatctgcatatgcacaatgttctcgtctgttcgatggacctccaacaaatttacccttacctaaggtccccgaaactgctactc

SEQ ID NO: 4313 - DNA, 350 bp, Glycine max
  Clone ID: LIB3028-010-Q1-B1-G11
tctgatttggaaataacagatgacggggaagagattctaagtacttgtcaagccaatgtggtactgttacacaggataaaaacaaaggattagatattcattgaatagtcagaaatactaactgcgattcctgcatcaatcgcaacgtcagtctcgtctggctaatcttttgaaccggtaaattcatccagtcaccattttaacgtgattctaagtcatgctagcaagctacaaaggtcatatggtcctccagtttataatcaattcgtgcattcataacctgaacctctcttcgattgctctctaacatgatgacccataggtatagtctccgaaaatgctcctcaggg

SEQ ID NO: 4314 - DNA, 359 bp, Glycine max
  Clone ID: LIB3028-010-Q1-B1-G12
gttgtgaaagcagagaagtgagatacactaagttatcctcataaatacactctaattaggtggcaagataagtgtctaaccttagtaacattgccacatattgtgttcattttggaattgtgccactaaaattctattcaattcatctatggctgcctcttcttatgctatgcaatcaatcctggcaaaccctttgatccgcatttccagcgggtctagggtgaaccaatttggcgttcctgctttgcacatgagaaggaatgttggcctgagagttaggtccatggctaaggaagaacaaccaagtgagcctgcaaccccagttacaccgccaccatcagtagaacccaagccaaaac

SEQ ID NO: 4315 - DNA, 383 bp, Glycine max
  Clone ID: LIB3028-010-Q1-B1-G3
cgaagatatgtttttctctttttttcctacggtgtggccaggctgttcactttagcgaaggatcaaaaaccctgtgaaagtgtgtttgtttggtcgagttgattgaattcgctggcagcttacagctatgatcatcaacaacgccccttttcctctatgattgattcgattcgattgaagtcgattccgtagagagtgagaaatcagatcacaataatcatcgatgggtaatttgttcgtgaagaagcccaaggtaacagacgttgataaagcaatcctcgcactcaagacccagagacgcaaactcgcccaatatcaacaaaagctagatgctgttattgaagcagaaaagcaagctgcacgagacttgattcgtgaaaaga

SEQ ID NO: 4316 - DNA, 412 bp, Glycine max
  unsure (1)..(412): unsure at all n locations
  Clone ID: LIB3028-010-Q1-B1-G4
ccgcctcagagggctcttctcgttctcttttacattccaaagccaacaaaacaaaaaactcactaaccctaaccctacccccacccttttgaaatgaacttcaaaccctggctctctttcctcctcttggccctggccctggccatggtggctgaggcttctagtgttcatcatgaatatggcttccatgttaatgctgtggtccatgatctcattggagatgacaatgagatgttgctagattccgaatccaatcgccgaaccctcaccgggcgacaacggtacattagctatggtgccctaaatgccaacaatgtgccatgtggtaaccgtggaagattctactacaattgccagcagangggtcgtgccaacccttacaatcgtggttgcaccaaaatcacacattgtg

SEQ ID NO: 4317 - DNA, 373 bp, Glycine max
  Clone ID: LIB3028-010-Q1-B1-G5
gcgagtctcagtccagttagcacaccaaccccaaatccaaaggttcatttcaatatgaccatcatgtcaagttttggacctttgaccattcttagtatagtcttgttagtggttggtgtcattgtctctggggctgaagctaggccaagggctttctttgtgtttggagattcacttgttgataatggaaataacaattacttggctaccaccgcacgtgctgatgcccctccttatgggattgattaccctccaagtcatagaccaactggtcgtttctccaatggctacaacattcctgatcttatcattcagcgacttggtgctgagtctacattgccatatgtgagtccagaattaagaggaaataagc

SEQ ID NO: 4318 - DNA, 432 bp, Glycine max
  Clone ID: LIB3028-010-Q1-B1-G6
gggaaggaaaagtggtgttggtggttgtcctcctcattggtatggcaaccctttcctccatcctctcctcctctcttcctcttttccatcgctaccctaaccctaacccttcgctctttcgcccctccctttctctctctttctctcgcactaaaccccgttcccccttcctcgttctcgctgcctcttcccatgatttcgcctccaactccaagaaatcagtgctcaccgagttgatacaagagatagaacctctggatgttagccacattcagaaggatgttccaccaactacagcagatgccatgaagaggactatatctggtatgctgggcttgcttccgtctgatcaatttaatgttgtcattgaggccttgtgggaaactctctccaagttacggatttcctcaatgatgaacgggtatacactac

SEQ ID NO: 4319 - DNA, 359 bp, Glycine max
  Clone ID: LIB3028-010-Q1-B1-G8
ctcgagccgaatcggctcgaggccggttgttgttacttctgtggagaagaatgagaagaagatgaagaggaagtatcagaagaagagggttttggccgaggatgagcctaagcccgatccttattggctggatacgttttttgggtttgcacccgaagaggcggagagggtacccaattgggggcattgtggggtgcttagtccgcttttggccaatgtttgcttggatgagttggataggtggatggaggggaagattaacgagttttatgttccttccaagagtgatgttatatggaatagtcccgacgaggatcaagggaacacgtcgtgggcggagttcgtgcccaagagtgggc

SEQ ID NO: 4320 - DNA, 386 bp, Glycine max
  Clone ID: LIB3028-010-Q1-B1-H1
gaagaaagaatacgcgcagagtggactttgacctcagcgccgtttgggtccgaaccaagacgcacacaggacggtgcgttcaacaaacctaccttggtgggccccacttttcccccgaaccgtagcttcagagtgatccctttcgcaccctctatataatagcgccctcgccactcgcctcgacgcgtgactctcgcgggtggacaacgaaatttctcagccaaagaacaaggatcagaatcgtttaatcaagttgaggaagatggcactagtctccggaggaagatcaacactgaaccctaacgcccctctttacattcccgccgcgttccgccaagtggaggatttttctccagaatggtggcagctggtgacgacactgacat

SEQ ID NO: 4321 - DNA, 348 bp, Glycine max
  unsure (1)..(348): unsure at all n locations
  Clone ID: LIB3028-010-Q1-B1-H10
caccattccaatttccatggcactctcctttcgccccgtcatccacccccgcgtcaccgaccggtcactctttcagttcctcccacccaagcctccccctcttccaacttcgccacctccctccgttctcctccccctcacgcgtcgccgcggcggcttccttccctcctgcctctccgacgacgccgtctccacccgcaacttcgaccgcggcttcaccgtgatcgccgccatgctccgccgcatcgagcccctcgacaactccgccatctccaaaggcgtgtcncccgccgccagagactccatgaagcagaccatctccaccatgctcggattgccaccctccga

SEQ ID NO: 4322 - DNA, 363 bp, Glycine max
  Clone ID: LIB3028-010-Q1-B1-H11
cagtttcgggggaagagatccagcagcaatggtgtacgtcaaggctcagaaatcaaaagcctacttcaagagatatcaagtcaagttcaagagaagaagagagggaaaaaccgattaccgtgccaggattcggttgattaatcaggacaagaacaaatataacactccgaaataccgatttgtggttcgctttagcaacaaggacattgttgcacaaataatatctgctagcattgccggcgatttagttcttgctacagcatattcacatgagctgccacgatatggtcttgaagtaggacttacaaattatgcagcagcttattgcactggtctcctgttggcccgaagagtcctcaaaac

SEQ ID NO: 4323 - DNA, 350 bp, Glycine max
  Clone ID: LIB3028-010-Q1-B1-H12
cgcaagcagaaagaaagaatcccaggcgaggagaaagatggaggggaaggagcaggatgtgtcgttgggagcgaacaagttccccgagagacagccgattgggacggcggcgcagagccaagacgacggcaaggactaccaggagccggcgccggcgccgctggttgacccgacggagtttacgtcatggtcgttttacagagcagggatagcagagtttgtggccacttttctgtttcgctacatcaccgtcgtaaccgttatgggagtcgccggggctaagtctaagtgtagtaccgttgggattcaaggaatcgcttgggccttcggtggcatgatcttcgccctcg

SEQ ID NO: 4324 - DNA, 395 bp, Glycine max
  Clone ID: LIB3028-010-Q1-B1-H2
gagacattacagtttgtattattgtagaagagagagggagagagatggagttgagcatgaaagtgttggtgaaagttgcttcgttgcttttcctattggaattcactgcaacagttgttgatgctcgcttcgatccaagttcattcatcactcagtttctccccaatgctgaagccaacaattactatgttaaatccacacaaaagcgtgctgtaacagctgtccttgcacaaaatcaatccctccacagtgtcgttgttcagatattggagaaacatgtcactctgcatgcaaaacttgtatttgcactcgctcaattcctccacagtgtcattgcagtgacataaccaacttctgttatgaaccttgcaactcctctgaaaacgaagctcact

SEQ ID NO: 4325 - DNA, 399 bp, Glycine max
  Clone ID: LIB3028-010-Q1-B1-H5
acaacgcgcactctctcttttctctcttaacacaaaaaccctatcgttcttcgcggtttcgccgattctcgccatgccgaaagccaaatccgacgccaaagccgccgatagccggttgaagcgcaagggcgctggtgctggaaggaagcaatcgaagaaagctgctaaggatcctaacaagccaaagagacctccaagcgctttcttcgttttcatgtccgagttcagagagcagtttaagaaggagcatcctaacaacaaatccgtcgctgttgtcggtaaagctggtggtgacaaatggaaatcgctgtctgatgctgaaaaggcccccttcgttgccacggccgaaaagaagaaacaagagtatgagaaaactattttggcttacaataagaaatt

SEQ ID NO: 4326 - DNA, 394 bp, Glycine max
  Clone ID: LIB3028-010-Q1-B1-H6
gcctcagctcactttttgcaccttgattccatttttccaacaactcactggcattaacgttgtcatgttctatgcccctgtccttttcaagactttgggctttggcaacgatgcttcccttatgtcttcagttatcaccggaggtgtaaatgtggttgccactcttgtttccatcttgactgtggacaaggttggaagaaaagttttattccttgaaggtggtgttcaaatgttgatttgccagattgctactggagtcatgattgctatgaagttcggggtgagtggctaaggctcgttttcctccggagaagccaaccttactttgttctttatatgtgcatttgttgctgcatttgcatggtcttggggtccactaaggtggttggtgcct

SEQ ID NO: 4327 - DNA, 420 bp, Glycine max
  Clone ID: LIB3028-010-Q1-B1-H8
ggaaagagcaccattgttttgcacaacacatgcgaggattccctcttagctgctcctattatcttggacttggtccttcttgctgagctcagcactagaatcgagtttaaagctgaaaatgagggaaaattccactcattccacccagttgctaccatcctcagctacctcaccaaggctcctctggttccaccgggtacaccagtggtgaatgcattgtcaaagcagcgtgcaatgctggaaaacataatgagggcttgtgttggattggccccagagaataacatgattctcgagtacaagtgaagcatgggaccgaagaataatatagttggggtagcctagctgaatgttttatgttaataatatgtttgcttataattttgcaagtgtaattgaatgcatcagcttcattaatgc

SEQ ID NO: 4328 - DNA, 330 bp, Glycine max
  Clone ID: LIB3028-010-Q1-B1-H9
ctcactcacttccattgtcactgctcctttctcggatctctctcttcttcttcttcgttttctcttcgcgagtgagagatggcgcaaattctgcttcatgggactctccatgccaccatcttcgaggttgataggctcaatgctggtggtggtggcggcaattttttcagcaagctcaagcaaaactttgaggagactgttggtattggaaagggagttactaaactctatgcaaccattgatctggagaaagcaagagtaggaaggactagaatcatagaaaatgaacatactaatcccagatggtatgagtcttttcacatttactgt

SEQ ID NO: 4329 - DNA, 404 bp, Glycine max
  unsure (1)..(404): unsure at all n locations
  Clone ID: LIB3028-011-Q1-B1-A1
caaaaaatgggagacaaaaacaagtcaaatttttggtaaaggaaaggccaaaactaaaaattcaaaaaaatgagggattaaaaggagacaattttgtagggattaaaagtgaacatttccctatttataagaactaaaaacatatgtaactcaactttttatcaaaatgagaggggatgttatttctatggcaaaagtttatttttatagaaatttttaccattttaattgaattaatgtagaaaagtttgttgcatgcaaaaatatcatggggaaagaaacattcttttccactatgtttttttccttcccttccttctcattcgtataaaacttattcagaacaaaagcttattaagtgagacttcatganatactaatagtctagatcttacatcaaattt

SEQ ID NO: 4330 - DNA, 364 bp, Glycine max
  Clone ID: LIB3028-011-Q1-B1-A10
ccataacacaaggcagaaagcaagctcatcctagagttttaaaaatggcagcagcctcctccatggctctctcttccccatccttggctggcaaggccgtgaagctgggcccatcagcccccgaagtcgggagggtcagcatgaggaagaccgtcaccaagcaggcctcctccggaagcccatggtacggcccagaccgcgtcaagtacttgggcccattctctggcgagcccccgtcctacctcactggcgagttcccaggtgactacggctgggacactgctgggctttcggccgacccagaaaccttcgccagaaaccgtgagctcgaagtgatccactccaggtgggccatgctcggggc

SEQ ID NO: 4331 - DNA, 355 bp, Glycine max
  Clone ID: LIB3028-011-Q1-B1-A11
ggatgatactgttcttcaaacccgcaagcctaatgctcccattgagcctttgaatcaaatggttgatgaggaaccaaggttggagctggaaaacgaattccctataaatgaagctacatttgttgcccctgttgcctcagccccagctgcaacctctgtggcatcttcatcagtgccttgtcctataattgatctgtctgaaacaaccccagctgttccatctaatcagcaatccccaaccgtggatgtgccatcgtcatctatgggtactggtggaggaattaattctgtggaggagaatctacttaaagagcttgaggagatgggttttaaacaggttgatttgaacaaggag

SEQ ID NO: 4332 - DNA, 386 bp, Glycine max
  Clone ID: LIB3028-011-Q1-B1-A12
atgatgatgaagtctgctatgtgtgcagtggtggttgtagcacttcttcttctggcggaggtggggcccatggctgaggctgtgacatgcaccccaacagagttgagtccgtgtcttccagcaatcacttccggtgctaaaccttccaatgcttgttgcacgaagctgaagcagcacataccatgcttatgtggctacctcaaaaacgctagcttgaagcagtatgttaactctcctaatgcccgaaaaaccgttgcttcttgtgggattccctttccaacttgttaattaattaagccttcttataattaaagtgtgggatatatatatatatatagataaacagtttaatttatacacactttgatcctacaaagcatcttgac

SEQ ID NO: 4333 - DNA, 228 bp, Glycine max
  Clone ID: LIB3028-011-Q1-B1-A3
cttctcttgaggtaaattgcatgctgcttcaccttgctattttgtttacattcgctgcagtgttttatcttggaatctccagtgaaacgtcgtgcggttcatgtgcgctactattattagacgtgcaatgaatcactaagtgcggtgctccttctgccgaggttcgcaatatcacatttcagtgtttgaatattgttgacagtgctggatttggtactgcaggaattg

SEQ ID NO: 4334 - DNA, 397 bp, Glycine max
  Clone ID: LIB3028-011-Q1-B1-A5
ctcgagccgattcggctcgaggattatactctgaaagctgttggtggaagtttaacggctattcctggaatctcagatatgattgatgatactgtgaactcaattgttactgacatgctccaatggcctcataggattgtggttccacttggtggcattcctgttgataccagtgaactggagcttaaaccccagggaaaacttgcactgactgttgtcaaagcaactgctttaaagaatatggaaatgattggaaagtcagatccttatgtaattgtgcatattcgaccattatttaagtataaaaccaaggttattgataacaacctgaatcctatttggaatgagaaattcgagttgattgcagaagacaatgataaccaatcactcattcttg

SEQ ID NO: 4335 - DNA, 411 bp, Glycine max
  Clone ID: LIB3028-011-Q1-B1-A6
ctcagtctcagaccctttctcaccaccatcttctttctcacactcacagtgctcaaggtttcagcatcatcctcagtgattttctacaacaagtgccagcacccagtgtggcccgggatccagcccagcgcaggaaagcccgttctggcccgcggaggcttcaagctcgccccaaaccgggcctactccctccagctccccgctctatggtccgggcgcttctggggccgccacggctgttccttcgacgccggcggccgggggcgctgcgccaccggggactgcggcgggtccctgttctgcaacggcatcggcggaagcccaccggcgaccctggcggagttcaccctgggcaacgagcaggacttctacgacgtgaccctggtggacgggtacaacctacccatctcc

SEQ ID NO: 4336 - DNA, 404 bp, Glycine max
  Clone ID: LIB3028-011-Q1-B1-A7
gtgtttctttctctctcatgttgtagtatctcactagtgtttttcattcgtttctgaaccacacaaacatcaccaccgaacaatgccgacggggttaccggcggcgaattccttagtggcgccggacgaagaggggtgggtgtgggggcagatcaaggcggaggcgcgccgcgacgccgagtcggagcctgctttggcgagctacctctactcgacgatcctctcgcactcgtcgctcgagcgttctctgtcttttcacctcggaaataagctctgttcctccacgcttctctcgacgctcctttacgacctgttcctcaacgccttctcctccgacccctccctccgctccgccgccgtcgccgatctccgcccctgccgcgaacgcgaccccgcctgcgtct

SEQ ID NO: 4337 - DNA, 410 bp, Glycine max
  unsure (1)..(410): unsure at all n locations
  Clone ID: LIB3028-011-Q1-B1-A8
cgctctttcgtgtttttgttcgcgaaggaaactctatccttagctatcgcgatggatcggtaccagaaggtggagaagccaagagctgaaactccaatcgatgaaaacgagatccggattactagtcagggaaggatgcgcaactacattacttatgccatgagcttgcttcaggagaaaggttctaatgaaattgttttcaaagcaatggggagagctatcaacaaaaccgtgacaattgtggagttgatcaagaggagaattgtgggcctccaccagaatacagcaattggatccactgatatcactgatacttgggagcccctagaggaaggcctccttcctttggagacgacanagcacgtgtcaatgataacaataaccctttcaaagaaggaactcgatacatc

SEQ ID NO: 4338 - DNA, 358 bp, Glycine max
  Clone ID: LIB3028-011-Q1-B1-A9
attcatccaaatttctcaaactcaagctagcctttgggggatatgatagagaagaagacacagtgtgagaaaaaggaaaaaatggaaggtgaagaaactgagatgaaacaacaatccaggttcaaaaggatttgtgtgttctgtggcagcagccctgggaacaagagtagctataaggacgctgctattgagcttgggaaagagttggtgtcaagaaatattgatctggtttatggaggaggaagcattggtttgatggggttggtttcccaggctgtttatgaaggaggtcgccatgtaattggagttattcccaagacactgatgccaagagagattactggagagacagtggggg

SEQ ID NO: 4339 - DNA, 394 bp, Glycine max
  Clone ID: LIB3028-011-Q1-B1-B1
cagctccaaccgaatccggtccagcgttgcaattcgccttttccaaaagcaatcacattaacatcacgctgtccccgccgtcgttcaaccacggcaagaagcattcgaactccgccgtcatccgtttacggcaagactgagttcatgacatggatgtggatacgatcgtcacatcacgattttctcccctgaaggacgtctcttccaagtcgagtatgctttcaaggctgttaaggccgcaggaatcacctcacttggtgtccgctgaaaggattcgatttgtgttgttactcagaagaaggttccggataagcttttggacaacacaagtgttacacacctctttcccatcaccaagtaccttgggttattggccactggcatgacaactgaa

SEQ ID NO: 4340 - DNA, 355 bp, Glycine max
  Clone ID: LIB3028-011-Q1-B1-B10
aaagaaagaaaaaaacccttagccaacacaaccatcatggccatctctgctattcagcaatcagcattcactggtcaaactgctctgaagcagctcaatgagttcgtccgcaagaccggtggcgccggcaaaggtcgcactaacatgcgccgcaccgtcaagagtgctcctcagagcatttggtatggccctgaccgtcccaagtacttgggtccattctcggagcagattccatcatacctgaccggagaattccctggtgactacggatgggacactgctggattatcagctgacccggaaaccttcgccaggaaccgggagctggaggtgattcacagcagatgggcaatgc

SEQ ID NO: 4341 - DNA, 424 bp, Glycine max
  Clone ID: LIB3028-009-Q1-B1-A6
gaaagaatggcacgcatcaaagaggatccatctctgaaacatattttggaggagatagagactggcggtcctgctgctatgatgaggtactggaataatgaggaggttttgcagaagttgggacaagccatgggtcttgccaattcgggagatgcaggtgcctctgctgaaaattctggggcagatgagaccgaagatttgggaaatgaagatgaatcaattgttcatcatactgctagtgttggtgatgtggagggcttgaaaaatgcactagcctctggtgctgacaaggatgaagaagattcagagggaagaactgctttgcattttgcctgtggatatggcgaggtaaaatgtgctcaagttctcctcgaggctggagcaaaagtggatgctttggataagaataagaacactgctctcc

SEQ ID NO: 4342 - DNA, 337 bp, Glycine max
  Clone ID: LIB3028-007-Q1-B1-A3
aaacactgctggatggtgtgtagcgaaagctggagtttctgatgctcagttgcaggccaacattgactacgcctgtagccaaggtatagattgcgggccaattcagccaggaggctcttgttttgagcctaacacaatagcatcccatgctgcatttgccatgaatctctactatcaaacttctggcaaaaatcaatggaactgtgatttctctcaatcagcaacactcacatcccaaaatccaagttacaatgcttgcatttacactggtgggagcacctgagaacagaggcttcggcttgatgttaactaataagttttgtggatagaggtgtat

SEQ ID NO: 4343 - DNA, 402 bp, Glycine max
  Clone ID: LIB3028-007-Q1-B1-A4
ggccttttagaaataaatttttcttatatttctttcattagtagtacctataatggatacagtaagagagttggcatcaaagagtgcagcagttagattcaccaagagttcatgttacatgtgccacagcatcacgcaactgttctatgagcttggtgcaagccctgcagtgcatgagctatacaaagatggctatgggaaggaaatggagtgggctttgaggagcatggggtgcaacccttcagtgccagcagtgttcattggtggaaaatttgtggggtcttcaaaggatgtcatatccctccatgttgatggctctctcaaacaaatgctcatggctgcaaaggccatatggttctagctagtactcatccacactccaataatataatataagaagct

SEQ ID NO: 4344 - DNA, 392 bp, Glycine max
  unsure (1)..(392): unsure at all n locations
  Clone ID: LIB3028-007-Q1-B1-A5
ggaatgatttttaaaactttgatctgtaccaaaatccctatactaataaagcaaaaggcaggttcatacatgtatttgttagtttgttgactcctttcaacctaacccatcatcgttcacacccgtggttctggctctgccctattttcggttcctctcgttatcgaaacagaaaccatttgtggtgaacatggatttggaccagtggatctcgaaggtcaaagatggccagcatcttctcgaagacgagcttcaacttctctgcgaatatgtaaaagagatccttattgaggagtccaatgtgcagcctgtcaatagtccagtgactgtntgtggtgatattcatggtcaattccatgatctaatgaaacttttccagactgggggtcatg

SEQ ID NO: 4345 - DNA, 376 bp, Glycine max
  Clone ID: LIB3028-007-Q1-B1-A6
cgagttcagccgaaccaaactccgaagctatggcagagctccaaaccaaggttgaacctgttacggtcccggctccggtggatcccgagccaccgctagctgaggctccgccgctcgaaaagaaagcggtggcggtgccaccaactgttccggctgcggcagaggaaaccaaagctcttgttattgtggagaaggagaaggagaatgagatgataccagaacctgtaagaaagaacgcctcacgtggatcccttgatagatacattgctcttgcagaaatagataaagagaaacgattgtctaatgtgaacgcttgggaagaaagtgaaagatccaaagcagagaataaagcccaatagcagctctctgctgttgc

SEQ ID NO: 4346 - DNA, 410 bp, Glycine max
  Clone ID: LIB3028-007-Q1-B1-A7
caaaggatttcaactttaggctccatctaaaaaaaatggctggtttggctagcaatcttcctcgaattgttatgataggtctgcaaattcattatgcagcacttgccatattcacaagagccgctctcttagatgggttgagtacaacggtgtttgtagtatacaggcaaggcatagccactttggctttggcgcctatatttttctctcctaagaggagacaatcagtgaaagattctttgggattcaggagcttctttttgatgtttgtgaccgctcttgttggagtcacggcaaatcagaatgcatacttcaaaggattattttatgcatcttctactgcagctaccgctatgagtaatctgataccggcattaacgtgtgtaattgcagcaattgccggatttgag

SEQ ID NO: 4347 - DNA, 333 bp, Glycine max
  Clone ID: LIB3028-007-Q1-B1-A9
ccaaattccattttccaattcaaaaccctaactccgttcgaagcaccaaatcgtgatggcaccaaaggcagagaagaagccagcagagaagaagcctgtggaggagaagaaatcgacggtgggagacaaggctccggcggagaagaagccaaaggccggaaagaagcttccgaaggagggaagcgccggcggagaaggtaagaagaagaagagaaacaagaagagcgtggagacatacaagatctacatcttcaaggttctgaagcaggttcaccctgacattggtatctcaagcaaggccatgggaatcatgaacagcttcatcaacgacat

SEQ ID NO: 4348 - DNA, 364 bp, Glycine max
  Clone ID: LIB3028-007-Q1-B1-B10
gctagattcacttgtgtttatgtttttccgtcctttatctctttttataatataagccctcatactcccttgtgtacagtgatcgatctcaagaagaaagactcaaaatatggaggggaatctagagaagaagttgctgagcaaagaggaagtgtcagaagaagataatttatcattggtgaagagggtgtgggaagagagcaaagagatgtggatagtggcagcaccagccatattcacaaggtttacgacctttggcatcaatgttataagccaagcttttattggtcatattggttcaagagaactcgctgcctatgctcttgtattcactgtcatcatacgtttcgccaatggtattctg

SEQ ID NO: 4349 - DNA, 405 bp, Glycine max
  Clone ID: LIB3028-007-Q1-B1-B11
ctcccagaaagaaagaaagcactctcgctcgcggccattgtgaaaattccgtacaattcgctctccaccccactgaagcaccaaacgacgccgttttcagcaagcacagtttccaaaccctagctcgttcttcctccaatgtcctccgaagacatcactctcgtccccgaccagaggatcgagaacggtctcaattcccctctcgtcttccaagacgaccctctccgcttcaattgccccaccccgcaccaccgccgggtcggagacccgcctccgaaaacccgcgaacttggctccttcatcgacgacaacaagatgttcatcgaccgcgaccgcttcttcgccgccgcccacaaccccgaattccgccgctacgctgactgctccgcccgccgcgaaccgcgc

SEQ ID NO: 4350 - DNA, 371 bp, Glycine max
  Clone ID: LIB3028-007-Q1-B1-B12
caaagctacgatgattccaaattcctgattccagtcacatttcacatttcatagttcatattccatattcatataccgtttctttgttctcgctgcctagcatggcatcaacctcactcttcaacttcagactccctctgttcaacttcaatccactgcaccatcgactgataaagatgccaaaatctctgcgctcctctcttcgcaacagtccacacctcgtttcttccattaacgaccatttggcgctcagacgtgtcagatatccgcttctcgaatctcactctgctccgaagcgcagattccacgttggtgtacagacagagtattctgatgtggaaagctctgagtcaattgtttctgacgctaca

SEQ ID NO: 4351 - DNA, 353 bp, Glycine max
  Clone ID: LIB3028-007-Q1-B1-B2
ggagccactcaaggctgagttccctattttgagctacgccgatttctaccagttggctggcgttgttgccgttgaggtcacgggtggacctgaagttccattccaccctgcacgagaggacaagcctgagccaccaccagagggtcgcttgcccgatgccactaaaggttctgaccatttgagagatgtgtttggcaaagctatgcggcttactgaccaagatatcgttgctctatctgggggtcacactattggagctgcacacaacgagcgttctggatttgagggtccctggacctctaatcctcttattttcgacaactcatacttcacggagttgttgagtggtgaga

SEQ ID NO: 4352 - DNA, 345 bp, Glycine max
  unsure (1)..(345): unsure at all n locations
  Clone ID: LIB3028-007-Q1-B1-B3
aaggggtgataaaactcatgtgtctactcgagtgatgggaacctatggttatgcagcaccagaatatgtcatgacgggacatcttacatcaagaagtgatgtgtatagtttcggagtggtactacttgagatgttgactggcagaagatctatggacaaaaaccgacccaacggtgaacacaaccttgtggaatgggctagaccacatctgggagagagaagaaggttctacagattgatagacccccgcttggaaggccacttttccataaaaggggctcanaaagccgcgcatctggctgctcactgccttagcatagatccaaaagcacgacccttgatgag

SEQ ID NO: 4353 - DNA, 373 bp, Glycine max
  Clone ID: LIB3028-007-Q1-B1-B4
ctcagagtcacacacacgcacatatattttcttcatcttcgtacaccactgtctcatcatctccttttccttgttctggtggcgctcttgattttcagatgacaacagcaattgggtgaaacgtgaacgccaccaccgatcggggtttgccaaaaccttacaatggaggtcgaaaggatgagacagttgatgctgatgtggtgtagaatacgaagcaaccgtgtcgctcttgtgggtggaaaccataccgctgccaggttttgcagtcgctgaaattctctccttcctatatcgctggctttgtttgttttttctcttccaactttactcaataggatctcatctcgctcggttaatttaatcatcgatgggg

SEQ ID NO: 4354 - DNA, 372 bp, Glycine max
  Clone ID: LIB3028-007-Q1-B1-B5
ggagagagcagagacagctaaaatgcaaggaggaatgagatcatttttgtcacatgggaatgtcattagaaatgctgttctacaacgcgtgcgcatggtgaaccccctgctacagacaattgcctcttcgcggtttgaatctgttacgcctgctcgcattgaggagcatggttttgagagcaccacaatttcagacatcttgaatgataaaggcaagggtgctgatggctcctggctttggtgcaccacagatgatactgtttacgatgctgttaaatcaatgacccaaaacaatgttggagctttggttgttgtgaaatctgacgcgaataacgcaattgcacgaattattactgaaagagattacttaag

SEQ ID NO: 4355 - DNA, 391 bp, Glycine max
  Clone ID: LIB3028-007-Q1-B1-B6
caaccttccaatccttccaaccaccactagtggatccttcccacagacggtagaactgaggagggtacgccgtgagttcaaggctaacatgatctccgaggaagagtaggttaagtcaattaaggaggaaattcgcaaagttgttgaacttcaacaagagcttgatattgatgttcttgttcatggagaaccagagagaaatgatatggttgagtacgtcggtgagcaattgtcaggctttgccttcactgttaatgggtgggtgcaatcctatggttcccgttgtgtgaagccaccaatcatctatggtgatgtgagccgcccaaagccaatgactgtcttctggtcatctctggctcagagctttaccaagcgcctaatgaagggaatg

SEQ ID NO: 4356 - DNA, 405 bp, Glycine max
  Clone ID: LIB3028-007-Q1-B1-B7
gacgccataagaaagagcaagtcgaaaagttcatccctccctctctctcacacatcccagccatgagcctcttcggtataggcagaaaccagagaacattccgcccgaaaaaaagtactccttctggaagtaagggagctcaacttagaaaacatattgatgccacgttgggtagtggaaatctgagggaagcagtaaagctacctcctggggaggatttaaatgagtggctagctgtcaacactgttgatttcttcaaccaggtgaatctgctttatggtacccttacagagttctgtactcctgagaattgtcggacgatgtctgcaggacccaagtatgaatatagatgggcagatggtgtacaaattaagaaacctattgaggtttctgctccaaaatatg

SEQ ID NO: 4357 - DNA, 388 bp, Glycine max
  Clone ID: LIB3028-007-Q1-B1-B8
gtcatgcagaaattgcatggattctttattgtgtctgttcaaccaggtggcagagccaagctttagtgataacaaagaacctgtagtaaaacatatagctcttgaagctgataacttgtcatggttgcttgagattttagttgacaaacaagctgctgaagattttgcgctgatgtgggcaaaccagcaggaattggcagccctccatggaaagcttccgattgcatttcgttatcatgtcagttgcatttcaggaagactatatgttggcattggaagaggggaggttttgccatcaaagaacacgcgccagttgttgttgcagacatggctacagcctctaatcaatgactataactggttgcagcacgggtgcaggtcatttgat

SEQ ID NO: 4358 - DNA, 372 bp, Glycine max
  Clone ID: LIB3028-007-Q1-B1-C1
gttggaaatctgaaaaagaaggggcaactaagtctgataataagatcccgtctggaaagtcaaatgccagcagcagattagcaagtgtagtgactggcaataaaggtggtagttatgggagtccttcacatgatcgattagtatatttaaaaacatgccttattgggcagcatgtggaagtccaggtgaaaaatggatctatatactctggaatatttcatgcaacaaattctggcaaagattttggaatcattttgaaaatggctcacttaacaaaggatgctgctttgcaaggaaaagaatctggtgtagaatttgtcagtaaagctccttttaagactttaattatacctgccaacgaccttgtacaag

SEQ ID NO: 4359 - DNA, 399 bp, Glycine max
  unsure (1)..(399): unsure at all n locations
  Clone ID: LIB3028-007-Q1-B1-C10
agtagagtannacaaaagagagtgcaataactcgttgtacattcctagtgtgtgggagagacatggctaagatgtgtgttttggtgttggttcttgctctggctgtggccacaagtgccagaaacgttcccaaccccaaggatgctggtcttaaggaccagaagaacttcatcagctatggtggagttggtggttattccgggattgggaacaatggactgccttttggaggagctggtgccggaataagtggtggttttggcggacgtggtggacttggtggtggcctcggcggtcctaccggtgggatcggagggtttggcggtaccggtagcggtgtcggtggcggtattggtggtggcgttggaactggcgttggtggtggcagcggtgttcttc

SEQ ID NO: 4360 - DNA, 396 bp, Glycine max
  unsure (1)..(396): unsure at all n locations
  Clone ID: LIB3028-007-Q1-B1-C12
gatagctccaataatctcaaggctcccaaaggcattggcaccttcactgagcaatcgaactgttatgatgtccaaacaggcagtaatggggattggggccattacttttactatggaggccccggtaaaaatcctaattgtcaatgagtaatgatgagaggaaagtaaaaaagaaaaaagaaaaaaattgcagcctctcttgtatcattgaatgcaagtgttaaagcccttccttctcttccatcttgtatacccttttttctgtagtggaaagttttgactctttttttttttttttttccttctaatattgaaagattctccatgtaagctangggagaagtgtggccaagtttctcaaaagcctaaagaaacaggcctgccttttataacatc

SEQ ID NO: 4361 - DNA, 368 bp, Glycine max
  Clone ID: LIB3028-007-Q1-B1-C2
gtcgcaattaaaagttaaggtgtacgcgcatatatgtatgtgaaattcgttgattctcttctgccttacttacggctgtctgtgctcatttgaggaagcctacgatcgaggttcgataattaatcatgtgtgacactatgtctatgtcgtccgcacctattacagatcatcgacctgttaaaggtcttgagatggaatatgtagacgatgataagataaaaaagcttggctctttaaagaaggtagcaatcagtgcatcttcaaagttcaggcattccttgcaaatgaaggggagaaggcataccatggttgtgtctgttgctattgacgataacgttgatgcccaagagttgcaagtagttgatgct

SEQ ID NO: 4362 - DNA, 327 bp, Glycine max
  Clone ID: LIB3028-007-Q1-B1-C3
cgaaatctcacaaataatgggcaactaagtctgataataacatcccgtctggaaagtcaaatgccagcaccagagtagcaagtgtagtgactggcaataaaggtggtagttatgggagtccttcacatgatcgattagtatatttaaaaacatgccttattgggcagcatgtgtaagtccaggtgaaaaatggatctatatactctggaatatttcatgcaacaaattccggcaaagattttggaagcattttgaaaatggctcacttaacatacgatgctgctttgcgaggaaaagaatctggtgttcaatttgtcagtaaagctc

SEQ ID NO: 4363 - DNA, 375 bp, Glycine max
  Clone ID: LIB3028-007-Q1-B1-C4
ttgttgttcctttttcatctattatagtttccagtactctttcctttattgctccagtcttccttactcttaacagtagtactttcctagtctaatatcatgcaccaggcaatatagatatcttttgcattttcctggtctgggttgccacatttatagtcgtgtctgatctctaagttctgtcttctgattgcagttggaaaggatgaaaaacgagaatatgcttccttcagtagacggtcaaagccacgagtcaagttttccaggtctacaaagagaactgatgcaattacacgaggccaatcaagagttaggaaacatattccctgttttcgataaattctctatcagcggtaatgcattagaaagggtgct

SEQ ID NO: 4364 - DNA, 414 bp, Glycine max
  Clone ID: LIB3028-007-Q1-B1-C5
gcgaagttgcgttaatgctactactctccttcagcttcttaatcactctcacccaaccctttcttcttcttcttcttaccagcgtcaacaatgtcagatccgtaccagatttcgttcgctcaagccttcttgtgcagcgctttcgccgcgtgtttcgccgagttttgtactattcctctggacacagctaaggtcaggcttcaactccaaaagaaggtagggattgatgatggagtgggtttacctaaatacaagggtttgctgggcacagttaagaccattgctagagaagagggtatatcagctctgtggaaaggcattgttcctggtttacaccgccaatgtttatatggacgcctaagaattgggttacatgatcctgtgagtataaatatctgactttcattgaataag

SEQ ID NO: 4365 - DNA, 369 bp, Glycine max
  Clone ID: LIB3028-007-Q1-B1-C6
ccctaacctctcctcaatgggtagaaacgaagccgccatttccttcctcaccaacgtcgcccgcactgccttcggcctgggcgcagcggccaccgccgtctcctcttccctctacaccgtcgacggcggccagcgcgccgtcctcttcgaccgcttccgcggcatcctggactccaccgtcggcgaagggacccacttcctcatcccctgggtccagaaaccctacatcttcgacatccgcactcgtccccacaccttctcctccgtctccggtaccaaggacctccagatggttaacctaaccctccgcgtcctctcgcgctccgacaccgagacagctccccaccatcgtccagaacctcggcctcg

SEQ ID NO: 4366 - DNA, 389 bp, Glycine max
  Clone ID: LIB3028-007-Q1-B1-C7
caagtgataaaattggaatgtctgattcaaaaaataaaatcgatgaagatgagactaatcctatcagtgcaggtagattttgtgaaaccatgcagggtgagacatctgtggaaaatatagttcttcgaaggcatactaatcctgatgctgcagctagaaatgggaaatcactaccaccagtgtatttttatgccctagaaagtgatcagcctatactggatatattaaagccgtctatagtcattgtttaccatccagatatgacctttgttagggaaattgaagtctacaaagctgagaatccctcaaaaaggttgaaagtatattttattttctatgaagattcaagtgaggttcagaagtttgaagcaagtatacgtagagagaat

SEQ ID NO: 4367 - DNA, 386 bp, Glycine max
  Clone ID: LIB3028-007-Q1-B1-C8
gcggaatctgctagaattttctaataatggcgaaagacgttgagcaggtcacagagcaaggtgaatactccgcgaaggactaccatgaccctcctccggcaccgttgatcgacccagatgagctcacaaagtggtccttgtacagagccgccatagctgagttcatagcaacactcctttttctttacatcaccgtgttgaccattattggctacaagagacagagtgacaccaaaatccccggtaacaccgaatgtgacggcgttggcattttgggcatcgcttgggccttcggtggcatgatcttcatccttgtttactgcactgccggaatctctgggggacacatcaaccctgcggtgacattcgggttgttccttggacgc

SEQ ID NO: 4368 - DNA, 390 bp, Glycine max
  Clone ID: LIB3028-007-Q1-B1-C9
acaaaatgaacaacctcttctttctcttcttcttcctcttcttagcctccgccgccgccagcgtccccgcccacaacatcacccgcatgcttgccaaacaccccggcttctccaccttcaaccactatctctccctcacccacctcgccgaagagatcaaccgccgccagaccatcaccgtcctggccctcgacaatgccgccatgtcctccctcctcgacaagcacctctccctccccaccatcaaaaacgtcctctccctccacgtcctcgtcgactacttcggcgccaaaaagctccaccagatcaacaacagcaccaccctcgtctcctccatgttccaggccaccggctcagcctccggcaccgccggctacgtcaacatcacca

SEQ ID NO: 4369 - DNA, 282 bp, Glycine max
  Clone ID: LIB3028-007-Q1-B1-D1
cacgctcacctaagtttcaatttcaatcccttttctttttccgttacaaaataattcaaaattccctccctcatttacccttgtttgtgtaaagtagtagcagagtgagactaggtatcatcgatggcagggtacaagggcgatgacgaatacgattacctcttcaagctggttctcatcggcgattccggtgtcggcaagtccaacctgctttcgcgcttcacgaggaacgagttcaatttggagtccaagtccaccataagggttgagttcgccaacaag

SEQ ID NO: 4370 - DNA, 406 bp, Glycine max
  Clone ID: LIB3028-007-Q1-B1-D10
tggggttcttgcacttgctgtgtcctcttcaagcttttgaactggggtgttaggggttcgaccattcctcgagcctagtacaagttgtggttgggatttcaatgcattgtcaaggtcttgtaatgcttcattgaggttgtttgagagtgtttgaggggagaattgacgtttgttccttatgctgttggccagttcccttaatacttttgacacttcctctccaagtctgatgcaagaatctttgtacaccgcacgaattgactttggtgtcttaagaatcaaatgttaataaattaataaatcagtcaatggaatatataataaaatcatgataataagcatcaaataagaagctgcacttataggcttaactaatcctcctattattgttgttgaaattcgattt

SEQ ID NO: 4371 - DNA, 410 bp, Glycine max
  Clone ID: LIB3028-007-Q1-B1-D11
aaaaaaataccctcgattcatgcctcaaaagggttgataataagtaaaaaaaatcaatgaattcatgataaaacccttctgcgtttttttattataaatttttttgtcaataaagggatcaaggggttgggggatcaaatggtaaagttcttttgttggtaaattggaggattagaaacatgactattgctttccaattagctgtttttgcattaattgctatttcatttattttattgattagtgtacctgttgtatttgcttctcctgaaggttggtcgaataacaaaaatgttgtattttccggtacatcattatggattggattagtgtttctcgtgggtattcttaattctctcatttcttgaagctctatttattctagatcaaaaacgaaatgacccctcccc

SEQ ID NO: 4372 - DNA, 394 bp, Glycine max
  Clone ID: LIB3028-007-Q1-B1-D12
gtggaatctcaatggccacgcttagcttcggcatcgccacgacatgtctgagtgctgccgctgattatcgtagaagaagcaactggaaatggagcagacccagaattgtgtgtgttggatgggacccggaaggcgtgcttggtccaccccaaactgggcacctcgccaggttcgagtttaagaggcgcctcgagagagacgcagatgcccgcgaagccttccaacgtcaagtccgtgaagagaaagaacgccgtcaatcccttcgacaatctcgtcctcttcgcgatactccgcaagacctcattgaatacttccttgacactgaagctcaagagattgagtttgagattgcaagaatgagaccaagattgaatgacgaattctttgcgcaact

SEQ ID NO: 4373 - DNA, 388 bp, Glycine max
  Clone ID: LIB3028-007-Q1-B1-D2
ctctctttcgtcagtttcgggggaagagatccagcagcaatggtgtacgtcaaggctcagaaatcaaaagcctacttcaagagatatcaagtcaagttcaagagaagaagagagggaaaaaccgattaccgtgccaggattcggttgattaatcaggacaagaacaaatataacactccgaaataccgatttgtggttcgctttagcaacaaggacattgttgcacaaataatatctgctagcattgccggcgatttagttcttgctacagcatattcacatgagctgccacgatatggtcttgaagtacgacttacaaattatgcagcagcttattgcactggtctcctgttggcccgaagagtcctcaaaacacttgaaatggatg

SEQ ID NO: 4374 - DNA, 394 bp, Glycine max
  Clone ID: LIB3028-007-Q1-B1-D4
gtaactgatgatttgcctgagtttagaataggccatagagttgttaaagtgcacaatattgagagactttttctttttttctttctagaagtgttaatatgaagttgcattatatatttgtgggaaaaactattgactttcagaaaacagaagaaggttgtttagaaatggcattgctgttttgacagtaactttttaggtaagggaatggaatattttgaagatgttgattaatcactagaaaatgcaaagaaattgtgtttttgcttttgccatttcaactgatgcctggtgaaaatttgctcacatttgctagctaccttaaaaattttgtgttgctgttctatagcatgccgtgaaagtttaaatggaatcttcattttatatgcttttt

SEQ ID NO: 4375 - DNA, 390 bp, Glycine max
  Clone ID: LIB3028-007-Q1-B1-D5
ctcacttctcagcactcagcagcgatatcagttgaagaaacagaaacaaacaaaagaggcagaagatgttgtgggtggacaaatatcgtcccaaaaccctcgaccaggttatggtccacaccgacatcgctcgcaatctcaagaaattggtaacggaacaggattgcccccatttactcttctatggcccatctggctccggcaagaaaaccctaatcatggctcttctccgccaaatgttcggacctggtgccgaaaaggtgaaggtggataataggacctggaaagtggatgctgggagtagatctcttgatttagagctgacaacattatcaagtgccaatcacattgaaatgagtccgagtgatgcaggctttcaggacagataca

SEQ ID NO: 4376 - DNA, 409 bp, Glycine max
  unsure (1)..(409): unsure at all n locations
  Clone ID: LIB3028-007-Q1-B1-D8
ggtgagaatcggaggggccgttttttgaaggtgtctgaagcttctgtcagcagaaaccgtagcactataattgttcctgctggaagctccagggatgaaggatgggcagcattcaggaacgttttggcagagatcaatgaagcctcaaggcttttcattctgcccaatcagcaaaattctgaatcctcagagcgtcttgttggactttcggatgatgttggtgctggcttcatatctggtcatagtactcaacctgccacttcttctgagttgaatgtggacaggtctgttgatttgccgcctcaggatgaaattgggaacttgggggtctcaaaagtaatcagggctgatcagaaaagattcttctttgatcttgggagcantaataggggtcatttcttaagaatat

SEQ ID NO: 4377 - DNA, 345 bp, Glycine max
  Clone ID: LIB3028-007-Q1-B1-E1
cattgcaaaaatggcatcattcaccatgacagcttccatccttggcagcccagccgtcaccaaccggtcggcagtagcaacgcagaggagatcactcgtagtgaatgctgccaaagctgttgaagcagaaaaggtcagttatgacaatgacatggatggtagcaatggaaggaggaacttgatgttcgccgcggcggcggctgctgtttgctctgttgctgggatggcagtggcagatgagcctaaaccaggaaccccagaagccaagaaaaagtatgctccgatttgtgtcaccatgccaactgccaagaattgtcccaattgaaggaacttgggttttaattt

SEQ ID NO: 4378 - DNA, 410 bp, Glycine max
  unsure (1)..(410): unsure at all n locations
  Clone ID: LIB3028-007-Q1-B1-E10
aaacaatgaatcttggtgccaagggttagatggattggcttctaagtctgccgaatactacaagcaaagtgctcgatttgccaagtggacgaccgttgttagcattccatgtggtccttctgcattagctgtcaaagaagcagcatggggacttgcacgttatgctgctatctctcatgacaatggtcttgtgccaatcgttgagcctgaaattcttcttgatggagaccacccaattgagaggacgctggaagtggctgagaaggtctggtcagaagtctttttctatttggctgaaaacaatgtcctttttgagggaattttgctcaaacctagcatggttacacctgnggctgaacacaaggacaaagcttctccagaaaccattgccaaatatactctaaccatgc

SEQ ID NO: 4379 - DNA, 312 bp, Glycine max
  Clone ID: LIB3028-007-Q1-B1-E12
atacgccgccgtttcgctctccggtgaccctctccaccctcagggcgccaccacccacgtccacaaagacgccggcagcaaccccacgtggaactaccccgtgaaattctctgtcaacgaatcgctggcgaaggaaaatcgtttatctcttgagatcaagctcatctccgaccgcaccctcggcgacaccgtcatcggcaccgtccatgttcctctcagggaactcctggataaccccggcgatgacagctccttccgccaagtcagttatcaggtgatgaagcaatcaagaaaatccaagggaatcttgaa

SEQ ID NO: 4380 - DNA, 397 bp, Glycine max
  Clone ID: LIB3028-007-Q1-B1-E2
gattagtccctttgtgattcctgggaaactcatttcattagagtgagagagagagagagagagagagagaggtatcacagtgaaacgaagaagccctaactacgcacgcactcattcttgagaaagctcaatattcattcgtccatggcactctcttctcgtctcttttccaaatccaaattgatctatggctgtcaaatacttctgcaaaaggagcatgctattccagttcgtcactttgctaaagagtctgcccctcctgcccttaagggagatcagatgctgaagaacatttttgtggatgtgaagaacagatttgagactgccatatgaatattaaagaacgagaagatcaccattgacccagaagatcgagctgctgtttctcattatgcaa

SEQ ID NO: 4381 - DNA, 378 bp, Glycine max
  Clone ID: LIB3028-007-Q1-B1-E3
cttgtcttcatgatgaagttcttgcagctgcagtagatgctacagcaagtctatctccaaagcaaaatgaaagaaagggagcatcttctatctttgttaatatagctaagaactttaaagcggggaatgcggatcagaatgcaaatcaatcagttcatactaatagactggaaaatttaaaacaattattctccagtcctcctttcttaaagtcttcctcgagcacagtagataagcaagatccttttgcgattgacatagatgacattcaaattgatgaacctgtagtcttctcatctcctcagaaaatcgatattgacaagagagataaagggaaaggaacagacagacagaaattacttgaagaagcaagcacag

SEQ ID NO: 4382 - DNA, 389 bp, Glycine max
  Clone ID: LIB3028-007-Q1-B1-E5
ctttgattagtgtggcctagttgttgttttctcgatgagaaaggcttcttccactatgcattgcgcacttctgcgcttttgggttcccttgttgctgcttgctagcttcagctatgctccttctgtttcggccacaactgaaatttcagggaatgaagtgaacacagatgggaaggtgataaatgaagagttagcaaaaccaagtctaaaaggacatgatgaagaagcaaagttcaaaggattttttccaaaaccaattcctatagttaaaccaattccaaagctaattcctattattaaacctattccaattccagtttataagcctatttcaaaatcaattcctactgttaagcctattccaaagtcaattccagttgctaagccaa

SEQ ID NO: 4383 - DNA, 377 bp, Glycine max
  Clone ID: LIB3028-007-Q1-B1-E6
attggatgagctgtcacctgaaagagagaggcttgtggatgattgtgctcaaacagaccctatgcctatggacagttccgagtctgatgcagatgtccaggagcatttaggaaaggattttagtgcgctggcagatatgtattggcctgagtccttgggacctttggatttggaaataccatcatcaactatataccatagcgaagatctaatttttagtgatagtcttagtggactgaatcgcttgatagccagcagcctggatgcattccagaattgctccttttttgggtttgacaagaatgaagcaccatcaacagttgaggctcgagaatctgccactctttcagattttaaaattgggagtggcatctgag

SEQ ID NO: 4384 - DNA, 397 bp, Glycine max
  Clone ID: LIB3028-007-Q1-B1-E7
gtggaacagctcgttgataatgcagatgaacgcagggttttggagaacgaagcgctcgatgaggtctgcttccgcacgcttaagctcagtagaccaagctttggggatcggaaacgacgactttcagctaccatgagtggtgtgacatgttgtcttcgtttcgctgggcaagtcaactcagatcttcgcagacttgctgtgactctcattcacttctggcgtctgcactttttcacggtgggtcttgccccactcatatctcgtggttcccaacactacagagctctgacagtacccgaactgagataccagttgtgggatgataggaccatgatgtgtgcagctgatgtacgccatggtcgacacttgacagcatctgcgatgttccgtggtaaca

SEQ ID NO: 4385 - DNA, 388 bp, Glycine max
  Clone ID: LIB3028-007-Q1-B1-E8
ggaaacttagaggaggaggcaaatgtcaagcctccaaccccattgacgcttgctggagatgcaataaagactgggccaatgaccggttcaggctagccaagtgcggcaaagggttcggaagacgggccaccggcgggctcggtggtcccatctatgtcgtcaccgataattccgatgacgacatggtgaaccctaagccgggaactatccgtcacgctgtcacccaaaaaggccccttgtggatcatcttcggacacagcatgatcatcagtttgaggcaagagctgatgatttcctccgacaagaccatcgatggtcgtggcgcaaacgtgcaatttaggggcggtgctggcctcaccattcagttcgtgaacaacgttattatcca

SEQ ID NO: 4386 - DNA, 418 bp, Glycine max
  Clone ID: LIB3028-007-Q1-B1-E9
cgaggaagttttcaatgctttttataagttgtggcctgagaagttccaaaacaaaacaaatggtgtgacaccaaggagatggatcaggttctgcaatccagatctgagtaaaataataaccgagtggataggcactgaggattgggtcctaaatactgaaaaattggcggagctacggaagtttgtagacaatgaggatctacaagtgcagtggagggaagcaaagaggagtaacaaagttaaagttgcagcattcatcagagaaaaagcagggtattctgtcagtcctgatgcaatgtttgacatccaggtgaagagaatccatgaatataagcgacaattattgaacatatttggaattgtttaccgatacaagaagatgaaagaaatgagtgctgcagaaaggaaagcaaatttt

SEQ ID NO: 4387 - DNA, 387 bp, Glycine max
  Clone ID: LIB3028-007-Q1-B1-F10
aacacatatttctttttcttttccctttttcctaggcacagcacacgccctctcaaatagaaactgagagatgaattctgatcagtttcagaagaacagcatgttcgtagaaacccctgaagatggtggcaaaaacttcgacgatgatggacgagtcagaagaacgggtacatggataactgcgagtgcccatatcataacggcagtgatagggtcaggagtgttgtcacttgcatgggcaattgcacaaatgggttgggtggctggccctgccgttctctttgccttctctttcatcacttacttcacttccactcttcttgccgactgttatcgttcacctgatcctgttcatggcaagcgaaactacacctattccgatgttgt

SEQ ID NO: 4388 - DNA, 384 bp, Glycine max
  Clone ID: LIB3028-007-Q1-B1-F12
aaaacactcataacacaaagcacaaagcaaagctcatccttgagttaaaaaatggcaacagcttcttccatggctctctcatccccatccttggctggcaaggccgtgaagctgggcccatcagccccagaagtgggaagggtgagcatgaggaagaccgtcaccaagcaggtctcctcaggaagcccatggtacggcccagaccgagtcaagtacttgggcccattctctggcgagcccccgtcctacctaaccggtgagttcccaggcgactacggctgggacactgctgggctttccgcagacccagaaaactttcgccaagaaaccgtgaactcgaagtgattcactccaggtgggccatgctcggagccttgggctgcg

SEQ ID NO: 4389 - DNA, 377 bp, Glycine max
  Clone ID: LIB3028-007-Q1-B1-F2
gaaggaagcgaacgaaatggtgggcattgtcactgccactttgatttgattcgtgtgcacatataaggtggggcatggcctacaccctttccaacactctcccactctcactcgccttcttcccagaccgcaccctccttcatccaccctccacacacctcttcctctctcgccccctcagattcaaaagtctttgcgtcgtcaatctcaagagacctgttcccccgctaaaagcatcgatggcggagaccaacaacaacgttgccgtcgaggtcttcgaaaaagaggatcttgccgtgtccctggccaaatacgtcgccgatctctccaacaaattcacttccgaaagaggggctttcactgtctgcctgtctggc

SEQ ID NO: 4390 - DNA, 367 bp, Glycine max
  Clone ID: LIB3028-007-Q1-B1-F3
aaggccagaaagatttggattcaaggaattgcaaattgggtcaattctgaaaaatgtgtcatacacaacaaggataatctttttggttcaaagtttaagtttttgggagatatgtatgataagaagattccttccatttttctcctttgccatggaagtccggaacaagccctccattgatgattatgtcaatctttggaatgattgggagagttcagtggaacaattgtcatatgacaagtgctataagttctggatgtttatgttgaaacatttcagcacagaaactaagaaactttccaattgcttggtgaagctaccggcaacatcaggcaacaatgaaatagttttgttagataaaaacgat

SEQ ID NO: 4391 - DNA, 365 bp, Glycine max
  Clone ID: LIB3028-007-Q1-B1-F4
aagggccaaagggcaaaaattttgagcacaatggcctcaacacaatgctttttgcacaaccacgccctcacaactccagctagagcttcaacacagcgcctatttgtgagcaccaaaccaaaccacattgtttgcaaggcagcacagaagcaggttactgtccaagagggtgaggacactactactggccttgtctctcgcaggttggccctcactgtgctcattggtgctgctgctgttggctctaaggtggcacctgctgatgcagcctatggagaagctgccaatgtgtttggaaaaccaaagacaaacacagacttcctttcatacaatgggaatggattcaaactctcaattccctcaaa

SEQ ID NO: 4392 - DNA, 393 bp, Glycine max
  Clone ID: LIB3028-007-Q1-B1-F5
tgtttataaaggagttccaaaggattacaccggcgaagatgttactgttgataacttttttgctgctttacttggaaataagtcagcactgactggtggcagtgggaaggttgtggacagtggtcctgatgatcatatatttgtatactatactgaccatggaggtcctggggtgctcgggatgcctgctggtccttacttatacgcggatgatctgattgaagtcttgaagaaaaagcatgcttctggaacatataaaaacctagtattttatctggaggcatgtgaatctgggagtatctttgaaggtcttcttcctgaagatatcaatatttatgcaaccactgcttccaatgcagaagacagtacttggggaacatattgccccgggga

SEQ ID NO: 4393 - DNA, 399 bp, Glycine max
  Clone ID: LIB3028-007-Q1-B1-F6
gaccttagaaagagaaggaaaaaaaaaacttgtgtttcttgggaagccatgagcaccaccgagagtcaaagatataagggcacagtgaaatggttcaacgaggagaagggtttcggtttcataactcccgaagatggtggctctgatctcttcgttcactacagtgcgatccaaaccgacggcggcttccgcaccttgtcggagggtcagtcagtagagttcctcgtcactcaggacgacagcgggcgagccgcggccgtcaacgtgacgaccaccacggttaaatctagtgacagcggtaacggggaaaactctggtggtgatgctgccaatgttgagaaataagtgagaatgaattattggagtttcctgaattgcgagtatgatatttatattgat

SEQ ID NO: 4394 - DNA, 421 bp, Glycine max
  Clone ID: LIB3028-007-Q1-B1-F8
aagagacttattgtcaaccagattcttccaccatctacatctgattgcaagttttgtgctatgaaaagaaaggatcaaatgcgtgctcttgatatagttcagaacgatccagaactctccagcttattgatgatccaggcaccactcatagatgttgagataagaggtgttccagctctcaaatttctgggtgacattatttggaaatgatttacacacagttactcaagcaatgattaggttaaatttagtaatttgctgaagttggtagttgaaaccatagacacatggcatgacatcaaggctcatcagattttatatgatgaatttgtggagcacttgagatgttcagattccggtactggcagttcttaaagagatactggcttccaatattcacacgccagagtttcaaaacacc

SEQ ID NO: 4395 - DNA, 399 bp, Glycine max
  Clone ID: LIB3028-007-Q1-B1-F9
cgcaagcaaaaagaaagaatcccaggcgaggagaaagatggaggggaaggagcaggatgtgtcgttgggagcgaacaagttccccgagagacagccgattgggacggcggcgcagagccaagacgacggcaaggactaccaggagccggcgccggcgccgctggttgacccgacggagtttacgtcatggtcgttttacagagcagggatagcagagtttgtggccacttttctgtttctctacatcaccgtcttaaccgttatgggagtcgccggggctaagtctaagtgtagtaccgttgggattcaaggaatcgcttgggccttcggtggcatgatcttcgccctcgtttactgcaccgctggcatctcagggggacacataaacccggcggtgac

SEQ ID NO: 4396 - DNA, 360 bp, Glycine max
  Clone ID: LIB3028-007-Q1-B1-G10
agcaaggagtaaccaccaaattcattccaaacaggagagaaaaagcaaagctcctcctgttatttcttggtggttggaggaggttcagaggaagaagaagatgagttaggagaaattaatattaactcttcaattttgtagtccaattgatccatccatggtgggggaatcaagaaagtgggtgatacttttggcatcaatatgggtgcaggcattcacagggacaaactttgacttctcatcatactcatctgagctcaaatctgtgcttgacataactcagcttcagctcaattacctctctgtggcctcagacatgggaaaggcctttgggtggtgctctggggtctcactcatgta

SEQ ID NO: 4397 - DNA, 366 bp, Glycine max
  Clone ID: LIB3028-007-Q1-B1-G11
tccaaggtgttggttgtgtgttgagatccatcaatgcaaggaagcgcggccgacggacaacccttggattcctagcctgaggacgatgacttgatggacgaggacagcgcccccgacaccgacgccgacgcttctccacctcaacctaagctcaattcagccatcagccccggagccacttcctcgcgcgccgcctcgaagaagaccatgggccgcggattccgccaggacactgatgccaatcgcaacactcgcatctccggcaccgacttcgactctctcaccgccgacggcagccctggccctcacagatcactgagggatggaatatgctggtcaccggcgtgcacgaggaagcgccagatg

SEQ ID NO: 4398 - DNA, 397 bp, Glycine max
  Clone ID: LIB3028-007-Q1-B1-G12
acgagagaatgcaattgcaactcttcagtatcgtgaaacctccttaagtagtggcagtatgccatcatgccctccaggatgccaaatttcacgtggtgtcaagcatgtagatcatccccaacaacaggtgcaccatatacctaacatgggtgatgcctcttacaagacatcggaaatgcacacaacggatgtcatcccagcagcgcccatcccttctgagacgggaaagtcaaggctggccaggcgaccaaaggaaccaaagtcagctccacctaataaaacgacttcagaaccctcaaaaaaagtctcgaatgagagtgaagacttgaataatatgtttggcaaggcagatgagtggaagagtggtcaggaaatggtcaatggaggtgatgatctt

SEQ ID NO: 4399 - DNA, 380 bp, Glycine max
  Clone ID: LIB3028-007-Q1-B1-G2
gtcaaataccaatgaaagcaactactggcgcattttcttcttcgtcttcgtctcctctttctcaatttcgatttctcaattctcaattctcaatctcaaggtgaaatgatgcactcagtggcaataattacttttggatgctggagataaggcgtgatgggcggttgctgttgttgttgttcttctaaggagactgtgttgagcgctccacctgcgtactactattatccaagagcatcagaagagcatgttcctctatcttctcacccgggtgctgcttctgctttctctgggcggctattggttgatactaatctagatacttcatctcctgatacttatagacctcctcctgctcctatccctttcaatgttacctt

SEQ ID NO: 4400 - DNA, 368 bp, Glycine max
  unsure (1)..(368): unsure at all n locations
  Clone ID: LIB3028-007-Q1-B1-G3
gtcacaagcgacaaccatggaccgtcacatangaaaaacatttcaaatgcccgcggcatcaatgaccgttttcttaattggaacaattctcctaactgtccccttctacgaccgtttcattgttcccgtggcaaagaaagtgctcaagaatccacatggtttcacccctttgcaacgcattggagtcggtttagtactctcagtggtttccatggtggtaggagcactgatagaaataaagagactaagatatgcccaatcacatggtttggtagataagccagaagcaaagatccctatgaccgtgttttggttgataccacagaacttgtttgtgggggcaggggacgcatttatgtacatggggc

SEQ ID NO: 4401 - DNA, 369 bp, Glycine max
  Clone ID: LIB3028-007-Q1-B1-G4
aaggcaagtacccggagaataacgtttggcaacatgaggtcattcgtaagcaattcgatgggaggtctcatgggcggaagcaaccttgcttcttgggtcgtcgccggaaccctagcctactttctctggattaaaccctcccaagacttcaagcgtcaacaacaggagaaggccactcttgccgccgctgagtctgattcttatcgtaaacccattcccgaccctcacgttacgggtttgatatatggaaacatgaacacggacaaagcaaccagtccagaggattgattgattagcattcatgtgagtgtgttgccttacatctactcagttctacacaaatacaccatccccagagttaatgaagat

SEQ ID NO: 4402 - DNA, 416 bp, Glycine max
  Clone ID: LIB3028-007-Q1-B1-G6
ttccatcagatatattttcttcaaaaacaatggcaggcgaggtggtgaagaaggaagactctctcaacctgaaagtcactaacaggagtcatgttcaacctgaggagaaaattggaaggaaagagtaccagctggtcacttttgatcttccctacttggccttcgactacaaccagaagctgctgttttacaagggtgaagattttgagggtatggtccaaaaactcaaagttggacttggtgtggtgctgaaggagtttcaccaacttgctggtaagttagggaaagatgaagagggggtgttcagagtggagtatgatgatgacatgcttggtgtggaggttgttgaagctgttgttgttgatgataatgagattggtgtggatgatctaactgtggctgaaattagtaacact

SEQ ID NO: 4403 - DNA, 380 bp, Glycine max
  Clone ID: LIB3028-007-Q1-B1-G7
ggagtgcgtaagtgcttgcgttcgtgtgtgtgctgtctgttgtgtttctttttgtcattcttcaatttctctgtgaggatgaacaaattaacttgccttccatgacgtatatgaggtggaagagaaaccggtgtagactagagaggaaaaattctagggtttgagtttcacagtgagagaagctcgtggtgtcgtggataccatttcgagctagaacttagaatggggagtgaccataagacaggggtaggaagagcgtcggtgaagcagcacaatcttcagaacacggaaaatgggcgtgtacagaataagattgtacgcgaatcgtccacagatatgggcgatatcgatcccataatcgaacaagctgaacaacctca

SEQ ID NO: 4404 - DNA, 385 bp, Glycine max
  Clone ID: LIB3028-007-Q1-B1-G9
gtcaccgttgcttactagatgtcaaaatccagttacaaagtttcaacaatgtccacttttgaacataagttactgtcctgcatcagaagttgatctggttcaaggaaagaatttggttattgtagtttacaactctctaggttggaggaggaatgaagtgattcggattccggttattgaggccaatgttagagttcatgactctaatggtatagaaatagaatctcaacttcttcctcaggctgagaaatatgtagacttaagaaattactacgtgaaggcatatctaggacaaactccacccaaggcacctaagtactggcttgcatttacagtttctgtaccgccacttggttttagcacatacactgtctcaactgccaaa

SEQ ID NO: 4405 - DNA, 278 bp, Glycine max
  Clone ID: LIB3028-007-Q1-B1-H10
gttcttttgccctattggggttcttagtcatgccatcaccaaagaaatgactaaaagtgccagaaaaaacaagcacagcttatagagggcacctacttgctttcccacataaccaaaaaagaaatttaattgaagtttaagagtttcagaaattcatgttcaagtttttaaattaagttacttgtaattttgtttggaattgttttcccctcaatcaaaatactattagtattttgttccatctcaagtgtataaattattttgacttgatgttcatt

SEQ ID NO: 4406 - DNA, 393 bp, Glycine max
  Clone ID: LIB3028-007-Q1-B1-H11
aactgaacctctctccgttgcgtacgacgcatcataggcatagcaatagcattgaagcaacggcggcggcaaccaccgttcaacgccggagataccatctatttctactgtattcttctcactctgatttattctcttcagtgaacactgtagctatgggaatcagtaaaacagaagtgaacttaaggaggttgcttggagctgctcctcagcagcaaaaccaggcaaaacttgtgcattatgttgcgtgaacaattggaacaattggctgaagaaaggacactggaaggcttaccaaggatttcaaaggctatgttgaatgattattcagagaagattgaagccattgcttccaaattggttaatcatgtgattgacgcacgagtacctgag

SEQ ID NO: 4407 - DNA, 407 bp, Glycine max
  Clone ID: LIB3028-007-Q1-B1-H12
ttactcagattgctccttctaggacttacgattcactaactgaagatttcagctatgctttgcttcttctaacaattgttgcacttgtagctgcaatatttgtcacttgggtattatcccagaggaaagatctacaagagaaatggagatgatctgtcctccatttttgccttataatttctaattttgaagttttaagtagttttatctctgttttctttgttagttattagttcggattttgaaatcttttgtagcttgaattgcaaaagtaatgcagaattccattaggttgaatggaggatgttttcattttaatgatgtaaattgaggagtacgaaagataatcatgaaattccgatgtttgacatgaatgttttatcattgttgtcaaggttaaatattca

SEQ ID NO: 4408 - DNA, 395 bp, Glycine max
  Clone ID: LIB3028-007-Q1-B1-H2
gccgcaccttgattcagagcagagcgaccttgaagagctatggctgtcggaaagaataagaggatttccaagggaaagaagggtggcaagaagaaagccgctgatccctttgccaagaaggactggtacgatatcaaggccccttccgtctttcaggtcaagaatgttggcaaaaccctcgtctctcgtacccagggaaccaagattgcttctgaaggactcaaacatagagtgtttgaggtctcattggctgatctccaaggagatgaagaccatgccttcaagaagattcgtttgagagctgaggatgttcaagggaaaaatgttctgacaaacttttggggaatggatttcacaactgataagttgaggtccttggtgcggaaatggcaaac

SEQ ID NO: 4409 - DNA, 367 bp, Glycine max
  unsure (1)..(367): unsure at all n locations
  Clone ID: LIB3028-007-Q1-B1-H4
aagaaacactcataacacaaaccacaaaccaaagctcacccttgatttaaaaaatggaaccagcttcttcaatggttctctcatcccaatccttggctggaaaggccttaaacctgggccaatcaccccaaaaagtgggaagggtgagcatgaggaagaccgtcaccaagcaagtctcctcangaagcccatggtacggcccagaccgagtcaagtacttgggcccattctctggcgagcccccgtcctacctaaccggtgagttcccaggcgactacggctgggacactgctgggctttccgcagacccagaaaccttcgccaagaaccgtgaactcgaagtgatccactccaggtgggccatgct

SEQ ID NO: 4410 - DNA, 245 bp, Glycine max
  Clone ID: LIB3028-007-Q1-B1-H5
gaatgagtaactgtcatttgttgtgtatcaagtcaggcatatagaatcttctgctccttttcgcctttgacttttttggcagggctcgtccttcatgactagatcaatgcattattcgagcaacacgagatataatgatgaaggacgaacacttatatcaatagctgtcgatggatagagtcaattggtaaaaaagcgtgactgtactaaaagtgaagcataacataacattcgtcgacacgtaa

SEQ ID NO: 4411 - DNA, 411 bp, Glycine max
  unsure (1)..(411): unsure at all n locations
  Clone ID: LIB3028-007-Q1-B1-H6
cctggccaaaaagtactggatgttggttgtggtacaggaggaggtgacatttacatggctgaaaattttgatgttgaggttgttggcattgacctctccataaacgtgatttctcttgctattgaacgtgctattggactcaaatgctcggtagaatttgaatgtgccgattgcactaaaaaaacataccctgagaatacatttgatgtaatctattcccgtgacacattgttacacatcaaagataaaccaccactattcagatcattttacaaatggttgaagcgtggaggtacacttattattactgattactgcaaaagtgaaggaagtccatcattangatatgctgagtacataaaaaaaggaggatatcatatccatgacatgaaaacatattgtcagatgttt

SEQ ID NO: 4412 - DNA, 369 bp, Glycine max
  unsure (1)..(369): unsure at all n locations
  Clone ID: LIB3028-007-Q1-B1-H7
tgaaaatgttgctattgtgaaaccaactgatgaggagccttatgcaccaaacaatcctaaaggttttgttggcaaagctcttggacaaccaggactgaaacgttcagtgagggttggggagacaggtttcagagaagttgcagcctaccttcttgaccatgatcattttgccaatgtaccctttactgcccttgtaaaggtcacacattctatttttaatgttaatgacagggtcaatggtagtatgcatcataacaaaaagcaaataagcaagattgcatctctgcagcagtttattcctcatgattttgatgcaagtgatcatggaacttctagtttccctgttgctgctgttcatangattgggat

SEQ ID NO: 4413 - DNA, 400 bp, Glycine max
  unsure (1)..(400): unsure at all n locations
  Clone ID: LIB3028-007-Q1-B1-H8
cagaattctctaaaagagatctttttctgctctttgaagaaagaagggtctttgcttgattttggagatgtctctgctctcagatctcatcaaccttaacctctccgataccaccgagaaggtgatcgcagagtacatatggatcggtggatcaggaatggacctgaggagcaaagcaaggactctcccaggaccagttagcgacccttcagagcttcccaagtggaactatgatggttccagcacaggtcaagctcctggtgaagacagtgaagtgattttatacccacaagccattttcagggattcattcanaaggggtaacaatatcttggttatctgtgatgcctacactcctgctggagaacctattcccactaacaagaggcacgctgctgcc

SEQ ID NO: 4414 - DNA, 399 bp, Glycine max
  Clone ID: LIB3028-007-Q1-B1-H9
agagaaacaacaacagaggagcaagcaggcacatgctgtcaccaccccacgatctaaaagaagaaagaaccagcttaagaaagtttgtcaagtgccagttgagaatctctcctcagacatatgggcatggaggaaatatggccagaaacccataaaggggtctccatatccaagggggtactatagatgtagcagctcaaaggggtgtttggcaaggaaacaggttgaaagaaacagatcagacccaacaatgtttatagtgacttacactgctgagcacaaccaccctgctcctactcacagaaactctcttgctggctccacacgtcagaagccattggtacctcaaacagccaccaccactgaagaagactctgacaagagcaagagccctcacaa

SEQ ID NO: 4415 - DNA, 167 bp, Glycine max
  Clone ID: LIB3028-008-Q1-B1-A1
taaacccgaattccggtccaacccaatttttccaccttcctccccgcctagccagccccaagaaaattaggatctgcttcagatttaatgtttcccctgtcccaaatcacgagtcaattgagtttgattttgtggatgaaaagcatagatagggcttttgcaaaact

SEQ ID NO: 4416 - DNA, 281 bp, Glycine max
  Clone ID: LIB3028-008-Q1-B1-A10
gtgaggtagaacccttccactgtcgtgaatctgctatgggtgcctacaactatgtttcagagcgatggcgcaagaaacagtctgatgtcatgcgcatcttgcagcgggtgaggtgctgggagtataggcagcaatattccaatgttcgtgtgacagggtctacccgctctgaaagtgctcgtcgcttgggcttcaatgcgaagcaaggctatgtgagtaccgtgttcgtgttatgaggggtggtcgaatgagactaattcgcaacagtattgtctatggga

SEQ ID NO: 4417 - DNA, 382 bp, Glycine max
  Clone ID: LIB3028-008-Q1-B1-A12
tgaactttgtacttattattctttataaatcttttacgttttcttaacatttttcgggaatgcgagctgaaatgtcaatcatcatgacatgagattggtcctctctatattgatcgcacaatgtatcacagggttgcatccaaaaagaaaaatgtggcagatgaagctggtgttattttgcaggcaaaattgaagcaactagagtcttcatcctaaaagtagttggtatagaatttaataatgtttttcttccaatgcattgtaccatagaaaattataaccaatggtgttaaggtcagtgatgttatatgctatttaaactttttatttgtaaactccccttttgttggcaccttcaaaatttgctttcgaactaaagaat

SEQ ID NO: 4418 - DNA, 364 bp, Glycine max
  Clone ID: LIB3028-008-Q1-B1-A2
tccattttccctctgtcttccccccctcctctacacaaaaatatattattagcatggagaaggtgaattttgtgaagaatggagagcttagattgcctccggggttccgtttccacccgactgatgaggagctggttctgcaatacttgaagcgcaaggtcttctcctgccctttgccagcctctatcattcctgagcttcatgtttgcaagtctgatccttgggatttgccaggtgatttggagcaagagagatacttctttagcaccaaagtggccaaatatcccaacggaaatcgctccaacagagccacaaattcgggttattggaaggcaactggcttggacaaacaaattgttacttc

SEQ ID NO: 4419 - DNA, 335 bp, Glycine max
  Clone ID: LIB3028-008-Q1-B1-A3
ctagtcgtagtattatttcatcgattctctcccttctctttctctctgcgacaccagatgatggagacgacggcgaagcgaaacgctgtcgttgcgccaatcgcggcgttgttgttggtggtgctactcgcggcgagtgtggtggtggaggctcaggagaactcggacgtgaagacgctggtgaagcacatgcacgggaagaagtactgcgacaaaggatgggaatgtaagggctggtcaatttactgttgttacctcactattactgattattttccagactaccagttcgagaatctcctctccaagcggaactcgccgggtggcgcacgccg

SEQ ID NO: 4420 - DNA, 374 bp, Glycine max
  Clone ID: LIB3028-008-Q1-B1-A5
acgtcgacagctacataagtaccattggagttgatttcaaaatcagaaccgtggagctggaaggaaaaaccgtcaagctgcagatttgggatacagctggacaggagcgattcaggactataacaagcagttactatagaggagcacatggaattattattgtctatgatgttactgagatggaaagctttaacaatgtcaagcagtggttgaatgagattgatagatatgcaaatgacactgtatgcaagcttcttgtggggaataaatccgatctagttgataacaatgttgttgactcgctaacagccaatgcatttgcagatgagcttggtatccctttccttgagacaagtgcaaagactcaatcaatg

SEQ ID NO: 4421 - DNA, 405 bp, Glycine max
  Clone ID: LIB3028-008-Q1-B1-A6
gtgaatgatctgacatttggagtggatataaaacagataagatggatgggaatactacagagaattgcagtagcatatttggttgtcgcactgtgtgaaatttggctcaagagtgatgatactgttaattcaggaccatccctattaaggaagtatcgataccagtgggctgtggctttgattctttctttcctttatctttgcttgctatatggattgtacgttccagattgggtgtatcaaattcaaacagaaccttctgcagagccaaagacattttcagttaaatgtggagtaaggggtaacactggtccagcctgcaatgtggttggaatgattgatcgaatgatattgggtatacaacacctgtacaagagaccaatatatgcgcggatgcctgaatgc

SEQ ID NO: 4422 - DNA, 391 bp, Glycine max
  Clone ID: LIB3028-008-Q1-B1-A7
tttatcatctccgttaactcatcatatgtcaaagcatttggatgtgtatgtgcatgcttgttaaaggcaaatagagagcctaaagatttctcaggaaggtaggttttgtcaaatctttgacatgaaatcacatttttttcattgtatgttaactaaaatttaatatatattttttactaattgataatattttgtaacgatgatgcacaggattggtagtgtggttgaatggaaaattctttacaaacttgctaaagataagagtggattactgcagaaagaaacaatccgaggtgtttacgatggaagtttatttgaacaactgaaaaaacaacactcttcaggcaaagagaagtagtaatatttttcagacacgtatgtgaaaagaaga

SEQ ID NO: 4423 - DNA, 377 bp, Glycine max
  Clone ID: LIB3028-008-Q1-B1-A8
gtggaatggttggcttgttggtagaagaaattgggcgtgtgggagttgttgaatcgggaagcaaaagcaatgagaatccatcacatagcatgccgccaggacgattagtcctatctgatcgtagacgagagcacgaaggaagccgcggcggtggacccggtcgaaccggagaaggttcttgaagttgccagctcgcacggactcactctcagattcgtcctcaggacccaccatcactgggattatgctggtggaaacgacaagataaagcagctggtgccaggaatcaaagtctatggtggttccattgataacgtcaagggttgcactgacaaagttgcaaacggtgataaggtctctcttggagctgaaatcac

SEQ ID NO: 4424 - DNA, 401 bp, Glycine max
  Clone ID: LIB3028-008-Q1-B1-A9
atttgaaaatgccatgtgaatcgctagaaacatgtaaagtgtgtggctaacccaataacgaaagtttcgtaagggaactggagcaggctaccatgagacaaaagattttctttctaaagaaattcgattcggaactacgatatgtccaaggtccaatatggaaagaatttcagaggttttccttgactttgtccgtgtcaacaaacaattcgaaatgcctcgacttttttagaataggtccgagtcaaatagcaatgattcgaagcactttacactattttggaaacctaaggactcaatcgtatggatatgtaaaatacaggatttccaatcctagcaggaaaagggggggaacggatactcaatttcaagtgagtaaacagaattccatactagatatc

SEQ ID NO: 4425 - DNA, 317 bp, Glycine max
  Clone ID: LIB3028-008-Q1-B1-B1
ctagctgttcgtctcctaagtatacaagggatcagatcagtatttcatttggggatgcttatggcaaccagatatatgcgccaagactggatgatccagcttcaggtacattcgagagctgttcttcagatacatttcatataactggtccgtgtgcatatcagatatgttatgtgtacctatatagatctggattatatggctggaagcctgacagtgtgaacataaatggttataacggcaagcctgttactttctattacaacacatatatcaccagagatacgtggtatggatttaagttgtgcaacggtgct

SEQ ID NO: 4426 - DNA, 371 bp, Glycine max
  Clone ID: LIB3028-008-Q1-B1-B10
gagaaaatgaaacaggtctagttagtaatgtggcattcccacaggagcttcatgggaaattgtctattactggcagttctagccatgccatcgggcttggtgatcgagtaactactccagcaggggcacaccaaggaagcgtttttgcaaaagatacaagaactttggtccaaccaccagatcccagttctgaagacaaaagaccacagtgatagtagtttgaggctgaaagatttttgtcttcctatttattggaaggctcatcctgattcctgttggggtatcatccactttgacaaattttctttcaactccacccctcccaattcggtcttttcttccccttttttcaatgtatgcggggagcaaga

SEQ ID NO: 4427 - DNA, 329 bp, Glycine max
  Clone ID: LIB3028-008-Q1-B1-B11
gaaaaaacgaaacacgtctagttattactgttgcattcccacaggagcttcatgggaaattgtcaattactggcagttctatccatgccatcgggcttggtgatcgagtaactactctagcatgggcacaccacggaagcgtttttgcatctgatacaagaagtttggtccagttaccagatcccagttctgaagacacatgactcacagtgatactactttgatgccgagacatttttgtcttcctatttactggaaggctcatcattaatcctgttggcgtattatctcttttgacaatttctcattcaactccacccttcccactt

SEQ ID NO: 4428 - DNA, 406 bp, Glycine max
  Clone ID: LIB3028-008-Q1-B1-B12
accaacacaaaaaactccgcagactgctttatgcagtctaatggatattccctagcgcaagataatcatggatgcttcggttgcatttcaggaactgggggtaccatggagctaaagtgcccaccaaatggtcagatgcagatgcataatgagtttgatggggctctccctttggtgacagttcctgctgctgctgaatttagcaaggaaaatggtgtctgggcatgctctcctgatcgtcttgaactgccttcaaagccattccaccattcaaactgctcagattcaccatgtgtatcagaatctggttctgatatttttagtaagcgggaagtcatacagaaactgcggcaacagttgaagagaagagatgatatgatactagaaatgcaagatcaaatggctg

SEQ ID NO: 4429 - DNA, 360 bp, Glycine max
  unsure (1)..(360): unsure at all n locations
  Clone ID: LIB3028-008-Q1-B1-B3
gtcttttatagcagcagttgagaaaggaaacatgagaagcatgccaaacagaagcatgcctgcatctccttatcctacacctggcgcccttctcatgggagatgccttcaacatgcgtcaccctttaaccggagggggaatgactgtggctttgtctgacattgttttgctaaggaaccttcttagacccctgcatgatctgcatgatgctaatgctctttgcaaatatcttgaatcattctccaccctgcgcaagccagtggcatctacaataaacacactagctggggcactgtacaaggtgttttgtgcattccctgacccagctagtaaggaaatgcgccangcatgttttgatta

SEQ ID NO: 4430 - DNA, 401 bp, Glycine max
  Clone ID: LIB3028-008-Q1-B1-B4
tgcaaagggattgctctatcttcatgaatttagtcccaacaaatatgtccatggagacctcaagccaagtaacatacttcttggacacaatatggaagcccacatttctgactttggagttgggcgccttgcaaacattgccggagggtctccgaccttgcaatcgaaccgagtggccgcggagcaactacagggaaggcagaatagcatatccactgaagtcacaaccaatgtgttgggaaatggttatatggcaccagaagcactgaaagtggtgaagccatcacagaactgggatgtgtattcatattgtgtgatattgttggaaatgatcacaggaagatcatccattgtcttagtggggaactcataaatacaccttgttcagtggattcagttgt

SEQ ID NO: 4431 - DNA, 407 bp, Glycine max
  Clone ID: LIB3028-008-Q1-B1-B5
tcctcctcagctcctctgataatataaccatgtaacgttcaaattctacgccaatctctgtcgcattctctttcctctttcttttttccttttccttagaagaatcgaaaacatcttcgaaaagcaagccattattaatggctgtcgactcctccttccagaaagaacatcaaattcgggagtttgtggacgggagtggaaacgtagctgtcggtttgaagttgcataataaaccaagtagtgatgaccttaaccgacagtttcctttaggctcaagatgtttatagtatttcagtgttgcctgaggaaaatgaaaatgcaaattgtgcttcaccactagctttcttgagcatcttagaggttcctaatcaagttaaaaacacaatgtgcttagatgctcacataaa

SEQ ID NO: 4432 - DNA, 366 bp, Glycine max
  Clone ID: LIB3028-008-Q1-B1-B6
cagcctttgattcccaaatccctcgtcccattgaacagtgatcagttatattcgcgttgcgatctattccaattccatgacgacaccaccgtcttcctcctcagcttcgcactcgcaattcgcctattcaaacccttcctcctcctcctacttccccgttccctttcaccttcagcaagccgcaaccactcactacgctgcgccctacgtcgccgccccctccgtgcaaatccccgctcctcccgtcgtcggccccattgctcccgcgccggttcccggcgtgtactccgccgtgccgcaatatcaggcacagcagttatttgagagggatgcgcagataataacgccggacgctcttgagaatgt

SEQ ID NO: 4433 - DNA, 405 bp, Glycine max
  Clone ID: LIB3028-008-Q1-B1-B7
ctcgagccgattcggctcgagtgcctattgttttctgtatttagattttttcgtcaacttttccgattttttcctcacttgttgtgaataatctggcagaggcggcagcaaataagaatggcttcaaatcccaaacctttgacttttgaggaggtggctaatcacaacaacaaaaaggattgctggattattatcaatggaaaggtgtatgatatcacgccatttctggatgagcatcctggaggagatgaagttttggtaacgtcaacagggaaggatgccaccattgattttgaagatgtgggccacagtgattctgccatagaaatgatggaaaaatacttcgtcgggaaggttgacacttccactcttccagcgaaagttaaccataatctgccacaacct

SEQ ID NO: 4434 - DNA, 395 bp, Glycine max
  Clone ID: LIB3028-008-Q1-B1-B8
accaacacaaaaaactccgcagactgctttatgcagtctaatggatattccctagcgcaagataatcatggatgcttcggttgcatttcaggaactgggggtaccatggagctaaagtgcccaccaaatggtcagatgcagatgcataatgagtttgatggggctctccctttggtgacagttcctgctgctgctgaatttagcagggaaaatggtgtctgggcatgctctcctgatcgtcttgaactgccttcaaagccattccaccattcaaactgctcagattcaccatgtgtatcagaatctggttctgatatttttagtaagcgggaagtcatacagaaactgccggaacagttgaagataagagatgatatgatactagaaatgcaaga

SEQ ID NO: 4435 - DNA, 406 bp, Glycine max
  Clone ID: LIB3028-008-Q1-B1-B9
caataataataactccattttccctctgtcttccccccctcctctacacaaaaatatattattagcatggagaaggtgaattttgtgaagaatggagagcttagattgcctccggggttccgtttccacccgactgatgaggagctggttctgcaatacttgaagcgcaaggtcttctcctgccctttgccagcctctatcattcctgagcttcatgtttgcaagtctgatccttgggatttgccaggttcctttctattttccattcacacccatcatcccctttctctttctctaatttcaattccatgcccccatttttaggtgatttggagcaagagagatacttctttagcaccaaagtggccaaatatcccaacggaaatcgctccaacagagccacaaa

SEQ ID NO: 4436 - DNA, 353 bp, Glycine max
  Clone ID: LIB3028-008-Q1-B1-C1
ggcaaacgcagcatctggtatggcagtccatgatgactgcaagttgaggtttttggagctgaaggcaaaaaggacacaccgtttcatagtttttaagattgaggagcagcagaagcaggtcattgtggagaagcttggtgagcctgcccagggctatgaagatttcactgccagccttcctgctgacgagtgccgttatgctgtttatgattttgagtatctgactgaagggaatgtccctaaaagcagaatttttttcattgcgtggtcccctgacacatcaagggtgaggagcaagatgatttatgcaagctccaaagacagattcaagaaggagctggatggaattcaag

SEQ ID NO: 4437 - DNA, 409 bp, Glycine max
  Clone ID: LIB3028-008-Q1-B1-C10
caaatcccttttctcgttcttcccaattccaatttccaattctccggccatgtcaaccgcggcagcggcggggggcgacatggaggcgggtttcgcgaagctccagggcgaggactttgagtattacatgcagacctactccatcgtcctcggccgcaactccaagaagtccaccgtggacgtcgacctatccagcctcggtggtggcatgaacatctcccgccaccacgctcgcatcttctatgactttgcccgacgccgcttcgccctcgaggtcctcggcaagaatggctgcctcgtcgagggcgtcctccacctccccggcaacccccctgtcaagctcgattcccaagatctcctccagattggggacaaggagttctattttctcctgcccgttcgcagcatc

SEQ ID NO: 4438 - DNA, 406 bp, Glycine max
  Clone ID: LIB3028-008-Q1-B1-C11
gaaacataccgaatgagagcatcaaactcttcttcttcgatttccattgcgaagcgttactttttcttcttctttctcttcattttcttcgctcttcgatcttcgtccggggactgctccgaataccaccaccaccactcgccgatggccacgatcggaggcttacacgactcccaaggctctcaaaacagcgtcgaaaccgaagccctcgctcgattcgccgtagacgaacacaacaagaagcagaattcgcttctggagtttgctagggtggttagggcacaggaacaggttgttgctggtaccctgcatcaccttactcttgaggctattgaggctggtgagaagaagctctatgaagccaaggtgtgggtgaaaccatggctgaatttcaaagaactccaag

SEQ ID NO: 4439 - DNA, 395 bp, Glycine max
  Clone ID: LIB3028-008-Q1-B1-C12
actatcttctctgctctctttctactttgtgccttcaccacctcatacctaccttcaaccaccgcggtggtcgataccgacggtgatattcttcagaatcctggcacatactttatcttgtccgtttttcgacccggcggcggagtagaattcgccgccactggaaacgaaacttgccctctcactgtcgtgcagactctcttcgggaggggctttccagcaatattatcgtcccggttacgaatccctttcatcggcgaaggacaactcttcagcatcctgttccgtattgtgccatggtgcgccaccactccttctaagtggaccattgtggagggtttaccagaatcacccgcggttaaactcactgggtacgacaacacagtgcctggtga

SEQ ID NO: 4440 - DNA, 371 bp, Glycine max
  Clone ID: LIB3028-008-Q1-B1-C2
cttctctgtctttcttttccacccggttccgtttcagctacccaattcaattccatcactgcattgatccgtttccttcaaattcatcaatggacgagttcggcgttttgaccgaaaggttcggtctcaaaccacaaggaaaatccgctccaatggctagggcaaagcgacctccgaatgtcgctgattcccaaacacgccccaattccaaatccccccttaacggatccccgtctcaccaaaactccaccttcgatttcgattacggctttttcagcagcagcaacaacagcaacaccgacaacaaaacgcagcgtttcgacgacatccttggcgtaaacgccaaatccaatggcgcttcgttcgactac

SEQ ID NO: 4441 - DNA, 387 bp, Glycine max
  Clone ID: LIB3028-008-Q1-B1-C3
gttggtaaagaggctggtgaaaagtggaggtctatgactgatgaagagaagaagccatatcttgacaaagttgctgagcttaaggaagagtacgagaaggctatggaaagctatgaagctggtcaagatgaagaagatcaaactgtgtctgataaggaaacttctgataaggaagctgctgcaaaagaagttgcaatagaagttgaagaggagctaactgacgaggactaatggttgcattatggcactccttgaacttgatagctagtattctaagggccacataattacttaacgactaaggttgtaaattttggaacatgttttagttggagttaaaaactgttgaaatccatgcgcaatatcttttcattttttgtaatgctc

SEQ ID NO: 4442 - DNA, 282 bp, Glycine max
  Clone ID: LIB3028-008-Q1-B1-C5
gttgtaacattattctttacgagcgttatgtactgtacctggacatgatttcttataccaaccctgttaataagcatgggacgctggggaaacctatttacattgtaatttcgtgcaaaatagatgctgtaacaaaggcattttacttttacttggggagaggcagtggaaccataaggaccttggaaattctgattaatatgacagggcacaatatcgtgtttgtaagccaacgctttatttttattttatggtaacccctttctgtggataattcttaat

SEQ ID NO: 4443 - DNA, 392 bp, Glycine max
  Clone ID: LIB3028-008-Q1-B1-C6
gacctcgcccaggccttccgcctcatcgaccgcgacaacgacggcgtcgtcacgcgccaggacctcgaggccctcctcacgtgcctcggcgcgtcgccgtgccccgacgacgtggcggtcatgctcggcgaggtcgacggcgacggcatcaccgtagaaaggctcatgagctacgtcgggtcgggtctgaaacccgggtcggatccggacgagctcaaggaggcgttcgaggtgttcgacacggatcgcgacgggaggatctcggcggaggagctgcttagggttttcaaggccatcggcgacgagcggtgcacgttagaggagtgccggcgcatgatagagggtgtggacagaaatggggacgggttcgtctgcttccaggacttttctcg

SEQ ID NO: 4444 - DNA, 381 bp, Glycine max
  Clone ID: LIB3028-008-Q1-B1-C7
cccggatttgagtggaaatgatcctgagaccacaaatttctgcatgttcatcaatgaagtctacacggtgctcagcgatcccgtccaacgcatgatttatgatgaaattcatggctactctttaacttcaatcaatcctttcttggatgattcaagcccaagggatcatgcctttgttgatgaattcagctgcataggctgcaaaaattgtgccaatgtagcccctggtgtgtttgcaattgaggaagactttggaagagccagagcatacaaccaatgtggggaccctgaattagttcaacaggcgattgacagttgccctgttagctgcattcattggacatcttctgcacagctatcattactggaagatgagatgcg

SEQ ID NO: 4445 - DNA, 408 bp, Glycine max
  unsure (1)..(408): unsure at all n locations
  Clone ID: LIB3028-008-Q1-B1-C8
tgtgcttttacgagatttagtctaggagaataagaaacccggattgttcacgtgccaaccaagaatctcgaagctcccaaaatccaacagctaaaaaattcacagctgtgtcatccatgaccatgattcaatcccatccaaatccctctctataatgccttcatcaagatccagtagtaggaacgaaacaacgattgagtaatcctcacttgatgatactactagtcctgagatgataacatcaaacttcgcaataacaacgaaacttccttacaatttatctttctctctttcgttctttcttccttccctctcttctattctcttcttgtctttacatcacaccctctttccccctttgccaaagctctgatcntttccctctccaatccccgtttctccactttt

SEQ ID NO: 4446 - DNA, 406 bp, Glycine max
  unsure (1)..(406): unsure at all n locations
  Clone ID: LIB3028-008-Q1-B1-C9
taataacgaaccttggggattaattgataatattagtttattatttgggaaagattcctgtgaaatgaaagatttcattaactcctaagtcatgtcgagtagaccttgttgtttcgagaattcttaattcatgagttgtagggagggatttatgtcaccacaaacagagactaaagcaagtgttgggttcaaagctggtgttaaagattataaattgacttattatactcctgactatgaaaccaaagatactgatatcttggcagcattccgagtaactcctcaaccaggagttccgcctgaagaagcaggtgccgcggtagccgccgaatcttctactggtacatggacaactgtgtggaccgatgggcttaccagtcntgatcgttacaaagggcgatgctac

SEQ ID NO: 4447 - DNA, 393 bp, Glycine max
  Clone ID: LIB3028-008-Q1-B1-D1
ggcacccagagacgaggaagggcgtagtaagcaaagctcaacgtcgattactacaaaaacacatgcccagacttcgaaaaaatcgttagggaaaacgtcttcaccaaacaaagcgctagcgtggccacagcaccgggtctccttcgcctcttcttccacgattgcatcaccgatggctgcgacgcttccctcctcataacttccaatgcatacaaccctcatgcagaacgtgatgcggacctcaacctttctctctccggtgatgccttcgacatcatagttaaaatcaaaaacgcattagaacttgcatgccctggtgttgtgtcgtgttccgacatcgtggcacaggccacaagagaccttgttaagatggtcggtggtcctttttacccg

SEQ ID NO: 4448 - DNA, 375 bp, Glycine max
  Clone ID: LIB3028-008-Q1-B1-D10
gggagagcgaagctgaagagaatatttttgtttctcaagccttcgaaatccagcgatctctcattcttcaatggccaccctctccgcatgcgcttctcctccatggccaaaccctgattctcccaattcaaatccaaaccctaatttcctccccgaccaatctcaaaccctcgacttcgactccctcatgcctccgcaacccgaatccccaccgcccaaccatcaccactcccccgacgcctctccaccggaatcctccccgtcgccgccgcctccgtcgatcctctacctctccttcaaccaggaccaggcctgcttcgccgccgccgccgacaacggcttccgcatctacaactgcgaccccttccgccagct

SEQ ID NO: 4449 - DNA, 381 bp, Glycine max
  Clone ID: LIB3028-008-Q1-B1-D12
cttcatataaattttctattccccaaatctcctccttagactgccaacccaatatagccattggatcgaattcagtctgaattcggtctaatggtttgggagttctaattaagtctaagaattctgtacatatatatatttagaagatcacagggtgcttgatcagtggtgtatcaggatggacaaggtgacgaggttggcttctgaaaagggtgtggtgattttcacaaagagctcttgttgcctctgctatgcagtcaacattctgtttcaagaacttggtgtgaatcctgtggttcatgagattgatcatgaccctgaaggcagagaaatggagaaagctctattgaggcacggctgcactgctccagttccagctgt

SEQ ID NO: 4450 - DNA, 412 bp, Glycine max
  Clone ID: LIB3028-008-Q1-B1-D2
actggtcgatccgctccaacagtcattacatgaacacatacaggtggaaggtggttagatcctgaagtttctcccagtcatttcttctttgttcagtttcttacggatggccgaacactagtgttggttgtttgcagcctttgctatgggcacttgagtggaatttgatcagttactttatcaaaattttgatgtgctgaataagttgcaactgccgagtgctaattctattatatagtcttaatatgatggctcctcttgtattggcgttttattaggagcattctttccttccttttttttttggtccctgcggtgagatttgacttctctcctaaactaactttggaagaagatagatggccaccaccagctgaacaaaggctagccgtttcgttgcaaatatattttt

SEQ ID NO: 4451 - DNA, 410 bp, Glycine max
  Clone ID: LIB3028-008-Q1-B1-D3
gaaactgtttggtgttgctacagttgacaaagtccctaccctgtttgtattgcagcagtacgacaatccactatcaaagaagttaaatgaagtggtaaatgagatacggcggcaaagatgttcctacttccggttcaagctctgcaggaaaggagatccatcaggaatgctattcttctcgtatatgatagaagacaagagcgcaggtggcttctcctatgtagagtttcttatccatgttcataggcaaattcaaaataaaatgtcatcataacgagtatatggcagcttcatttttgcaagcttttagacctaaatgatagagcaagccccaagtataggtgagattctgcatatttatgtgcattcaattgccttgagtttgacagacgaataccagaagacacaag

SEQ ID NO: 4452 - DNA, 415 bp, Glycine max
  Clone ID: LIB3028-008-Q1-B1-D4
cattccaatcgctcccaaaatcttttctaatttgttcataactcaataattctcatcatgggctccttgattgttccaggtgaacatgatcacaaactaaagcttgtttctcttccctttgtatcaaccagtcacctcattcccgtagtagacatagctaggctctttgccattcatggtgttgatgtcaccataatcaccaccacagccactgccgccattttccaaagctctatcgatcgcgaccgtgaccgcggccacgctattagaacccacgttgtcaagttcccatgtgaacaagttgggttgccagaacgagtagagagcttcaactccaacactcctcgggatttggtccacaaaatctaccagggactcaccattctccaagaccaataccaacaactcttccatg

SEQ ID NO: 4453 - DNA, 410 bp, Glycine max
  Clone ID: LIB3028-008-Q1-B1-D5
caattaccattccataacctaaatctcctctttgtttccgagtcagagagcaatggcacgtaccaagcaaaccgctcgcaagtccaccggcggaaaggcgccgaggaagcaattggcgactaaagccgctcgcaagtcagctccggccaccggcggagtgaagaagccccaccgcttcaggcccggaacggtggctctgagggagatcagaaagtaccagaagagcactgaacttctgatccgaaaactcccattccagaggctcgtcagagaaatcgctcaggatttcaaaacagatcttcgtttccagagcagcgctgtttctgcgcttcaggaagccgcagaagcttatctcgttggactcttcgaggacaccaacctctgcgctattcacgccaagagagtcacca

SEQ ID NO: 4454 - DNA, 332 bp, Glycine max
  Clone ID: LIB3028-008-Q1-B1-D7
gttgtctaaaaacactgatgacaaagctggcaaggaggctgtggaaaatgtgtttctcgcagccgaggctattgaggagtttggtgggattctagtctccttgaaattggaatttgatgacagcattggattaagtggcgaggatgtaaagccattgcctgatcatataaaaaatgctctgtgtaccacttttgatcgctactccacctatttgaattcctttggacctgatgagaactacctgcggaagaaggtggagacggaattgggtgcaaagatgattcacctaaaaatgagatgcagtggccttggtgctgaatggggaaaggtta

SEQ ID NO: 4455 - DNA, 397 bp, Glycine max
  Clone ID: LIB3028-008-Q1-B1-D8
cccgctgaaacctttcttcacaaaatggcctcaactacactaacaaccctctccctccgcaacctctcttatcctacaccctcctcctcttcttaccctacgcacctctccgccaacccctcctccctccaattccccaacttctcccaccgcgccaccaccacgcgccgcgcccgcgtcgtcgtcgtctccgccgtcgaggcaccggagaaaatcaccaagctcggcgacgaaatcgcgggactcacgctcgaggaagccaagaacctcgtcgacttcctccaggacaagctcggcgtctccgcggcagcgttcgcccccgtagccgtcgccgcgggtgccgtcggcgccgtggcggacgctccggcggcggtggacgagaagacggagttcgacg

SEQ ID NO: 4456 - DNA, 408 bp, Glycine max
  Clone ID: LIB3028-008-Q1-B1-D9
gatctcatccttgctttctgctgctcctttggagggtgctgctgatcaggttcagaagaccaacaactcgcaggatgtggtggctgcacaagatgattctgcaaaaaccctttccgaagagcttgcagacattgaatcccagctcaagttctttgagaccccttcttttcttgatgaagcctgggctgatgctacattggcgtctttgctcggcggagacgcaactcatgacgccgccggaaaccctatgaacctttggagcttcgacgacctgccttccatggcaggagtcttctgaacaccctttatctccccttttatgtaaataaagctacaagaattgtgatcgtgatgttggtgatggagtccacagcaagaaacctgcttaaagcttatgtggagtttatt

SEQ ID NO: 4457 - DNA, 67 bp, Glycine max
  Clone ID: LIB3028-008-Q1-B1-E1
ctttctttccgctatcagacggatgattactatgattatttatttgtttatttaaacaagtggccat

SEQ ID NO: 4458 - DNA, 364 bp, Glycine max
  Clone ID: LIB3028-008-Q1-B1-E10
gtcggcggcgtaaccctccaacaacaacacttcctcgtcagaaaatgtctctggtggcgaacgaggatttccagcacattctgcgtgtgctgaacaccaacgtggatgggaagcagaagataatgttcgcaatgacctccatcaagggtattggaaggagattcgccaacatcgcttgcaagaaggctgatgttgacatgaacaaaagggctggtgagttgactgctgctgagttggacagtgtgatgactgtggtggcgaaccctaggcagttcaagatcccaaactggtttttgaacagaaagaaggattacaacgatggcaaatactctcaagttgtgtctaatgctcttgatatgaagct

SEQ ID NO: 4459 - DNA, 393 bp, Glycine max
  Clone ID: LIB3028-008-Q1-B1-E12
gaccaaggtaggtcaattgccatggacattggtggtgaagtggaagagaccgtgagagagttgaggcaatacttcaaaactggaaaaaccaagagtgtgacatggaggaaaaaccagctcacagctctcttagaccttgttcatgagaatgaagatgctatatttaaggccctccatcaagatcttgggaagcaccctgttgaggcttaccgtgatgaggttggaggggtagaaaaatccgccagcaatgctttgagctgcgttgagaaatggatggcccctaaaaagagtgatatcccttttcttttcttcccagctaaaggagaagtgttgtcagaaccacttggtgtggttctcatattttcttcttggaacttcccaatcatactgaca

SEQ ID NO: 4460 - DNA, 392 bp, Glycine max
  Clone ID: LIB3028-008-Q1-B1-E2
agaaaaaggaggtttgagagactagaagaggattgggatttggcaagagatttagattagcatggaatcaagaatggagtgtagtagtcatcaacaacctcagtcactgtaaatttttttggttattatttatctctctcaaatgcatatgcaatcgcaatcaattgcaaagcatttcggatccagagggagagaccctttgtgacagcctgtatcgtctcaatcgtctgatagattcctcattttttttccatttctcgcggcaagatctcacactctgcacctaaggttagggttttggttcttgcggcatggcgacttcttcgagttcttcgagctggccccagggcatttcctccgacagcataaagggactgtgcctcgctctctct

SEQ ID NO: 4461 - DNA, 413 bp, Glycine max
  Clone ID: LIB3028-008-Q1-B1-E3
attaacatatacaaattctctgtgttgtgttgtgtacttgtgttaattgtgttgttgttgtaggaaatttaagtgaagagagaatgatgatgaagtctgctatgtgtgcattggtgcttgtggcactggttgtggttgaagtggggcccatggctgaggctgcggtgacttgcaacccaacacagttgactccttgtcttccggcaattaattcaggttctgcaccttcgagtgcttgttgccagaagctgaaggagcaaaagccatgcttctgtggctacctcaaaaaccctagcttgaagcagtatgttaactctcctaatgccaaaaaaaccgttagttcttgtggtattgcctatccaacttgttaagcacctcttatatatatatataaaatgtgtgaacaatatata

SEQ ID NO: 4462 - DNA, 330 bp, Glycine max
  Clone ID: LIB3028-008-Q1-B1-E4
cttgttatggattcaataatatgggcgtttcggcatacagaaaggaatattgctgaaactgggctgaacctgttgttggagatgttgaaaaagtttcaggcatcagagttctgtaatcagttttatcgaacatactttttgacaattgaacaagagatatttgctgttctgacagacacttttcataaacccgggttcaaatttcatgtcttggagcatcaacatttgtactgtcttgcacaaactggtgccctaaccgagcctctttgggatgctgctacaaatccgtatctatacccaagtaatacatcttttgtacgcgagttgact

SEQ ID NO: 4463 - DNA, 387 bp, Glycine max
  Clone ID: LIB3028-008-Q1-B1-E5
tgccggtgtacctttcttgtgttggccatgcgccactgatcaatatcttgacaagtcatatatatgtgatgtgtggaagattgggcttggactagacaaggatgaaaatggaataatttctagggaagagataaggaagaaggtggatcaactgcttgttgatgaagacatcaaagctaggtcattgaaattgaaagacatgaccataaataacatactagaaggtggtcagtcatcaaagaatctcaacttctttatggattgggcgaagtaattatgcttaatttggttctatattgaaaagtcatgtgtaatttctacatgtaagaatttaatttctatgtaaatcttaatgtaatctatttaaaaattaataagctttattat

SEQ ID NO: 4464 - DNA, 387 bp, Glycine max
  Clone ID: LIB3028-008-Q1-B1-E7
atgcacacgaaatcagactcggaggtgacgagcaacagcatggagcagtcgtcgccggcgcgttctcctccgcggcggccactctactacgtccagagtccttcaaaccacgacgtggagaaaatgtcctacggctcaagccccatgggttccccacaccaccatttccactactacctctcttcccccatccatcactctcgcgaatcctccacctctcgcttctccgcttccctcaaaaaccctcgcaacttctcctcctcctcctcctggaagaagctccaccctcaccccaaccgcgacgttgaccccgacgaccatgacgacgccgaccaccacctcaagcagtcctcccgcaacctccgcttgtacttgtggttcttcctc

SEQ ID NO: 4465 - DNA, 366 bp, Glycine max
  Clone ID: LIB3028-008-Q1-B1-E8
ggccttcaatttcacccttcacacgtggtggtggtgttgttcttcttctcttcccctttctttttcttcttctgagcttgtttaagctctttctatttgattccattaacatatattatcacaatgtgtggtattcttgctgttcttggttgttctgatgactctcgagccaaaagggtccgcgtgcttgagctctctcgcagattgaagcaccgtggccctgactggagtgggctccatcaacatggtgactgctttttagcacatcaacggttagccatagttgatcctgcttctggggatcaacctctctttaacgaggacaaatccgtcattgtcacggtgaatggagagatttaaaccatg

SEQ ID NO: 4466 - DNA, 410 bp, Glycine max
  Clone ID: LIB3028-008-Q1-B1-E9
cttcaaaaaccaaagccagaccgaccctaagaagaaaccaacaaacatgggaagcaagaaaacctacgaggaagaagaaagcacggctctattttcccattcccaaacacaaacagacttgctgttacccttcaacgagaacgacccacaggacatggtcatataccaagtcctccacgaagccaatgctctcaccaacacattcctccctcagcccaccagaaacataacaaagaagcactacagaggagtccgccgccgtccttggggaaaatacgccgctgagattcgcgactcggcgcgccacggcgccaggatatggctcggcaccttccaaaccgctgaagaggctgccatggcttatgaccgagccgcgttcaagatgaagggctccaaggccttgctcaatt

SEQ ID NO: 4467 - DNA, 415 bp, Glycine max
  Clone ID: LIB3028-008-Q1-B1-F1
catttttctttcattttccgttagtgttgtggctatggagtcggcattgatatttctgggaacgggagtttcgggaacggttccctccatgaggtgcctcatcgacccttcagatcctccatgtctcgtctgcactcaatctctctccctcccacctcacctaaaccctaactacaggtgcaatacctctctgttaatcgattattactctcaaagcgacgccactcacaaatatatattgatcgacgctggcaagaccttcagggagactgtacttaggtggtttgttttccatcacattccaagaatagattctattcttttgactcatgaacatgctgatgcagtccttggattggatgatatacgagctgtgcagccgtttagtcccactaatgatattgatcccaccccc

SEQ ID NO: 4468 - DNA, 407 bp, Glycine max
  unsure (1)..(407): unsure at all n locations
  Clone ID: LIB3028-008-Q1-B1-F12
cttacttactttttcaatggttcaattcctgaaagccttggacaattgacatcgttgcaaagactgaaccttaatgggaacttcctgtctggaagggtcccagcaactcttggaggaagacttctgcatggggctagcttcaatttcactgataatgcaggcctatgtggcatacctggattacctacttgtggacctcacctttctgctggtgctaaagttggcattgggctaggtgtttcttttactcttctacttcttattaccggttcagtttgctggtggaaaaggcggcagaatatcctccgggttcagcaaattacagcaagggcagctccatatgcgaaagcaaggacccaattttcacgtgacatcnagatgcacaggcataataatcataataatgc

SEQ ID NO: 4469 - DNA, 416 bp, Glycine max
  Clone ID: LIB3028-008-Q1-B1-F2
gccgacgtggtatcgacaaagcaaggttccgccggagacgccgcaacgccatgaaccactccccgttcaggctctgaggatcgggggaggactaagagagtagcttcgagctatactatgatggcttcgacaataattaaggggctccgcccgctgtcgtcgaggatgtcggagtttctgctcggatcgggattcgacggactgctacagtatgtttcgtagattgagatcaacaacttgggtaaggtggagaatctgccggtgttgaatgtggcgctagagtcaatgccaacggtggaaattactgagtctctggttgcgacggagacgcacagcgccgtgtgcaaggaacattggcgcgcgagatgtcgtgcaagcacctcttacactctaattgcttgtgtccagtgtgctgc

SEQ ID NO: 4470 - DNA, 398 bp, Glycine max
  unsure (1)..(398): unsure at all n locations
  Clone ID: LIB3028-008-Q1-B1-F3
atttcnggagctcgttggtgcaacgctgaatgcttttttttctttttgtgtgatagattttgcaagttgcgtgtgtgtgagagtgagtgagtgcagaagatgtggccattcagcagaaaagggtcttctgggttttcatcatcatccactgcagagcaagtcactgaaggaattgatggaactggtctcactgccattgtcacaggggcatccagtggtattggaactgagacttcacgtgttcttgctttgcgcggtgtccatgtgattatgggtgtgagaaatatgcttgctgctaaagatgtcaaagaaaaaatacttaaggagatttcctccgctaaagttgatgccatggagttagatctcggttcgatggagtctgtcaagaaatttgcatc

SEQ ID NO: 4471 - DNA, 407 bp, Glycine max
  Clone ID: LIB3028-008-Q1-B1-F5
caataataataactccattttccctctgtcttccccccctcctctacacaaaaatatattattagcatggagaaggtgaattttgtgaagaatggagagcttagattgcctccggggttccgtttccacccgactgatgaggagctggttctgcaatacttgaagcgcaaggtcttctcctgccctttgccagcctctatcattcctgagcttcatgtttgcaagtctgatccttgggatttgccaggttcctttctattttccattcacacccatcatcccctttctctttctctaatttcaattccatgcccccatttttaggtgatttggagcaagagagatacttctttagcaccaaagtggccaaatatcccaacggaaatcgctccaacagagccacaaat

SEQ ID NO: 4472 - DNA, 410 bp, Glycine max
  unsure (1)..(410): unsure at all n locations
  Clone ID: LIB3028-008-Q1-B1-F7
aattttacactccctccctcctcccatacccatcatcttataatacacaaaggttttgaatatcaaaatacatgacaattcacaacaacaaaatgacttcaattgccaccaatagcactgttgtcgccactagaatgctagttgtgatcactttagtccttgcactagtatgttgtgtcacatccgcgcaatcaccggcagcagcaccagccccggagagcaacgggtgcttgatggcactaacaaacatgtcagattgcctgacatatgtggaggatgggagtaagttggcaaagcctgacaaagggtgttgccctgagttggcagggttgattgatagcaaccccatttgcttgtgtgagttgctangaaaacctgactctattggcatcaagattgatttgaacaaa

SEQ ID NO: 4473 - DNA, 410 bp, Glycine max
  unsure (1)..(410): unsure at all n locations
  Clone ID: LIB3028-008-Q1-B1-F8
ctcataacacaaagcacaaagcaaagctcatccttgagttaaaaaatggcagcagcttcttccatggctctctcatccccatccttggctggcaaggccgtgaagctgggcccatcagccccagaagtgggaagggtgagcatgaggaagaccgtcaccaagcaggtctcctcaggaagcccatggtacggcccagaccgagtcaagtacttgggcccattctctggcgagcccccgtcctacctaaccggtgagttcccaggcgactacggctgggacactgctggggctttccgcanngaccagaaactttcgcaaagaaacgtgaactcgaagttattcaatccaaggtgggccatgctcggagccttgggctgcgtcttcccggagttgctgtcncgcaacggggt

SEQ ID NO: 4474 - DNA, 402 bp, Glycine max
  unsure (1)..(402): unsure at all n locations
  Clone ID: LIB3028-008-Q1-B1-G1
aagaaagtagcaaagatgacaggtgggatgtttggaaggaaggggcaaaagataaaggggacagtggtgttgatgccaaagaatgtgttggacttcaacgccataacctccgtcggaaaaggcagtgctaaggacaccgccaccgatttcttgggcaaaggcttggacgcattaggtcatgcagttgatgctctcactgccttcgctggccatagcatctccttgcagcttatcagtgctactcagactgatggtagtggaaaaggaaaagttggaaacgaagcctatttggaaaaacatcttccgaccttgccaacgttgggagcaaagcangaagcattcgatnataactttgaatgggatgctagttttggaattccaggagcattttacatcaaaaac

SEQ ID NO: 4475 - DNA, 409 bp, Glycine max
  Clone ID: LIB3028-008-Q1-B1-G10
gaaatttaagtgaggagctagagaatgatgatgaagtctgctatgtgtgcagtggtggttgtagcacttcttcttctggcggaggtggggcccatggctgaggctgtgacatgcaccccaacagagttgagtccgtgtcttccagcaatcacttccggtgctaaaccttccaatgcttgttgcacgaagctgaagcagcaaaaaccatgcttatgtggctacctcaaaaacgctagcttgaagcagtatgttaactctcctaatgcccgaaaaaccgttgcttcttgtgggattccctttccaacttgttaattaattaagccttcttataattaaagtgtgggatatatatatatatatagataaacagtttaatttatacacactttgatcctacaaagcatcttga

SEQ ID NO: 4476 - DNA, 331 bp, Glycine max
  Clone ID: LIB3028-008-Q1-B1-G2
gggaaagggtgatcagttgcgaagtttgatggaattggaagatcagtgttgttgtctcaatctctatctctctctattttacgtgtaaaattagtaaaacgtgcgaaaaggggcagagacggtgtagatatcgttgcctagttatttctatctctacagttattttaacttattttggttcactgtttatctaatttctgttttgtttacccacactaattaattgtgcccctaaatatagggaatttcatggaaagagaatcctatatggtgatatattactattattataacatgaattttagttgtaaaagtttaattattccagaag

SEQ ID NO: 4477 - DNA, 412 bp, Glycine max
  Clone ID: LIB3028-008-Q1-B1-G3
gtgcaaaaatattaagatgataaacattggagcacttgttgtactctttgcatttctcttcctcagttgtgcctatgcacaagacacaacaacccttgtgcctgcaatcataacttttggtgactcagccgtggatgtagggaataatgactatcttcccacccttttcaaggctgattaccctccttatgggagggactttgctaaccaccaacctactgggaggttttgcaatggcaaattagctactgattttactgctgacactttgggttttaagacctatgctccagcatatcttagcccacaggcatcagggaaaaacctccttattggagcaaactttgcttctgctgcatctggttatgatgaaaatgctgctactttgaatcatgcgattccgttgtcccaa

SEQ ID NO: 4478 - DNA, 394 bp, Glycine max
  Clone ID: LIB3028-008-Q1-B1-G4
aattcctgtaatgtgcaccagtaaagaccaaagtatgattattgtcacattatgccacatgattgtacttgtatatacatattttgtcccgcctttgtaaatacaattgggacactactaggattgggaataaaggtctttacatttttagtttggcaaatagatattgcaactacctttgtataaatctatttctgaagaagcaattacaactttcaagggatgatagcattttgtggcataaggattaaggaggcataaaggaccaattgctttggaatattcactcatgacaaggcacaaggtcatgcgtgtatgccaacacatagtaatgatgtgtgtttttattcactaggcaactggcagatctggttttcccttgtcacttttgtat

SEQ ID NO: 4479 - DNA, 276 bp, Glycine max
  Clone ID: LIB3028-008-Q1-B1-G5
ctcttttccattcttgcttcctttgtgggttgtttgagttttctttccttcaatttaattgaaagatggcttgcttggtatctcgctcgggaagggaattgcagaggtacaacaacatgggtggccggcaagttgttgggtgcataccttatagatataaacaagacatagagggtaaaatgagcaacgaattggaagtactagtggttagttcacagaaaggtcaaggattgatgttccctaagggaggatgggaacttgatgaatccgtagaag

SEQ ID NO: 4480 - DNA, 398 bp, Glycine max
  Clone ID: LIB3028-008-Q1-B1-G6
cacaaattctcaaatccaaatccaattccaattccaattcccaatcttctcaaaccctaattcctcatcttgaaaatgagagaaatcttgcacatccagggagggcaatgcgggaaccagatcggagcgaagttctgggaggtgatatgcgacgagcacggcatcgaccacaccggaaagtacagtggcgactctgaactccaattggaacgcatcaatgtttagtacaacgaagcgagtggcggaaggtacgttccacgcgccgtcctcatggatctagagcccggcaccatggactccgtcagatccggcccctacggccagatcttccgccccgacaacttcgtcttcggccagtccggcgccggaaacaactgggccaaaagtcactacaccga

SEQ ID NO: 4481 - DNA, 335 bp, Glycine max
  Clone ID: LIB3028-008-Q1-B1-G7
atagattctcaactaatgagaacactctcacccttggttcccactcttctcaaaccctaattcctcatcttgagcatgatagaaatcttgcacatcgaaggagggcagtgcgggaaccagattggagcgaagttctgggaggtgatatgctacgagcactgcatcgaccataccggaaagtatagtggcgactctgaactccatttgggacgcatcaatgtttagtacaaggatgcgattggcggaaggataattccacgctccgtcctcattgatctagaccccggaaccatggactccgtcagatccggcccctacggccatatcttccgctc

SEQ ID NO: 4482 - DNA, 410 bp, Glycine max
  unsure (1)..(410): unsure at all n locations
  Clone ID: LIB3028-008-Q1-B1-G8
ggtcattgcaggatagcttttttgccagctttgcccttggatggctcatcaccaatggtgcaggtcttgcatcatacccaatagacactgttagaagaagaatgatgatgacctctggtgaagctgtcaagtacaagagctccttggatgcattcacacagatcctcaagaatgagggtgccaagtccttgttcaagggtgccggtgccaacatcctccgtgccgttgccggtgctggtgtgtttgctggttatgacaagttgcaggttcttgtgttcggcaagaagtacggctctggtggggcttaagttctaatgctgagtcagtactattatttgtttttagatggcgatgaannaaaacattgaagttccaagagtcctagactaattgctgccgcaaattttgtt

SEQ ID NO: 4483 - DNA, 304 bp, Glycine max
  unsure (1)..(304): unsure at all n locations
  Clone ID: LIB3028-008-Q1-B1-G9
caggatgccactgctgatgaggatgagtatgaggaggaagaggaggaggaggagtatggccaacatgatatgtgattttgaacttggtaatgtattgcggtggcttgaagatgtataacatgccgcaacttcctgttgccggttgattgtctcttttgaggggatggttctgttccggctagatctagtttccattactgttctataaaactggttctgtttgtttccgtttttatgtaacctgttgtttgtanggaagacaatatgaaactgctattattttaaagctctaaatgttcaatcc

SEQ ID NO: 4484 - DNA, 389 bp, Glycine max
  unsure (1)..(389): unsure at all n locations
  Clone ID: LIB3028-008-Q1-B1-H1
ctggtcacccctttcttcatatcagtgaagaggatcaggagttctctggtctttgctccttggctccttcactatctgagagcattttgtgcactactgggttgaaaatgtatatgctggagagcaaaggaggtgccatagcatgcatgttcttgtctcttttcttcttggggacatggcctgctcttttgactatgttagagaggcgtggtcgtcttcctcagcatacctaccttgattactcaatcaccaatttcttggctgctttactcattgcttttacacttggtgggatangcaagggcacacatgatcagccaaatttcttagttcaacttgctcaggataactggccctccgttcttttcgcaatggggggtggtttgttc

SEQ ID NO: 4485 - DNA, 400 bp, Glycine max
  Clone ID: LIB3028-008-Q1-B1-H10
gaaacaattgctggtttgaatccaaatgtcatcaagattattgaggagttcccactaagtagcaagctagatactcaagcctatggtgatcatacctgtataataacaaaagagcatttggagcctaacttaggtggtctcactgttgagcaggctatccaaaacaagaagttgttcatcttagatcaccatgactatctcattccatatttgaggaaaataaatgcaaataccacaaagacttatgctacaagaaccatatttttcttgaaaaatgatggaactttgacgccattggccattgagttaagtaagccacatcctcagggtgaagcatatggtcctgttagtgaagtctacgtgccttcgagtgaaggagttgaagcttacatttggttac

SEQ ID NO: 4486 - DNA, 400 bp, Glycine max
  Clone ID: LIB3028-008-Q1-B1-H11
ctaagatggcttcctttgtatccttcctagtgctgcttcttgcagcccttatcctcatgcctcaagggcttgctacttactacaaaccaattaagaagccaccagtgtacaagcctccagtgtacaagccaccagtgtacaaaccaccggtttataagccaaaaccaccggtttacaagccgaaaccaccggtttacaagccaccatataagaagccaccatacaagaaaccaccttatggaaagtaccctccagtagaggacaacacccatgcctaaagcaagcaatgaggtctattatctacttaataaataagaggaactgctttgtgttttctagcattgtgatttacaacttcgtagcaatgcatattcttgactcttgcatgcacttcaatcct

SEQ ID NO: 4487 - DNA, 396 bp, Glycine max
  Clone ID: LIB3028-008-Q1-B1-H12
ccaaaattttctctgaagaagaagcaacaatgtctggtcgcggaaagggaggcaagggtttgggaaagggtggagcgaagaggcatcgcaaggtgctccgcgacaacatccagggaatcacgaaacccgcgattcggaggctagccagaagaggcggcgtgaaaagaatcagcggcttgatctacgaggaaaccaggggtgtgctcaagatcttcctcgagaacgtcattcgcgacgccgtcacctacaccgagcacgctaggagaaagaccgtcacggccatggacgtcgtttacgcgctcaagaggcagggaagaaccctctacggtttcggaggctgagggcttgggctttttctgggcctggatttgttcttcgctgggctttaaaatgttg

SEQ ID NO: 4488 - DNA, 169 bp, Glycine max
  Clone ID: LIB3028-008-Q1-B1-H2
ggcgaccttccacacagaaaccgtgcaatcagggttggccttgagcagactccacatcctattccactcggtggcactcttgtttctctattactaccgcataagccacatcttactggaaccaagctttgtatggattttcatgaccataccggagcttatcttcggc

SEQ ID NO: 4489 - DNA, 166 bp, Glycine max
  unsure (1)..(166): unsure at all n locations
  Clone ID: LIB3028-008-Q1-B1-H4
actcgtacctaaactcggttccacgctcaatcaccctcgcaactccataatcgggacgggcttcatttgtacatgaaacaattaaggtcggtttgcatggccaaaaaacttttaggccggtaaagttggttaaaatgtgatcatcaatcccttagtcccccntaat

SEQ ID NO: 4490 - DNA, 362 bp, Glycine max
  unsure (1)..(362): unsure at all n locations
  Clone ID: LIB3028-008-Q1-B1-H5
tccaagactaagattaactaaaagccactcaggcacccttgcaatagaaaggccaatccacacgttgcctttcgttggttctttcagtgcattcatgcggaggaaactaaaaaatttgatcagaggctgtctcctcttattcaagccccttgtaaaaatagcacccactgtacacttagcttttattatttctgtgtacaggatcaagttcattttttaccccacttttgccatctcaactggtggcttaacctcgcgccataaaactggcgtntcttgtattatgacattnacatcttagctcaatgaanatttgataattcagaattcgtgattaananaaaaaaaaaaaaggggcggcg

SEQ ID NO: 4491 - DNA, 412 bp, Glycine max
  Clone ID: LIB3028-008-Q1-B1-H7
gcagaagaaggcaaagatagtggcagagctccaagctgtgaagcacaacagtggcaagtcctacaatcagttagcggaggagactggactcaccaacgtctatgttgctcagcttctcaggagacaggctcagctcaatccccaaactgcccctctacttcgggcagcgctgcccgacctgccccaagaccttgtttctgagatgatgagaccccctttgaggtcttatgaccctaatctcatccaaaaccccactgtctataggttgaatgaagctgttatgcattttggggagagcatcaaagaaataatcaatgaggagtttggtgatgggatcatgtcagcaatagatttctactgctcggttgataaaattaaaggagtagatgggaaggatcgtgtggtattgaca

SEQ ID NO: 4492 - DNA, 404 bp, Glycine max
  Clone ID: LIB3028-008-Q1-B1-H9
caattcaggaaaccctagtgattaatttcgttgcgaaacggcgattcaagattatcgtgagccagaagatggtagcggaagcggaaattatctgtcagcagaacattccgatgttggacgtgaagtatcatatttgcgtggctcaagaacacaacgtgaaggttgaggtttcacccaaatcaccttcacctcctgttccgatctttggccaagcagtgagttgctctgagatcattaaagattccattttggaggcccctgcgatgaattttttcccaaatgtgcgttctggtagctatgccgagattggaccgcgcgtttctatggatgatgaacacatttgtattgatgatctgggagctcatcttggatttgtgttcaagtgtccgataccgagtgcattt

SEQ ID NO: 4493 - DNA, 229 bp, Glycine max
  unsure (1)..(229): unsure at all n locations
  Clone ID: LIB3028-009-Q1-B1-A1
ttggattaccgtgaagcctgcacgccatgcttttatcgtcaatatcggagaccaaattcaggttctaagcaatgcaatttacaagagtgtggagcacagagtgatagtaaattcagataaagagagagtttctctggcatttttctacaaccccaaaagtgatatacccattgagccaatanaagagctggtaacacgggaaaagccctcactctacccagcaatgacc

SEQ ID NO: 4494 - DNA, 289 bp, Glycine max
  Clone ID: LIB3028-009-Q1-B1-A10
ggagaaggtacagccatggattccaggtgtccgtgtccgtcactagctagataaacggcgactagatgatgattatgatctatgaccacaccatgtcattgcgagcttcgattatcacgacgcactcagatatgtgcacccacctgcatgcatcactgatctggtggatactacacctggagattggagagagaggaaatagagcctcgcttctcttgacatcaattaatagggtgtgtctgaagtgtgtgttttagcgtaatgtccttatggagcttctaaggttgtt

SEQ ID NO: 4495 - DNA, 371 bp, Glycine max
  Clone ID: LIB3028-009-Q1-B1-A11
gatcaaggccaaaacaataagtagtgagaagaagggagagaatggaggaaaaggcaaaagctgagcagaagaagataggtatgaccgagacttggttgaagaagcaccgtcttctttacaatggagccactagacaccctcttattattagcattcgcgatggcaccatcaacactgcttccttcaaaacatggctcgcacaggattacttgttcgttcgggcgtttgtcccatttgtggctagtgtgctgataaaagcgtggaaggaatcagattgcagtggtgacatggaagtcatattggggggcatggcttctctggaggatgagatttcatggttcaagacagaagccaacaagtggggtaattca

SEQ ID NO: 4496 - DNA, 353 bp, Glycine max
  Clone ID: LIB3028-009-Q1-B1-A12
ctttcaattgcttaccagaccaagcatggaagctaccggggaaaaagcatggcattttctgcatgtggttcggaatatggaagcaaattctatgctatttaattacggcataacaaccaccttgtgtcttcattaattcctatgcaaatctccaacctagaagattaagcatgtccctttgtaagtaccctgaggctgaaatagtaaccctttatatacctttcagatctattgacatattcaccctccaagcaaaacatttttattcgtattttgctccatctctttagatcatcacaacttcagacgcttggttttaggattcaactttcaaaggcttactccaacatatc

SEQ ID NO: 4497 - DNA, 384 bp, Glycine max
  Clone ID: LIB3028-009-Q1-B1-A2
ggaactttgtaaaagcataaaccctgatgatgccgtggcgtatggtgcggaggttcatgccgccattttgagtggcgaatgagacaataaggtggacgagttgttgctgctggctgtgatgccgcttattcctgggattgagaccgatgctggtgaaatgtcagtgttgattcccaagaacaccatgatccccaccaagagggagagcgtcttctccactttttctgataatcaaacaagtgttttgatcaaagtgttcgagggggaccatgcaaagacagaggataacttccttcttgggaagtttgagctttccggtttcactccatcgccaacgtgagttccacaaatcaatgtggggtttgatcttggtgtttatggcat

SEQ ID NO: 4498 - DNA, 343 bp, Glycine max
  Clone ID: LIB3028-009-Q1-B1-A3
gtattcaagtcgatgtactagtgggataatcaaaggataaggtcagaattgctccttcaattccttttaatttgatggtttaagctcatatgacttttcaatttcgttcattagaattaattggtgaaagaaaagtaaaaaaaaatgaaaaaataatgaagtgttgaatcatgtgatttgtatcaatgatatgaaattgtacctattcattcatgtattgtaagattcaaagtcatttgagatttgttttatgatacaaaccaatgtagccgaatcataggattcaaatcatgaataagattttaataattgtgtgtcagcatgttacgcctgaaatgctttt

SEQ ID NO: 4499 - DNA, 147 bp, Glycine max
  Clone ID: LIB3028-009-Q1-B1-A4
gtgacaattgtttctgaaaacagttttatgtatcctatttttcagattcttgctggtcaagcagcatgtatggcttacctagaatatggagtgcatgaatttgtttcaaatgttggcataatttaaatcaatatgaactattgtgag

SEQ ID NO: 4500 - DNA, 150 bp, Glycine max
  Clone ID: LIB3028-009-Q1-B1-A5
ggctggcaaggccgtgaagctgggcccatcagccccagatgtgggaagggtgagcatgaggaagaccgtcaccaagcaggtctcctcaggaagcccatggtacggcccagaccgagtcaagtacttgggcccattctctggcgagccccc

SEQ ID NO: 4501 - DNA, 392 bp, Glycine max
  Clone ID: LIB3028-007-Q1-B1-A12
caaaaagcggggaaagggagattgaattcgatcctgggacgttaacgttgtttcaattcaattgtggtcctgtcggtgccctatctcagacgacgatgtcatctttatatagaggggaatccaggaggtacaacaataaaccaagaggacgtcataatttgacaacgcagaagaagcaagagattaaggaagcctttgagttatttgatactgatggctcaggtactattgatgccaaggagctgaatgttgctatgagggcccttggatttgagaagacagaagaacaaatcaatcaaatgatagcagatgtggacaaggatggaagtggagcaattgattatgaagaatttgagtacatgatgacagccagaatacgagacatggacact

SEQ ID NO: 4502 - DNA, 426 bp, Glycine max
  Clone ID: LIB3028-005-Q1-B1-A10
cccctccacccacccagcatatctctctattcctatttattagcacccctcacattaccttgtgtcaccaactactttgactcctttaccataccattacaataattatcaaacctaaccagtaaaaatggtgaccgtggaggaaatccgcaacgctcagcgttcccatggacccgccaccatcttggccttcggcaccgccacgccgtccaactgcgtctcccaagccgattaccctgactactacttccgcattaccaacagcgaacacatgactgatctcaaagaaaagttcaagcgcatgtgtgaaaagtccatgataaagaagcgatacatgcacctgacggaggagtttctgaaagagaacccgaacatgtgcgagtacatggcgccatcgctggacgtgagacaagacgtagtggtgat

SEQ ID NO: 4503 - DNA, 441 bp, Glycine max
  Clone ID: LIB3028-005-Q1-B1-A12
ggaattgaagttaaccaataataaggtttgcacttaaaattacgggtggtgctggtggtggtgctggtggtggtgcaggatatgttcccagaaatagtaactcttccggactttcttcttcaactcaagacatgagtgaagtgtctggcttctctggatatgaaagccgctcaagcacatcatcgctggggagaatatgatggaagtgtagagttattgttttacctttcctttcgagtaatttctttgggaggcagaaggggtatcaattaaactttggttggtttggatatcatccacaacactcgatcgcccacatgcatctttgatgaataattgtaatcctttaatgtatttcacaacttcaataggaatctatgatgagttttgtcattaaatccaacacaatttgatgtgcagaacaatcacaatcttccacac

SEQ ID NO: 4504 - DNA, 429 bp, Glycine max
  unsure (1)..(429): unsure at all n locations
  Clone ID: LIB3028-005-Q1-B1-A2
taattgcaaacaatccaacagggctatgtgagggtggctgtgctgctattattgactcagggacctctttgattgccggtccaacaaaaattgtgactcaaattaaccgtgccattggagcagaaggatatgtgagttatgaatgtaaaaacatcatccataactacggtgattcaatatgggaatatataatttctgggttaaagcctgaaattatttgtgttgacattggactctgctcgcgtaatagaacatttataacaaatgatgttattgaaacagctacacataatgaaagttggggcgagtcacgaacaaaggagagccccttgtgtactttttgtgacatgattgtcttttggatgcaagttcagcttaagcaaaagaatacaaaggaaaaaatattanaatatgtggatgagctgtgtt

SEQ ID NO: 4505 - DNA, 148 bp, Glycine max
  Clone ID: LIB3028-005-Q1-B1-A3
gtaaataagctgttataattgtagctctggttactttttgaaaccacgaatgtaattatccaattaagacgtagaagtatcccacttgcaagtgttgtgtgctttttatatgaaaaaaccatcctcaattcattccgtgtttgaccaa

SEQ ID NO: 4506 - DNA, 402 bp, Glycine max
  Clone ID: LIB3028-005-Q1-B1-A4
ccattttaaaaaaagtatggatggtttcagcgagctaaataagggacccagagctgccaagagttctgataataaaaacatcaaaagtcttggacctgtcacattattacacaagggacagaacctttcagtgaagagtgacaacacagaagttcctttggttcccgacaaggaacagtacaatgggaaagatttggctgagaattattctgatgccaagttttttgtcatcaaatcctatagtgaaggatgatattcataaaagcataaaatacagcgcttgggcaagcacccctaacggcaacagaaagctggattcggcatatcatgaagccaaggagaagcccggtggctgtcccatatttttgttattttcggtcaacactagtgggcaatttgttg

SEQ ID NO: 4507 - DNA, 386 bp, Glycine max
  unsure (1)..(386): unsure at all n locations
  Clone ID: LIB3028-005-Q1-B1-A5
accgaagaaactgccaagaggttgaagaccgaagagactgccaagaggtttgaagactnganggggactggcaanaaggaaaatccaaattcttaaaaaaaatgaaaagaaacctgttgataaaccagcattacttaagaggccagagaagaaaaggacagcatcaagaaaatcgttgtcaagcaaggacagtaagggtgatgagggggattcagataacagtgacacatcattgaatccaagaataagaaatactgaagctcgtaagtctgtgaaaaaaataatctctgaggatgaccaaactcctgtgcgcaaaaaaaccccaaccacaagaacgaaagaaggaaaaatcaaccgtggtattggtacagaaaaccagaacctgc

SEQ ID NO: 4508 - DNA, 309 bp, Glycine max
  Clone ID: LIB3028-005-Q1-B1-A6
aaataaagggcaaattactgaaaatcccttaccactctgctgtgactttcagtactgtgctactaataaataaagggcaaattacagtttttctaagtgctaaacttctagtaacattattgtgttgttcttactgtccatgtctaagtactgaactgttgtatttgatttttcgttgggaattgaagcaactaattacattacttaactgtttgcttattttagaattaatcaaacacgctccatcaagtgtgcatgaaaataatataaaataataaataagcacatgacatggctaaggtcttggtc

SEQ ID NO: 4509 - DNA, 302 bp, Glycine max
  Clone ID: LIB3028-005-Q1-B1-A8
ataagcatcaagcggtggcattgagagtccaagcagacgggtccatctttgtacaattgctcaatggatgggtatcaggacacactttatgcacacaccatgcgtcaattcgaaagagattgcaccatttcaggtaccatcgactttgtgttcggtaatgcagtatctgtttttcaaaattgcacttacgtggtccgaaagccattggagaaccatcattgcattgtgactgcacaaggtagagaagacagacagcaacgacctggaatagtaatcaagggggatccattgtgtctgaccct

SEQ ID NO: 4510 - DNA, 373 bp, Glycine max
  Clone ID: LIB3028-005-Q1-B1-B1
tggcaggaaaggaaagggaaagggtgtttaccagtttgtagacaaatacggtgctaatgtcgatggttacagtcctatctacgacaccaaggactggtctccaaccggtgatgtctacgctggcggtacgactggcttggctatctgggctgtgactctacttggtcttttagctggtggtgcacttcttgtctacaacacaagtgctttggttcaatagactttgcaaatcgatgtttaagttataacatagtccatgtaactatctaaaaatgaagaactattcgtgaagtactttgtggatatgttccttctgttctataaatgagtggatgtgaaaaaacttttttgttagtaatcatgcttcttcatc

SEQ ID NO: 4511 - DNA, 268 bp, Glycine max
  Clone ID: LIB3028-005-Q1-B1-B10
aagcttctccctcttactcttacactctcatccaaatcttgcaaaaaaaaaaaatcacaatggcagcgagcgctcacactccatccaaagagttcgtgtacatggccatcctggcggatcatgcccatcgctactaggagatggtagagttcatgagaaaggtctccgcctccgccgacaaccatgagcttagcgttgaggaacgcaacctcctctccgttggcgaacataactttatctgagcttgccgctccacctggcgcatcat

SEQ ID NO: 4512 - DNA, 279 bp, Glycine max
  Clone ID: LIB3028-005-Q1-B1-B11
gttggcggtgtcataactcgtaagacaacaaagctcatcgaatcgaagtccttcattttcattctcttccttgtcactgatcgtcatgtacagagttgcagcatcatcattcagaacgcatctcaagggccatggaggtaacttgggatccactaagttttcaacttcagccgcggtagctgcaaggacttcatcaggtggtttgtttagctgggttaccggaaagcgttctagtgctcttcgtcctctggacatgccccttggtggtgttgctctccc

SEQ ID NO: 4513 - DNA, 376 bp, Glycine max
  Clone ID: LIB3028-005-Q1-B1-B12
aaccaaaaaggcacttgtttgtttgtcgtacaaaatggaaactaaaccgagttcggtgatggttacgctcagttacggcgcgttgacgtgcgccgcggaagttctcgcgactttgctagcttctgctgtcgtcaaagccacgcttttggccccggatctctaccggctgctattgaccaacacgcctacaaccaaaggagagagaaaaactcagagtcaagacaagcaacgtgatgcagagggcgaagacggtaacgatgatgaaggggacgatgatgacgatggagatggtggatttggggagggtgaagaggagttgtcatctgaagatggaggtggatatggcaacaattccaacaacaagagcaactcaaag

SEQ ID NO: 4514 - DNA, 367 bp, Glycine max
  Clone ID: LIB3028-005-Q1-B1-B2
ggagttccctattttgagctacgccgatttctaccagttggctggcgttgttgccgttgaggtcacgggtggacctgaagttccattccaccctggaagagaggacaagcctgagccaccaccagagggtcgcttgcccgatgccactaagggttctgaccatttgagagatgtgtttggcaaagctatggggcttactgaccaagatatcgttgctctatctgggggtcacactattggagctgcacacaaggagcgttctggatttgagggtccctggacctctaatcctcttattttcgacaactcatacttcacggatttgttgattggtgagaaggaaggtctccttcagcaaccttctgac

SEQ ID NO: 4515 - DNA, 297 bp, Glycine max
  Clone ID: LIB3028-005-Q1-B1-B3
ctcaactcttctactcaaattcaatttctctgagacagtgaaaatatccccgttaagataggatgatgatgaaatcatcatattcttcatacctttctatattagtcctatttttccttctccttgtggataaatccctctccaaatccggtgcacgtttttctctaagcagagcagtgttcatgccgcaccattcagtgattggtggttcccaatgggatctaaacgtggaaatcgtggaacagcaagagtctgcttcacaaccattgaagcatatcaaaaggctcttcaaaatca

SEQ ID NO: 4516 - DNA, 348 bp, Glycine max
  Clone ID: LIB3028-005-Q1-B1-B5
gttcctcaatttctccgccaatactcccaagttggttcctctcgcgctagggttttagtctacagctcattctcacacacaaccctaacaacacaaatttcccactttctagggtttcctttcgtcatccaccatggccgagtggcagtccctcctccaatccattctcgtcggcctcattttctcttaccttctaaccaagctcatctccatcgtcgtttccttcaaagacgacaatctcaacgtcacgcacgcctccgccgccgaaaccaccgccacgcgcgcggaacaattcgaggatgctctgaagcgcgacgacgccgtttcctccgatgcacgccccttcga

SEQ ID NO: 4517 - DNA, 380 bp, Glycine max
  Clone ID: LIB3028-005-Q1-B1-B6
aggaggagaagtgatggagaggttgacaacactaggcatcgcggtgaatttggtaacatatttgactgggaccatgcatttgggtaatgctgcctctgccaacgttgtaaccaacttcttgggaacctccttcatgctctgtctgctcggtggcttcctcgccgatactttcctcggaagataccgcaccatcgccatcttcgctgccgttcaagcaactggtgtgacaatcttgacaatatcaaccataattccgagccttcaccctccaaagtgcaacggagacaccgtgccaccttgcgtgagagcaaatgagaaacaattaacggtgctttatttggcgctttatgtaacggcgctcggcaccggacgtttgaaat

SEQ ID NO: 4518 - DNA, 343 bp, Glycine max
  Clone ID: LIB3028-005-Q1-B1-B7
cagctattgataaagctgtggctgatggagtgaatgttctttccatctctttgggtggtggagtctcctcttattacagagatagtttatcagtggcagcatttggagcaatggagaggggtgtttttgtttcatgttctgctggaaatgcaggacctgaccctgccagcctcaccaatgtgtcaccatggatcaccacagttggagccagcacaatggatagggattttccagcggatgttaggcttgggaatggcaaaaaagtgactggagtttcactctataaagggaaaaatgtgctatcaattgagaaacaataccctttggtgtacatggggagcaa

SEQ ID NO: 4519 - DNA, 242 bp, Glycine max
  Clone ID: LIB3028-005-Q1-B1-B8
cagctattgataaagctgtggctgctggagtgaatgtcctttccatctctttgggtggtggaatctccacatattgcagagataattcagcagtggcagcgttttgaccaatggacaggggtgtttttgcttcatgttctgctgtcaaatgcatgacctgaccctgccattctcaccaatgtgtcaccaggaatcaccccacgttggacgactcacaccggatacggattttccactggctc

SEQ ID NO: 4520 - DNA, 364 bp, Glycine max
  Clone ID: LIB3028-005-Q1-B1-B9
tggcaggaaaggaaagggaaagggtgtttaccagtttgtagacaaatacggtgctaatgtcgatggttacagtcctatctacgacaccaaggactggtctccaaccggtgatgtctacgctggcggtacgactggcttggctatctgggctgtgactctacttggtcttttagctggtggtgcacttcttgtctacaacacaagtgctttggttcaatagactttgcaaatcgatgtttaagttataacatagtccatgtaactatctaaaaatgaagaactattcgtgaagtactttgtggatatgttccttctgttccataaatgactggatgtgaaaaaacttttttgttagtaatcatgc

SEQ ID NO: 4521 - DNA, 338 bp, Glycine max
  Clone ID: LIB3028-005-Q1-B1-C1
gttgggtcttagcattgatgaggatgacaatggtggagacgatgttgatatgcccccattggaagaggacggtgctgaggagagcaagatggaggaagtggactaaatgccaaaggtctcgtgttaaatgaattgtggttcgtgtctgttaaatggtggtggatgcagaagtcttttagttttatctttctttttgttttggttttttgagaaatatagggtttttactttttaagtttttgtgatgttaaaaaaatgtgtctgtcaatctgtgtgttgcatctacctacttttgtcagttattgttccggataaaacatcctttgtcagtaactgtt

SEQ ID NO: 4522 - DNA, 422 bp, Glycine max
  Clone ID: LIB3028-005-Q1-B1-C10
gtgggattttaacaatggaggatttacacaattacaagttggaagtaacagatgcaacgactgtgaatgtgatgggatacaccatatatggaatgccacctccttcatctggaacacttgctctttctctggttctgaacatcttgggcagttatggaggttctaatgctgcaaggggaaatcttggtctacatcgactaatagaagctctgaaacacatgtgggctgttcgaatgaacttgggtgaccccaactttgtaaacattgatgatactatatccaaaatgctttccccatcttttgcaaaagatattcagcacatgatacttgataacactactttccctccagagtactatatgaacaggtggagtcaacttagcgattcacggacaagccatatgtgcattgtcgatgctgat

SEQ ID NO: 4523 - DNA, 343 bp, Glycine max
  Clone ID: LIB3028-005-Q1-B1-C11
gtctcaagcaaccatggcaatggcaacccaagcctctctcttaaccccacccctctccggtctcaaagccagcgaccgcgcctccgtgccatggaagcaaaactccagcctctccttctccagcccgaagcccctcaagttctccagaacaatcagagcagcagccgccgacgagaccacagaggcaccagcaaaagtagaggctgcaccggtcgggttcaccccaccagaacttgacccaaacaccccttccccgatcttcgggggcagcaccggcgggctcctgcgcaaggcacacgtggaggagttttatgtcaataccttggactcacccaaagaacag

SEQ ID NO: 4524 - DNA, 411 bp, Glycine max
  Clone ID: LIB3028-005-Q1-B1-C12
ctcttcctctgaagccattttttcttccttcctttttggtttcctattccttcttcaattatctctcttcatttagttgtgaacattttttcggtctcgtcgaagcaatggtggcgggtggcaattccaaatccgacatctcctttgctggcacttacgctagcagtgctttcgctgcatgtttcgccgaggtgtgtactcttcctttggacaccgccaaagttaggcttcagcttcaaaaacaagctgtagttggtgatgtggtgaccttacctaaatataggggtttgctgggaacgattggaaccattgccagggaagaaggtctttcagcactctggaaggggattgtgccagggctacatcgtcaatgtttgaatggtggtttaagaattgcgttatatgagcctg

SEQ ID NO: 4525 - DNA, 416 bp, Glycine max
  Clone ID: LIB3028-005-Q1-B1-C2
gcaagaacatcacagatagagcaatgtattccttggcacacagcaaggtgaacaacaggatgtggggaactgtgaaaggaggaggaaatgatgaagatggtttaaggactttgaacattagccaatgcactgcactcaccccatctgctgttcaagctgtttgtgactcattcccttctctccacacatgctcagggaggcactcactcatcatgagtggctgcctcaacttgacatcagtgcattgtgcctgtgctgtccatgcgcaccgtgcattcaccactttcccttatcctgcccattaagaagcccatccttttgatgttgaacacacttcgaggatgtgccccttgaaagggctcagagaaatgaaagaagtgaaatccaccccccttgtagatgtatgcctgcataag

SEQ ID NO: 4526 - DNA, 208 bp, Glycine max
  Clone ID: LIB3028-005-Q1-B1-C3
accacaagaatgagggagatattgcacgtgcaaggtgggcaatgcgggaaccaaatcggttccaagttctgggaagtgatatgcgacgaacacggcatcgaccccaccggaaagtacaccggcgacgaggcctccgatctccaactggagaggattaacgtctactacaatgaggcctccggcggaaggtatgttccccgggccgtcc

SEQ ID NO: 4527 - DNA, 403 bp, Glycine max
  Clone ID: LIB3028-005-Q1-B1-C6
caatttcacttcccacagcatcaaaaacaagaaaaaaaaatggccgcaaaagagaacgaggtaacccacaagtttcgctttttccgcgtttacaaagacgggacagtggagctttacaaacccaccatccaaaaggttgcccctttcgatgacccaatcaccggcgttcgctccaaagacgcggtcgtttcagacgacccacccgtttccgttcggatctttttacctccaatatccgacccgacccgaaaattcccgatctttttctataaccacggaggcgggtactgcatgcaatccgctttctccccagactaccacagtctcgtcgccaccactgccgccgaagcaaacgtcattgcaatctccgtggaatacgggttgttcccgatccgaaccatac

SEQ ID NO: 4528 - DNA, 417 bp, Glycine max
  Clone ID: LIB3028-005-Q1-B1-C7
aaggactaacccttccttggatctctttctacctcttttctccgcgactggtttcagtttgaacctaaggcagagaagccagagagtctcctctgccttagagaaactctcacaatggcgtttcaggactttgatctcatctcagagaggagaaggaacgagaagaggcaaaaggcgaggaagaggatcatgattggcgtggtctcttccgttgtcctcgttgccatgataggtgcagtactcttcgttgtggttagaaacgacaacgaagcaggcaacaaaaaaagcaatgaaaataagtcacatggccattcacaacaatctaccacccccggcaaggatcacgttgtggcgcattcgaagatggtgaaattggtgtgcagctccgcggactacaaggaaaaatgtgaagacccc

SEQ ID NO: 4529 - DNA, 379 bp, Glycine max
  Clone ID: LIB3028-005-Q1-B1-C8
attgagtttaagatctgattgggcggcgacgatggagaacaacgacagtatcatatcgcgggagaagatcgaccaggcggccgtgtggctcggctccgccgtctcttccgctttcttttcctctttggaacgcttttcctgcgtcaacgtcgccacctctgaccccgacaacgacgaagacgacgacgattattactccaccaccaaccgccactcccaccgccgcatccaccaccaccactagccctccctccattcagatcgacgggaaaaaaacaaacgacgtctccaacctccccgtttgagacaatataacgacgacgtcgttgctgcgctgtgtatagacctttttccctttccttcgttcgtgtgtgttatg

SEQ ID NO: 4530 - DNA, 405 bp, Glycine max
  Clone ID: LIB3028-005-Q1-B1-C9
gaaagtgaaggtgaagaaatgcttcttcaaacgaggcaatttggcacagcgtgtccatgggtcagactcacacccgcaagcaaaagaaatagctcagtctcattgagaaggagcaattgtggcccaaaatgttcggtgtcccaattggaattgaagagtgagagtgagagcaaaacgaagccgtatccagcagaggcatcgaggaccataatggagttggctaaggtgggcacgctgtgtacgttgacccaagagggtttgccccttggtactggggttcgattcgcggttgaccctgaacatggcactcccttgttctgcttcaattccactgacaacactaacaatccctcttcccttcatgttcaatttgaacaatttggattgcccactcctcagtgcact

SEQ ID NO: 4531 - DNA, 177 bp, Glycine max
  Clone ID: LIB3028-005-Q1-B1-D1
tggcaggaaaggaaagggaaagggtgtttaccagtttgtagacaaatacggtgctaatgtcgatggttacagtcctatctacgacaccaaggactggtctccaaccggtgatgtctacgctggcggtacgactggcttggctatctgggctgtgactctacttggtcttttagctgg

SEQ ID NO: 4532 - DNA, 329 bp, Glycine max
  Clone ID: LIB3028-005-Q1-B1-D10
gtcagctgatggaagtgccttgtgtacaggaagttgggacacaaacttaaagatatgggcatttggacggcatatgaggacaacttaagccattgcgggaaggtcaaattggagacgaattgcgtgctaatttatataacccttcattttagccttgcaactcatgtccgtttgtccatgtgtgtgatctcagtaccttttccattgtacgacccactccgccaactgtaccattcccttataactatgatcattataatacttaaaggtgtgaacagctacagatcttcctgaaagtggccccaactatataaaatgaaaatttgcat

SEQ ID NO: 4533 - DNA, 172 bp, Glycine max
  Clone ID: LIB3028-005-Q1-B1-D11
ctcagctcccaactgccagggtactcccgcaagcaataccaactgcatctgcattgagtggtggctcaggttctgctggaactggaggcagggtttctgtcaataatttggtcaacaaattttctacaatgggattccctaaagaccatttaagggccacggttcgaaacct

SEQ ID NO: 4534 - DNA, 431 bp, Glycine max
  Clone ID: LIB3028-005-Q1-B1-D12
ccctctctctctttctctttctctctcatccagatcttgcaaaaaaaaaaaaacacaatggcagcgagcgctcccactccacgcgaagagttcgtgtacatggcgaagctggcggagcaggccgagcgctacgaggagatggtggagttcatggagaaggtctccgcctccgccgagagcgaggagctgaccgtggaggagcgcaacctcctctccgtcgcctacaagaacgtaatcggcgctcgccgcgcctcctggcgcatcatctcctccattgagcagaaggaggagagccgcggcaacgaggaccacgtcgccgtcatccgtgactaccgctccaagatcgaggccgagctctccaacatctgcgacggaatcctcaagctcctcgacacgcgcctcgtcccctccgccgcctccggcgactccaa

SEQ ID NO: 4535 - DNA, 295 bp, Glycine max
  Clone ID: LIB3028-005-Q1-B1-D2
cagcacgaattgcatcactctcgtccgttaccactgcggccctagaccacgtcaagcgatctctcacaacgccctcatccgttagggcaaagatgagtcgaggaactggaagttgaaaccatcgtgacagcactactttctcacctgaacgacgtctctatcaagtggagtaagctttcaatgctgtgaacgtcgcaggaatcacctcgattggtgtccgaagaacggattcaaattgtgtcgttactcagaagaacgtttcggatacgcttttggaccacacaactgttaaaca

SEQ ID NO: 4536 - DNA, 197 bp, Glycine max
  Clone ID: LIB3028-005-Q1-B1-D3
tctcagatcgaggaggttctcaacatcaagaactatggctattggctcatggggaaccacaggttttgaccaacgagaccatgcactggccgttctgcatacagcatgtccaccacctctttgcgcaagaaatctaaccgaactcgtgtcccaaatgttccatgtgccactctcagagactttcattcaaatttgca

SEQ ID NO: 4537 - DNA, 399 bp, Glycine max
  Clone ID: LIB3028-005-Q1-B1-D4
cgagcaatcttctcttctcaaaaaatctctgttcaacaacgctaaagaatactatctcaagtatcaggtgatgagatgaaccaagcacaacaacttcaagaagcttgaagtttgaactgtctcaaacatgttctcaaagcttcagccacaacaccagcaacagcatcaaccttttcaattccctcgtgaatgtcaaacgtccgaggacgatgacagccgaagcagcggtggccctaacaccgccgtcgctcaaaaatcagttttaggcggcggatgatgcaccgatggggccacaattgaagtggttccgggcccaagggccgcccgcccgggtccaagaacaggcccaagccgcctctcataataacgcgcgaacccgagcccgccatgaagccgttc

SEQ ID NO: 4538 - DNA, 339 bp, Glycine max
  Clone ID: LIB3028-005-Q1-B1-D5
actgattcaacgatggacgccaatggcaattgggaagaggatgatgacgaagagttcgagttatcacggaattattttcaggccaatgaactcgcctcctcatccgccaagacatcgaggcatcagctcatctagttctatgtcattgataaacatgaactgagggatgctgcgtctaaaattgaacccaatcatgaatacgagatccctctcttgttggatacgtacaacatcatgtaacctgaatggatttgtgctctaatgttctgttttgggcttctgatgtagtgatttggattactgatagctctgattgataattttgcttcacctgagctg

SEQ ID NO: 4539 - DNA, 98 bp, Glycine max
  Clone ID: LIB3028-005-Q1-B1-D6
gtgggagtacatcttacttctactgtcattaattataagacttaatttattaatttaacatttattaaaaaaaattgattaatttagttattactatt

SEQ ID NO: 4540 - DNA, 419 bp, Glycine max
  Clone ID: LIB3028-005-Q1-B1-D7
tcgaggaagttcccaacataaacaactttagcgaaatgctctcagggaagaccaggttatttgttgtcgatacaagtttcaggacgtgcttgcttctgtccttcctattcaagatattgcacaatgggcacatgatgtcggatcacaagttgcttgtagatgcatgccacagtgttccacacatgatgattgatgtccagagccttaatgttgactttcttgtggcttcttctcacaagatgtgtggccctacaggcattggattcctatacggtaaaatatacctcttgtcttccatgcctccatttttgggttgtggtgaaatgatttccgatgtatatcttgatcattcaacttattccgaacctccaaccatatttgaacctggaacaccagctagtggggaagcaattggttta

SEQ ID NO: 4541 - DNA, 371 bp, Glycine max
  Clone ID: LIB3028-005-Q1-B1-D8
cctctctctctttctctttctctctcatccagatcttgcagaaaaaaaaaaacacaatggcagcgagcgctcccactccacgcgaagagttcgtgtacatggcgaagctggcggagcaggccgagcgctacgaggagatggtggagttcatggagaaggtctccgcctccgccgagagcgaggagctgaccgtggaggagcgcaacctcctctccgtcgcctacaagaacgtaatcggcgctcgccgcgcctcctggcgcatcatctcctccattgagcagaaggaggagagccgcggcaacgaggaccacgtcgccgtcatccgtgactaccgctccaagatcgaggccgagctctccaacatctgcgac

SEQ ID NO: 4542 - DNA, 305 bp, Glycine max
  Clone ID: LIB3028-005-Q1-B1-D9
gacctttttacattgcaaatggctgctgcaactgctggagttgttggtggaaatggttcgtctgcttcttggatgcgattcaaaggcaacgaaatgaagcaaaccaagatgaacaagtcaaggattagttgctcttattcttcttctgtgatggatccttacaagaccttaagaatacaacgcggtgcctctgaatctgaggtcaggaaggctttcatgcagcttgctctgcagtaccatccatacgtgtgcagagggagcaattgtggggtgcagtttcacgaaatcaacgaagcttatgatac

SEQ ID NO: 4543 - DNA, 422 bp, Glycine max
  Clone ID: LIB3028-005-Q1-B1-E11
aaaatctaaatgcctctttcttatttcccgtaatttgtgtccttctctctaatcccccttcaacattttcgcgtcttctctttctcaaatccctatcttcaaaatttcaagattatcactttaaagacagattttttttttttgacaaaaaaaatgactctggctatggctgtttggagtgctggtcttcacttcagtgctgctcgtagtagcttgagacctttggagaaaaccatttgcactgcccctttcttgaaggcgtcatctgggtttgctgctactaagccattctgcatccttaacacaacaagattgtcatattctggaactacaattatccctcgagcagcacctgttactgatgtgaaggatgggaatcaaggtgagactgataccattccaactcccgtagttataattga

SEQ ID NO: 4544 - DNA, 423 bp, Glycine max
  Clone ID: LIB3028-005-Q1-B1-E12
gtttggcaataaaaggaggagacgacgacgcggggaatctccggtctccaccgacatcccttctcttccaaatcctgtgatcccattccaatccgttccgttcagctcaatctcaaaatctcaatggccgataatgagcaaccgaataacgaggaggcaagtcctcttctccaccagccccatccccaacccaaatccgaaccaccaacgccacctgagactcccgagtttctcctcggctggaccgctgatgggctccctctggcccacgccagcgtcgtgggccagcccatgggccgcgccccttggaactcctccatctgcgcctgtctcggccaaaacgatcacttctgcagcagcgatctcgaagtttgtcttcttgggagtgtggctccttgtgtgctgtatggaagcaatgttgag

SEQ ID NO: 4545 - DNA, 427 bp, Glycine max
  Clone ID: LIB3028-005-Q1-B1-E3
ggtccaaggccaatcaattgagggtaattcgggggcccaattctcacgggaaaacattaataacactggtggagtatgattgtgttgcgaagtggtctctcacttaggtcattccccgcagtttttaggaagccctcaatacattggatatgttttgtgttacgccaaagtatatcatatcatgcacctgcagtgggcaagcaggaatgccattaccagactatgaccagtaaaatacaggactgcatgggtttctatatcaatgaattttacaattccttgaccttggtaaaccttaattggccaaggagagactccactaaagaggaacaatgtcctgccattttgtatttgacaaaatggcttatttgggattgagttttgaatgctgatctaatgagaagttttcgtaacctcccaaggattg

SEQ ID NO: 4546 - DNA, 424 bp, Glycine max
  Clone ID: LIB3028-005-Q1-B1-E4
cacattcaaatccaaatggccctttacattacactaataattggcctcctagtaaacaccctagtactctataaatagcatttgcatgcaccttagtcttcaccaaaatactcctcttggcatcttgtgttgtgtccctcttttaagctatttccttctcttaacacaattggttgtgccaattgccatagtcaccaaccaattaacaaaggtatatatatcatcatatcatcaccaaatgaaaaatattgggttgttttttcttgtggtggtggctacttttgtggtggcaaccacaactgggaaccttttacacgaactttgacataacgtggggtggtgagcgtgccacaatctatgagaatggaaaccttctcacactctcccttgacagagcctctggctctggctttccttccaaaaa

SEQ ID NO: 4547 - DNA, 377 bp, Glycine max
  Clone ID: LIB3028-005-Q1-B1-E5
cccaaaccagcaaaaacctttcttcacaaaatggcctcaacagctctaacaagcctcaccctccgcacgctatcttatcctacaccctcctcttcttaccctacgcacctctccgccaaagcctcctctctcgaattccccaatctctcccaccgcgccgctaccacacgccgcctccgtgtcgtcgtctccgccgttgaggcgcctgagaaagtcatcaaactcggcgacgaaatcgccggactcacgctcgaggaggccaagaacctcgtcgacgtcctccaggataagctcggcgtctccgcggcggcgttcgcccctgtggcagttgccgtcggttccggcggctctgtggcggacgcaccagcggtggttga

SEQ ID NO: 4548 - DNA, 178 bp, Glycine max
  Clone ID: LIB3028-005-Q1-B1-E6
gacagtaccaatatctatgcctacatttccatcattgctctaattgtgtgtataccacctgccgtaattttggaagggcccacactgttgaagcacggcttcaatgatgctattgctaaagtaagtttggtcaagttcgtctcaaattccctccgggttggtatgttttaccaacccc

SEQ ID NO: 4549 - DNA, 348 bp, Glycine max
  Clone ID: LIB3028-005-Q1-B1-E7
tattgaagaaggtcccaactttgaattggcatttacgcatttccactggactgatgagtgtactacccttatcagacagatcatttcggccttcagagaacatagtataagcagaagcccccatagcccatttcaatccttcagctgtagcagcagcgactaatagtctgtcaacatatggaattggttcggcatccggttactgatcatattctgagaagtggaacaacgagaaaagaacttccacatcatcgattgggaatccttcatcccaagattgttcatagcatcatgcatgcattgattagctgcataacagtaactgccacatcgccaattcataccagg

SEQ ID NO: 4550 - DNA, 413 bp, Glycine max
  Clone ID: LIB3028-005-Q1-B1-E8
cagtgctaaagacctagtcaggaagatgctgacacaggatccaaacaagcggattacttcttctcaagtccttgaacacccatggatgagagaaggtggagatgcatctgataaaccaatcgatagtgcagttctatccagaatgaaacaattcagggcaatgaataagctcaagaagctagcattgaaggttatcgctgaaaatctatcagaagaggagattaaaggtctcaaagcaatgtttgccaacatggacactgacaatagtggcactatcacctatgaagaattaaagactggcttggctcgaatcggatcaaaactgtctgaggctgaagtgaagcaactcatggatgcggctgatgttgacggaaatgggtcgattgactatcttgaattcatttcgggtacaa

SEQ ID NO: 4551 - DNA, 428 bp, Glycine max
  Clone ID: LIB3028-005-Q1-B1-F10
ctcaaacactagcaaagggaaggaaaagtaccttccccaataacccttctctccgatttggcttctctcatcggagggaaacaatcaataaaagaaaaaaaaaatccacataaagattataacaaaaaaagtatgaaaggaaaagtactaggttccgcagtttctctcatcctagtggtgggtgtggtaattggcgtggttgctgtagttcaaagcccaaagggcgtgaacaacaacaacaatggatgataattgaaaaccagcaacagggccgtgacagcgttgtgccaaggctcagactaccagaaactgtgccacgaggttctgtcatcttcgaacagcacagacccaaacgagtacatcgcaaccgtggtgagaacctcgatggacagcgtgattaaagcgttgaacatgagcgacaggctgac

SEQ ID NO: 4552 - DNA, 189 bp, Glycine max
  Clone ID: LIB3028-005-Q1-B1-F12
tagaaagcaatttcttgattgctcattttggggggctgctttatgatggctaatataagttcggtgagcatcctagcagcccaaatcaaatttgagtttttacaatgttgatggttaattcaaaactttagtagatttctcatttgtgaaaatacggttggttcatttttaaatatgaactttttcatg

SEQ ID NO: 4553 - DNA, 413 bp, Glycine max
  Clone ID: LIB3028-005-Q1-B1-F3
ccagatttcaccctttctcagtttctctctctagaaaaaccaaaacctggctcctttttttagctctttccttatttagccttcacacactccaaactgtgaaatccatttttagcaaagtaaaaaaaagtgagccagtgtgagagagagtggtcatcagtcatcaccgttgattgattaagatgcagcaatcaaacggctctgattcgacgactacgatggagcagagcgcgccgccgcctccgaggcaatcaccggcggtggccatgccgcagcagtgggtgccgatgcagtaccctgcggcggcggcgatggtaatgccgcaccacatgttgccgcctcagcattatgcgccgccgccgtacgtgccttaccaccaccagtacgcggcgcagccccagcaccagcaccag

SEQ ID NO: 4554 - DNA, 390 bp, Glycine max
  Clone ID: LIB3028-005-Q1-B1-F4
gattacccaatgttgtttgaactccgtaatgatgctgccgagcgggtttctcattgtggggttctggagttcattgctgatgaaggcatgatatacatgccatactggatgatggagaacatgcttttacaagacggggacattgtcaaagtgaaaaatgtgacacttccaaaggggacatatgttaagtttccagccccacacaaaagaccttttgggatatttccaatccaaaagctatcttagaaacaacattgaggaatttttcctgccttgacaactggagatagcattatggtggcttacaacaacaagaaatattacatagatattatagaaactaagcctgacactgccataagcataattgagactgactgtgacgtggac

SEQ ID NO: 4555 - DNA, 390 bp, Glycine max
  Clone ID: LIB3028-005-Q1-B1-F5
ctcgagccgagaagtgcaagaagtgcggacaaccaaaggaggtagcagccatgccagcaattgcgatgaccggagcatctttccccacttattcacactatttttccagggccccaggagtaccagaacaaaagatgaatattggattgcttggcaatggtgcaccatcacagtcactgcatttaaactccaattggcctgttcctggagcagataagtacggtgtccagccactttccatatggctacctggtggaaattatggcactgtgcatcatcatgaaaattctaccaaccagaacctatctgttccaaagggatggcgcaatggggactggatctgtaactgtggcttccacaattactcatcccgctcccagtgtaaaaagt

SEQ ID NO: 4556 - DNA, 405 bp, Glycine max
  Clone ID: LIB3028-005-Q1-B1-F6
gcatttcctcgtttttttcttcccttttctctttctccggcgacgatctcagattccggccactcctctcgccggcgagcccttactcttccctcctccgtcgagccctctccgattcgaatcgttcccagcctcgcaccaccatgaatcccgaatacgattatttgttcaagcttttgctgattggagattctggtgtatgcaagtcatgtcttctcctgaggtttgctgatgattcataccttgacagctatatcagtaccattggagtggactttaaaatccgcactgtggagcaggatgggaagactattagacttcaaatttgggacactgctggtcaggaacgtttccgaacaatcactagcagctattatcgtggggctcatggcattattgttgttt

SEQ ID NO: 4557 - DNA, 359 bp, Glycine max
  Clone ID: LIB3028-005-Q1-B1-F7
ctcgagccgaatcggctcgagcaatgaccaatcacaattctctgtgaactttctagaatctcgttcttcctttgccttctccttcttcttcaaccctttttctttctctttctttcgcactttcattctctaaaaaaatctaagtccctttggtcttcatcttctgttctgatccaggtatggcttctaaacgcatcttgaaggagctcaaggatttgcagaaggatcctcctacctcatgcagtgcaggccctgtggctgaggacatgtttcactggcaagccacaatcatgggacctgctgatagcccatatgcaggtggtgttttccaagtttcaattcatgttcgtcctgactat

SEQ ID NO: 4558 - DNA, 394 bp, Glycine max
  Clone ID: LIB3028-005-Q1-B1-F8
ttcatataatattgcttcttggttcattctagctaattttgatggctcttccaatttgtctcaccgttattgcaattttcaccctttgttgtgtcattaattgtaacaatggcgttgaagcgtttcatgacatatacccggatcttcaatccatttcagcacgttcggtgagcaaacttcagagaactggataccattttcaacctcgtaagaattggatcaatgatccaaatgggcccatgtactacaatggaatctaccatctattttaccaatacaacccaaaaggagcagtttggggcaacatagtgtggggacacgcagtatcaaaggacctcatcaattggaaagaacttgaacctgccctatacccatcaaaaccctttgacaaata

SEQ ID NO: 4559 - DNA, 282 bp, Glycine max
  Clone ID: LIB3028-005-Q1-B1-F9
caaattccccccccgggaactctcgttttcgtttttcggccaagtacttgtactgctaccaccgcactctccacaaaaacgcacccagcaccatcttcaacaaccacggaaccaggaagaacgcatggccaacctctctgcttcctttggcgctccctgttcccgcgggttcacccgcccttcaaccaaatttcaacccttccttctgcgacaccgacgacagaggtgtgggttttgggggcacaggcagcacccaatactttgtaaggggatcacagaaag

SEQ ID NO: 4560 - DNA, 383 bp, Glycine max
  Clone ID: LIB3028-005-Q1-B1-G1
ggttcacgtttcacaatcactttttgcgcttctctcactcactcactcttcttcttcctcttcgtgtggttttctttctcgaactcgaacgaagatgcgtgagattcttcacatccagggagggcaatgcgggaaccagatcggagccaagttctgggaggtggtgtgcgcggagcacgggatcgattcaacggggaggttacaaggggacaacgagttgcaactcgagcgagtcaacgtctactacaatgaagcgagttgcggaacgttcgtgcctatggcggtgctcatggatttggagccagggaccatggacagcgtcagatctggtccctacggtcagatcttccggccagataacttcgtccttggacagtccggcg

SEQ ID NO: 4561 - DNA, 409 bp, Glycine max
  Clone ID: LIB3028-005-Q1-B1-G11
ctttcccctaattccgaccatggaagccacggcctccgcaatgagcttcgcccttccctcaacaaaagcccaagcccaagcccaactcctgacccggcccaccaatccattcaccattccctcccgcagcccagcccaccgccccccgccgcgcctccccaccatccgcgccgcaattccccgcacaaagaaagaggcaacggtggagactgtgcgggagcagctcgagaactgttacctcctcgccggcatcaactacaagggcttcacggtgaagcagttccaggagcttcgaaagacgctcccagaaacaacgaaactgatcgtggcgaaaaacacgctcgtttacaaggccgtggaaggcacgccctgggagacgctgaagccctgcatgaagggcatgaacgtg

SEQ ID NO: 4562 - DNA, 416 bp, Glycine max
  unsure (1)..(416): unsure at all n locations
  Clone ID: LIB3028-005-Q1-B1-G12
caaaagggagaagaaaangaaagaaaactctcaaaaaactattatagcaatggcagaacaaaaccaaaaccaaacaactgaagctggaaggcaccaagaggttggtcacaagagccttctccagagtgatgctctttaccagtatattctggagacaagtgtctacccaagagaacctgaatccatgaaagaactgagagagttgacagcaaaacacccatggaacatcatgacaacctctgcagacgaagggcagttcttgaacatgctccttaagctcatcaatgccaagaacaccatggaaattggtgtctacactgggtattcacttcttgccaccgctctcgctcttcctgaagatggaaagatcttggccatggacattaacagggagaattatgaattgggtttgcctg

SEQ ID NO: 4563 - DNA, 403 bp, Glycine max
  Clone ID: LIB3028-005-Q1-B1-G3
catttgtgacggccaatggccgtgttttctgcaacagaccacgcctacacaatccccggtgataacttctattcagacaagtttgagcaattgagatttttatgtgaagtgttcagcttccgcagcaggagtcactggcagaggtcttagttctacatccagatcactttaacgatcaatatttacatgaggctccttcttgaatcttattataggtagtctttcttactaatttgtaatcaatgtagcttccagatatacattcgtaccatagccctatcgaacccaatttgagtgattgctactttaccggtgtttcttacacaccgtatcctcccggtatacctgagtttctatttgtgtcgtctttaaaagattatggaaacatttgaaagttctttgg

SEQ ID NO: 4564 - DNA, 404 bp, Glycine max
  Clone ID: LIB3028-005-Q1-B1-G5
ggcaaagattatgttcatcagctgagacttatcacagagctgataggttcacccaatgatgccagccttggatttctacgaagtgataatgctcgtagatatgtaaaacagcttccccaatatccaaagcaaaacttttctgctagatttcccgacatgtctcctggtgcggttgatttgttagagaagatgctcatctttgatccaaacaggcgaattacagttgatgaggcgttgagccacccatacatggcacctctccatgacatcaatgaggaacctgtttgcaccagacctttcagttttgactttgagcaaccatcattcactgaagaagacatcaaggaactcatctggagagaatctgtgaagttcaatcctgttccaccagtctactgaaattt

SEQ ID NO: 4565 - DNA, 390 bp, Glycine max
  Clone ID: LIB3028-005-Q1-B1-G6
gattcctcctaattggttgtttttggacacccttcctttagcgcgggaactaatgaagtccggaggaacaacactttcttcatcatccctagctgcccttcgtgacctctacggaattaaggtggatggatcagctcacagggctatggtagatgtgaacacattgtccttgattctttccaggttgacctctgatctgaaattgaccctatctgaccttgtcgacaaatcattcacagaatcagatattatcaactctaagaagaagaagaagaattagactagttttctgactgtattttgcattgatgttgtgacaaatgaattattttgtaaccaacaatcgaactctaaatttggagtttaagtagaaaagaaacgttgtttggt

SEQ ID NO: 4566 - DNA, 376 bp, Glycine max
  Clone ID: LIB3028-005-Q1-B1-G7
ggagaagggggttcaagagtaaagaaagcactcagctatttcatgtgagagtttttctattgctgacatgtcccccctcccctgcagcctccatctcctgaagcctgcacatttgtagttttgctaatgtttatcgcttccaagggtttgctgttgagccatttcgtttctaaaatgaaatataggtttttatttatagttacttttattacatttgggatgatgggttttgaacggagttaaggagtggagccttcaaaaattttggtccgttctgctgcttttgttttgttcatcatcccacaaggacgcccttttatttctatttcaagttatacaagttctactagatgaaaagataaagtagtcaggtgat

SEQ ID NO: 4567 - DNA, 386 bp, Glycine max
  Clone ID: LIB3028-005-Q1-B1-G8
ggcgtcatttcatttccaccaaacaccaaagaaagaggtgaagtcaaatggtccttagttctgggagtgttgatgcttgagtcttgacggaacgaacggaaaaggggatctcaatggacaacaccaagccccttatcgaactggaactcgacgatgatggcagaatcagaagaaccgggaatgtgtggactgctaacatacacattataacagtggttgtaggggcaggggtgctgtctttggcatgggttatggcacaactaggatggttagctggcatagccagtatcattaccttttcagctgtcgccattttcacttacaatcttgtagctgattgttacagatatccagaccctgtcactggcaagagaaattatacttat

SEQ ID NO: 4568 - DNA, 430 bp, Glycine max
  unsure (1)..(430): unsure at all n locations
  Clone ID: LIB3028-005-Q1-B1-G9
ggaattcggcccaagccggtgccctgcaaactacgtccccctcactcaaatcagcttcttggaccgcgccgccgtcgtttaccgcgacagactttctcttgtctccggtgacgttacctacacgtggacccagacacaccaacgctgcatcaaacttgcttcttccatttctcaacttggtgtcggtctttctcccctcgatgtggttgctgtattggcccctaatgttccagctatgtatgagctgcattttgctgttcccatgtcaggggctgttctctgcacgctaaatacacgtcatgattctgcaatggtttccttgttgctaaaacattctgaggccaaacttgtttttgttgattatcaattacttgatattgctaaaggagcacttcanatcctgtcaaaaattcacaccaagcttcccaat

SEQ ID NO: 4569 - DNA, 426 bp, Glycine max
  Clone ID: LIB3028-005-Q1-B1-H1
gcttcatcccaaaaagctcttttccttctaaatttgattccttagttcagcattctattattatatatggcttcttcaccttcctcagaaaacaaaaacctagagggagtagctggtggtgccggagagaaacccattccacttggtgagaacgttctgcagaagcatgctgcattctttgacttgaataaagatggtgtcatctacccatgggagacttttaaagggttgcgtgaaatcgggactggggttttgctgtccgttggaggtgctattttcatcaatgtgtttctcagtcagagtactcgtcccggaaagtttccatctatactttttccaattgaaattaaaaatatccaacgcggcaaacacggcagtgacactggagtctacgatactgaaggaaggtttgtaccttcaaaattt

SEQ ID NO: 4570 - DNA, 153 bp, Glycine max
  Clone ID: LIB3028-005-Q1-B1-H10
atcgatgccctggtagttcccctgaaccttttttaatttgtgcgaaatttggaaggggtaaatttccccctaacttgagtacccaattactttgtgtggtcagtccaagctggggtttcgttgggaccacgttgttcgcttgaactaatggtg

SEQ ID NO: 4571 - DNA, 448 bp, Glycine max
  Clone ID: LIB3028-005-Q1-B1-H11
tacttaacaccggaatccggcccaagaaaattgataccatcacacagcattagtatgtaccaccaacaagggtcagatccaacaaagcaatcaccggcaaccggttttccggtgagctatagcaattcaacaacgtattcgaccaacgaggcttcctacgctccagtcccacctccccagcccaaacctcttgtcgattggtccaccggcctctgtgactgcttctccgaatgtggaaactgttgcatgacgtgttggtgtccatgtgttacctttggccgagttgcagaaattgttgacaagggatccacatcatgtggtgctagtggggctctgtatacgctgatttgctgtgtcattggctgtggctgcctatactcttgcttctaacgccccaagatgagacgacagtatggtctaaagggaaatggttgttcggattgcttga

SEQ ID NO: 4572 - DNA, 251 bp, Glycine max
  Clone ID: LIB3028-005-Q1-B1-H12
cttggcatgcacacgcacatcccacattacatcaaacacatttcatttttttttttctttctcctttgtcatcctcaaaatccccgaccttaattgctccgaccccaacaaataacaaaacaagcaagccatggattcctcccagattcatggcttgtcctcgtaaattcaacacctttacaagtcaaacttaagccaccattaactgaaaaaccgcaggaagaagaataagatcaaatctcataagggtt

SEQ ID NO: 4573 - DNA, 149 bp, Glycine max
  Clone ID: LIB3028-005-Q1-B1-H2
ccctaattgcgttcttgattatactctgcaaattaatttttgggttccagagtcttatattataaatggcctttgccgcattcatagtgttcaggaaattggggctattagccagaggttgtggagaaaaatcgcttgtacctgtagat

SEQ ID NO: 4574 - DNA, 384 bp, Glycine max
  unsure (1)..(384): unsure at all n locations
  Clone ID: LIB3028-005-Q1-B1-H4
tcaaggccttaataaaggctttcctccccgtttccgtttcccccgtccaaatccccttttggtttgccaaaattagaaaatggaacctgattcaaattgggccaggtggttaccaagtccggaaatccttgcgggaagcccaacggcttcaaccacggcatcgggcccgatgggcaaatgccaattgacangacaattggcggtggtgatgatgctttcaatactttcttcagcgagactggtgctggaaagcacgtgccacgtgcagtgtttgtagatcttgagcccactgttattgatgaggtgagaaccggaacttaccgccagcttttccacccagagcagctcatcagcggcaaagaagatgccgccaacaactttgcc

SEQ ID NO: 4575 - DNA, 384 bp, Glycine max
  Clone ID: LIB3028-005-Q1-B1-H5
ccagaatcggttgataatgacatcccggttattgataagtcatttggttttgacactgctgttgaagaggcacaacgagccataaatgctgctcatgtggaagcagaaagcactgagaatggtattggtgttgtcaagttaatgggtcgtcacagtgggtttatatctatgtatgcaactctcgccagccgagatgtggattgttgcttaattccagagtcacctttttacctcgagggtccaggtggactctttgagttcattaggaaaagactcgcataaaacgggcacatggttatagtaatttctgaaggtgcaggtcatgagcttatttcagaaagcctatctgctacaaataagcaggaagcttctggcaacaagtta

SEQ ID NO: 4576 - DNA, 396 bp, Glycine max
  Clone ID: LIB3028-005-Q1-B1-H6
gagggttctctccaaaactattgccaagatagttaataaacaccacttctctagattgaagaatcttcttgctgataaaaaggtcaaagaatctgtgatttatggtggttcaatggacgaacaaaacttatttattgagccaacgatcttggtggatcccccactggaagcagcacttatgtcggaagagatttttggcccattacttccaattattaccgtggataagattgaggacagtattaagttcataaattctagacctaaacctcttgccctttatgttttcaccaagaaccaaacactgcagagaagaatgatatctgaaacatcatctggcagtgtgactatcaacgacgcaattctacaatatgcagtctatactgttccatttgg

SEQ ID NO: 4577 - DNA, 422 bp, Glycine max
  Clone ID: LIB3028-005-Q1-B1-H7
ccaccctacagatgaagagctcattcttcactacctaaggaagaaggttgcctctattcctttgccagtttccatcatagctgaggttgatatctacaagtttgatccatgggagctaccagctaaggccgagtttggggagaaagagtggtacttcttcagtcctagagaccggaagtacccaaatggagcaaggccaaacagggcagcagcttcagggtattggaaggccacaggcactgataagaacatattggcatcactggcaagaggaggggttagagagcactttggtgtgaaaaaggctttggggttcaacaaaggaagacccccaaagggtgtcaagaccaattgaataatgcatgaatatcgctttgttgacaccaatagacccattaggatcaaagacacctccatgaggt

SEQ ID NO: 4578 - DNA, 426 bp, Glycine max
  Clone ID: LIB3028-005-Q1-B1-H9
ttagcaccggaatccggcccaagcttaaggcattccgggcaaattttttcccactttaatttaaactttaaaacggcacagaaagaagcatataattccggagtcaatataaaatttgtgaagtcagtcaaagcttcagtttcacagatgcctcgtggaacgcttgaagttgttctgatcagcgccaaaggaagcgatgacaatgatgttctctccagcattgatccttatgtgattctcacatacagggcacaggagaaaaagagcactgtgcaagaagatgctggatccaagccacaatggaatgagagctttcttttcactgtcactgacagtgcatctgaacttaatctaaagataatggataaagacaactttagtcaagatgattgtcttggcgtggcaaccattcatctggattcagtg

SEQ ID NO: 4579 - DNA, 379 bp, Glycine max
  Clone ID: LIB3028-006-Q1-B1-A1
aataaaccgaatgagagcattaacctcttcttcttccactttcattccaaagcgttattccttcttcttcttcctctccattctcttcgctcttcgatcctcgtccgggggctgctccgaataccaccaccaccacgcgccgatggccacgataggaggcttacgcgactcccaaggctctcagaacagcgtccaaaccgaggccctcgctcggttcgccgtcgatgaacacaacaagaagcagaattcacttctggagttttctagggtggtgaggacacaggaacaggttgttgcgggaaccctgcatcaccttactctcgaggctattgaggcaggtgagaagaagctctatgaagccaaggtgtgggtgaaacca

SEQ ID NO: 4580 - DNA, 324 bp, Glycine max
  Clone ID: LIB3028-006-Q1-B1-A10
acttcatccaaaaacatggcacccttaaccatcagaaccatcatggacacctccgctattcagcattcaggattcactgggcaaactgctctgaaccatctcagtcacttcgtccgcaacaccggtggcgcccgcaaaggtctcactaacatacgtcgcactctcaatagtgctcatcacagcaattggtatggccctgaccgtcccaattacttgggtccagtcgctgagcagattccatcggtcctgagcggacaattccctggtgaccaccgttgggacactgcagaatatccagctgacccggaaaccttgtctaggaac

SEQ ID NO: 4581 - DNA, 319 bp, Glycine max
  Clone ID: LIB3028-006-Q1-B1-A11
cgagagtgcttactacgagcattacaagagcatcatgggaactaagagttggggaattggaccggtttcgttgtgggcgaaccaggatgctcaagataaagctgcacgagggtatgctaaagaagaagaagagaaagaagggtggcttaagtggctcaactccaaagcagagagctctgttttgtatgtgagttttgggagcatgaacaagttcccttactctcagctcgttgagataacacgtgcgcttgaagattcggggcatgattttatctgggtggttaggaaaaaccatgggggttaaggggaaaactttttg

SEQ ID NO: 4582 - DNA, 313 bp, Glycine max
  Clone ID: LIB3028-006-Q1-B1-A12
ggaataatcaattagaaaaaataaaagttcattcaaattatgctgggatttatgcaattaggttaatttaattccctgcaagaggaaaaatgtggaggaaaagaaggtgatttggtatctagtaagaaggtcttgcattcaatccgttgagcatgttgatcaaatttggttcctaactttgtgtatgaaaaatgcactgttaggagatctattcacttgctagacaaaacatcatcctaaaatagtacgaggtgttttactccatgtaatctttgaaattgaagagaaaggaaattgtcatgttataaggctt

SEQ ID NO: 4583 - DNA, 399 bp, Glycine max
  Clone ID: LIB3028-006-Q1-B1-A3
atttctccatttccattttctctctcacttttcaagaatcgtaagctatgggaaagtcttacccaactgtgagtgctgattaccagaaggccgttgagaaggcgaagaagaagctcagaggcttcatcgctgagaagagatgcgctcctctaatgctccgtttggcatggcactctgctggaacctttgacaagggcacgaagaccggtggacccttcggaaccatcaagcaccctgccgaactggctcacagcgctaacaacggtcttgacatcgctgttaggcttttggagccactcaaggcggagttccctattttgagctacgccgatttctaccagttggctggcgttgttgccgttgaggtcacgggtggacctgaagttccattccaccctg

SEQ ID NO: 4584 - DNA, 425 bp, Glycine max
  Clone ID: LIB3028-006-Q1-B1-A4
ctaaaaccaattgtcaaatgtcaatattgaaaaacaagttgtgcagattcaaaaacctataaaggaaatgtttcattcagttgctatattcggtttgatgttcagttattggagcaaatgttctgtgacaccattttatttgtctagcagccaatcaagtaatcttttattaccctcaatggtcatctttgcctaaattggtttttcaggaaaagagaacagagcatgtatggttaagatcagaagttaaagtcatgcgacgttttctagtgatcatttgtcctttaagttctaattttaagcattcatataatctccaacggtcaatatttgatcctttcacttatcatgaaaacgcattgctataacttgctatattcgccacatgtttgtgtatgtgatattatgctattatgactgcttca

SEQ ID NO: 4585 - DNA, 425 bp, Glycine max
  unsure (1)..(425): unsure at all n locations
  Clone ID: LIB3028-006-Q1-B1-A5
gacgtcggattcactcgtacctagaacttcggctcgagaataaaccgaatgagagcattaacctcatcttcttccactttcattccaaagcgttattccttcttcttcttcctctccattctcttcgctcttcgatcctcgtccgggggctgctccgaataccaccaccaccacgcgccgatggccacgataggaggcttacgcgactcccaaggctctcagaacagcgtccaaaccgaggccctcgctcggttcgccgtcgatgaacacaacaagaagcagaattcacttctggagttttctagggtggtgaggacacaggaacaggttgttgcgggaaccctgcatcaccttactctcgaggctattgaggcangtgagaagaagctctatgaagccaacgtgtgggtgaaaccatggttgaa

SEQ ID NO: 4586 - DNA, 396 bp, Glycine max
  Clone ID: LIB3028-006-Q1-B1-A6
cttcttcccaaccactactactcactcactgcagatctcaattgcatcgctgtccatggctaccatcgttagcatcaaggcccgccagatcttcgacagtcgtggcaatccaactgtcgaggtggatttgacttgctccgatggtacttttgccagagctgctgttccaagtggtgcatccactgggatttatgaggcccttgaattgagagatggaggatctgactaccttggaaagggtgttacaaaggctgttgacaatgtgaacaccgtcattggccctgctttgattggcaaggacccaactgagcagactgctattgacaacttaatggttcaacagcttgatggaactgttaacgaatggggttggtgcaagcaaaacctatgagcaaa

SEQ ID NO: 4587 - DNA, 392 bp, Glycine max
  Clone ID: LIB3028-006-Q1-B1-A7
ctcgagccgctccgtctctgcaattacgatggcgcccagggacaagactagtgccgttaagcctagcggtaacgccggggtgaaggacctgcattttcgtggagtcaggaagagaccgtgggggaggttcgccgccgagatcagagatcccgccaagaagacccgcgtctggctcggaaccttcgacaccgcggaggaggcggcccgtgcctacgacgccgccgcgcgggagtttcgcggccctaaggcgaagacaaacttccctctcccttcggaaaattttaagaacgcgagccctagccaaagcagcacggtggagtcctccagccgcgaccgcgacgtcgccgccgattcctctccgctcgacctcaacctcgcccccgttcccgtct

SEQ ID NO: 4588 - DNA, 342 bp, Glycine max
  Clone ID: LIB3028-006-Q1-B1-A9
caaagtcacaatggaccccctctctctcttctgcaccggagccctcctcgccggcggcctctactggttcgtgtgcgttctgggcgccgccgagcataacggcaaacgcgccaccgatctttccggcagctccatctccgccgagaaagtccaagacaactacaaacagtactggtccttcttccgccgcccaaaggagatcgagaccgccgacaaagtccccgacttcgtcgacaccttctagaatctagtcacagacatctacgactgggggtagggccagtccttccacatctccccctccatccccggcaagtcccaccgagacgccaatcgcctcca

SEQ ID NO: 4589 - DNA, 357 bp, Glycine max
  Clone ID: LIB3028-006-Q1-B1-B1
gcactccgtcttcatcaatcagcatcaccaccgctccaacacaggggaaaatgagggagatccttcacgttcagggagggcaatgcgggaaccagatcggttcgaagttctgggaagtggtgtgcgacgagcacggcatagatccgacggggaagtacgtcggaaactcagatctacaactcgagcgcgtgaacgtgtactacaacgaagcttcctgcgggcggtttgtcccacgcgcagtgctgatggacctggagcccggaaccatggacagcgtgcggactgggccgtacgggcagatattccggcccgacaacttcgtgttcgggcagtccggcgcgggcaacaactgggcca

SEQ ID NO: 4590 - DNA, 383 bp, Glycine max
  Clone ID: LIB3028-006-Q1-B1-B10
aaaccttttgtcctcacaccatagcagtatattctaagaactggagaaggcattacagaagtctgccttagtgggtttattgcttttgatgttcctcctccaaagggtccattgtggattcttggcgatgttttcatgagggcatatcacaccgtctttgactatggaaatctccaagttggctttgccgaagcagtctaattacgctttctggaggattttctttgtaaatttgttaagcgtgttgtaaataagctgttataattgtagctctggttactttttgaaaccacgaatgtatttatccatttaagacgtagaagtatcccacttgcaagtgttgtgtgctttttatatgaaaaaaccatcctcatttcattccg

SEQ ID NO: 4591 - DNA, 413 bp, Glycine max
  Clone ID: LIB3028-006-Q1-B1-B2
attccattctctctgtgtatttccctacctctcccttcaagatgcagatcttcgtcaagaccctcaccggcaagaccatcacccttgaggtggaaagctctgacaccatcgacaacgtcaaggccaagatccaggacaaggaaggaatccccccggaccagcaacgtctcattttcgccggaaagcaacttgaggacggccgtacccttgctgactacaacattcagaacgagagtactcttcacctcgtcctccgtctccgtggtggcatgcagatcttcgttaagacactcaccggcaagaccataaccctagaggttgaaagctccgacaccatcgataacgtcaaggccaagatccaggacaaggagggtatccccccggaccagcaacgtctcatcttcgccggaaag

SEQ ID NO: 4592 - DNA, 343 bp, Glycine max
  Clone ID: LIB3028-006-Q1-B1-B3
aacaaactgcagcagccactggaatagagggcatgatcataaatctgtcatcaattgcccataactacacttacataaaggggattagatttaataagatcaatgaaccgaaaggttacggtaacaacaaggcgtatggacagtccaagttaacagacatagtacatacgcatgacctttcacatcccctgcgagaagatggtgtgaacattacagcaaactcattccatccaggagtcataattactcctcttatgagacactcttctttccatatgcacttcctcaacgtctttaccttttacatatgcaagaacgtcacccagggagcatccaggacatg

SEQ ID NO: 4593 - DNA, 380 bp, Glycine max
  Clone ID: LIB3028-006-Q1-B1-B5
gtttttaataggtagtacgtaggtgtaatcgttgtcttcctgcagatatggaagaagcgggtttaggagattgttgttcctctaatacgactattacgaggaaaagcgagaagcgaaagcagcagcaccaacaacaagagaagccatacagaggaataaggatgaggaagtggggcaagtgggtggcggagattagagaacccaacaagaggtcgaggatctggttgggttcttacgccaaccccgtcgccgccgcacgcgcctacgacaccgccgtcttccacctccgaggcccttccgctcgccttaacttccccgaattgctgtcccaggacgacgacgtttcgacccaacaacagggcaagatgtccgccgattca

SEQ ID NO: 4594 - DNA, 399 bp, Glycine max
  Clone ID: LIB3028-006-Q1-B1-B6
catagctgaaagctgactctagctagaggataataataagattaagatcatccatccaacaagaaagaggaagtgtgtttttgattggatccacaaaattcaagatgactccagttaatttggctggccagtttggtgacacaacatacactaaggtgtttgttggaggcttggcctgggagactcaaaaggagacaatgaagaagtattttgagcaatttggtgagatcttggaggctgttgtcatcactgacaaagccactggaagatctaaaggctatggatttgttacttttcgtgaaccagaagctgccatgagagcttgtgtggatcctgctcctgtaatcgacggtacgagagctaactgcaaccttgcttctttgggtgtccagagatcta

SEQ ID NO: 4595 - DNA, 373 bp, Glycine max
  Clone ID: LIB3028-006-Q1-B1-B7
atgtatttcacccaaatataaatagcaatggaagcatttgccttgacatattgaaggagcagtggagccctgcgctaactatttcaaaggtgttgctctcgatttgttccctgttgacggaccctaatcctgatgatcctttggtccccgaaatagcccacatgtacaagacagacagaaacaagtacgagtcaactgccagaagctggacccagaaatatgccatgggttaagtgacctgtggtatgtgtgaggaagagcctttctactcacagtgtttatgcctctcagcccttgtatgaatatttgtcgtttttaataaggcccctccagttgaagattaatggagcaggacgtttctcctgttgtttgt

SEQ ID NO: 4596 - DNA, 423 bp, Glycine max
  Clone ID: LIB3028-006-Q1-B1-B8
caagagacagcagagcagagatctagcgtattctctcgctctttctttcactgtcacagagccacatccatgggcttcccagccaacggcgcctctgcggcccagcccctaaacttcctcatctacggccgcacgggctggattggcggcctcctcggctccctctgccgggcccagggcatctccttccattacggctcgggccgcctcgagaaccgggcctccctcgaaaccgacatagccctcctcaagccctcccacgtcttcaacgccgccggcgtcacgggccgccccaacgtcgactggtgcgagtcccacaaagtcgagaccatccgaaccaacgtcgttcggaacctcactctcgccgacgtctgccgcgaccacggcctcattctcatcaactacgccaccggttgcattttc

SEQ ID NO: 4597 - DNA, 319 bp, Glycine max
  Clone ID: LIB3028-006-Q1-B1-C1
ctccagaaaaaatggcggtgcctcttctctcgaagaagatcgtgaagaagaggctgaagaagttcaagaggcctcaaagtgacaggaagatttctgtgaagacaaactggcgcagaccaaagggtatcgattcccgtgttaggagaaagttcaagggatgcactttgatgccgaacattggttatgcttcagacaagaagacccgccactatctcccgaatggtttcaagaaatttgttgttcacaatgtgaaggatttggaactgctcatgatgcacaacaggacttactgtgctgagattgcccacaatatatccac

SEQ ID NO: 4598 - DNA, 86 bp, Glycine max
  Clone ID: LIB3028-006-Q1-B1-C10
ggtccatacaaagtcattgcgttggtatgggatggatgcttcgctcacgacatatttgttcgtgctagggcatgtcctgtcacctt

SEQ ID NO: 4599 - DNA, 417 bp, Glycine max
  Clone ID: LIB3028-006-Q1-B1-C2
gcattggattacttgaaggagaaacaactgagaatagaagcaccattgttaggacagaatcaattaaaccagctgtggctgagaaagtttctcaagattatggattgccatctaactactttgctgcttcaaaactggaccaaaccactgaagataataaagacactaaaactagttgcaaacaactggacttgaatggattcagttggaactgatgagaagagaaagcacaatggaagcacacagaaagcaaagttactccaatttctggcaggaaacaatgtatttactgtaaacaatgtatcagcttctgtttctttcagctcatggtggtcatgactagccaaatatgagttacttttagtagaatgcaaagttgcaactaacaaatttgtaagcagtaattataatggatat

SEQ ID NO: 4600 - DNA, 402 bp, Glycine max
  Clone ID: LIB3028-006-Q1-B1-C3
aaaaaatgggttcctcctcctccaagttgaccgtgtgtgttaacttgggcacactgtacatcctgatctttgtgctccaacctaccaaggcaacttgatgtaaatcttggtagtgagtttttgtctgcaggggcttttgttcacacgaaatatttcaaaggtgggttgtgacaatcccccatcattctgacaagttaaccgggactggattccattccataggggcctaattgtttggtcacttcagcatgttcatgaagacggttcctggagattccgctggcacagtcaacggctttctatttatcctcccaaaacgcggaaccttatgagatagactttgagttcttggggaacagaacaggacaaccttacattctgcaaacaaatgtgttcaccgga

SEQ ID NO: 4601 - DNA, 308 bp, Glycine max
  Clone ID: LIB3028-006-Q1-B1-C4
caccgaacaaagcagcagctcacaatccaccactggatccaccggatcgccgccttccgccgccttccacggcggaggagatgaactcgacctgaaacaacttgaacggtttctagggttggacaacatgggtgctgagtgggacaacatggatgacctgtggatgctggacgacgtcgttgtgcccaaccgtcacttaatttactagaagggagataattaattaattaataaatggcgttttcctaagttacagttttataaaactatgttggtgtatgtgttcttagttttccgttttgtcctgt

SEQ ID NO: 4602 - DNA, 293 bp, Glycine max
  Clone ID: LIB3028-006-Q1-B1-C5
ctccagaaaaaatggccgtgcctcttctctcgaagaagattgtcaacaagacgctgaacaacttccacccgcctcaaagtgacaggaagatttccgtgaacacaaactggccacaaaccaccgggtatcgattcccgtgttatgagaaagttcaagggatgcactttcatgccaaacactcgttacgcttcacaccacaagacccgccactatctccccaatggcttcacgacatttgtcgttcacaatcgtaacgatctggaactgcccatcatccacaacccgacttactg

SEQ ID NO: 4603 - DNA, 233 bp, Glycine max
  Clone ID: LIB3028-006-Q1-B1-C6
ctaaaaccctaatctcccaaaaccctacgcatggcgtcgtcgttaattcacctccgccgcaccgtcagagcactctccggcgtcgcccagtcgttctctgtgcatgcggcatcgtattccgtcgccattcggtgcggtgtgtcatggagtttgcagtcacggaagggtgtggtccagccgcgttcattcaggtcaagcgcactttcacgtctcgcgcttcgatcctcccagcg

SEQ ID NO: 4604 - DNA, 366 bp, Glycine max
  Clone ID: LIB3028-006-Q1-B1-C8
tcttcatccatagacatggccaccgtcacttctgcagccgttgctattccctcattcactggcctcaaggcaagcgcaggcaaagtgagtgccgcagttaaagtctcagctccccaagccacaaggttgggcatcaaggcttcgctgaaagacgttggagtcgctgttgtggccactgccgcgagtgcagtgctggctagcaacgccatggccattgaagtgttgctgggtggtgatgacgggtctctggctttcgttcccaacaatttctccgtggcctctggggagaagatcgtgttcaagaacaacgcaggtttcccccacaacgttgtgttcgaccaggacgacattcctagcggcgtggat

SEQ ID NO: 4605 - DNA, 313 bp, Glycine max
  Clone ID: LIB3028-006-Q1-B1-C9
ggtcaaactgacgttaatgctgtgacatggggtgtcttcccagctaaggagataattcaaccaaccattgtagatcctgtcagcttcaatgtatggaaggatgacgcatttgaaatttggtcaagatgatcggcaagcttgtaccctgaggattaggcatccaggaaattggttgaagaggttgggggcagccacttcttggttactttggtcgacaattattacatcaatggtgatccttttgccgtctttgcatatctctgacatgagcttattactcagtagaacttatcctatgtcacatctgttggtg

SEQ ID NO: 4606 - DNA, 253 bp, Glycine max
  Clone ID: LIB3028-006-Q1-B1-D10
tctctttgttatatttgttacttatattttcttcgttcagcatggactctccgaagcggcaggggcagaagtttctggtggcggtgacggcggtggctgcggtggtggtaaagctgcttaggcggctgcatcggacgctggtggtgagggagcactggaggatgtatctgcagtcgccgaataatcttctgagcatcataggcagcatccagctgccgtttaggaagaataacatgggtgaggaggattgcgg

SEQ ID NO: 4607 - DNA, 415 bp, Glycine max
  Clone ID: LIB3028-006-Q1-B1-D11
cagttcaacaactctcagcaacatgcacaatcctcccccgccaggcggtccaggccctcaccaccaccccggcccaccggctccgccaccacatgctcatccatctcctccgcctcctgggcctccacaccaccaccacggcccacccggcccaccgcatgcttatccaactcctccgcctcctgggcctccacaccaccatcccggcccaccctaaccaggctttcatcaacaccatggcccacccgggccaccgtatgctcatccaactcctccgcctcctgggccatcgggacctccccctccaaggcctccacaccaccaacaccaccgttgctgatgttatgcatatggaagcttatcaataacgatcctacatatatatgatgttatcttgaatgctttttaatttctg

SEQ ID NO: 4608 - DNA, 418 bp, Glycine max
  Clone ID: LIB3028-006-Q1-B1-D12
gtcatcatcttcagacctggacaggcaaatagagcagttgaagaggtgtgagcctcttaaggagtctgaagtgaaggtgctctgcctcaaagccatggaaatcctcgtcgaagagagcaacgttcaaagggtcgacgctcctgtcaccatatgtggtgatattcacggtcagttttatgacatgaaggagcttttcaaagtaggaggggattgccccaaaactaactatttattcctgggggattttgttgatagagggttttactcggttgaaacgtttctgcttctgctcgctcttaaggtgaggtatccagatcggataacacttattaggggaaaccatgaaagccgtcagatcactcaggtatatggattctatgatgagtgccttcgaaaatatggttcagtcaatgtctgg

SEQ ID NO: 4609 - DNA, 367 bp, Glycine max
  Clone ID: LIB3028-006-Q1-B1-D2
tgaaatttacaaggcaactaacactatcaaggcttataatcagataggttttctaaagctcgagaagtcaattccagatgccattctaagacaagcaaaaggccttgcaattatcactgtggtcaaagtacgagtgggggttacttacaatattggaacaggacttgtggttgcccgtacggaagacggttcatggtctcctccatctgctgtttccacctttggtgtacggtggggggctcaggctggaggcgagttgacagacttcatcattgttttgagaacaaatgatcctgtcaagacatttggtggcaatatgcatctttcacttggagcaggtttgagtgctgcagtaagctttgttggt

SEQ ID NO: 4610 - DNA, 357 bp, Glycine max
  Clone ID: LIB3028-006-Q1-B1-D3
cttctctctgagaacaacaccccacactcctctctctctctccgcttccttctcttctcacacctccatggcccaaacttcccttccctccgccgatgccggcattgacgctgtccagcgccgtctcatgttcgaagacgaatgcattttggtggatgagaatgaccgtgtggttggtcatgattcaaaatacaattgtcacttgatggaaaagattgaagctgagaatttgctgcatacagctttcagtgtattcctgttcaactcaaagtatgagttgcttcttcagcaacgatctgcaacaaaggtaactttccctcttgtgtggacaaacacctgttgtagccatcctctgta

SEQ ID NO: 4611 - DNA, 421 bp, Glycine max
  Clone ID: LIB3028-006-Q1-B1-D4
atcagctcaagatggagctcacagagggacatgtattccaaggttggcatgaaggagctatagagtttccacctacatacaaataccgtctgaattctgtagactacctaggctgtgatcagcagcatgtgagcagaaagcggcgctccccagcatggtgcgatagaataatatggtttgggaagggaatgaagcaaatccaatacaacaggagcgagtcaaaactttctgatcataggcctgtacgagcaatgttcacagctgatatcagggttgcagggacttgtaaatgattaaaaaagttacaaaggcaatttgtccaagaaattttggttttaatggactaaatttagtcatggaccaaaaccagacacagacaccggacacctaaccaaacttagtcctgggctaaaacaagcat

SEQ ID NO: 4612 - DNA, 382 bp, Glycine max
  Clone ID: LIB3028-006-Q1-B1-D6
cacacaacacaccacaaccttcttcttcttcttcttcaacttctggttcaaaacctcaacagtttgttgaattgcgcgttgaaatacgactcaatattctttcgcgagctctgttctcacttcaaaggttaggttcttcgacagtttctttgtttccactccgtcgcttgctgagaaggcgtgagcgagagttgtagaattacgcaacgagtgtcgcggatgagagatctgtggtgaggtctctggaaatgacatcattggaggtgacgatgaagggaaattgcttgaaccacaacgacggcggagccacggagcctcattccccgtccacggccaaagacgcagaagctgcacttttcaggcagctatggcatgcttgtgc

SEQ ID NO: 4613 - DNA, 364 bp, Glycine max
  Clone ID: LIB3028-006-Q1-B1-D8
ctctttgttatatttgttacttatattttcttcgttcagcatggactcgccgaagcggcaggggcagaagtttctggtggcggtgacggcggtggcggcggtggtggtaaagcgggtgagccggctgcagcggaggctggcggtgagggagcagtggaggatggagctgcggtcgccgaagaagcttctgagcaacataagcagcaaaacgctgccgtttaggaagaagaagaggggtgaggaggattgggggaaggtggggtgtggcagacggcgatcctgatgggggacacgtgtgaaccgttggatttcccaggcgtcatttattaccatagtaacgggaagcacgtgaactagatgcccc

SEQ ID NO: 4614 - DNA, 280 bp, Glycine max
  Clone ID: LIB3028-006-Q1-B1-D9
agccccatctcggcgctatcattctaacctacaaaatgttctgccaccatcgacgctctcaacctgcatgcggcatactttccggtcgcagtgacagccgtggcagcagtggtggcaacaccgctcagccagatgcagcttacgtagtcggtcacggaccacttcctgacgcagctactctctgcgcacagtcttctcagcagcagtaacagcaaaccgctgccgtttaggaagaagaacaggggtcaggacgatcgggggaatggtcaggaaagaacac

SEQ ID NO: 4615 - DNA, 412 bp, Glycine max
  Clone ID: LIB3028-006-Q1-B1-E1
caacaacactctctcttctcgctcttggcttttcgctcttcactcactctcattcattcatttccaccgttcatggatccagtaagcgtgtggggtaacacgcccttggcgacggtggatcccgagatccatgacctcatcgagaaggagaagcgccgtcaatgccgcggaatcgagctcatcgcctccgagaacttcacctccttcgccgtcatcgaggccctcggcagcgctctcacgaacaaatactccgagggcatgccgggcaaccgctactacggcggcaatgaatacatcgaccagatcgaaaacctctgccgctcacgcgccctccaagccttccacctcgacgcccaatcctggggcgtccacgtccagccctactccggctccccggccaacgtcgccgcct

SEQ ID NO: 4616 - DNA, 389 bp, Glycine max
  Clone ID: LIB3028-006-Q1-B1-E11
caacaaggtaaggtcagggttctggtttgtgagcaccagtggtgaccctaatgatatcactagcaagttcaagattgagaggcttgaaggggatcatgcttatgagatctacagcttcaagttctgccccagtgtgcctggtgcgctgtgtgctcctgtggggacttttgaagatgctgatggaaccaaagtcatggctgtgggggatgatattgagccttactatgtgaggtttcaaaaagtctccatctttggtcaagacaagaaacaaccttttagcattttgtacgttggtttgtgcctgtaataggtagatgcgggtcatgactcggaataatgagctactagaatgcaatgcaactgtttccttggtgtgcctgtgtgaaaga

SEQ ID NO: 4617 - DNA, 425 bp, Glycine max
  Clone ID: LIB3028-006-Q1-B1-E12
cggatttcacacaattgaggatcagagaaacaaagacaaccacaacaataacaataacaacggtgatgactgctcaagtgcatcttcaattactgtttccaatgaggaaagtgggaaaagcacgtctcaagaatcgattatggtgcccaacagcaacggtttcatccaccatgttccatgcatttccactctcccttggccttatccttttccctcagcagcacctgctatgtgccctccagggtttcccatgtcattctaccctgcagcattttggaacattccatggtttccctcacaacactcacaccattctgctcctactccaaggtctcccagttccggtcctaattctccaacactagggaaacactcccgcgacgacgacgcggaaaaacaagaccatttgcaagaagaatcaccct

SEQ ID NO: 4618 - DNA, 404 bp, Glycine max
  Clone ID: LIB3028-006-Q1-B1-E2
attcattcagaggcaataaaggagttgtaaattaagagcatggctgcacaagctcttgtatcatcatcatctcttaccttctcagccgaggctacaagacaaagtcttggaccaagatcattccaatctccatttggcttctcaagaagagcctcctttcttgttaaggcagctgctactccccctgtcaagcaaggatcagacagacctttgtggtttgcatcaaagcaaagtctttcctacttggatagcaaccttccgggtgactatggatttgaccctctgggactttcggaccctgaaggaacaggacggttcattgagccgaaatggctagcatatggtgagataatcaatggtcgttatgcaatgttgggtgcagttggtgcaatagcacctgaaat

SEQ ID NO: 4619 - DNA, 422 bp, Glycine max
  Clone ID: LIB3028-006-Q1-B1-E3
gttgggtttgttagtagtgtatgtatggcgtgtgtattgctttgcttctctttctctaagtctttgttcacgctctcttcttttctttgtcttggtctaacatccaacaacacccatacccaacaacaacattgaagggtgtcggcttcattttaagtaatttttgtggcaacaatcaaaccccatctgacgatttcgccccccaaacccagtgagttgaattccctccccagatccacatcggtacgtagaatcctgctgtggtgaggtgcggtgtattcattggacaagattggaatgcaaaggttgattgattaatactaacaaataatcatcttagccacaagagatggtgtcaagccagctggtgaaagtgaagagagatacgctacgaccatgcatgacatgccctctctgccata

SEQ ID NO: 4620 - DNA, 355 bp, Glycine max
  Clone ID: LIB3028-006-Q1-B1-E5
gaataaacatcttcagaccttcgaaactcggctgcagacagcagagccgaagtgcctataaatgtaaccacacaacaaaatgcaagagagacagtgaatcaaggggtgttactgaatacaaatagaaacactcgagtacagaataatcctacaacgtggctgagaaatgcagctgaagattccacagcagagtcttcaagtagtactaggagagaaagggatgggggtgtagttccagtatggtcccccccagcttctaatttctcagaacaatttgtagatgatgaaccggttcctataccattttcatcatccactaattgtatacgaaccggttcatcttacttgcaaaggc

SEQ ID NO: 4621 - DNA, 358 bp, Glycine max
  Clone ID: LIB3028-006-Q1-B1-E7
aagcactatagtacaaaaaggacattcattcatctatggctacccttattgctcccagcaaccactctccccaagaagatgctgaagctctcagaaaggcttttgatggatggggaactgatgagaacactgtcattgtaattttgggtcatacaactgtgtatcagacgcagcaaatcataacagtttatgaggaaatttaccaggaggatcttgtgaatcgccgagagtctgaaatcacaggacactttgagaaagccgtgtaacgatggatactggaacctgcagattctgatgctgtcttggccaatgttgccatcaatactggcaccctctcctatgtcattgaggaaattgc

SEQ ID NO: 4622 - DNA, 78 bp, Glycine max
  Clone ID: LIB3028-006-Q1-B1-E8
ttgggaagctgtttggccaggcactcccattctcactggattgcgagagcgtctacagcctctccctgcaggtgttga

SEQ ID NO: 4623 - DNA, 398 bp, Glycine max
  Clone ID: LIB3028-006-Q1-B1-E9
atctgcgtgtaaatactccaacttgtcccaattcacacctttgcctcgcgattctccgatgcgttacacctttgtccaccgattcctctttaattttcttccctttttcccccaattcaactaaattttctgctatctatattcccaggtaagtaaagtcagatttttcttggtggacggacatgcagaagaaggctgcactcaacttccaagctttcctctagaacaaaagcaaagattatactgtcataaaaaggttttgtacttattttaatgggtgctcctaagcagaaatggaccgcagaggaagaagcagcattgaaagctggagtagtcaaacacggggctggaaaatggcgcaccatacttacagacccagagttcagttccattttgcg

SEQ ID NO: 4624 - DNA, 393 bp, Glycine max
  Clone ID: LIB3028-006-Q1-B1-F1
atttgaggccaggcaagccccactcaatcagcacacctctcctcgttcacgctacccctttctgctcgtcttccacctttcaagttttaaaagtataaagatggcagagacattcctaattacctcagagtcggtgaacgagggacaccctgacaagctctgcgaccaaatctccgatgctgtcctcgacgcttgcctcgagcaggacccagacagcaaagttgcctgcgaaacatgcaccaaaaccaacttggtcatggtcttcggagaaatcacgaccaaggccaacgttgactacgagaagatagtgcgtgacacctgcaggaacatcggcttcgtctcacatgatgtgggactggatgccgacaactgcaaggtcctcgtcaacattga

SEQ ID NO: 4625 - DNA, 360 bp, Glycine max
  Clone ID: LIB3028-006-Q1-B1-F10
gcgccaagtactatgaagccggtgcacgttttgccaagtggcgtgctgtgctgaagattggtcccaacgagccatctgagctggctatccatgagaatgcctatggcttggccagatacgctgtcatatgccaggagaatggcctggttcccattgttgagcctgagatccttgttgatggatctcatgacattcacaagtgtgctgccgtcaccgagcgtgtccttgcagcatgctacaaggctttgaatgatcaccacgtccttcttgagggtaccctattgaagccaaacatggtcacccccggatccaattctgctaaggtttcccctcaggtggttgcggagcacactgttagag

SEQ ID NO: 4626 - DNA, 286 bp, Glycine max
  Clone ID: LIB3028-006-Q1-B1-F11
gtggtgttgccgttgcaaattgcacaactcattccacatggcgtgacggcatgacaattcgcagcttagatacaactaagctcgcacgtcacgttcatgcatccacgagtacctgcatacgatgatcattccccaatacgcatggtctgcaacccatagtcgcacataatctgatagagagagactcacaagtgagtgaagaatctgcagccatcatcgcaggagttctaagcagcaggctcaactgctatgagtcgtcaccagctccggtgccaggggtcccccc

SEQ ID NO: 4627 - DNA, 425 bp, Glycine max
  unsure (1)..(425): unsure at all n locations
  Clone ID: LIB3028-006-Q1-B1-F12
caatttcttatctttaccctttcccttccccttcttcaacacacacacaatatctcttccaattttctcctccaatttcaatttctcgtcgtccctcattatggctcgtctctcgatcgtcgccatcgtcgccgccgtgctcctcctggccctctccgccacccccgcgacggcgcgtccctgcaggagcttcataatctcctcctactccttccgcaaccctaactccaacacgttcgccaccatcaccgagatccgatccttcacccctctctacatcaccgacaaacccccctcctatgcccttttcttcccccacgcgactcagctccctcagcatgagagcgtgcgcccacgcgcccctctagggttcgcctccgcctacgatttctcttcnctccgcgaccgcaccaaggacatcctca

SEQ ID NO: 4628 - DNA, 394 bp, Glycine max
  Clone ID: LIB3028-006-Q1-B1-F2
ccatgattactgccattttgtgggttggttatcacgggcaagctgggggaactgccattgctgatgtaatccttggtacaactaacccaggatgaaggttacccatgacatggtacccacaaggttacttggccaaagtgcccatgacaaacatggacatgcgtccaaacccaacaacacggtacccaagaagaacctatagattctacaaaggtcctgtagtgttcccattcggacatggcctaagttactcaagattcagccacagcttatcacttgcccccaaacaggtctcagtgcccataatgagcctccaagccttgacaaactcaaccctctcaagcaaagcagttaacgtgagccatgccaattgtgatgactcattggagatgga

SEQ ID NO: 4629 - DNA, 400 bp, Glycine max
  Clone ID: LIB3028-006-Q1-B1-F3
tggctaacccacccccagttcgtccatggtttcgcttagcctcaattcgctctagcccacccgcacttcaccttgggcaactgcccctgcccagaagttaccctgccaacatttacaactggttagctagatcatctgcacagattcagccaagtcaagcatctccccagcctcacaaggaaccttcttctcaacataacagattctcctcgtcttcactcgctacttctccagagaatcacaacattacccgtattcccttgccaagtacctctcactcgccaaaaagttcaactcccccgtctcagcttgtcctcatagctccacgatagcaaaatccctcgccaggctggtctttcgggttctagcgggatcctgtgtgctgcgttgaactgtttgt

SEQ ID NO: 4630 - DNA, 418 bp, Glycine max
  Clone ID: LIB3028-006-Q1-B1-F4
ctcatgctgtgattgaaccatttgtcatagcaacaaacaggcatcttagtgtgctccaccctatttataaacttttgttgcctcactatcgtgacaccatgaacatcaatggactcgcaagacaatcactcatcaatgcaggtggcattattgagcaatcatttctgcctgggccatttgctgtggagatgtcttcggcagtttacaaggggtgggttttcactgatcaagcccttcctgcggatcttatcaagagaggaatggcagtggaggatccatcctctccctatggccttcgccttgtgatagatgactacccttatgctgttgatggactagagatatggagtgctatccagacatgggttaaggactacgtctccttgtactatgccacggatgatgcagttaagaaaga

SEQ ID NO: 4631 - DNA, 379 bp, Glycine max
  Clone ID: LIB3028-006-Q1-B1-F5
tgaatacgtgatatctcacaaggcctatgcgagggtgggattgcttgggaacccgagcgatgtctactacggcaaaacgatagcgttaagcgtcgccaacttcttcgccaccgtcacgctgcgtccctccgaccagttaatcctccaaccccaccccctccacgatctccttcatttctcatcgctccctcaattggtcaacaggttgagctcccaaggttactatggaggcgtgcgattgcttatggctatttgcaatgtcatctacgcgtattgcagagagaacgccatcgatcttggcgacgacaatttcactctctcctacgacaccaatatccctcgccaggctggtctttcgggttctagcgggatcgtgtgt

SEQ ID NO: 4632 - DNA, 396 bp, Glycine max
  unsure (1)..(396): unsure at all n locations
  Clone ID: LIB3028-006-Q1-B1-F7
caaattcattttaatcctaattctgcacttcttgatcattcgatttttctcctcaagatgcagatattcgtaaaaactttgaccggcaagaccatcacccttgaggtggaatcctccgacaccattgacaacgtaaaagctaagattcaagacaaggaagggatcccacctgaccagcagagacttatctttgcgggtaaacaacttgaggatggtcgcacccttgccgattacaacatccaaaaggaatcaaccctccatctcgtgcttcgcctcaggggtggcatgcaaatctttgtcaagactttgaccgggaagaccatcacccttgaggtggaatcctcggacaccattgataatgttaaggccaanatccaggacaaagagggcatcccc

SEQ ID NO: 4633 - DNA, 402 bp, Glycine max
  Clone ID: LIB3028-006-Q1-B1-F8
gcgaagaaagattcgaaacgaagaaagaaagcgttgtgaagaatggcggaagagggacaagtgatcggtgtccacagcgtagaggagtggaaggaacatctcaagaagggagaagagtccaagaaattgattgtggtggattttactgcttcttggtgcggtccatgccgtttcattgccccaattcttgcagagtttgctaaaaagttgccgaatgtcaccttcctcaacgtggatgtggatgaattggagactgtttccaacgagtggggaattgaggctatgccaaccttcctgttcttgaaagaaggcaagctggtggacaaggttgtgggtgccaacaaagacgagctgcaattgaccctacgcagacatgccgcaactgccgggtgcttgaagtgc

SEQ ID NO: 4634 - DNA, 375 bp, Glycine max
  unsure (1)..(375): unsure at all n locations
  Clone ID: LIB3028-006-Q1-B1-G1
atttgcgtgagaacgannaaagaaannaaaaaaccctaacgcactcgagaccctgagatttttcatcttcgtttcccattctccttttgattatggacgtcgaagtgcggcagatcttcaacaagttcgacaagaacggcgacggaaaaatctcggtaacggagctgaaggacatgctcgcggccctcggatccaaaacgacggacgaggagttgaaacgcatgatggaggagctcgaccagaacggcgacggtttcatcgacctcaaggagttcgcggattttcactgcaatggcggtgccggaaaggacgactcgaaagagctccgcgacgcgttcgatctctacgacgtcgacaagaacggcctcatctccg

SEQ ID NO: 4635 - DNA, 395 bp, Glycine max
  Clone ID: LIB3028-006-Q1-B1-G10
ggattgggtagttttgcagcagctattcattcttcaaagttatgggtcatgaatgttgtgcctactatagctgaggcgaatacactgggtgtgatatacgagcgaggacttattggcatctatcatgattggtgtgaagccttttcaacatatccaaggacatatgaccttattcacacccatggtgtctttagtctgtacaaggataaatgcaaggccgaagatatacttctggagatggaccggattttgcgaccagaaggtgctgtcatattccgcgacgaagtagatgtgcgaattaacgtaaagaaaatacttggaggaatgagatgggacactcaaatggttgaccatgacgatggtcctcttgttcctgacaatgtgcttgttgctgt

SEQ ID NO: 4636 - DNA, 397 bp, Glycine max
  Clone ID: LIB3028-006-Q1-B1-G11
ctcgagcctaatcggctcgagcttcacaacattctcacataacagctttcaaactctgagaaagaatggctgcgaagacattgatgagtactgctatctcaaccttcgaatctctcctttcttcctcaaaatccatatttgccaccgcagttcctctttctaactttggtgtcaccaatgcctcttcgtctcgcttttctatgagtgctgactggatgccaggccagcctatacctccatagcttgatggttcagcacctggtgactttggattcgaccctcttcgtcttggtgaagtaccagagaatcttgagaggttcaaggagtcagaagtcattcactgcagatgggccatgcttgctgttccagggattttggtttcagaggcattgggctt

SEQ ID NO: 4637 - DNA, 416 bp, Glycine max
  Clone ID: LIB3028-006-Q1-B1-G12
ctccatgctaccttgtgacagagggaagatgctgctcaactgcatcaatttatccttcatgctgctcttgatattgttcaggaccttgcatggactactagtgccatgtacttgaaatcagtagacaggtttaatgaacttgtggtgtcagtgtatgttacagctggtcatatcctttatacttgggattcttttatagtttagataaaaagaattgcattactcttgtttgttcacttttttttaatctttttttttccaaataaatgaagtactgagtacccaactttgaggaccaatcaatttagttagcttctttaattgtataattatgccattgtcactggcaggggagcaaaatataagtgcctagagtggagaagtcttaaactaaaagcttacagcaagcacatatc

SEQ ID NO: 4638 - DNA, 398 bp, Glycine max
  Clone ID: LIB3028-006-Q1-B1-G2
gtgagctataagctagtttatcgtgaggagaatatgaagttgtttgttttctttgttgctgcagtagttttggtagcatggccatgccatggcgcaggctaccaaaggttccctctccgaatgaaaactggctatggtgagcgttcttcggaggtaaaatgcgcaagttttaggcttgctgtggaagcacacaacatccgagcctttaaaaccattcctgaagagtgcgttgaaccaacaaaggactacattaatggcgaacaatttagatcagactctaaaacagttaaccaacaagctttcttttatgctagtgaacgcgaagtccatcacaacgacatatttatattcggcatagataacaccgtactctctaatatcccatactatgaaaaaca

SEQ ID NO: 4639 - DNA, 117 bp, Glycine max
  Clone ID: LIB3028-006-Q1-B1-G3
ttttttttttttttttttttttttgttatgagtggcagaaatattattattaacatggtatattcgggtaagattttattatgttttgatgcagtcatgattcatgtgtttggtaat

SEQ ID NO: 4640 - DNA, 381 bp, Glycine max
  unsure (1)..(381): unsure at all n locations
  Clone ID: LIB3028-006-Q1-B1-G4
actcaccctcattaccancacgaaagcatagccaaaaccttttttcgaagtccccgattttccctaatggctccggcaaaggcaaagaagaagcggcggagaagaagccagcggcggagaaagcaccggcgaagaagaagccgaaggccgagaagaagatctcgaaggaaggatggagcgagaagaagaagaagcgcacgaagaagagcgtggagacctacaagatctacatcttcaaggtcctcaagcaggttcaccccgacattggtatttccagcaaggccatgggcatcatgaacagcttcatcaacgacatcttcgagaagctcgcccaggaagcgtcgcgtttggctcgctacaacaagaagcccaacatcacct

SEQ ID NO: 4641 - DNA, 402 bp, Glycine max
  Clone ID: LIB3028-006-Q1-B1-G5
caaagtcccaccacttggttttcataacccattctccatctcagaatggagaatgcgagaataagccagtggttgatccttctggtgtgtgcgctgctgttgctgatatcagaagcttcttatgtgccaatcactattgttcagaacgcggtagcaaaaggagctgtttgtttggatgggagtccaccagcttatcattttgataggggatttggatcagggattaacaattggttggttgcatttgagggaggaggatggtgcaacaatgtcactacttgccttgctcgcaagaccaatcgtttaggttcatctaagcaaatggccaagctaattgccttttcaggaattttgaataacagggaaatgtttaatccagatttctacaactggaacagaatc

SEQ ID NO: 4642 - DNA, 409 bp, Glycine max
  Clone ID: LIB3028-006-Q1-B1-G6
gtgttaaacttcagcgcttatggataatggattgcattggagacaaaggactaggtgttgtagctacgacatgtaaagatttgcaagaattgagggtttttccatctgttccctttggggatccagcagctgtcacagaaaaagggctggttgcaatatcaatgggctgccctaagcttcactcgttactctacttctgccaccagatgacaaatgctgcactcataacagtggctaagaactgcccaaattttattcgattcaggttgtgtatccttgatgcaacaaaacctgaccctgatacaatgcagccactggacgaaggttttggcgcaattgtgcagtcttgcaggcgactcaggcgcctatctctctcggggaaattgactgaccaggttttcctttacat

SEQ ID NO: 4643 - DNA, 378 bp, Glycine max
  Clone ID: LIB3028-006-Q1-B1-G7
ctcgagccgaatcggctcgaggacagatgaactggtttttgttttggcggcaacgaatcttccctgggaattggatgcagccatgctccgacgtcgtgagaagcgtagccttgtaccacttccagaaccagtagcaagaagagcaatgttcgaggaactccttccgcaacagcctgatgaggaaccgatcccctatgatatactggtggacaagacagaaggatattccggatcagatatccgattactctgtaaagagacagcagtgcaacccttaagacgcctaatgtcgcaacttgagcagagccaggatgtggtgcctgaagaagagttgccaaaagttgggccaatcaaatctgaagatatagagacagcttt

SEQ ID NO: 4644 - DNA, 259 bp, Glycine max
  Clone ID: LIB3028-006-Q1-B1-G9
cttctccaaagagaaagaacagcaagcaatcgttacccattacctatttcactttccacaccactctcatcctatatctctttcttccttattcctctgtcaagccactcgataatatgcagagtctttcaccacctacttccaacgcgctcaattttgaagcatgtttttcgccggcaacttgggccttcaggcgaatccctgttaaatgcccttttgggtttgagccggttaactacggagtccggtccagcccaag

SEQ ID NO: 4645 - DNA, 327 bp, Glycine max
  Clone ID: LIB3028-006-Q1-B1-H1
gacttcaactccactgttactccgtgcaaaagtcacgaactgaacatggatctcttgatgaactgtatggagccagtggataaatgtttgaaggatgctagcatggacccaagacgtgttgacgagcttgtacctgtaggtggttcaacaaggaatcggagcgttcaggaactgctgcaggacttcgttaattgacaggagctgtgcagcatcaacaatcctcatcaacctgttgcatactgtgctgcagttcacgcttccattgtaagtggatacggcactcacagtgttcaagatcgtcacatccgtgatgtaacgccaccatct

SEQ ID NO: 4646 - DNA, 425 bp, Glycine max
  Clone ID: LIB3028-006-Q1-B1-H10
cggctcgagcggctcgagtataccttccttgctatgacatactccgcaattggttggaggaattcacagctaaaaaggcaccaaccacaactacttatgtacctctagtagctggttcattggcacgctctctagcttgcactacttgctaccctattgaacttgctaaaactcgtatgcaggcatttaaagagactcaaattggtaaaaagcctcctggagtgatccagactctgctaggtgttgtttcaaatgtcaagagcacaaacactccacagaacagcttgcaaggttatcgtgttttgtggactggcatgggagctcaacttgcccgtgatgtacccttctctgctatttgttggtcgacacttgaaccgactagaagaaaacttcttggtttgattggaggtgatgatgccaatgca

SEQ ID NO: 4647 - DNA, 411 bp, Glycine max
  Clone ID: LIB3028-006-Q1-B1-H11
attgatgccaatggtatcttgaatgtctctgccgaagataaaaccactggccagaaaaataagatcactatcaccaatgacaagggtagattgtcaaaggaagatattgagaagatggttcaagaggctgacaagtacaagtctgatgatgaagagcacaagaagaaggttgaggccaaacacgctttggaaaactatgcatacaacatgaggaacaccgtgaaggatgacaagattggtgataaacttgacccggctgacaagaagaagattgaggatgcaattgagcaagcaatccagtggttagacagcaaccatcttacataagcatatgagtttgatgacaatctgaacgaattggaaagcatctgcaatccaatcattgccaagatgtaccaaggtggtgctggt

SEQ ID NO: 4648 - DNA, 413 bp, Glycine max
  Clone ID: LIB3028-006-Q1-B1-H12
atttgaggccaggcaagccccactcaaccaccacacctctcctcgttcacgctacccctttctgctcttcttctacctttcaagttttaaaagtataaagatggcagagacattcctatttacctcagagtcggtgaacgagggacaccctgacaagctctgcgaccaaatctccgatgctgtcctcgacgcttgcctcgagcaggacccagacagcaaagttgcctgcgaaacatgcaccaaaaccaacttggtcatggtcttcggagaaatcacgaccaaggccaacgttgactacgagaagatagtgcgtgacacctgcaagaacatcggcttcctctcaaatgatgtgggactggatgccgacaactgcaaggtcctcgtcaacattgaacagcagagccctgaaattg

SEQ ID NO: 4649 - DNA, 405 bp, Glycine max
  Clone ID: LIB3028-006-Q1-B1-H2
tattagctaatgttttgggaatttcagttataagactctcaggtggtggtgcatcgctgagttgtgtgagagtgagaaagagagagtgtgtgtgtgtgcagaagatgtggccattcagcagaaaaggggcttctggtttttcatcatcatccacggcagagcaagtcactgaaggaattgatggaactggtctcactgccattgtcacaggagcatccagtggtattggcactgagactacacgtgtcctttcattgcgtggtgtccatgtgattatgggtgtgagaaatatgcttgctgctaaagatgtcaaagaaacattacttaaggagattccctccgctaaagttgatgccatggagttagatctcagttcattggagtctgtcaagaaatttgcatcag

SEQ ID NO: 4650 - DNA, 373 bp, Glycine max
  Clone ID: LIB3028-006-Q1-B1-H3
ggctttatggtgagggtgaagatgaaactaaaggtgtatatactgccaagcttgaggaactcaaaaagcatggtgatccaattgatgagcgttacaaagaattcatggagaggggtactataatcgaacagtttgtctattgtataaatagttacagacaagttgcaatgtcgaatgatcccagatttgagcacattgacattaacgagaaacagaaggtcataaatgaatgtgttgaagctgaaaagtggtttaatgagaagcagcagcagcagaactcacttccaaaatatgccaaccctgtactcttgtcagctgaaataagaaagagagctgaagctgtcgataggttctgcaagccgattatggcaac

SEQ ID NO: 4651 - DNA, 216 bp, Glycine max
  Clone ID: LIB3028-006-Q1-B1-H4
caaaacccctttttggatttggaaaaaaataaccattgtgttgacaaaaacatacaatttgggccgacaaagagttggttgagcaatatggtaattacttcccatgtataactttatagtttaactacataggtccctcattttttgtcccttcagcgggatcttgttttatgtactagtataatcaagcaaaattataagaaacttatttatgat

SEQ ID NO: 4652 - DNA, 401 bp, Glycine max
  Clone ID: LIB3028-006-Q1-B1-H5
ctcatgggatcccaactcaacatatatccatgaacccccatacttcaagaacatgacgatggatcctcctggacctcatggtgtaaaagatgcttattgcctgctgaattttggtgacagtataaccactgatcatatttctccagccggaagcattcacaaggatagtcctgctgccaaataccttgttgagcgtggggtggaacgcaaggacttcaattcttatggaagtcgtcgtggcaatgatgaggtgatggcaaggggaacttttgccaacattcgccttgttaacaagctcttgaaaggggaagttggtccaaagacagttcacattccaacaggggaaaagctttacgtgtttgatgcagcaacgagatacatggcttctgggcaagacacca

SEQ ID NO: 4653 - DNA, 361 bp, Glycine max
  Clone ID: LIB3028-006-Q1-B1-H6
ggaggagacgacgacgcggggaatctccggtctccaccgacatcccttctcttccaaatcctgtgatcccattccaatccgttccgttcagctcaatctcaaaatctcaatggccgataatgagcaaccgaataacgatgaggcaagtcctcttctccaccagccccatccccaacccaaatccgaatcaccaacgccacctgagactcccgagtttctcctcggctggaccgctgatgggctccctctggcccacgccagcgtcgtgggccagcccatgggccgcgccccttggaactcctccatctgcgcctgtctcggccaaaacgatcacttctgcagcagcgatctcgaagtttgt

SEQ ID NO: 4654 - DNA, 406 bp, Glycine max
  Clone ID: LIB3028-006-Q1-B1-H7
caatgatggagttctactaagaaaccatattccacgtatccttaaaaagcacttcaggggaaagccatattacgttgatcttcttgatttgtttaatgaggttgagttccagactgcttcaggacagatgatagatctgatcaccacactggaaggagaaaaagacctgtctaaatacacattaacactgcatcgacgtattgttcagtacaagactgcatattattccttttaccttccggttgcatgtgcattgctcatggcgggtgaggatcttgacaaccatgttgatgtaaagaacattcttgttgagatgggaacatactttcaagtacaggatgattatttggattgttttggtgattctcaaacaattggaaagataggtacagatattgaagatttc

SEQ ID NO: 4655 - DNA, 379 bp, Glycine max
  Clone ID: LIB3028-006-Q1-B1-H8
gggttatttttgatccctcaaagctaatttctctctctctttttttatttccgggactgaagaggttgtctatttgaaatctccttcatcctttcctttcttgtataaaactttttaaatttttttgtcagtgggtgttttaattaaccacctgttcttcaagttttagaaagacgcaggttgaattaattagtatcatggcagctttgatggatttttacagcagcagcccagagtttcaacttcactcagatccattcaggggagaactaatggaagttcttgaaccttttatgaaaagtccttctcccaactatttcccttcctccccctccctccctaatctttactcaaacgggttatccagcaacacccaaag

SEQ ID NO: 4656 - DNA, 414 bp, Glycine max
  Clone ID: LIB3028-006-Q1-B1-H9
acgatcaaagcaataatcaggagaaagaatacatgggaaaatggaggctcacgtgtacaatgatgatattgaaattactgccacgcttttggatgcaatgaatatcaaggtgatagcattggctggggcactccaaactgtcaatgatcaccaaagcacatcaaaatgaagcatgccacttacatgtgttgaaactttatgcatatacaatgaacaacagtataaacaacaaccccaaatcacaatcacaatatggataagtcaagaaattattctgatgtgtacatggctttctcgatactaaatctgacaagtgttgccttcaaacttaattgatctgtcaacttgcattacacttcatgatcatctgtaattacaaccattgtaacatgcatatattattcactccttgga

SEQ ID NO: 4657 - DNA, 406 bp, Glycine max
  unsure (1)..(406): unsure at all n locations
  Clone ID: LIB3028-007-Q1-B1-A10
tacgtctccaactaatcatacaaattgaaaaacataaacatatccaaaaccaaataacttaaataatttcaaccctccaatcctcctcccccctccaaactcccctttccaatcctggctcccttgggggttgtttgagttttctttccctcaatttaattgaaagatggcttgcttggtatctcgctcgggaagggaattgcagaggtacaacaacatgggtggccggcaagttgttgggtgcataccttatagatataaacaagacatagagggtaaaattgagcaacgaattggaagtactagtggttagttcacagaaaggtcaaggattgatgttccctaagggaagatgggaacttgatgaatccgtanaagaagcagcttatagggaatcccttgaaga

SEQ ID NO: 4658 - DNA, 361 bp, Glycine max
  Clone ID: LIB3028-007-Q1-B1-A11
actacatcatcacctaatacccagaccatctcgccgcacacagcgcactgcagcgttgtgtcttcgcacgccgccgtcgacgtcgtccgccatcgtcacatctcgccggagcgtcgcgtcgctggctaagtgccaagtgctgctgctgattttgtggcttgttgataaaaatgagacttataacacataacatgctgtcatcgaacatgaagggtgttgtaaatggatttcctttgcggattgaagcagagaaagttgtagaaaagactgtggaaatgaacggtgagtttctgaaaaagatgtttgagaagattgattggaaggcttttgttgatgcatcacgagcagtgggatacaccga

SEQ ID NO: 4659 - DNA, 309 bp, Glycine max
  Clone ID: LIB3028-002-Q1-B1-H10
aaaaaatctttatgcattcggcacaatcgattatgcttaatgttgtggtcaccgattcatcacatcgagttacgcatatctcacacgcacgaaatctagtactaacatcaacaaatccgtcttgctatacaaattgctgcgaaactgtggtggcatggatctcatctatgattgtgctgatccttatcctgattgtcgagtcttgtatgcatttgcatctatcagcatttaagactcattcatgtttgagtgtaaggaaacaactgctcatctgagctacgctctatcttttgtagggatatatgtatc

SEQ ID NO: 4660 - DNA, 406 bp, Glycine max
  Clone ID: LIB3028-002-Q1-B1-H11
gaagaagagagggaaaaaccgattaccgtgccaggattcggttgattaatcaggacaagaacaaatataacactccgaaataccgatttgttgttcgctttagcaacaaggacattgttgcacaaataatatctgctagcattgctggcgatattgttcttgctgcagcatatgcacatgagctgccacgatatggtcttgaagtagggcttacaaattatgctgcagcttattgcactggtctcctgttggcccgaagagtcctcaaaacacttgaaatggatgaggagtatgaaggaaatgttgaggctactggagaggattattccgtggaacctgctgagagcaggaggccattccgtgctctccttgatgttggtcttattaggactacaaccggtaaccg

SEQ ID NO: 4661 - DNA, 287 bp, Glycine max
  Clone ID: LIB3028-002-Q1-B1-H12
aaagagagcaagagcagtacgtgaactggttgaagaaaggtgaagcagcatttgtggcaaaagaaaagtcattgacggaatcatcagagacacattcttgatcaatgtttactcatattttagtcaatgtttttgagagttcggaaaatgattaggttctccgataagtaaactgattagtacaatgtagaataatgtttcttactttcttttgtaaatgatatgcacctcaaattttgtagaagctatataagagaacttctataaaagttaagtgcataagttga

SEQ ID NO: 4662 - DNA, 383 bp, Glycine max
  Clone ID: LIB3028-002-Q1-B1-H3
agtaactccacacaacacaacacaagctaagagaattaaattccaaaccccaaagaaagagaatatccgaaaaatcctaaccagccaaaggagaaaaaagaatcaagttggtgctggcaagagaagggaggcaaaaagaaagaaaaaaagaaagagctacaaagagagggtaccctcgtcgtaaattgcactgtttttgtgtccgttacagcacttttaggagttcctctattctagtaacctctgccaaccaacaaaacaagcctgaaaataaaatagagatgctgcctccttgctggcgatcgttcgggaagatacagtaatgctactgacatgggaaagaacgggagttggttttctgcaatcaaaagagttttcacaca

SEQ ID NO: 4663 - DNA, 407 bp, Glycine max
  Clone ID: LIB3028-002-Q1-B1-H5
attctttcatgtacaagcaagaacagatcatagaagcagatgataatactttgagcatcatgcttgcagaacaacaattggtgcagcttcctcatctagaaagtcattctttgccagaagcaaagaagcaaagctcagtagtgtccccagatatcagacgagattaataacaacgaagatgatgatagtcctcaggagggtttatccaacactacagagaaggtgagcactgattggagagctcttgacaagttcagtggcttctcagttgagccatgaatagaggcatgaaatagaatgggtgtcaagccttgcaactcatcagactactactagctcggacatggcattgctgctactgcagaataatagtacggaaaatgacaggaacaacaagttcaacccgt

SEQ ID NO: 4664 - DNA, 381 bp, Glycine max
  Clone ID: LIB3028-002-Q1-B1-H6
attctgatcgctccctgagagaacacgtcgtggccgttgcagaagaaaattgcaagatgaagttcaagatcgcgaagcccaccactggatggcagaggaaactcgagatagacgacgatctgagcctgcgagcattatgggacaagaggatcgcacaggacgtcatcggagatgcactcggtgaggaatttaagggctatgtcctcaaaattaccggatgttgtgacgtacacggatttccaatgaagcagggagtgctgactcctgatcgtgttacacttttgcttcagaggggaacgccttgcttccgtggatatggaacgcgtaatggagagcgtacgagatagtctgtacgtgggtgcaatgtcagcccagacctct

SEQ ID NO: 4665 - DNA, 404 bp, Glycine max
  Clone ID: LIB3028-002-Q1-B1-H7
atcttcttccaaataaaaaaaaaaaaaagaaaaaggaaggagataggaaagggttaattgaatccaaaaaaaaagaagagaaaaacaaaatgggcagggtttggacttcgatgatagcattgttgctttgcctgatgacatcatcggttcggggcgaggacccttacatttactacacatggaacgtgacctacggcaccattgccccattgggtgtcccccaacagggtatcctcatcaatggtcagtttcccggccccgaaatcaactccaccagcaacaacaacgtggtcatcaatgtcttcaacaacctcgatgagcctctcttgttcacatggcatggtgtccaacagaggaagaactcttggcaagatggcacattgggtgcccagtgccctatcgcc

SEQ ID NO: 4666 - DNA, 282 bp, Glycine max
  Clone ID: LIB3028-002-Q1-B1-H8
catcaattgaattgtgcatacagaaacagttctgcagattatggtggtggtcccaatttccatgctactgaggataagccagtcatattcccccagtcctttgttcaacccaacactacaacacagtcggcaagtttggttgcaccttcatgtgatctaactggtcttggagttccggaggatggacagaaaatgattagtgaccttatgacaatctatgatacgaatgttgtaggaaacaagaacttaagttcctccaactgtgtagctgtaaaaaatcat

SEQ ID NO: 4667 - DNA, 395 bp, Glycine max
  Clone ID: LIB3028-002-Q1-B1-H9
aaagaatctttataaataggggactatattttttgtttaaagtaaattcatcgatctttcacttccactttcgtttttctccctctcaggacatcctgtattaacagtgaaaagtgcatctgaagagacagaatgcaaggacccgggggtggcagggatcgtttctttgattttggcgatccttttggtggttttggaggctttggttcctttggacctcccaggagtttaatctcaagcttttttgggggtagggacccatttaatgatcctttcttcgcccgaccttttggagggatgtttgagtctagtcgctttggtggtcctactggatttcctttcccccctgatatgaatccatctgggttccttgagcatccagcctcgggtttgga

SEQ ID NO: 4668 - DNA, 407 bp, Glycine max
  Clone ID: LIB3028-003-Q1-B1-A1
agcagcctgagctaggtggagggaccgtagagcttggtcctcatactgctgtccaccgttggaccggtgatccaagacaacctaacaaagaggacatggggaggttctattctgctggaagagaccccgctttctattctcaccatgccaacgtggatcgtatgtggaatatatggaaaacaataccaagtggaaaaagaagggatttcaaaaaccgtgattggttggaaacctcctttttcttctacgatgagaacaagacccttgtccgtgtgaaggtgaaagacagccttgacacgaataagatgggttatgtttaccacagatgtcgcaattccaatggctccaaaaaaagcctaaacccaaaagaactagaaaggctaaaaaggtggcgttcgcacaacaat

SEQ ID NO: 4669 - DNA, 354 bp, Glycine max
  Clone ID: LIB3028-003-Q1-B1-A10
gaacaactgatggaaagaaatggaagtgtggtaagaatgtggtgcctaaccagaagtactgtgaaaggcacatgcacagaggtcgaaatcgttcaagaaagcctgtggaaacatctcaagttaactctcctttggcaacaaagccttgtagcaagtcacacaccaaaccatcctcaaagacacaatttgaaatttcaagtccaaaccttatcgccattccacatattgacacatcaagtaccccatcaaggagcctcagtgtcaccaattgctcttctgctaataataggtccaaaaatacggcacgttatgctgactacctcatgtcgttttcttccgcgtccacagtgtccc

SEQ ID NO: 4670 - DNA, 410 bp, Glycine max
  unsure (1)..(410): unsure at all n locations
  Clone ID: LIB3028-003-Q1-B1-A11
gtatttgagaaaaccactgtgaagacagctgggaatttgtcacagttgccaccattggaggtgcctcggattcccgatgcattgaggcctccatctaatacgggaagcggtgaatttgaagttacatatcttgactcggatactcgcatcacaagaggagacagaggcgagctaagggtctttgtgattgcttgagttcctggtgaatgcaactatgcactatgcattttctctgttggacttaaaaaaaaaaggtttcaacaccttgtgccatcattttgtttagttttttcctcctgatggtatttgttctaagttcttcaatattgtaaacatgatggaattaaactctactatatagttccaaggaagcanggtactttttgtttaagtgtaacatatttcttttt

SEQ ID NO: 4671 - DNA, 409 bp, Glycine max
  Clone ID: LIB3028-003-Q1-B1-A12
ctcttcccccattttttcctctttcttcctcgcctagctagctccagaaaattaggatctgcttcagatctagtgtttccctgtcccaaatcacgagtccattgagtttgattttgtggatgaaaagcatagatagggcttttgcaaaactctccaatgtttcttgaaattatatgaccatgcgtcgaattcgtatgctgcactccttctccgtcgtgttcctctactggttctacgttttctcatgaactccctcttaaatccgtgattaattagatctatctccttagttaatccttgtcttttccaataattaattagatctgcgtctcctttttggattagtttcttttttggttctgttatcaaatcaaataacaaatctccttctcggaaatggcatcaccga

SEQ ID NO: 4672 - DNA, 355 bp, Glycine max
  Clone ID: LIB3028-003-Q1-B1-A2
caaaagaagggaactgttgaaggagtctcgccaatggtatcagaatgggatgagtatcgatatattattttcttggcatatagttagtgtccagcaaatatcatattcgttatttttgcactttagaaactcgtttcctccaagttgtggtctagatgcttcttgttcgaaggcctgtgagactgtagtcaatttcttagtgtttcggttttgattgaacctgtacatgaactgtcaatttttctcgtgtaaggtttctcatgaaataaccctgttgacacaataacgcagttatttgcatcgatctttccaatcattgtatggcaagaagaagctcaagggacacgagatctaa

SEQ ID NO: 4673 - DNA, 325 bp, Glycine max
  Clone ID: LIB3028-003-Q1-B1-A3
attggttcattctcaagttttgttaaggacttgtatggattgggaggcaggagacttggactgacttcactcccaccattgggttgcctacctgctgcaaggactatatttggtttccatgagaatggttgtgtctcaagaatcaacactgatgctcaaggatttaacaagaagctcaactcagctgcaacgagtcttcaaaagcaacttcctggtcttaagattgcggttttcgacatttacaagcctctctatgaccttgttcaatccccttcaaaatctggttttgtggaggcaaacagaggatgctgtggtacccggactg

SEQ ID NO: 4674 - DNA, 354 bp, Glycine max
  Clone ID: LIB3028-003-Q1-B1-A4
cttcgatcatacacttagttgcttccaattaagatggttctgctagagaagctctgggatgatgttgtggctggccctcaacctgagcgtggccttggcaagctcagaaaactcaccaccctcaaaactattgatgaaggagaaagtagcaagctgcagaagacgttgtcgatgccgtcgacaccaacaaccccgatgactccgacgactccaacgacaccgggatcggcccgtaaagctgacaacgtttggaggagcgtcttccatcctgggagcaactccgccacaaagaccatcggtgctcagatgtttgacaaaccacttcccaacactcccactgtctatgactggctg

SEQ ID NO: 4675 - DNA, 371 bp, Glycine max
  Clone ID: LIB3028-003-Q1-B1-A5
ctttgacaagtaccaccctgggttcttcggcaaggtcggaatgcgctattttcacaagctccgcaacaaattctactctccgatcctcaacatcgacaagctctggtccctggttccgcaagaagtgaaggacaaggcctccaaggagaacaaggcgccgctgatcgacgtcacgcagttcgggtactttaaggttctcggaaagggtgttttgccgcagaaccagcccgttgttgtcaaagctaagcttatttccaagatcgctgagaagaagatcaaggaggctggcggtgctgttgttctcaccgcctgattttattgaccggatcgcctttttcaacgatttagggtttttttttggtttggttttg

SEQ ID NO: 4676 - DNA, 409 bp, Glycine max
  unsure (1)..(409): unsure at all n locations
  Clone ID: LIB3028-003-Q1-B1-A6
ctttgttattacctctttccaaagtccaaattttctagttccaccaaaccaaaccaaaccaaaatggcagcagcctcagcctcatccatgatatcaacaccagccttatctccaaccatccaaaagcaccatcatttgaagccatccaacgtgtgcttccaaggtcttagacccctcgcaaggttcaccaaagcctcatcaaccaaagtgagcaccaccaccaaaagggttattccaaagggtggtgttagagctgaactcaactcagcccttgtgataagcctcagcactggcctctccctcttcttgggaaggtttgtgttcttcaacttccaaagggagaacgtggcanagcaagtgcctgagcagaacggcctcacacactttgaggctggtgatacacgtgcca

SEQ ID NO: 4677 - DNA, 327 bp, Glycine max
  Clone ID: LIB3028-003-Q1-B1-A7
cttcctcctcttgcattcggcaaccaaaccatgcagcgcacggcgttggcgacagatgaaccacggcggcgctccggcgacgcggagggggagaaggtgttcaaggggagcgaggtgttcggtgacacgtcaccaaattacttgaagaccattttggccctggcgttgtggctcggaaccattcatttcaacgtcgcgttggtgctcttcgcaatcttcttcctctctctccacaaagcacttttgcttttcggtttgcttttcgtgctcatggtaattcctgttgatgaaaagagcaaattcggtcgaaaattatccaggtacata

SEQ ID NO: 4678 - DNA, 292 bp, Glycine max
  Clone ID: LIB3028-003-Q1-B1-B1
ataataaccccctttttccctctccatacccttttgctttctttatccaataataagaacttcccacgagtggctttaactggtctggtctggtctggtcggacacacaaaaatattagtatggagaaggtgagttttgtgaagaatggagagcttagattgcctccggggtttcgtttccacccgactgatgaggagctggttttgcagtacttgaagcgcaaggtcttctcctgccctctgccagcctctatcattcctgaggttgatgtttgcaagtctgatccttggg

SEQ ID NO: 4679 - DNA, 398 bp, Glycine max
  Clone ID: LIB3028-003-Q1-B1-B10
cggctcgagtaagattcatgctgctggaattgccaagcatggtgaaatagactatgaagctgttgtgaagcttgcagagggatttaatggggctgatcttcgaaatgtctgcacagaagctggaatggcagcaattcgggcagagcgtgattatgtgatccatgaagattttatgaaggctgttaggaaactgaacgaggcaaagaaacttgaatccagtgcacactacagtgctgattttggtaaagactagaatctattgcaaaattcttgcagagccatggatatctaggcagtgcatcttgagttggaaatacctcacgcaagttactcaattcgtacggctaagcgtgatgttccctttgggttgttctggcttgtgttttccgaattctaaa

SEQ ID NO: 4680 - DNA, 402 bp, Glycine max
  Clone ID: LIB3028-003-Q1-B1-B12
gattatgcgcagtgcgatgtgttcacgggaacgtgggtggtggacgaatcgtacccgccctatgatcccgccacgtgtcccttcatcgagcgcgagttcaggtgcaaagggaatggacggcccgatctcctttacacccgctataggtggcacccacttgcctgtaatttactcagatttaacgggctagattttctggagaagatgagggggaagagcatcatgttcgtgggagattcactgagcaggaatcaatggcagtccttgacttgcttgcttcattcagcagtgcccaattcaccttatactttggatagagttggagatgtttctattttcacacttacggagtatagggttaaagtgatgcttgataggaacgtgtatctagttgacgttgtc

SEQ ID NO: 4681 - DNA, 236 bp, Glycine max
  Clone ID: LIB3028-003-Q1-B1-B2
ctgtggttatccatgtcccctacagactaaggaaaggattccggaagattcatgtcaggcttgtgagagaacttgagaaaaagtttagtggaaaagatgtaatcttgattgccaccaggaggatagtaaggccaccaaagaaaggttctgctgttcagcgcccccgcaccagaacactcactgctgtacatgaggcaatgctggaagatattgtattgcctgctgagattgttgga

SEQ ID NO: 4682 - DNA, 402 bp, Glycine max
  Clone ID: LIB3028-003-Q1-B1-B3
gaagaaagctttcaaattcctctttttgcatcaaagaataaaactagtaggtttaaatatgaagcatatatactcaatgaagcgactgtctcatttgcatggctgttctctatgctatagaaacgcaaggcctttagcatgtggtgcctcgtatgggaggagcttcaaaagcaaagcacaaacaaggttcacttctggatgatattcttattctttacttttcttttttcaatcttgtttcggcaaagtgatgatattagtcacttgtgggttatataatattttatagaggacatttagcttgcactgtgttgaatgggttaaaacacttttggagaaatttgtataataaccattccctgaaggaggagcacctattgtaagttatcagaatgtgaaata

SEQ ID NO: 4683 - DNA, 406 bp, Glycine max
  Clone ID: LIB3028-003-Q1-B1-B4
gggtttttattctgttgcagagacagtggttgagaatcactgctcaaaagaataataataccaaattccaaccagataaggagtgtggaatttggaagcttcacttctttcttgtattacttgatgcccttttcccttctctccctccctcttctcttattctcattgtttagttacctaccgtggatcaaagtcaattccctatctcgcttctttttgtagttgatttcttttgggtttcgcagtctccccaaaagggttgtttttattttgttctaaaattttgtaatttttgcttggacttgtgataaaaaaaatttgattttttagatcgattcgttgatgggtcatgccggggttgttgttaattgttgtattggctaattgaagttcggttggtgatttg

SEQ ID NO: 4684 - DNA, 399 bp, Glycine max
  Clone ID: LIB3028-003-Q1-B1-B6
caaggaccagagggtccttctggtatggatacttgcttctatgccgagtaccacaacattggccccggttcagacaaatccaagcgtgtgaaatgggctgggatttggaacctcaattcaaaagctgcacgttggttctcaccatctaagttttttcatggaactgattggattgaggttactggaattccttgctttcctggcgtgcccaaacaccataggcacaaaaagacaatacttaattggcaataaaagtaatgagttgcaaaatcaagcaatataaattaattaaaaagtaatgattgtgcttctttattctttaattattttcatttcattaattaactctagtgttaactacattttttttatctcaagcaattaaaatcaatgtaacac

SEQ ID NO: 4685 - DNA, 358 bp, Glycine max
  Clone ID: LIB3028-003-Q1-B1-B7
cttgcatggccgcaggtcgactctaaaggatcccctcggggaattccaattccacattttcaagaaataaggaggcaaaaatgttcatatatgaattggaattatttgttttcttattaggcctatcctgaagccaaaggaaatgagatcggaattcctcggggaattccaattccacattttcaagaaataaggaggcaaaaatgttcatatatgaattggaattatttgttttcttattaggcctatcctgaagccaaaggaaatgagatcggaattcctcggggaattccaattccacattttcaagaaataaggaggcaaaaatgttcatatatgaattggaattatttgtttt

SEQ ID NO: 4686 - DNA, 380 bp, Glycine max
  Clone ID: LIB3028-003-Q1-B1-B9
gaataatagagatgagattccggatactatatcagtttctggtcaaataaattgtcgagctgacttggaagggttgccagatgtgtcatttcacttggctggattgaacacagcaaaccttgaagttttatcgtatcatccttgtgctcaagtttcagatcaaggtttggataagcaaggagtgatgttttctccgccattaggtaattttgtgttgatgcgttatcaggcagcttatgcccttggaccccccataaagggattctatcagttgtcaatggtttctgaggataaaggtgcatttctattcaagttgcatttaatggaaggatataaggctcctttgacaatggaattctgtactgtgactatgccctttc

SEQ ID NO: 4687 - DNA, 402 bp, Glycine max
  Clone ID: LIB3028-003-Q1-B1-C1
ctcaagcaaccatggcaatggcaacccaagcctctctcttaaccccacccctctccggtctcaaagccagcgaccgcgcctccgtgccatggaagcaaaactccagcctctccttctccagcccgaagcccctcaagttctccagaacaatcagagcagcagccgccgacgagaccacagaggcaccagcaaaagtagaggctgcaccggtcgggttcaccccaccagaacttgacccaaacaccccttccccgatcttcgggggcagcaccggcgggctcctgcgcaaggcacaggtggaggagttttatgtcattaagtgggactcacccaaaggaaaagatctttgaaatgcccactggcggcgccgctatcatgagggagggtcctaaccttctcaag

SEQ ID NO: 4688 - DNA, 411 bp, Glycine max
  unsure (1)..(411): unsure at all n locations
  Clone ID: LIB3028-003-Q1-B1-C10
cgcagatctctcagggcttgcatcttctcaggtaagttgtgaagatgtacacatcaaggaagaaaatccacaaggataaggatgctgaaccaactgagtttgaagagtcagttggacaggcattgtttgatctggaaaataccaaccaggagcttaaaagtgatctgaaggatttatacataaactcagctgtgcaagttgatgtttctgggaaccgcaaggctgttgttattcatgtcccttacagattaaggaaaggtttccgtaagattcatgtcaggcttgtcanggagcttgagaaaaagtttagtggcaaggatgtaatcttggttgccacccgaaggattttgaggccaccaaagaagggttctgctgctcaacgtcctcgtagtcgcactcttactgctgttc

SEQ ID NO: 4689 - DNA, 397 bp, Glycine max
  unsure (1)..(397): unsure at all n locations
  Clone ID: LIB3028-003-Q1-B1-C11
ggagagggagagggagagagaaagaaaggtgaattggattgcatctctctctgtgtgttggaagaggggaatcgtagatctgatttctttctttctttttaataattttgtgatcagaattattgagctgaacaaaagacaatgggattgtgggaagcttttctcaattggcttcgcagccttttttttcaagcaggaaatggagttatctctaataggacttcagaatgctgggaagacttcccttgtaaatgtagttgctaccggtggatatagtgaggacatgattccaactgtgggattcaatatgaggaaagtgacaaaagggaatgttacaataaagttatgggatcttggagggcaacctatgttccgcancatgtgggaacgttactgt

SEQ ID NO: 4690 - DNA, 360 bp, Glycine max
  Clone ID: LIB3028-003-Q1-B1-C12
tgacaaaccaggtgctcgatgaaattggtgtagatgttgcctcacagttatcagcagctcccaaagggagagtcgcaacaaagaatgctgaaaatgttagcagctcgggcattgacgaacttgagaagcgtttggcagctcttagaaacccataaattttgcatgggattgtgattctggaactcaaaagttttaaactgaaattctttcctgaagtatgttttcttgggatttcacaagttgagtgtgtatatacaatcttgaaattattatgtatgaataatgatatattaaaatttctgagatggctatttacttgtaaaacaagaaaggcgtgactgggactggagggcctcgtgg

SEQ ID NO: 4691 - DNA, 324 bp, Glycine max
  Clone ID: LIB3028-003-Q1-B1-C2
ggctcacacacgcacagatctgatctatctgaagctgaaaacgccgacgcccgacggtgatgatgaagatggggtcctcaccttcacgttgctccttcttcctattcctcctcctcctagtggcgctcttcccctcgtcgctctccgagatccggttctccgagatccgaaacgacgatcgctccatcgttcccttcgatcagtttggattcacccacaagggtcgccttgagctcagcgtttccaaaatatcactctccaattccaatttggacctctccaaggtgggattcttcctctgcaccctggattcctggcttcatg

SEQ ID NO: 4692 - DNA, 400 bp, Glycine max
  unsure (1)..(400): unsure at all n locations
  Clone ID: LIB3028-003-Q1-B1-C3
caaaatcctcttttatttatttatttttttctctgcttcgcgtcgttttgtcctcgataatgtcgtcgtcgacgccggattcagacaaaacgacgacgtcgtcgaagaagagcgcgttcgacgcgttagcggcgtcgcggctcgtgacggagctcaggggaaacttcgcttcgggcaaaacgcgtagttatgagtggagattgttgcagctcaacgcgattgcgaaactcgtcgtcgatcacgagcaggagatcgtcgacgcgctccgaaacgacctcggcaagccgccactcgaaaccgtcgcatacgaggtctcgtcgtttacactgttactcgtttgcgttttggtttnaataaatatatagttggtttgactatggtantggaaaaggaatattcc

SEQ ID NO: 4693 - DNA, 384 bp, Glycine max
  Clone ID: LIB3028-003-Q1-B1-C5
atttggggattgccaaacgtggaaataatcgatattgagatgaatcagttatcaggttcgattagttcggatatcaaaaccgcgaaagcactcggttcaatattcgccaggcagaaccggttgtccggtgaaataccagaagaaatctcaatggcgacgtcgttagtgattgtggacctgagcgagaatcaaatctttgggaacattccagagggaatcggcgagcttaaacaactaggtagccttcatttacagagcaacaagttatcaggttcgataccggaatctctaggttcctgtaattccctcaacgacgttgacctatctcgaaattcattctccggagaaatccccttctccgtggggtcctttcccggctttaaa

SEQ ID NO: 4694 - DNA, 404 bp, Glycine max
  unsure (1)..(404): unsure at all n locations
  Clone ID: LIB3028-003-Q1-B1-C8
ctggcattggtcttgatgaactcagctgtcaagttttctccatgatgcccctagatgaactgataggtaaaactgctgaacagattgcctttgaaggcattgcttctgccatcatacaaggaagaaacaaagaaggagccagttctagtgctgcacgtatagtttctgccctcaaaggaatggcaaatgcaatgagttcaggaagacaagaacggatttcaacaggactttggaatgtggacgaaaccccatttacagcagagaatattctggccttcacaatgcagaagattgagttcatggcagtggaagggttgaaaatccaagctgacatgacagaggaagaagctccctttgatgtttctccacttagcactgaggaagggaacanagagaatgaacta

SEQ ID NO: 4695 - DNA, 385 bp, Glycine max
  Clone ID: LIB3028-003-Q1-B1-C9
ggagtatgtgtgtgtgttaattatgtgtatgcatggtggaagctagagtaatagaggcgcaacaagatcactgttgttgtgggggctatagccagctcctcatcataagtggatcaatacataaaaaaggttaattagtaaagtcacacgtgctttctaacggtggcgcaccagaggggtttaggttcaggttcggggaagttcttggcggcggaacaaggcggcgatgaggaaacggaagagagtactgtaggttcggttccgagccatgtggtctctgcagcttcggcccaaaccaataatcagtgggtcacggcaagtggttctccaaggatgtcacgttttatgaatgctccttcctccccaggattgtctcctctgtttg

SEQ ID NO: 4696 - DNA, 410 bp, Glycine max
  Clone ID: LIB3028-003-Q1-B1-D10
gcgactgggaaatggctagggaatgcttcacaacgaacgacgttgcagtttccgctcgccccaagcttctcgtcgctgagctcatgtgctacaacaacgccatgttgctcgtggcgccctacggtccctattggcgcgaactaaggaagatcattgtgacggagatcctctcctcgagccgtgtagagcaactacaagatgttcgtgtgtccgaagttcaaaattcgatcgtagaactctacgacgtttggcgtagccaaaagaacgagtctgactatgcatccgtggagttgaagcaatggtttgctcagcccatattcaacatggttctacgaatggtcgtcgggaagcggtttctgagtgccacggcgaccgacgagaaggcagaaaagtgtgtaaaggctgtggat

SEQ ID NO: 4697 - DNA, 396 bp, Glycine max
  Clone ID: LIB3028-003-Q1-B1-D11
atcttatcttagcaatagctacccctatcacaacaatactctattaggcaaaaacaccaaatgggagaggaaaaagagcagcctaagaatgaaaccgagaagaagcccgaggaggccgccgcagcccccaagaaagacgacggacccatccctgtcgtttacaaactcgacttgcattgcgagggatgcgtcaagaagatcaaacgcacatgtcgccacttccaaggtgtggaaaccgttaaggcagatctatcgtcgaacaaagtgactgttaccggcaaattggatgccgagaagctgcgagataagatcgccgagagaaccaagaagaaggttgacatcatctcagctccgcccaaaaaagaagccgccgccacggaaaatccaccggagaag

SEQ ID NO: 4698 - DNA, 381 bp, Glycine max
  Clone ID: LIB3028-003-Q1-B1-D2
cttctccaacatgccaaacgacagcgttctgagtcttttcttcttcgttaccctcttcacatgccttctctctgctaattcccacgatgaccatattttcctaccgagtcaactccatgacgatgactcagtgagttgcactgctaccgacccaaaccttaactacaagccggtgatcggaatcctgacccaccccggcgacggtgcctctggccggctcagcaacgccaccggggtttcttacatcgccgcctcctacgttaaattcgtggagtccggtggtgctagagttattccccttatctacaatgagtcacctgagaaccttaacaagaagctcgatttggtcaatggagtgctcttcactggtgggtgggctgt

SEQ ID NO: 4699 - DNA, 331 bp, Glycine max
  Clone ID: LIB3028-003-Q1-B1-D3
tctgcaccgtagtttttggggatattaaataaaaagagcttctataaaagttgattttaactcatgtgagaaactaaattcattttaccttttttttccttctcttatagaagcctacggagaagtttattcaaatggggctatagtgtggaaatttatgaactgtggaatctttgcagctagtgctttgaaatgcctctttgttcataataacattacattccagctgcacaaaagtattttttttttaccatgattcttctgtatgctatgttgtgtagttgtttcttatatgaaccataatatgtattcatgctgtcctgaattgaag

SEQ ID NO: 4700 - DNA, 410 bp, Glycine max
  Clone ID: LIB3028-003-Q1-B1-D4
ggtttctaccagagtattcggcctacacagatggggctatcactgaacattgatatgtcttccactgcatttattgagccattgccagtaattgatttcgtaactcaactgctgaacagagatgtatccgcccggccactttctgatgctgatcgtgtgaagatcaagaaagctctccggggtatcaaagttgaagtgacacatcgtggaaacatgagaagaaaatatcgtatctctggtctgacttcacaggcaaccagagaattgacattcccggtagatgaaaggggaaccatgaaatctgttgtggagtacttctatgagacatatgggtttgtcattcaacatactcagttgccttgtctgcaagttggcaatgcacagagaccaaactatttgccaatggaggt

SEQ ID NO: 4701 - DNA, 403 bp, Glycine max
  Clone ID: LIB3028-003-Q1-B1-D5
gaaaaagttagggtttgtaactttgtcttttgcttgcgaatctgaatcgaataataatcaatcaatcatcatgtcgtcggcgaagaagatcacactgaagagttcggacggcgaggctttcgaggtggacgaggcggtggcgctggagtctcagacgataaagcacatgatcgaggacgactgcgccgacagcggcatccctctgccgaacgtgacgagcaagatcctggcgaaggtgatcgagtactgcaagaagcacgtcgaggccgcgaatcccgaagacaaaccctccgaggacgatctcaaagcctgggacgccgatttcgtcaaagtcgaacaagccacgcccttcgatctaacccgggctgcgaactacttgaccatcaagagcctgctggacctt

SEQ ID NO: 4702 - DNA, 401 bp, Glycine max
  unsure (1)..(401): unsure at all n locations
  Clone ID: LIB3028-003-Q1-B1-D6
ggcttcaattccagaagagccattgttggcaccgaacccggaccggttctgcatgttcccaatccaatatcctcaaatctgggaaatgtacaagaaagccgaagcctcgttctggacggcggaggaggtggacctctcgcaggacctccgccactgggactccctgaccgacggcgagcgccacttcgtcagtcacgtcctcgccttcttcgccgcctccgacggcatcgtacttgagaacctcgctgggcgcttcacgaaggaaatccaaatccccgaggcccgcgccttctacggcttccagatcgccatcgagaacattcactccgagatgtacagcctcctcctcgaaacctacatcaaggactcctcncagaagagccacctcttccgcgccatcg

SEQ ID NO: 4703 - DNA, 403 bp, Glycine max
  Clone ID: LIB3028-003-Q1-B1-D7
ctcaaacgaatacgttttctctttctcttcaatttcacccttattagcatagcatattcattccccatcttgaatcgttcttaactgcgagaggggatatcagagaagttgattggcctcccattaataacagatctgaatgatctgatggagtctaaaggtgggaagaagaagtcgtctagtagtaagtcctttttgtacgaagctcctctcgattacatcattgaagacgttcgaccacacggtggaatcaagaagttcagatctgctgcttactccaactgcatccgcaagccatcctgagattccctaggtcgtgtgaggacgtagcccccttagtcctgcatccgccaaaattttctcagtctcttcccttctcctttttcttgttttcttccttgcc

SEQ ID NO: 4704 - DNA, 395 bp, Glycine max
  Clone ID: LIB3028-003-Q1-B1-D8
ccaaacaaaaccggaatcatatcccaaactccttcctccctctgggtcttgaggtacacaaccctaatcaccgcttcgagctctgtcattgtcgcaggttccaggtttcagcgatttcgatctcgcatagcattctacgatggatacgattccagttaaccgcaagcctttcttgaacaatttgactgggaagcccgtaattgtgaaactcaagtggggaacggagtacaagggctatctcgtttccgttgattcatacatgaatttgcagctggccaacactgaacagtacattgagggacagtttactggaaacttgggagagattttaatcagatgtcacaatgttctctaccttcgatgaataccggacgataaggaattcgaagatgttg

SEQ ID NO: 4705 - DNA, 410 bp, Glycine max
  Clone ID: LIB3028-003-Q1-B1-D9
ggctaacaacaatggtggctggtgcaaccctcctttgcaacactttgatcttgctgagcctgctttcttgcaaattgctcaatacaaagctggaattgttccagtttccttcagaagagtctcctgtgtgaagaaaggagggatcaggttcaccatcaatggtcactcttacttcaacttggttctcatcacaaatgttggtggagctggagatgttcattctgtgtccatcaaagggtctagaactgggtggcaaaccatgtctagaaactgggggcagaattggtaaagcaactcctacctgaatggccaaagcctctcttttcaggtcactacaagtgatggcaggactctcactagcaacaacattgtgcctgctaactggcaatttggacaaacatttgaagggg

SEQ ID NO: 4706 - DNA, 313 bp, Glycine max
  Clone ID: LIB3028-003-Q1-B1-E1
ccttcttacatttacttgattacatcccctccgttcatggaccaatatgctcaagcttcttcttccatcctcattctctaaactcatctccagacacattttctcacaactatcacgccccaccaccaccatgtccataaatctacgcacccacgccttcgcgggtaacccgctccgatcccccaaccgggtcgacccgttttcgcccgcctccgcgctcgagaccctcacgacccgaatcctcgacgccgcgcacgtgtcctcaccgtccgtggattttaaggtcttgccttttagaaatgggagggtgctg

SEQ ID NO: 4707 - DNA, 411 bp, Glycine max
  Clone ID: LIB3028-003-Q1-B1-E10
caagctgtcgcctttgaacttgaggctacaaaacttgtaaatgatgcagagattgccctacagcgagcagataagtctaattctaattcaaatgctgataccatagaatctacacaagcacaagatgttgttgtggctgttcctgaagaggagaaagtggttcaaggtttttctggtgatgttgaaagagacagagatttggcaattgacgacgaatctgtgcttgccaatttatcacctgaaacactatctgataaaaccagccaagttttggaagacaaaacacagtctgattatttaagtgataatgagaatgctgtgcaaacaaaaaagcaggaaatacagaaagatttgaccagagatagttcactagctcccaaggcattattgaaaaagtcttctcgattcttt

SEQ ID NO: 4708 - DNA, 406 bp, Glycine max
  Clone ID: LIB3028-003-Q1-B1-E11
tggttctggagtgctatctcttgcatgggcaattgcacagatgggttgggtagctggtcctgcagtgctctttgtcttctctttgataacatacttcacctccactcttctcgctgactgttaccgttcacctgaccctgtacatggcaagcgaaactacacatattctgaggttgtcaaagccaacctaggaggaagaaaatttcagctgtgtggattggctcagtatataaatcttgttggtgtaacaatcggctacactataactgcatcacttagtatgggggcggtgaagaagtcgaactgtttacacaaacatggccatcaagacgagtgcaaagttaaggacaacgcttttatgattgcttttgcctgcatccaaattcttccaaaccaaataccaaac

SEQ ID NO: 4709 - DNA, 335 bp, Glycine max
  Clone ID: LIB3028-003-Q1-B1-E2
cctgctcaaaatgctcaagacaggcgaatgaggagaatattaaagagtccagatccattagctgagcagcattggaaggagatgcagcagggtgaatcagggactggtggtatttttggttaagaatggtgcaatttaattttttgttcacaataatcattctaacatgctctgctgaatggttgcacacttgaggtgagagtaagcgctggatggatgctgctaattttgattgttagacaatcacttttgtggtttttttatcaggcgcttcttgttggtttgtgtcgagatatgtattctttacttccttggagccagatctatttcaggtt

SEQ ID NO: 4710 - DNA, 330 bp, Glycine max
  Clone ID: LIB3028-003-Q1-B1-E3
acgtaaagcaacttctcatgctgttctgtccaaggacccaaattcaatggattcggtttcctccgaagcctccgttaatgataagattcctgccagtccacttcgggtgccgcctagtccgtcaagattctcaatgtctccaaaactcactagacttcaatcattgcatctcaatctgaaccaagttacaagagctacccaaaacttctcagaaacattacaaataggagaaggaggttttggaactgtctacaaggccaagttggaagatggcctggttgtggctgtaaaacgtgcaaagaaggaacattttgatagtttgagaacaga

SEQ ID NO: 4711 - DNA, 402 bp, Glycine max
  unsure (1)..(402): unsure at all n locations
  Clone ID: LIB3028-003-Q1-B1-E4
tccttttgttcctatctctggttttgagggagacaacatgattgagaggtccacaaaccttgactggtacaagggtccaactctgcttgatgcacttgaccagattagtgagcccaagaggccctctgacaagcccctcaggcttccccttcaggatgtgtacaagattggaggtattggaactgtgccagtgggacgtgttgagaccggtgtcttgaagcctggaatggtggtgacttttgcaccaactggactgacaactgaagtcaagtctgtggagatgcaccatgaatctcttacagaggcacatcctggtgacaatgtgggattcaatgttaagaatgttgctgttaaggatttgaagcgtggttatgttgcctcanactcaaaggatgaccctgc

SEQ ID NO: 4712 - DNA, 332 bp, Glycine max
  Clone ID: LIB3028-003-Q1-B1-E5
gtgaaagccctctatagaagggcccaagcacatatgcagttgactaacttggatttggctgaacttgacattaagaaagctcttgacattgaccctaacaacagggatgtcaaattggagtacaggactttgaaggaaaaggtgaaagagaataatagaaaggaggcgcaattttatggaaatatgatcaacaagatgacaaagattggttcctgatagcaataaaccagctacgaagtaccaacggtattgaatccggggttgacaactaaatctagatgtcatccaatatggaacacgaatctgtttagtccccgtttttctggggtttg

SEQ ID NO: 4713 - DNA, 163 bp, Glycine max
  Clone ID: LIB3028-003-Q1-B1-E6
caaagagcataaaagcaatattttagaaacagtgcatgtaattgtttgtctctgttttatatcatgcttttgaggatgcctgtagactctttgatttgtttttgcctgacctttttgttcccaagcgtttgatagcatggaaataagagcgcttgactttgtt

SEQ ID NO: 4714 - DNA, 405 bp, Glycine max
  Clone ID: LIB3028-003-Q1-B1-E7
cttagctgaaccctcacctcaatcttgcgtgctagctagctttattccaattcctacagaaccaaattattctgctagctagctagtacgtcaaataaaataaaataatcaaatatggcattcagcgggacccaacagaaatgcaaggcttgcgacaaaactgttcactttgtcgaaggtttatctgccgatggagctgcttatcacaagaactgcttcagatgcagccattgcaatggccttcttgcgataagcaattactcatccaccgaaggagttttgtactgcaaggtgcactttgagcagcttttcaaggaaactggaacctaacccaagaaatcccagttctcctggaaagcctcaactcgagctgaatagagcaccaagcaagctttctgccttctt

SEQ ID NO: 4715 - DNA, 404 bp, Glycine max
  Clone ID: LIB3028-003-Q1-B1-E8
cttcacttttaagttaaatagtttttcattgtttcatttaatctacaatggctgcttcaacaatggctctctcttcatcatcattggctggccaagctatcaagcttgccccctccacccctcagcttggtgttggaagggttagcatgaggaaaacagcctccaagactgtttcttctggaagcccatggtacggcccagaccgtgtcaagtacttgggcccattctctggtgagcccccatcctacctcactggtgaattcccaggtgactatggttgggacactgctgggctttctgctgacccagagacctttgccaagaaccgtgaacttgaagttatccactccagatgggccatgttgggagccctgggctgtgttttccctgaactcttggcccgc

SEQ ID NO: 4716 - DNA, 392 bp, Glycine max
  Clone ID: LIB3028-003-Q1-B1-E9
cctttctatgttgcttaagaagttacctacttatagcaagagaatctagctctattggttgtgtaaggtaaaaaaaaaaaacgcataaccatgtcaaccaaattgattgaaacaagccttagccttatggtatggcttgtaattgcaacatcagcaatagcacaatctgataaccccccagttcttgacacagaaggccaccctcttgagcctggcagagattactacatcacaccagcggtaacagacattggaggccgtgccactatagtagacaacggcacatgccctttatttgtaggtcaagagaacacttttgtagaagagagctttgccgttttcttcaccccttttgcaaaggaagatgatgttgtgaaggtgaatagggactt

SEQ ID NO: 4717 - DNA, 402 bp, Glycine max
  Clone ID: LIB3028-003-Q1-B1-F1
aatttacattactcattacactaactcaatcctcagtctatccaaattctccagccatggcagtttcttctgcatctgcttcctccaaacttatactattcccccatgcttcatcttcttcccttatctccacacccttccgttcctccaccaacacccacaaactatcccctctctcctcctccttcctccaccccaccaccgtcctccgccgcaccccctcctccaccactaccaccacctccccgcgccgccccctcaccgtccgcgccgcccgcggcaagttcgagcgcaagaagccccacgtgaacatcggcaccatcgggcacgttggacacggcaaagaccaccctggacgcggccctcaccatggcccttgccgccctcggcaacagcgccccg

SEQ ID NO: 4718 - DNA, 410 bp, Glycine max
  Clone ID: LIB3028-003-Q1-B1-F10
caaaaacaaagaaaaaaaaaaacccttagccaacacaaccatcatggccacctctgctattcagcaatcagcattcactggtcaaactgctctgaagcagctcaatgagttcgtccgcaagaccggtggcgccggcaaaggtcgcactaacatgcgccgcaccgtcaagagtgctcctcagagcatttggtatggccctgaccgtcccaagtacttgggtccattctcggagcagattccatcatacctgaccggagaattccctggtgactacggatgggacactgctggattatcagctgacccggaaaccttcgccaggaaccgggagctggaggtgattcacagcagatgggcaatgcttggtgcccttggctgcaccttcccagagatccttgagaagaatggtg

SEQ ID NO: 4719 - DNA, 405 bp, Glycine max
  Clone ID: LIB3028-003-Q1-B1-F12
gacctttggaaccgctgctattcttgttacgaacgtgatgcgcacaagaataagggaaatggaaacactcatgaacgccgaacaacaacagcaacaacaacagcacgatgtcgcaaccactgactcgtcttttatttcagacaataaagattgatttgcatttagtttttttttttatttccgtttcggtcctggagtttgtgatgctttgtaaactcgtggaatgcaaagggcacgcaacgtgtttgttgaatgtcctgactgaaaaataaggctgggacaaccagcggaatatggaaacccatttgcgattatgagatttttaatattttatctcatcattttggtgtgttaaaaaaaaaaaacaaaacaaaacccaaaaaaaccaaaaaaccaaccacacac

SEQ ID NO: 4720 - DNA, 376 bp, Glycine max
  Clone ID: LIB3028-003-Q1-B1-F2
ctcttggattctgggctggtcatcggaactctaaaatcagagttattcttgcacgtgtgtgggaaaatgacacagaacttgatatttcaaacaatagaattagtagggctactgggcatctagtgtaccagaaaagattttacaggagtaagttttgtatatgtcctggtggatcacaggttaatagtgctcggatagcagactctatccattatgggtgtattcctgtgatattgtcaaattactatgaccttcctttcaatgatattcttgactggaacaaatttgccgttgtactcaaggagagtgatgtttaccagcttaaacaaatcctcaaaaatatatcagatgctgagtttgttacacttcataataa

SEQ ID NO: 4721 - DNA, 328 bp, Glycine max
  Clone ID: LIB3028-003-Q1-B1-F3
ggtttgggattggagggattgacgctgcgtctcttcctcttctctttcgatccatccctcattcctaatcctccaatccaaccacctcagcctcacactcacatatacacatatctgaacgcgtatcgtccctcctatggcttcaaagcgcatcctcaaggagctcaaggacttgcagaaagacccaccaacttcttgcagcgctggtccagtagctgaggacatgttccattggcaagcaacaataatgggtcctgctgatagtccttatgctggaggtgtattcctagtcactattcacttccctccggattatcctttcaagcct

SEQ ID NO: 4722 - DNA, 409 bp, Glycine max
  Clone ID: LIB3028-003-Q1-B1-F4
ggaagtcagtgatgaactgaaaaatcttgtcaaggtaactgaagaatgcctggagaagggaatagctgcgtgcaaggacggtgctctctttaggaaaattggaaagagaatcagtgagcatgctgaaaagtatggctatggtgtagtggagcgttttgttgggcatggtgtgggaacagtgtttcattctgaaccaattattatacacaatcgcaatgagaaggcaggccgcatggttgaaggtcaaacatttacaattgagccgattctttcaatgggaagcattgattccattacatggccagacaactggacaacactaacagctgatggtagtccggctgcacagtttgagcataccattttgataactaagactggagccgaaattttgactacatgttgacat

SEQ ID NO: 4723 - DNA, 323 bp, Glycine max
  unsure (1)..(323): unsure at all n locations
  Clone ID: LIB3028-003-Q1-B1-F5
ccataatgctgggcttcttggtcatggcagtgatgtcagtcattggataccaaagagaattgctggtccattagagggacttcaaattgcatttgttgcttgtggtccatggcacacagccttggtaacttcaacagggcagctgtttacatttggtgatggaacattcggtgtcttgggccatggagataggcaaaatgtttcatatcctagagaagtagaatccttattggggttgagaacaatagctgttgcttgtggagtgtggcatactgcagctgttgtanaggttatcgcaacacactccagtacaagcatatcat

SEQ ID NO: 4724 - DNA, 406 bp, Glycine max
  Clone ID: LIB3028-003-Q1-B1-F6
ctaaaaattgccagttacattcccttcacaagattctcacaaacaactcttgagaaagaaagaatggctgccaacacattgatgagttctgccatctcagccttcccatctctcctttcctcctcaaaatccagatttgccgcagcagttcctctttccagctttgttgtcaccaatgcctcttcttctcgcttttccatgagtgctgactggatgcctggccagcctagacccccctaccttgatggttcagcacctggtgactttggattcgaccctcttcgtcttggtgaagtaccagagaatcttgagaggttcaaagagtcagaactcattcactgcagatgggccatgcttgctgttccagggattttggttccagaggcattgggcttaagcaactggg

SEQ ID NO: 4725 - DNA, 373 bp, Glycine max
  Clone ID: LIB3028-003-Q1-B1-F7
gccgatgattcccagtaatggatccttcaaggatgtgataacggagggagacggtagaacgaggtactgattgcctagatcaaatgttccgtgatgcttggtttgtacaatatatatataagataatgctttcatagttgcaggatttggcctgtggtgagcatcatagtttgcagtagttttggtagcaagactttgtattttccttttatttagcttactatatgcagtagcagctatctctgtaatcttatatccatctcctgttgtttgtattgtgccgttgggttttttgatgtagtgagattgaaaatgatgtgctagtaatattattgctgttagaaattcaaaaaatactaaacccaaggattat

SEQ ID NO: 4726 - DNA, 403 bp, Glycine max
  Clone ID: LIB3028-003-Q1-B1-F8
gcgagaacgacccaaagagaaataaaccacttatatatatatatatataaaaataaaaaaattagcatcatacaccatatctagttaccttcaacataaaatggaagaatccaagggttttgttagtggtgagactcaaaaacctcacccaaaaatgccttctagttccttcccaattcctttgccagggaggaatcgccatggccagcagtgtccatcaagatatgccccacaatggaggcaaagggcaatactagggcacaccgtgggaaaccctagcggggcaagtgagaatacaactttgaaggtgtaagtcactcgaggagtaataatacttagtatgaagatcttaaacgtttgaataaccgttgtcgttgttatgttgtcttttctatatcgtata

SEQ ID NO: 4727 - DNA, 401 bp, Glycine max
  Clone ID: LIB3028-003-Q1-B1-F9
agcaggtgttatccctgtggtcaagacatccattggcggtactcgtattattggtcgtctttgtgctggtaacaagaatgggcttctcttgccccataccaccacagaccaagaacttcaacatttgagaaacagtctacctgatcaagttgttgttcagcgaatagacgaaaggttatctgctctgggaaattgtatagcatgtaatgaccatgtggccctcacacacactgatcttgacagggagactgaagagatgattgcagatgttcttggagtagaagttttcaggcagaccattgctggcaatattcttgttggtagttactgtgccttctccaatagaggtggcttggttcaccctcatacttccatagaagacttggatgaactttctacac

SEQ ID NO: 4728 - DNA, 412 bp, Glycine max
  Clone ID: LIB3028-003-Q1-B1-G1
taatcactcactcacacattcgccacttccacacagcatagatcacctttccttttttcccacagaaaaaaacaccacctttctttttccgactaaaggttcgccggaaaatgcctctatcctcctcttcctcctccgccgtagactccgccgtctccggcgagatcatgctctttggcgttagagtcgtggtggactccatgcggaagagtgtgagtatgaacaacctctcgcagtacgagcttcctcgcgacgctgccaacgccaaagacgacgccgcaggatacgcctccgccgatgatgcagctccgattaactccgacaagaaccgcgaacgcaagccaaggaatctcatggactgaaggaaaacacaagctattcttggtggggttgcagaaagtggggaaaggtg

SEQ ID NO: 4729 - DNA, 411 bp, Glycine max
  Clone ID: LIB3028-003-Q1-B1-G11
aacagcacaaagcgggttactgtctgttcaagctaccatctctctctctctttcttagtgcctccttgccagaagttaaaatggcccaagaaactttcctattcacatctgaatcagtgaacgaggggcaccctgacaagctctgtgaccagatctccgatgctgtgctcgatgcatgcttggagcaggaccctgacagcaaggttgcctgtgaaacctgcaccaagaccaacatggtgatggttttcggagagatcacaaccaaggccaacgtggactatgagaagattgtgcgtgacacatgcaggaacattggttttgtctctgatgatgttggtcttgatgctgacaactgcaaggtcctcgtcaacattgagcaacagagtcctgatattgctcaaggtgtgcacg

SEQ ID NO: 4730 - DNA, 334 bp, Glycine max
  Clone ID: LIB3028-003-Q1-B1-G2
caaagctacattaataacgtcgtttaatgttccaatattgtagtgtttttgtcctgttggggttggactgctgtgctgtattttggttttgtattctgccccttgatttgttctgttacttttagccgtgttcatgtctccaggaaatgtttatattttctttcaaaaatgtttttccattgtgtttatttgtcttttttgggcatggttcaggctccagtaggtcgcattttctttactggagaacacacgagtgaaagatttagtggctatgtgcatggtgcatacctcgcaggtatcaattctagcacagaactacttgaagaaatgagaa

SEQ ID NO: 4731 - DNA, 407 bp, Glycine max
  Clone ID: LIB3028-003-Q1-B1-G3
cttgacacaactaataaagatctccatgtcaagggaatggaattattactggctgcatcttactctttacatgcttctcacgctgtgtattggtactgtattttctggtctggggcattctctgtcttctgttgtgacaagagttgctgcaatttttgtatttgtatcattctgttcccttctaagcattgctagggtgcctgcacttttgaaagaaatcaagatatatgcctgtgaagaatcaaaccagcactccagcacattagttttcttacttgcacagctcttgtccagcatcccatttctttttctcatctccatttcatcaagtctaatcctccacttcctcctttggttgggaagatcaattcagcctgttaatgtactttgtgctgaattttttcatg

SEQ ID NO: 4732 - DNA, 410 bp, Glycine max
  Clone ID: LIB3028-003-Q1-B1-G4
ggttcatcatcataaccttcaatgaaaagaaatggctgaggcaagcattggcagcaaaagcagcagatggtctttacagggaatgacagctctcgtcaccggtggatccaaaggaatcggatatgctatcgtggaggagttggcacagcttggagccactgtgcacacttgcgctcggaacgaagctgaactcaatgaatccttaaatgaatggaacacaaaaggatacagagtaactggttccgtctgtgacgtggcgtctcgtgcagaaagacaagacctcatagctagagtctccaatgagtttaatggcaaactcaatatccttgtaaacaacgtgggaacaaacgtaccgaaacatacccttgatgttacggaggaagacttctcatttctgataaatacaaatc

SEQ ID NO: 4733 - DNA, 398 bp, Glycine max
  Clone ID: LIB3028-003-Q1-B1-G5
tggaattccaaggtggccatcccgcaagattaataaagtcaatcgatcattgaagaagatacagactgtgcttgactctgtccagggcatggaaggagggttgaagtttgatccttctatgggggcgtttgtggcaggagggtcaatcatccaggaaattgatgcacctaaaagtactataaaagaccccgtgcctgttactcaagatgcattctcagtaccacccgcaccttgtagtgaaggtgagaatttttcaattaagttggagggaaaattgaagaaaaccaatgtttcttcagttgattacagtgaagattcaaaatctatggcaatcaatgatgggttcgtgccaaaatgcaagccctttgcaccaaggttcaggattgtcctgaacaagc

SEQ ID NO: 4734 - DNA, 404 bp, Glycine max
  Clone ID: LIB3028-003-Q1-B1-G6
tttgcagccagagaatcttcttctggactcaaatgctattctgaaagttacagattttggattgagtacgtatgcgcaacaggaggatgaacttctccgcactgcttgtggaactccaaattatgttgctcctgaggtgcttaatgatagaggttatgttggttctacatctgatatctggtcctgtggagtcattctctttgtgcttatggctgggtacttgccctttgatgagccaaatcatgcgacactgtaccaaaaaattggcagggcccaattcacatgtccatcatggttttctcccgaggcaaagaaactattgaagcgtattcttgatccaaaccctctaacaaggataaaaattcctgaactcttagaagatgaatggttcaaaaaaggataca

SEQ ID NO: 4735 - DNA, 403 bp, Glycine max
  Clone ID: LIB3028-003-Q1-B1-G7
ttcattaacttcacacacagacacggtgtttccaccacaccatagcatatagtactagtagattaaacgccaaagaaataaattactcactttcacgtaaaccataacgtgcttccaccgcaaccaaccacaatgggtgccgttaggtccataacggtgttgctactagtgttatttatggccatgagctccggcgtgcgctcgtgtccgccgtcggacagggcggcgctgctggcattcaaggcggcgctccacgaaccctacctgggaatcttcaactcgtggaccggcgccgactgctgccacaagtggtacggcgtgagctgcgaccaggagaaccgccgcgttgccgaaataaacctcggcggcaagtcggaggagccgatcttcgagcgcgcccacc

SEQ ID NO: 4736 - DNA, 404 bp, Glycine max
  unsure (1)..(404): unsure at all n locations
  Clone ID: LIB3028-003-Q1-B1-G9
ggtttctcttcctcccttggagaaaaagaagagccaccgctgcgacgccgttcgtgcatttttgaggtgccgctgtcatgtttgggcgtggtggaccaaggaggagtgataactccaaatattatgatattctcgggatttccaaaaatgccagtgaagatgaaatcaagaaggcctatagaaaggcggctatgaagaaccatccagataagggaggagatcctgaaaagtttaaggagttaggtcaagcatatgaagttttaagtgatcctgagaagaaagaactgtatgaccagtatggtgaagatgcccttaaagaagggatggggggaggaggctcgtttcataatccatttgatatatttgaatcattttttggangagcaagctttggtggtggtggt

SEQ ID NO: 4737 - DNA, 411 bp, Glycine max
  Clone ID: LIB3028-003-Q1-B1-H1
gaaacaaacccacccgggacaacctcctcctatcattacactaccgccatggtcgaaccaaagtcccgaaccgtgggcaacaccgagcgaagctggtgccaagccgtccgcggtggcaccggcatcgccgtcctcgccctcctaacctcaaaaccccccgatatccccaagctccaaacctccctccgcaccctccaaacctcccacccaatcctcagttcccgactccaaaccaacgcaaccacattctccttcctcacctccccaaccccctccatcaaaatcttaacactcacgctccctactaacctcaccgaccccctggaccagattctcgaactcgaactcaaccgtaacccgtggcaggattctaccaccgaagaaaacgtgttcttcaccaccatctacgca

SEQ ID NO: 4738 - DNA, 261 bp, Glycine max
  Clone ID: LIB3028-003-Q1-B1-H10
agccaacaatacagatcatgcagaatcccaatgcaactcctttacaagaagttcaagtcatataaaattgaagaatctgtaggttcaagtgtggaggagaaaaaccattttcatcttcatatagactttttaatatctcttgatctctcacaaatctatatgaagatgaaaagatattaaaaagtctatcgtactccatcaaaacgaaagtagagaatatctagatttgtatcttcgtttatataaatgactagtgttctt

SEQ ID NO: 4739 - DNA, 405 bp, Glycine max
  Clone ID: LIB3028-003-Q1-B1-H11
tttatagtttactattgaaagatgggtttgaaaatggcaatactgatcctaggcctgctggccatgttccttttggtctcctcagaggtggcatccacgaattcaaaagaggtgacaaatggagttgaagatgccaaatatcctggtggaggctatggtgggggttacccaggcaatggcggtggtggctatcctggccgtggtggtggctaccctggtcgtggtggtggctatccaggtcgcggtggtggttaccctggtcgtggtggcggctatccaggccgtggaggagggtattgtcgctatggctgttgcggtggccggacatacaatggaggttgtagaaggtgctgctactacgccggtgaagctgttgctgcacaaactcaggataagactcacaat

SEQ ID NO: 4740 - DNA, 315 bp, Glycine max
  Clone ID: LIB3028-003-Q1-B1-H12
agagataccacttcgcttgccaactcacagctgatctatttgccacgaaccatacagatttcactatcaccagtatcttccaggagattgctggaagcaaggacactgttggacagtatgagtctgagacagcctttaaccttcgtggacacaatcgtgttgtgcacggcaatgatgtctttgatccagaattcaacattgtcgcccctggagctgattaaaccatttacttccccgccatcgaaactagccatatgttgacctccgtccacctcgacatcgaaaaacttctttatagctctgtggagaatgatg

SEQ ID NO: 4741 - DNA, 408 bp, Glycine max
  Clone ID: LIB3028-003-Q1-B1-H2
gccaagtgaaagtgagaaaaaataaaaatcaaagagcataatgtcagggatcattcacaagattggggagacccttcatgtgggagggcacaagaaggaggaggagcataagggtgagcaccatgctggagaatacaaaggggagcaccatggtgaacacagtagtgagtacaaaggagagcatcatggtgaacacaaagctggagagtaccatggtgagcacaagccagagcacaaagaggggttcctagacaaagtcaaggacaagatccatggtgagggcggcgccgccgagggcgagaagaagaagaaggagaagaagaagaaggagcatggccatgagcatggccatgacagcagcagcagcagtgacagtgattaaactgctgcatcacctatatatttaaa

SEQ ID NO: 4742 - DNA, 409 bp, Glycine max
  Clone ID: LIB3028-003-Q1-B1-H3
atctatggcaatgttttaccaatttaggaatgctggtgtcttttttttcctttgtgttcttctcttatctggtgtgtgtgttttgggtcgaccagccacttttctacaagactttcatgtcacgtggtctgactcccacatcaggcaatttgatcaaggcagggcaatccaactcagacttgaccaaagctctggatgtgggtttgcttccaaggtgaagtacatgtttgggcgtgttagcatgaagatcaaactcgtccctggagactctgctggcacagtcactgcattttatttgaactctgacacgaattatgttcgtgacgagcttgatttcgagttcttggggaaccgtactggggcaactttacacagttcaaaacaaacatctacgctcatggaaagggtg

SEQ ID NO: 4743 - DNA, 398 bp, Glycine max
  Clone ID: LIB3028-003-Q1-B1-H4
cagctctcctctcactttcatttctacatccctggctctgttccgtcgatgacgatggcgtttagggtgcgaaaccctgacctccgctttctcattcttctctctctcttgtccatcacttccgccaaggtcttcttcgaggagcgtttcgatgacggatggggaaatcgttgggttaaatcagattggaaaaaagatgagaacctggctggggagtggaaccacacctctggccaatggaatggagacgctaacgacaaaggtattcaaaccagtgaggattacagattctacgctatttcagctcagtaccctgaattcagcaacaaggataagacactagtcttccaattttctgtcaagcatgaacagaagcttgactgcggtggtggctacat

SEQ ID NO: 4744 - DNA, 403 bp, Glycine max
  unsure (1)..(403): unsure at all n locations
  Clone ID: LIB3028-003-Q1-B1-H5
ctaatccctatttttcttcctcagtagtgtcatttacgcttctcttctctgcagcaactatgcctaaccctaaggtcttcttcgacatgaccatcggcggtcaatctgctggccgcatcgtgatggagctctacgccgacgtcactccccgcaccgccgagaacttccgcgcgctttgcaccggcgagaagggcgtagggcggagcggcaagcccctccactacaagggctcgtccttccaccgcgtgatcccgagtttcatgtgtcagggtggcgacttcaccgccggaaacggaaccggcggcgagtcgatttatggcgccaagttcgccgacgagaactttcctgaagagcacacgggtccggcatcntctccatggcgaacgccggtcccggaaccaac

SEQ ID NO: 4745 - DNA, 405 bp, Glycine max
  unsure (1)..(405): unsure at all n locations
  Clone ID: LIB3028-003-Q1-B1-H6
gtgccttggacgaagatcttcaaggatgtgctgctatggtcgctaacattctcagagaaaaagggcagattgttgagttggttttggaaagcaaaccacttaaatgggtttttaaacgtgcagcccgattaaatgctgagcggcttgtgttagtggggaattctgaatggcaaaggggtgtggttggtgtcaaaattctctctactgctgaacagtatgaggttaaactggatgatctgaagtaaatcagaatttgaattttttgtggttatgtattctgtctttactattggtattaatttcaccttgattttttttacatagtcctttgagactcaagtacttgttttgtatgtgtacatactcacctgtgtatgcatatgtgattatccatataccanaact

SEQ ID NO: 4746 - DNA, 410 bp, Glycine max
  Clone ID: LIB3028-003-Q1-B1-H9
ctcgagccgaatcggctcgagcagcgaacacatgactgatctcaaagaaaagttcaagcgcatgtgtgaaaagtccatgataaagaagcgatacatgcacctgacggaggagtttctgaaagagaacccgaacatgtgcgagtacatggcgccatcgctggacgtgagacaagacgtagtggtgatggaggtgccgaagctgggaaaacaagccgcaacgaaagcgattaaggagtggggtcaaccaaagtcaaagatcacacaccttgtgttctgcaccacttcaggcgtggacatgcccggagcagattaccagctcacgaagcttctcggcctgaggccctccgtgaagcgcctcatgatgtatcagcagggctgcttcgccggcggcaccgtactccgcctcgcga

SEQ ID NO: 4747 - DNA, 412 bp, Glycine max
  Clone ID: LIB3028-004-Q1-B1-A1
atgccatccattttgtcatgaaagaataccactgccagcattggaacaataggcactcccaaagcgcttatggcattagagaagagggaagaaacctcacgaataagccccaaacaaccaatggtgaagacttgccaaagtatggctgtgaaagtgaggttcagcaaatatgaagccttccccaactcatactccttcatttcattcttcaaaccactccactctccactagcaaaaagtcccactaaggtagcaagggtagccacaagggaagtgtataatatcatatccaagaccactttgaatgtttctctttttatgaccttcttgaacacaagctgtgtgagggaaagccatagtccataccctgcagatgcaccaactgtgcatatgaatccaatcacatactttt

SEQ ID NO: 4748 - DNA, 408 bp, Glycine max
  Clone ID: LIB3028-004-Q1-B1-A11
atatccttagacctgctgtctccactcctgggaagcattaagaaagacaatgaggaagtttttccaatagcccagaaattgggggagagggtccttgaaagctgtgcaaccaagctgaaaccctacttggttcaagcagtgaaatccttgggtatatctgtggatgattatagtgcagtacttgcttcaatatgccaagatgtatctgatgacctggagaaaaatgatacatgtgttactagtgagcatgtggaagataagagtgagtcagcgaaacaatcactggaggagtcaacacattttgatcaggtggttaaaaaggattcaagggaagttacatcctctcagcaagaaaatcctgatgatgtgaataaatctccaaagtcagtcatgagcaatgttgttgca

SEQ ID NO: 4749 - DNA, 391 bp, Glycine max
  Clone ID: LIB3028-004-Q1-B1-A12
ccgccacttctgaatctattgaatcaacaatcatgtcggacgaagagcaccatttcgagtccaaggccgacgccggagcctccaaaacctaccctcagcaagccggtaccatccgcaagaacggctacatcgtcatcaaaggccgcccctgcaaggttgtggaagtttcgacttccaaaactggaaagcacggtcacgctaagtgtcactttgttggaattgatattttcactgccaagaaacttgaggatattgtgccctcttctcacaactgtgatgttcctcatgtgaatcgtactgattaccagctcattgatattgctgaggatggatttttgagtccgcctactgaaaatggtaacactaacgatgacctcaagcttcccactga

SEQ ID NO: 4750 - DNA, 407 bp, Glycine max
  Clone ID: LIB3028-004-Q1-B1-A3
aattcatccctcatttctcttttcgttctctccaatttcccgaaaccctaatttcctcaatcctggttttggaattcgacaatggagcagaagaggagcagcaagatgtacaacctgttcgtgaagcacttggacgggaaaaccctaaccctcctattcccctctccgatcctctacgcgagttccatcaaggatcgcctcttccaactcactggaatccccgcccaccaccagcgcctcgtcaccggctgtcgccacctcaacgatgacaaatccgctatccagtgctccccgggggacggcaacatgtttccctccgtgcgcctcctcctgcgcctcaagggcggcaagggaagctttggctcgcttctccgtggcgccgccaccaaggccggccagaagaagac

SEQ ID NO: 4751 - DNA, 410 bp, Glycine max
  Clone ID: LIB3028-004-Q1-B1-A4
agaacatgagaggatgcaattggactggcccagaagaatgcaaatttgtctgggtatagcaaagggcttagcttatcttcatgaggaatcaaggttgaaaatagtgcacagggatattaaggcaaccaatgtcttacttgataaacatctgcatgccaagatctctgactttggtttagccaaacttgatgaagaagagaatactcatatcagcacaagaatagctgggacaattggttacatggctcctgagtatgctatgaggggttacttgactgacaaagcagatgtctatagctttggaattgtagctttagagattgttagtggaaagagcaacacaaattataggccaaaggaggagtttgtatatcttttagattgggcctatgttctccaagagcaaggaa

SEQ ID NO: 4752 - DNA, 137 bp, Glycine max
  Clone ID: LIB3028-004-Q1-B1-A5
gaaagaaacagtgttaatttgctagcctcattttcatgatgaatgactatattaaaaatatttgcaacacaaaaccccatgtaacagtgaaatttcactttttttccaacgattctttatacacctgaactttgctt

SEQ ID NO: 4753 - DNA, 406 bp, Glycine max
  Clone ID: LIB3028-004-Q1-B1-A6
tctctctctctcgtgttctgagctgctagaagcaatggagaggaaaagaagccatgcttctttcaccatgtttgcaatgcttgttggattgctctctcagagccttgtcattcctgtaatatccaccactgttgcagatcagaagaactactacaccccagatccacatgctggaagtccccccacaggtttctccgattctctgtgctcacacaatagtagtcctccatctcatggccatgggagctctccaccctcacatcacaatagtccaagtactccatcaacaccctcaggtggaaactgtggatcatcacccccacaacatcatgatccaacaccctcaactccatcaacaccatcaaaccctccctcaggtggatactatggaggtagccctccaaca

SEQ ID NO: 4754 - DNA, 404 bp, Glycine max
  Clone ID: LIB3028-004-Q1-B1-A7
gcgaaaacccccaactccaacctctgttcatcgtctaccgcgctttcttttcaaccagaactatgattaagctttttaaagtaaaggaaaagcagagagaacttgcagaaaatgcaagtggcggaccacctgttaagaagcaaagtgctggagagttgcgtcttcacaaagatataagtgagctgaatctaccaaaatcatgtaccatgcaattccccaatggcaaagatgatctgatgaactttgaagtttcaattcgacctgatgatggatattacttaggtggcacatttttgttttcctttcaagtgtctcccatctatccacacgaagcaccaaaggttaagtgtaagacaaaggtctatcatccaaatattgacttggaaggaaatgtttgtctcaac

SEQ ID NO: 4755 - DNA, 404 bp, Glycine max
  Clone ID: LIB3028-004-Q1-B1-A8
tacacaccacacaacacagatcatgggagtggatttaaggcaagtggtggcgggtgtgctcaccctcacaatgttcgtcatgcttattcacatgatcaaaagggaccattttgatgctgttcatgataaacttcctggaacagaggatgtcggctttgaaagtacaaactttgatactactcatgttagaaagaacatcgggatttggaagggagatgctgatgagttaaacccatgttgggctaagccatctgaagacaatgcggagactgaggggtttgttaccttttcactaaccaatggcccagagtaccatatatctcagatagcagatgcagtgcttgttgctcgcagtcttggggcgacacttgtcatccctgacattagaggaagccaacctggtg

SEQ ID NO: 4756 - DNA, 383 bp, Glycine max
  Clone ID: LIB3028-004-Q1-B1-A9
cagaaagaaccccaaaagacttttctggctatatttaaggcaagtggtggcgggtgtgctcaccctcacaatgttcgtcatgcttattcacatgatcaaaagggaccattttgatgctgttcatgataaacttcctggaacagaggatgtcggctttgaaagtatatactttgatactactcatgttagaaagaacatcgggatttggaagggagatgctgatgagttaaacccatgttgggctaatccatctgaagacaatgcggagactgatgggtttgttaccttttcactaaccaatggcccatagtaccatatatctcagatatcagatgcagtgcctgttgctcgcagtcttggggctacacttgtcatccctgaca

SEQ ID NO: 4757 - DNA, 401 bp, Glycine max
  Clone ID: LIB3028-004-Q1-B1-B10
caagattactgttactgctgcactggggtttgatagtttcttggttatgcgccatggagctggtcctttatctgcggatatgccagtaaataatgcaaatggaaaacatagattgggctgttatttctgcaatgatgtcgtggcaccaaccgattcaacatccaactgcactttggaccagcaatgtactgtgacccgaccagggctagctcctattgcttcagcccttgcagttgaacttttagtagggattttgcatcatcctcaagggatatttgccgaaggtgatattaacaacagtgtcactggagctactgagcaacctcttggtattttgcctcatcagattcgtggttccctttctcaattttctcaaatgaaccttataggttactcctcct

SEQ ID NO: 4758 - DNA, 394 bp, Glycine max
  Clone ID: LIB3028-004-Q1-B1-B11
ctgccatctgtatctgcatagcataaataccgcacgcacgcgattcctatgatttgttttttcactctgggcgattttccctattctttttgagtgccgagcaaaaccctaatcgagttcgattgcaacacacctccgttgctgtattccaccttctccgacgaatggcaaccaaacctcttacaaccgaagctattgcgcttacagaaaagaagatggacatgacattagatgacataatcaaaatgtctaaaaatacgaagaataagaagccaagaagggttctgaacaaaagtcaaaagttttcaaataattttactcaagataagtctgcaaaggtccaacgttatatggaatcaagatcttctcttagacagggggctcttgcaaaaag

SEQ ID NO: 4759 - DNA, 405 bp, Glycine max
  Clone ID: LIB3028-004-Q1-B1-B12
ctacaactagtaacaaagatccaacaagcagatcaatctctctctctgtctcccaatcaaaacagacatgggtttgaaggaggattttgagcagtatgctgagaaagcaaagactttgccaccgactcaatcaaacgaagacttgcttatcctttatggattgtacaagcaggccaccgttggacctgtcaacaccagccgtccgggaatgttcaacatgagggacagagctaaatgggatgcatggaaggctgttgaagggaaatccaaggacgaagcaatgagtgattacatcactaaggtgaaacagctgctggaagcagccggcatgcctgcttgataacattgtcatgccttgctttcttattctgtgctagaagttccaacagtttggaaataaacaat

SEQ ID NO: 4760 - DNA, 407 bp, Glycine max
  Clone ID: LIB3028-004-Q1-B1-B2
cgaagagtgaaggttcgttgaatcccatggcgagagtgaagcacacgccagcttctcgcaaatccgctaaaaagcaagcgccacgcgcatccacttccacgcagccgccaccacaatcccaatcgcctgcaactagagagaggaggagagctcaacaagtggagccgcagcaggagcctgaggctcagggaaggaagaagaggcgcaataggtcgggaactgtggcgcttcgtgagattcggcattttcagaggagttgtgagcttctcatcccggctgctccctttatcagatgtgtcaaacagattacaaatcaattctctacggaggtgtctcgttggacacctgaagctgtggtagcacttcaggaggcagctgaggaatatctggttcacttatttgaagat

SEQ ID NO: 4761 - DNA, 349 bp, Glycine max
  Clone ID: LIB3028-004-Q1-B1-B3
ggggaagagaagaaaataatgaacatatacactatattgcctaagataactaacgggttgttgggttttaaagtccttggtgatttggatgtggcccatacttggcaattgatggccacacttgccttccaaaagccgtgctactttgctaacaacctctaacttgtgtaagctccaaatatctgttgtatggctagttagagaatatcaagtagaaatgggttgttgtattgtaagtatgtacatctacaaaacaaatccttacatttgaaccactagttcaatgaaatatatgtagttctaacttaatgctattttgaaatacatttccccctggaaactccctcat

SEQ ID NO: 4762 - DNA, 408 bp, Glycine max
  Clone ID: LIB3028-004-Q1-B1-B4
ggaagcacttcttcagaggagtcacgagcctctcgtgctacagaaaaccatagcatagagattgctatgggttatgcaaaatcacttgggagggaaaaatattcagtgatatgtcattattttaagcagttccgtgaacttagaaattggtgttgcccatctgagcttgattttattgcttctttaagccgctgtaggaattgggatgccaaaggtggaaaaagcaagtcctattttgcaaaaacacttgatgacagattcatcataaaagagattaagaagacagaacttgattcatttttggggttttcttctctgtatttcaaacacatgagagaatcatttgaatttggcagccaaacttgtcttgcaaaagtcttggggatatatcaggttactaaaagacac

SEQ ID NO: 4763 - DNA, 399 bp, Glycine max
  Clone ID: LIB3028-004-Q1-B1-B5
aatatattccattctctctgtgtatttccctacctctcccttcaagatgcagatcttcgtcaagaccctcaccggcaagaccatcacccttgaggtggaaagctctgacaccatcgacaacgtcaaggccaagatccaggacaaggaaggaatccccccggaccagcaacgtctcattttcgccggaaagcaacttgaggacggccgtacccttgctgactacaacattcagaaggagagtactcttcacctcgtcctccgtctccgtggtggcatgcagatcttcgttaagacactcaccggcaagaccataaccctagaggttgaaagctccgacaccatcgataacgtcaaggccaagatccaggacaaggagggtatccccccggaccagcaacg

SEQ ID NO: 4764 - DNA, 401 bp, Glycine max
  Clone ID: LIB3028-004-Q1-B1-B8
cctgatcatggtggcggttaccctgtccgtagtggtggacactgtatgcatggatgttgcggtggccggacatataacggacgttgcaggacgtgctgctataaagctggcaaagctgttgctgcaaaaactcaatataagactcatgattaacacgatgcaatgctacgtaattagtacttttgataatttattttcagtgaaatagaatagcttgtgactggacaagcatggattctcatcaagcaagaatcaatgatatttcacacgactatacatatttcacaattacagattaatagtgttgttgaatgtataataatacacatcatcgtgactgtgatgatcagtttaagagaaaattgacatacattggtgatcaaaaaaaatgtgttcaccgg

SEQ ID NO: 4765 - DNA, 378 bp, Glycine max
  Clone ID: LIB3028-004-Q1-B1-B9
catttttctagttcctgcgcatccaaacgagtccttaatatcgaactttcctgaagatggtgttgatagagcatgaagagagcaagcagagagacgcgaacccctccaacgccgccaacgacgattccgacggcttcgaaaccgccagcgacaccgatctggccggtgaaggcgacgacagtggggccggcatcccggaagaacagaatcgcaccgaacagagtcataccgagaagcagacggagcaagagccggaacacgatgctcctcggagcagcgaatcatccgagaacaatgccctgatcagtgaagaagaatcgagacagaaagcattgaatcaagcatatgaagcataggtagaatggaataagctttttg

SEQ ID NO: 4766 - DNA, 406 bp, Glycine max
  Clone ID: LIB3028-004-Q1-B1-C1
gataatgtattatcacattattcctgagtatcaaaccgaagagagtatgtacaatacggttagaaggttcggtaaggttagctacgatacactgcggttaccgcacaaggttctggctcaagagtctgacggctccgttaaattcggtcacggcgattcctccgcctacctgtttgatcctgatatttacactgatggtaggatctccgttcagggaattgacggcgttcttatccctcctgaagaagaagaagaacgcactcgccgcaccactccacttgttaaggttgctgctcctaaaccaagaagagggaagttgatggaaatcgcttgtagcatgtttggatcttttggacaagtctgccaatgaaatcgcattctcaactaatcacaaaaataataaaga

SEQ ID NO: 4767 - DNA, 408 bp, Glycine max
  unsure (1)..(408): unsure at all n locations
  Clone ID: LIB3028-004-Q1-B1-C10
gtccacgataatgctctccggaaacgaagacagctccgccgcgggctccgaccaaacccaccgtcaaatcttcgaccactatgcgtcccacacactcatccccgaccacttcctacacgcgccaacgcactccaccgccaccaccgccgccgcagccaccgtggatttcacccatcaccaccacttcaccccgcaaccccaccaccacaaccaaaaccacatgaaccaccaccaccaccatgccttcttcgacccacgcgcttttcatggcgcgtcgaacacctcttaccccccaccccattccatgctctcccttgacccgctacctcacgtcaacgcagttgggcctgggcacgggcccggttccgggccangcggacttctccttgtcccanagtctgaagacgt

SEQ ID NO: 4768 - DNA, 405 bp, Glycine max
  unsure (1)..(405): unsure at all n locations
  Clone ID: LIB3028-004-Q1-B1-C11
gtaaattaagaagatcattaatggcttctcttgcaaccttagctgctgttcaaccagctgcgctcaatggccttgctggaagttccctctctggaactaagctctctttcaagccctctcgccacactgtcaaatccaagaacttcaggagtggtgccgtggtagcaaagtatggtgacaagagtgtgtactttgatttggaggatctgggcaacactacggggcagtgggacttgtatggctcagatgcaccttcaccctacaaccctcttcagagcaagttcttcgagacatttgctgctccattcacaaagaggggattgttactcaagtttctgatattgggaggttggttcacccttgcatacttcagtgcaacagcctcaggtgacattctnacaatca

SEQ ID NO: 4769 - DNA, 409 bp, Glycine max
  unsure (1)..(409): unsure at all n locations
  Clone ID: LIB3028-004-Q1-B1-C12
cactcataacacaaagcacaaagcaaagctcatccttgagttaaaaaaatggcagcagcttcttccatggctctctcatccccatccttggctggcaaggccgtgaagctgggcccatcagccccagaagtgggaagggtgagcatgaggaagaccgtcaccaagcaggtctcctcaggaagcccatggtacggcccagaccgagtcaagtacttgggcccattctctggcgagcccccgtcctacctaaccggtgagttcccaggcgactacggctgggacactgctgggctttccgcagacccagaaaccttcgccaagaaccgtgaactcgaagtgatccactccaggtgggccatgctcggagccttgggctgcgtcttcncggagttgctgtcncgcaacgggg

SEQ ID NO: 4770 - DNA, 398 bp, Glycine max
  Clone ID: LIB3028-004-Q1-B1-C4
aaaagcactggcgcagctaccctgaggcttctcttctcttctcttctctgtcgtgagtcaccatggtgagggttagtgtgctgaacgatgctctgaagagcatgtacaatgctgagaaaaggggaaagcgccaagtcatgattaggccatcctccaaagtcattatcaaattccttttggtgatgcaaaaagcacggatacatcggagagtttgagtatgttgatgaccacagggctggtaaaatcgtggttgaattgaacggtagactgaacaagtgtggggttattagtccccgttttgatgtgggcgtcaaagagattgaaggttggactgctaggcttctcccctcaagacagtttgggtatattgtattgactacctctgctggcatcatgga

SEQ ID NO: 4771 - DNA, 404 bp, Glycine max
  Clone ID: LIB3028-004-Q1-B1-C5
aaagaaaagaaaatcctcaattttctgagcagccaaacactctctctctgtctctcgaaaattctcagtttgcagagaaaatctgaatcatgtcgtggcaagcgtatgtcgacgatcaccttctgtgtgacatcgaaggtaaccacctcactcacgctgctatcatcggccaagacggcagcgtttgggctcagagtaccgacttccctcagttcaaacctgaggagataactgccatcatgaatgactttaatgagcctggatcacttgctccaactggattgtatctcggtggcaccaaatatatggtcatccagggtgaacccggtgctgtcattcgagggaagaagggtcctggtggtgttactgtgaagaagaccggtgcggccttgatcattggcatg

SEQ ID NO: 4772 - DNA, 404 bp, Glycine max
  Clone ID: LIB3028-004-Q1-B1-C6
atcctgacccccaatcaggttatggtcacgggggttacgcgtatgagccacaacagccttcttatcctacacagcagccgtattatgcccaaccgccgccgccgccgccaaactatggcaatgaacctcagcctcatgctagcggcagagtggccggccacagaaatgagaagcggttagacaggaaatactcgagaatcacagataactacaactccatagatgaggtgactgaggctcttgcacgtgcaggccttgagtcttcaaatcttattcttggtattgatttcactaagagcaatgagtggacaggaaagcattcatttaacagaaaaagtttgcatcacattgggaatggtccaaacccctatgaacaagcaatatcaattattgggaagaccttg

SEQ ID NO: 4773 - DNA, 402 bp, Glycine max
  Clone ID: LIB3028-004-Q1-B1-C7
tttattacgagattagatgatctttcgatggactactgtccgcactacagccccaaatatgattcatcgccggagaagttcttagagagcatagagagatttctatatattcacaagggtttcaggagagccaatgccaatgtattggagccacgagcactttatctccactcggttttgacccatcgttcaggatcagctgcaatgctatcacttatatactcagaagttctgaaaatgcttcggttgtggagccttttgcattttgatgctgaaattttcttccctcgtgatgctcttacccttcccacaggctatcataagcagaaaagcaaggagtcagaccaagctcacataatgacttcaggaaacctattagttgagatcttaaatgatctgaag

SEQ ID NO: 4774 - DNA, 178 bp, Glycine max
  Clone ID: LIB3028-004-Q1-B1-C8
tgcggcggatgatcaattgtgctaccacaacaagattgacagccacaaaggacccttactgaatccttcctcaagttattcctatagatcagctcaactatttctatctattcatacgggtttcaggatacctattgccactgtgctggcgtcacgatcaccttatttccattcgttt

SEQ ID NO: 4775 - DNA, 401 bp, Glycine max
  Clone ID: LIB3028-004-Q1-B1-C9
ctcaatcgatgtcgcacaagcctttggactcgcgccacaccacagactcctgcttgttgcagctccgcacctggaaacccttcaagctccagcaagacgggccccaccccaaaccctactaccacaaacgcccctgcctctccgatcgcacaaccacctcgttttccctcgacatgtccaaactcaccctcgccgacgacgacaatcacaatcccaacaaccgcgccaccaattaccgcctcgtcgctcgcaagaggcgccgccgcggctcgcgatccgtgtccggccgcagcagcgaccggagcgggacgcgccggtgctgctccgtgggggcctccgccgcgtacggcacctgctccgatttcccggtggccatgggcaccgactccagcggggagctc

SEQ ID NO: 4776 - DNA, 396 bp, Glycine max
  Clone ID: LIB3028-004-Q1-B1-D1
catttttctagttcctgcgcatccaaacgagtccttaatatcgaactttcctgaagatggtgttgatagagcatgaagagagcaagcagagaaacgcgaacccctccaacgccgccaacgacgattccgacggcttcgaaaccgccagcgacaccgatctggccggtgaaggcgacgacagtggggccggcatcccggaagaacagaatcgcaccgaacagagtcataccgagaagcagacggagcaagagccggaacacgatgctcctcggagcagcgaatcatccgagaacaatgccctgatcagtgaagaagaatcgagacagaaagcattgaatcaagcaaatgaagcaaaggtagaagggaataagctttttgtagaagggaagtatgaag

SEQ ID NO: 4777 - DNA, 188 bp, Glycine max
  Clone ID: LIB3028-004-Q1-B1-D10
tttatattcttttcgacacgtcaaccaatctacttggagagtacttgtgaatgaagtgattgtaaggcccccaattcataggatcatggatccccctccccccttgtgcaatataaaaaaaaaatctttggatgataactgcaccaaatattttcatgtaatatataataatcatcgtactgcactcc

SEQ ID NO: 4778 - DNA, 392 bp, Glycine max
  Clone ID: LIB3028-004-Q1-B1-D11
atccacaccatccatccacaatctcctccagcctactactttactctgtttccttttgtttcttattgatctctgacaaccccaacacttccgaatcttgcattgtatctacccacttctcaaccaacaatggcaatggcaacccaagcctctctcttcaacccacccctctccggtctcaaacccagcgaccgagccaccgcgccatggaaacaatcctccaacctctccttctccacctcgaagcccctcaagttctcgcgaacaatcagagcagcagccaccgaccagacgacagaggcaccggttgggttcaccctatcggaactggacccaaacagcccttcaccgatcttcggaggcagcaccggcaggctcctgcgcaaggccca

SEQ ID NO: 4779 - DNA, 394 bp, Glycine max
  Clone ID: LIB3028-004-Q1-B1-D12
cggatgttcccgcggcggtgcgggagttttcccggacgctgttcaacatgaggccggacatctcgctgttcgtgtcgcggacggtgttccacagcgacctgagggggattctgggtctggttaacgtcccctgttgtattatgcagacggcacgtgacatgtccgtgcctgccagcgtggcgacctacatgaaggaccacatcggcggaaagagcagcatccagtggctggacacggagggccacctcccgcacttgagtgctccttcatacctggctcgccagcttgagattgcgctttcccagtagcgcgtggggaggcgcgtgctagtcctggcgcgtgggtctgcttgttaatttaagtaatttaactctactagtactagtactaccag

SEQ ID NO: 4780 - DNA, 412 bp, Glycine max
  Clone ID: LIB3028-004-Q1-B1-D2
cggaagtttgaaacatacatattcttcttaattttgggtcagtagtatgtggaagttgaagatagcagaaggaggagatgggttaatctctgtgaacaatttcattggacgtcaacactgggagtttgatcctaatgctggaactccacaagaacgtgctcaagttgaaagggtacgagaggaatacaaaaagaaccggttttgcattaagcaaagcggtgacctactcatgagaatgcagctcacaaaggagaacacgtgtgggcccattctagcaagagtgaacgtgaaagacacggaaaacgtaacggaggaagcattgatcactacaatgagaaaggctatcaatttctattcctctattcaagcccatgatggccactggccagcagaatctgctggccctttgttt

SEQ ID NO: 4781 - DNA, 409 bp, Glycine max
  Clone ID: LIB3028-004-Q1-B1-D3
gaaaggaaggaaaaatggagttgttcttctacgcggtgttcggcggtttgggagcggttgttgcagtgacggagctgagcaagagcaacaaggaccgaatcaacacctcttccgcattcaattccttcaagaacaactacctcatcgtctattccctcatgatggctggagattggctacaaggtccatatgtctactacctttacagtacatatggatatgggaagggagacataggacaactcttcattgctggttttgggtcttccatgctctttggaacaattgtcggatctctagctgacaaacaaggccggaagagggcttgtgtgacttactgcataacctacattttgagttgcatcaccaagcattctcctcattacaaagtcctgatgttgggccgtat

SEQ ID NO: 4782 - DNA, 407 bp, Glycine max
  Clone ID: LIB3028-004-Q1-B1-D4
gtataggcgtgccaaggtcttgttaattttgagcgttaagtgctgcaactaatcagatcccaagaccttggcctaccttgccatacagaaaaaaaaaaagcaaaaaaaaagccaaggtttggagccaacaaaaataaacacaaagcacaagtcatggaaagaataatggttggaagtgcaacaaaggttgctttcaccctcttggccactttcgccattgtcattccatgccttgaggctggcattgctgagtttgacgattttctcaaagcccaagctgatgaagcccataaaattgctcttgattcctatgtcccagagccccacgatgtcgcccatgaactcaatttccatgttcatatggcactggaaaactccacaaggagggaactaaggcagaggaaact

SEQ ID NO: 4783 - DNA, 403 bp, Glycine max
  Clone ID: LIB3028-004-Q1-B1-D5
catcgaacccgtcgtagcagaaaaacttgtcaccatggtttcttccgacaaggatccacgagaggatgtccttcaagcctggtacatggatgatagtgatgaagatcaaagactcccccaccacaaagaacccaaggagtttgtctcgttggaccaacttgctgaacttggagtccttagctggaaactagatgctgataaccatgaaaatgatccagagctgaagaagattcgtgaagagcgtggttacacctacatggatgtttgtgaggtctgcccagaaaagttgccaaattatgaacagaaaatcaaaagcttctttgaagagcatcttcacactgatgaggagatccgcttttgtgctgctggaagtggctattttgatgttagggatcgcaatgaa

SEQ ID NO: 4784 - DNA, 401 bp, Glycine max
  Clone ID: LIB3028-004-Q1-B1-D6
gaatagtgagcaactaataatgacatatgttacattaatcatcctattgaggaaacttcataatggaattcaaggtcacatgattgttacatggatagccgtgagttgcaagggaaagcgtctgtacacacatgatagatatcgacgtctaatcgtctgagacaatctaaggatgcacacagtgatcatttgaacgtgtcagaagcagtgacagtagagaaatgtgtaacatacaggatactaccctcacaatcatagaggatcctatggtgagcgatagcccacttcaagctccaacttttgattgtcaccatctaatttagtgactcaggctaatgagagactcacatacggataaaattgatgtagagtctaagcagtatctggatgccatgatatct

SEQ ID NO: 4785 - DNA, 403 bp, Glycine max
  Clone ID: LIB3028-004-Q1-B1-D7
aacttaagttcattccttgtgttttgctttcttcctcaaaaccaaacatgtcgaacacatgcggcaactgcgactgcgctgacaagactagctgcaccaagggaaacagctatggtgttattgtagagactgagaagagttacatcgagactgttgtcatggatgttccagcagctgagcatgatgggaagtgcaagtgtggcactaactgcacttgcacggactgcacctgtggccattaaggaatatgtatgaaaatgtaattgccatgtgtttggcaatacaaatatccaaataatgtaatcttcgtatgaataaatgtgtgtgctgttatcctacttcaggtctgtgtagtcatgcagtctgaatcatttcaagttcctgtcttagttaatataacagc

SEQ ID NO: 4786 - DNA, 80 bp, Glycine max
  Clone ID: LIB3028-004-Q1-B1-E1
ggttgtgaagtctgagtctgaatgccaatgttccagtactcgacgagttcatactttgcttctgtcagaagtcatatcct

SEQ ID NO: 4787 - DNA, 334 bp, Glycine max
  Clone ID: LIB3028-004-Q1-B1-E10
caccaccatcttcttcctcttcacagtgctcaaggtttcagcatcatcgtcagtgatattctacaacaagtgcccccacccagtgtggcccgggatccagcccagcgcaggaaagcccgttctggcccgcggaggcttcaagctcgccccaaaccgggcctactccctccagctacccgccctctggtccgggcgcttctggggccgccacggctgcgccttcgacgtcggcgggcgcgggcgctgcgccaccggtgactgcggcgggtccctcttctgcaacggcatcgggggaagcccaccggcgaccctggcggagttgacgctgggcaac

SEQ ID NO: 4788 - DNA, 405 bp, Glycine max
  Clone ID: LIB3028-004-Q1-B1-E11
caccaattcacacacataataaactcactgctcttctctctacccctccctccctcctcgcctccgcctcaagcttccctccttcaccctcccctccccgaacgccgtcttcgccctcctcctcctcacctacttcatggtcgtctccggcattgtttacgacatcatcgtcgagccccccggcatcggctccactcaggacccctacaccggcgccgtccgccccgtcgtcttcatgtccggccgcgtcaacggccagtacatcatcgagggcctctcctccggattcatgttcgtccttggtggcatcggcatcattctcctcgacctcgccctcgatcgcaaccgcgcgaaatccgtcaaggtttcctacgcctccgccggcgtttcctccgtcgtgctagc

SEQ ID NO: 4789 - DNA, 404 bp, Glycine max
  Clone ID: LIB3028-004-Q1-B1-E12
tccatagcttctttagccttggataagggagaacttgtttctgatgacttggttgttggcattatagatgaagcaatgaagaaaccatcatgtcagaaaggtttcattcttgatggttttccaagaactgtggtccaagcacagaagcttgatgagatgctgcaaaaacaaggagttaaagttgataaggtgctcaattttgcaattgatgatgcaatccttgaggagcgaattactggtcgctggatacacccatccagtggcagaacttaccatacaaaattttcccctccaaaggttcttggtgttgatgatgttactggtgaaccacttatccagcgcaaggatgacactgcggctgttcttaagtcaagactggaggcatttcacaagcaaaccgaacc

SEQ ID NO: 4790 - DNA, 411 bp, Glycine max
  Clone ID: LIB3028-004-Q1-B1-E2
accaaattgcttctgtccatccctgtcattctcaagttggctgatgctcttgacatagctgtgaaatctgtgaggtacactcgtggaagcttcattttccctggggcacagtcttttcctcaccgcagtttttccgaggaggtttctgttcttgacagctatttcagcaaccttggttctggtagcaaagcatatgttatgggtgacccttcaaagtcacagatttggcacatctactctgcaagtgcacagaccaaaggatcatctgaagctgtctatggcctagagatgtgcatgaccggtttagacaaggaaagtgcttctgtgtttttcaaggagaatacatcttcagcagcttcaatgaccgaaaattctggaattaggaagatccttccacagtctgatatatct

SEQ ID NO: 4791 - DNA, 406 bp, Glycine max
  Clone ID: LIB3028-004-Q1-B1-E3
gcagaaagcatgtctcaaggatgaagcattgtcgagttgatacttctaatgcattgaaatcatccccgtggtttagatttccttatccattacaatggggtactcctatctttcactggaaaatggctcttgtgatgtgcgtggtttccttgatctcatctgtagattcggttggttcgtatcatgcttcttcattattggtagcatccagacctccaactcctggagttcttagtcgaggaattggtttggaaggtctttctagtgtcttggctggtctctggggaactggaacaggttctactaccttaactgaaaatgttcatacaattgctgtcactaaaatgggaagccgcagagcagttcaattgggtgcatgctttctgattgtgttgtctctcgtggg

SEQ ID NO: 4792 - DNA, 412 bp, Glycine max
  Clone ID: LIB3028-004-Q1-B1-E4
gttgacttctgaaggatttgagtttgtccacaactacaagataactaagcacttggttgcatcgtttccaaggctaattaaccttgtcaatggctgcaagaagaaagcaacggtggtgaatgtggcaactaatggcaggataataagaaagcttgatgatagtgatgggaaggtgattaattttgtgacttcagctgtggagtttgaggaccacctttaccttggtagtcttaattccaactttgttggaaaattaccattgtatagtgcatagaatagtcaagtttagccctccttgaataaaggtgtgcctcagcttggattaagcgaaagaagcatcccatgatggatatgtatgatttagaccaagcacatgtaggagaatattgttccataatgcatattctctgtt

SEQ ID NO: 4793 - DNA, 403 bp, Glycine max
  Clone ID: LIB3028-004-Q1-B1-E5
cataccaatatcttaaaatatctcttccatagaagtttgttttcaaagtgtgtttgtctcacagatcctactcttgtgaccacggatcttcacttcactctctcactctctctctctctctctctctctctctctctctctcttttttgggacgcttttttctcttctcaaagtaaaccagggcaagcaattatattacactactcactcactgagaccatggctcataatatcaccaccgtcaccgacgctcaagccaaggccgcaggctggcgtggccgtgcctaggtcaccttcatcgctggaaacggtgactatgtgaaaggtgtcgttggcttggccaaaggtctgaagaaagtgaactgcatgtaacctctggtggttgcagtgttacccgatgttc

SEQ ID NO: 4794 - DNA, 297 bp, Glycine max
  Clone ID: LIB3028-004-Q1-B1-E6
ggatcacattgttaagacttagtggcttaattacaggatcatggatctcatttactgaaggaattctattaatatagcttattctttcattcacactcattttttttaacaagttctgtaaatccatgttcatttgccccattactgtaaaatagttacctcagttgtattgaaactggaagagtgccgcctatttctggtacactctcagattgtgcttcaattttctagtttcattactgatattatgtacttcttctacaatcaatgacaaaaattatgcttctgtttgttcct

SEQ ID NO: 4795 - DNA, 403 bp, Glycine max
  Clone ID: LIB3028-004-Q1-B1-E7
ctttttgttgcttcggagccaactcaacaacaacgccgtgcctaatccttaagaataacgaattacaacaaccaaccatgttgcattgtctcaacacttcctgttcggacatcacagtcttggaaagacaacgggaagcaaccatcaagtgccagaaccaccaaccaccctacttaacggactttaacgccgtcttcccttcttcttcttcttcttcttcttcttcctcttcttcttctcatagtcagggcttgctcatgatgtgctcggattcctcgctcggccaggtcctaactcactccgtcaaacccgatccgggcgtctggcccgaattcggttttctacccgccatttcgagaacttgtagcagagacggagacttggtttcgctcaaggaaaacat

SEQ ID NO: 4796 - DNA, 410 bp, Glycine max
  Clone ID: LIB3028-004-Q1-B1-E8
gatgaagaagtgtttcgcgcgcatggacgaagaggttctcaggtggagccagaacaacgagactccaaattgcaggtgcgagcttcaaaccccgcactgcgacgccgtaggctccaccgctgtcgtcgccgtcgtcacgccagagaaaatcatcgtcgccaactgcggcgattcacgcgccgtgctttgtcgcaacaaggtagccgtcccactctccgacgatcacaagccggaccggcccgacgagttgcttcggatccaagccgcgggagggcgcgtgatatattgggaccggcctagagtgcttggagtgttggctatgtccagagccataggggacaattatctgaaaccgtatgtaatttcggaaccggaggtaacggtaacggagcggagtgacaaggatgagt

SEQ ID NO: 4797 - DNA, 405 bp, Glycine max
  Clone ID: LIB3028-004-Q1-B1-E9
ctcctctcaccctcctctctccccgtctctctctccttctccctgcctcctacctgctccgctgccgtcccccgccgtgctccgtccctccgccgccgcctccgacgacctcagcttccgcgacgtcgaaaagctcttctcctctgtctccaccaccagcctcctccgctcctccgccgtgctgcacgccaccgccgtcgagcccatggttgacttcggcacatggctcttgcgatcaaatctcatgcacgtgcatggcatccgcgacctcatcctcgccaccgtccgcaacaccttcttcgaccacttttgcgccggcgaggacgccatcaccaccgctgccagcatccgccacctaaaccgtgccggcctccgcggcatgctcgtctacggcgtcgaagacgc

SEQ ID NO: 4798 - DNA, 408 bp, Glycine max
  Clone ID: LIB3028-004-Q1-B1-F1
gacaaagtaaattcagcacttctgctgccattgaggaagaacccattaaaccatcaatacaagtagaacacacccaactcttaattgatggaaaatttgtagatgctgcttctggtaaaacttttcaaactttagatcctaggacaggtgaagtgattgctcatgttgctgagggtcactctgaagatgttgatcgagcagtttcagctgcacgaaaagcatttgatcatggaccatggcctaagatgacagcttatgaacggcaaaggatcttgttgcgtgtggccgatctgatcgagaagcataatgatgagcttgcagcacttgagacttgggataatggaaagccttatgaacaagctgctaagattgaagttccaatgcttgttcgcctgattcgatactatg

SEQ ID NO: 4799 - DNA, 409 bp, Glycine max
  Clone ID: LIB3028-004-Q1-B1-F10
cttttacctttccttccttccacttccaattttcaataattcacgactccttccgagatctctctctctcgcccacaatccaaccatggcgaatacggggaatttagacgcggcgatagagcaattgctgaacgtggagaagcagatgaggctcgccggtgacgtggcgggtaccagaaaagcagccaccgatattttgcagctctgcttcgatgcacgagcctggaaaacactcaatgaccagattgtcgttttgtcaaaacgacgtggccagctcaagcaggctgtaacagctatggtgcaacaggctatgcaatatattgacgagacaccagatatcgaaactcgcatagaactcatcaaaacgttgaacagtgtgtctgcagggaagatatacgtggaaattgag

SEQ ID NO: 4800 - DNA, 197 bp, Glycine max
  Clone ID: LIB3028-004-Q1-B1-F11
agcaaagaagggggtggagggatacccttcctaatgacccttattccaccaagcttgtagttgtaccaagcaagtctttctggcagagggatgttgagatacatccttaggatgggtatccctccacccccagcatagaaaggccaaagtggattcctatttgtatgccacgacaggacagttttagaccctgtggt

SEQ ID NO: 4801 - DNA, 405 bp, Glycine max
  Clone ID: LIB3028-004-Q1-B1-F12
atagcccaagccctatacaaccaaaccctaacacacacccatttgattcagtttccatggctagcctcaaggttgcatttttggctgcagtgctctgcatggttgtggtgagtgcacccatggcacatgcagctatcacgtgcgggcaggtgacgaatagcctgatcaattgcatcggttacctccagaacggaggaacgccgccgtcgggatgctgcaacggagtgaagagcctcaatgccgccgccaagaccaccgccgaccgccagacggcgtgcaactgcctcaagtcggccgccagccaaatctccggcttcaaagccaacaacgccgcctcgctccccggcaaatgcggagttcccatcccctacaagatcagcacctccaccaactgcgctaccatca

SEQ ID NO: 4802 - DNA, 212 bp, Glycine max
  Clone ID: LIB3028-004-Q1-B1-F2
cattttccctcttctttctctctcacgttttccgcttcagttttctcgggaaaatcacggtgaaaggtccaggcctctagtctgacattggcaagagagctcgcgatcttcggttcaacgattaccagaatgaccacaagttcaccatcaccacttacacttccaccggagtggaaatcactgccactggagtcaggaaaggtgagatacat

SEQ ID NO: 4803 - DNA, 412 bp, Glycine max
  Clone ID: LIB3028-004-Q1-B1-F4
caagcattggcagagagggaaggtctctcgtttcttgagacatctgcactggaagcaaccaacattgagaaggcattccaaaccattttgacagagatttatcatattgttagcaaaaaggcgctcgctgctcaggaagcagctgttggtaccatacttcctggtcaaggtaccaccatcaatgttggggatgcatctgggaatacaaagagaggctgctgctccgcttaatgtgacatgtgaggaaaaagcgatggtagcagatagtattttttccccccaattctgttttgcccctttctcttttcatcttttttttttcctcctttctttatgggtgagagacacatgtagagtacatttacttcatctagttgcaaaaacaaagtctgtgaaattttataaaacaata

SEQ ID NO: 4804 - DNA, 406 bp, Glycine max
  Clone ID: LIB3028-004-Q1-B1-F5
aaattaaaaccgagcctcttccccaaaggagacacagagcgagagagaatcgtaacaaaagcggtaaccggaataagttgtctctacgatttgagccatggcaacaacaacaccctcaaaccgatcatcagaggcgtttgctctcatggcaatcctcagcactctgctttgcacggcggtggcggcgaaggagagcgtgtacgagatactccccaagtacggcctcccgagcggtctgttaccggacaccgtcaccgactacacgctcgacgaggacgggcaattcgtcgtcgttttggcgaagccctgctacatacagttcgattacttagtttactacgagaccaagatctccggcaagctcagctatggctccatcaccaacctcaagggcattcaggtccag

SEQ ID NO: 4805 - DNA, 402 bp, Glycine max
  Clone ID: LIB3028-004-Q1-B1-F7
tcgtgttgctgttcaatgtaaggttgcatcagatcttcccaagcttgttgaaggtcttaagcggttggccaagtcagatcctatggttgtttgtaccattgaggagtctggtgaacacattgttgctggtgcaggagagcttcatcttgagatctgtttgaaggacttgcaggatgatttcatgggtggagctgagatcattaaatctgaccctgttgtgtcattcagggagactgtcctggagagatcatgccgcactgtgatgagcaaatcacccaacaagcacaatcgtctgtacatggaagcaagaccattggaggaaggtcttgccgaggccattgacgatggcaagattggaccaagggatgaccccaagattcgctccaagatcttgtcagaaga

SEQ ID NO: 4806 - DNA, 398 bp, Glycine max
  Clone ID: LIB3028-004-Q1-B1-F8
gaactcatgaccaagattgacaggcgatccggcaaagagcttgagaaggagcccaagtttttgaagaacggtgatgctggttttgttaagatgattccaaccaaacccatggttgttgaaactttctccgagtatcctccacttggtaggtttgctgttagggacatgcgtcaaactgttgctgtgggagtcatcaagaacgttgagaagaaggatcctaccggagccaaggtcaccaaggctgcccagaagaagaagtgaatcgtgcgggctggttcatcaggggatgttggttacaataaatgttggtttcttttctgtactcttgtgtcttcttttctaggtagcttgtttttcggacaaagtttgaagtctccaccatcatctcgcaactgttg

SEQ ID NO: 4807 - DNA, 404 bp, Glycine max
  Clone ID: LIB3028-004-Q1-B1-F9
ccacaagcaagtttgcaaaggcaataatctctattaccctcattatccaaaatcagaaaaaatggccactagaggcctcaaaatttgcttggccgtgtcctctcttttcttgatcattcttgccatcgttattgtgaccttaattttgaccatctttaaacccaagaacccagatatatttctccacccagttgacctagaaaactttcaattgctttcacctaatacaactagtgcacccttaggcatagtgatcacaattgtgaaccctaattatggaaacttcaagtacgtgaattccagtggctatcttaaatatcgtgacaccattatagccgaagttccattggggataagatcattccctgctcgtagcactaccaatgtgagcactactgtgggta

SEQ ID NO: 4808 - DNA, 406 bp, Glycine max
  Clone ID: LIB3028-004-Q1-B1-G1
gaacgcagatccagccgcttccgcttgttcgatcgctacagacgcttgtatcggattattcatgattgattcataagcagcatgtcttcctccggctatagttgttgcagatctcggatgttgtaaaattagtgtatgatgtgaagctatgggctggaaaatgtggatgtaggagatttcgggacgaaaggcctcaaaacgcttcgtcgtttgtggttactgagtcctgagtgatcttgtcatccgacctttgccatgacaggtgcgcttgcttggcaggtcaaaatatgttaataaaaaaagttttattggtttagggagagatcgcacgggagttgcccggggtctctctctcgtgtggtgtgtggtgtttgctgtgctctccttttcgttatgccttttatta

SEQ ID NO: 4809 - DNA, 409 bp, Glycine max
  Clone ID: LIB3028-004-Q1-B1-G11
atgaacacggtgctagatgaggaaagcgcggttggtggcggggacaagaagaaaaagaagatgcaaaagaaagaaaaggaagtcaggactttttactctattccagcagcacccgcgatggaaacgacccaaaggagggttgattttgcaaaagctgggccacccaatgtaatgttaatgcagcagatcccaaagcaaaaccctgagtattcattggtggagacaagtccaccactggcggctcgtttgcgctatagaggaggccgggacaagatatccaccacctacgacttagtggaacagatgaattacttgtacgtcaatgttgtcaaggctagggatctccctgttaaggatatcactggtagccttgacccttatgtggaagtcaagcttggtaactacaagg

SEQ ID NO: 4810 - DNA, 221 bp, Glycine max
  Clone ID: LIB3028-004-Q1-B1-G2
ctcaactctgaactcggcactaggaacaagataactgtaagtgcacagcagaagatttgtggacaatctctgaagaacgtgtacagaggaatcatgcaaaggccgtggggcaacgtgagcctcggaaactactggacccacatacaggcttccgcttctggctcagcaccctcaccatcacctaagaaaccccaccaacgtagaatcacacggcaaatcgc

SEQ ID NO: 4811 - DNA, 408 bp, Glycine max
  Clone ID: LIB3028-004-Q1-B1-G3
ttggcatcttgtgttgtgtccctcttttaagctatttccttctcttaacacaattggttgtgccaattgccatagtcaccaaccaattaacaaaggtatatatatcatcatatcatcaccaaatgaaaaatattgggttgttttttcttgtggtggtggctacttttgtggtggcagccacagctggtagcttttaccaagactttgaaataacgtggggtggtgagcgtgccaaaatctatgagaatggaaaccttctcacactctcccttgacagagcctctggctctggctttcgttccaaaaaagagtacttgttcggaaaaattgacatgcagctcaagcttgtgcctggtaactctgctggaacagtaactgcctattatttatcttctctggggcctactc

SEQ ID NO: 4812 - DNA, 410 bp, Glycine max
  Clone ID: LIB3028-004-Q1-B1-G4
ataacattaacatctccaaccttggcagcacaaagcaagccgcaggatctggtccggtcctcgtgcgtgcacgcgcggtacccgcgtctgtgcctgcacaccctctccaactatccgggctccgccaacacgccattagacgtggcccggacagcgctgaaggtgagcctagcgcacacacgccgggcctccaagttcctgcacgcgctttctcatgacgattcaatcatcatgagaaagcgtgagcgctccgcgctgcgagactgcacggagcagatctcggactctattgatcagcttcggcggagtctcgacgagctgcagcatctccgctcggagacattccggtggcagatgagcaacgccctgacgtgggtcagcgccgccctcaccgatggcgacacctgcct

SEQ ID NO: 4813 - DNA, 406 bp, Glycine max
  Clone ID: LIB3028-004-Q1-B1-G5
ctataaatcactccccttgtcccctcgaactttctctcttcgggttctcgtcaaaacgcaaagatgcaagttccattgatcgacatcgacagaatcaacgatctccaagtgggtctgaactctctgcagaacccatccttcccaatcccttctcagatcacaacctccctcgcttacaatttctgcaaatggggcgcagtcattctcgcccttgtcgccaccttcggcagcatcatcaacagagtcactatcttcatcatccgcttccgcgccaaagccccttctctcccatccctaaccctaaacgacgacaatttttacacctcctcctcctctgacgacgacgacgacgacgataacgacgacgacctaacctactcctcttccgagcccgaagacgagccct

SEQ ID NO: 4814 - DNA, 410 bp, Glycine max
  Clone ID: LIB3028-004-Q1-B1-G6
ctagcagcactggagctgccaaggctgttgggaaagtccttcctgctttgaatggaaaattgactggtatggcattccgtgttcccaccgtggatgtctctgttgttgacctcacggtgaggctggagaaggaagcctcatatgatgaaattaaaaatgctatcaaggaggaatcagagggcaagttgaagggaattcttggttacactgaagatgatgtggtctccaccgactttgttggtgataacagatcaagtatttttgatgcaaaggctggaattgcattgaataagaattttgtgaagcttgtctcttggtatgacaacgagtggggatacagttcacgtgtcattgacctgcttgtaatcgttgccaagaagtctttttaattaaggtggttctaacattat

SEQ ID NO: 4815 - DNA, 385 bp, Glycine max
  Clone ID: LIB3028-004-Q1-B1-G7
ggaaagttagaaatggctgaagagtgtttaaaacacgcaacagatttgagtgggttattgctgctatattcttctttaggagatgctgaaggaatatcaaaacttgcaactcttgctaaagagcaagggaagaataatgttgcattcctttgcttattcatgttgggtaaacttgaggactgccttcaacttttggtagaaagcaatcggattccagaggctgctttaatggctcgatcctatctcccaagcaaggtctcagagatagtggcaatttggatacaagatctcagtaaggtgaatccaaaagctgctgaatcattggctgatcctgaggaatatcataatttgtttgatgactggcaagttgcactagctgttcatt

SEQ ID NO: 4816 - DNA, 62 bp, Glycine max
  Clone ID: LIB3028-004-Q1-B1-G8
agtggcaatatcgtaagacatggccatcgaagcgttattagtcgtaaattcgacgcgttgct

SEQ ID NO: 4817 - DNA, 378 bp, Glycine max
  Clone ID: LIB3028-004-Q1-B1-G9
gctaagcgtgcctcagcatctgctggtggacagactacaactggagagaaagctgccactgcttgattacttccatttctagaacgatgatgaaaacaaccaatagtatggttttctgacaggactcaatgaacactgtatgaacatcttgaggtcagacttctcttggttggagctagtcattgtgattggattgtattaatgtgaagtaaatacttgtgtcgctagctgtagtttgttatctgcatggtttatagaagtcaaaccatgtttttattaaaatatgtacacaatagaataaagctatgatatttacatggggaacttggaaccatgtaaatacctttcctaaagcaaatagcgactcatatttaccct

SEQ ID NO: 4818 - DNA, 411 bp, Glycine max
  Clone ID: LIB3028-004-Q1-B1-H10
atgacacaaaaactgattatcagaccagagtttctttcaagtacgctgcttcgagaggggtgtatggaacgccttctttctatgtcaatggattcttgttgcctgatactggagctaccgctgactacaagacttggaggaaggtcattgatccattggttggtgtgaagaagagtatccagaatgaagagtcccttcgtttcttcttgtaaaaattgtgggaatgtaaagcccagttgcattagcactttatcattgaaggaatccaaataaagagtgtctcgtagctgctagtgtcgagaatgcaataatggaatcaactgttataaaacattccttagtccttgcatatacatatgtggcatgggttggaaattcgtatatatgatccacggggtgatgatgctaaaa

SEQ ID NO: 4819 - DNA, 405 bp, Glycine max
  Clone ID: LIB3028-004-Q1-B1-H11
ggaaacatgataaaataatcaaagctttgtgtgatatggctaaagataatgcacatgttcctatgctttcccgcactcatggacagccagcttcaccaactactttgggaaaggaaatggcgatctttgctgcaagattaagcagagaaaggaaggatctgtctcaggttgagatagtggggaaatttgctggtgcggttggaaattacaatgcacatattgttgcatatcctgatgttaactggcctcacattgcagaacagtttgtacactctcttggattaagttttaatccttatgttgctcagattgaaactcatgactacatggcaaagctttttcatttgctcatccagttcaataatatattaatcgattttgatagagatgtatggggctatatat

SEQ ID NO: 4820 - DNA, 402 bp, Glycine max
  Clone ID: LIB3028-004-Q1-B1-H12
cctaattgtttaaacctaattctcatttcttcatcgttcgattcttctcctcctaaagatgcagatcttcgtgaaaactttgaccggtaagaccatcacccttgaggtggagtcctccgacaccatcgataacgtgaaagctaagattcaagacaaggaagggatcccacctgaccagcagagacttatctttgcgggtaaacagcttgaggatggtcgaacccttgccgactacaacatccaaaaggaatccactctccacctcgtgcttcgcctcaggggtggcatgcaaatctttgtcaagactttgactggcaagaccatcaccctcgaggtcgaatcctcggacaccattgataatgtcaaggccaagattcaggacaaggagggtatccctccaga

SEQ ID NO: 4821 - DNA, 417 bp, Glycine max
  Clone ID: LIB3028-004-Q1-B1-H2
gttattagggtttttgagtgcggcggtccaaacactcttctctgcagcttttgcctacaactcccttcaccatggctgaacaaaccgagaaagcttttctgaagcaaccaaaagtgtttctcagcacaaagaagactgggaagggaaagagacctggaaaaggtgggaaccgcttttggaagtccattgggcttggatttaagactcccagggaagccatcgaaggaacctatattgacaagaagtgccccttcactggcaatgtttccatccgtggccgtatcttggctggaacatgtcacagtgctaagatgaacaggactattattgttagaaggaattatctccattttatcaagaagtaccagaggtacgagaagaggcactcaaatattcctgctcatatatcacctgcct

SEQ ID NO: 4822 - DNA, 409 bp, Glycine max
  unsure (1)..(409): unsure at all n locations
  Clone ID: LIB3028-004-Q1-B1-H4
cttctccttctcttctctgcttctcttttcatctccgaaaacaatgaagctcattagcagcattaaccccaaaaatctcaaactcagtcccaaacgcttctttcgcaaaaaggaacgatctttagtctcacgctccgacccaccttcattcggatccggatcttcctccgacgactccaccacaaatcacaagccttccgccggtaaccaaactccgaccagcgtcctcccgggcgtctccggagactggtccgacgtcgccgccgtcgacgtgcggtgggacctcgcccaggccttccgcctcatcgaccgcgacaacgacggcgtcgtcacgcgccaggacctcgaggccctcctcacgtgcctcggcgcgtcgccgtgccncgacgacgtggcggtcatgctcggc

SEQ ID NO: 4823 - DNA, 400 bp, Glycine max
  Clone ID: LIB3028-004-Q1-B1-H5
gccattcgtattgtcgcagagaaagaaaaccctagctcaccgtttcaagatgcaaatcttcgttaagaccctcactggtaagaccatcactctcgaagtcgagagttcagataccatagacaatgtaaaggccaaaattcaagacaaggaagggatcccaccagatcagcaacggctcatttttgctggcaagcagcttgaggatggacgtacccttgctgattataacatccaaaaggagtccactctccacttggttcttcgtctccgtggtgggatgcaaatctttgttaagaccttgacgggaaagacaatcacccttgaggtcgagagctccgacaccattgacaacgttaaggctaagattcaggacaaagagggtatccctccagattaacag

SEQ ID NO: 4824 - DNA, 405 bp, Glycine max
  Clone ID: LIB3028-004-Q1-B1-H7
atttcaaccaacagttctcaagggccataattttgttatcggagacaaatcctttaacaggagatgaaggagaaatcagaaaggattgtcgctacctcaatgccaattagatatataatataagcttgcatttgtgcatgataatatgtataattagcataagattataatgcacgagtgtgtcaaaataaagagggtgtggaacgtactgggcctgggttaccatacatattcagtgcaaaaagctattgggcctagccttatatatacccttgtgtttgctttgttcatagatgtgaatgttacttgacttcagctgacaaagcctcaaacatcttaaaggtttatgaagtactttgttcttcgctgtcgatctataatggaaaatgtttgatcaacatttca

SEQ ID NO: 4825 - DNA, 405 bp, Glycine max
  Clone ID: LIB3028-004-Q1-B1-H9
cgaaaatgtggaagagaacgggttttgaagaagaagcagttcaattgatcaactcagatttcagggacctaagtctagctgctaatagactcgcccatcatgccatcaaacttggtggcattggctttggagcctcttttttcggattgtttgctgccattgctgctatttatctgttgattttggatcgtacaaactggaaaacaaatattctcacagcactactcattccatacattttcttcagcttgccttcattaattttcgacgtcttcaggggagagcttggaaaatggattgctgcagttgctgttgtattacgccttttccttccaagacacttccctgattggctggaattgcctggtgctctgattcttcttatcgttgtagctccttctctaa

SEQ ID NO: 4826 - DNA, 408 bp, Glycine max
  Clone ID: LIB3028-002-Q1-B1-H1
cttgcattgggtggagcatacttagaaacagcaactatgtctctcatgcagcttactagctcccctgttggctcactggtccgtttcattgtaatatttgctttatggtacagaaccatggctttggccaagttgccaccaaacgcttcatcagttccagcagttttagcgtttggagattccatcgtggacccaggcaacaacaacaacataaaaacattgatcaagtgcaacttcccaccttatggaaaggattttcagggaggaaacccaacgggtcgattttgcaatggaaaaattccttctgacttaatagttgaacaattgggtattaaggagtatttgcctgcatatttggattcgaatctcaaatctagtgatcttgttaccggcgtctgctttgcctcc

SEQ ID NO: 4827 - DNA, 385 bp, Glycine max
  Clone ID: LIB3028-001-Q1-B1-A1
gtgactacggctgggacactgctgggctttcggccgacccagaaaccttcgccagaaaccgtgagctcgaagtgatccactccaggtgggccatgctcggggccttgggctgcgtcttccccgaactgttgtcccgcaacggggtcaagtttggagaagctgtgtggttcaaggccgggtcccagatcttcagcgagggtgggctggactacttgggcaacccaagccttgtccacgcccagagcatcctcgccatctgggctacccaagttatcctaatgggtgctgttgagggttatcgtattgctggtgggcccctcggtgaggtcactgacccaatctaccctggtggcagctttgacccattgggcctttgctgatgacc

SEQ ID NO: 4828 - DNA, 394 bp, Glycine max
  Clone ID: LIB3028-001-Q1-B1-A10
aaaaaaggcaaagcttattcccccaagacttagctagcactagcaaacacctctatatctaaaatggtttcaatttctgatcatgaactggttttgatctttggtctcctaggtaacattgtgtcattcatggtgttcttagcacccttgccaaccttctatacaatttacaagaagaaatcatcagaaggatttcaatcaattccatatgcggttgcacttcttagcgcactgttgcttctatattatggcttcataaagaccaatgctactttgattatcaccatcaactgtattggatgtgttatagaagtttcatacctaacaatgtacattatatatgctcccaggaaacagaagatatccactttggtaatgatactcattgccgaca

SEQ ID NO: 4829 - DNA, 391 bp, Glycine max
  Clone ID: LIB3028-001-Q1-B1-A11
gctacagaacgagcactctgatcctgaccctaatcctcccctttccttccttccttcggcaacaaaaatcatgtcggggtccttgggattcttctttgtgggtcttacgttgttgttgttggtctgggtggctaatgctgtggccaacacttccaacaaatttgatcaactcttccaaccaagctgggcttttgagcacttcattcatgaaggggatctcctcaaactcaaactagacaatttttccggcgctggttttacttccaagagcaagtatatgtttgggaaagtcaccatccagcttaagcttgtggaacgtgactctgctggaacagtcactgctttctatatgtcatcggacggtccaaaccacaacgagtttgattttgag

SEQ ID NO: 4830 - DNA, 386 bp, Glycine max
  Clone ID: LIB3028-001-Q1-B1-A2
gattgatggccttaaagctcatgctgagaaacatgtgactgatagaatgatgctcaatgctgctaacattttccccttcaacacaccaaccaccaaagaagcatactactatagaatgatatttgagaggttcttccctcagaactcagccaggctgagtgttcctggaggaccaagtgttgcatgtagcacagccaaagctgttgagtgggatgctgcttggtctaacaaccttgatccatctggtagagcagcacttggagtgcatgcatcagcttatggaaatcaggtcaaagctgtagaaccagagaagatcataccaaagatggaagtttctccactaggagttgccatatagagctagtatgagccatagcaaaaactag

SEQ ID NO: 4831 - DNA, 410 bp, Glycine max
  Clone ID: LIB3028-001-Q1-B1-A3
atttttctcttcaccttttccttctttccacaaaaatggttccatctcagttatccaagtatggtctcctcttcatttcttgcacctttttccttatcaacttcttaaccattcccatttcttccctcaacataggagttgaaaccaccggaatcactgtctctgtgagcaaagagtgcagcagaacatgtgagtcaagcttctgttcagtgcctcctttattgagatatggcaagtactgtggacttctgtatagtgggtgccctggggaaaaaccttgtgatggccttgatgcttgttgtatgtatcatgataaatgtgtccaagccaaaaacaacgactacctaagccaagagtgcagccaaacattcatcaactgcatgcaaaagtttaagaactcaagagctcct

SEQ ID NO: 4832 - DNA, 105 bp, Glycine max
  Clone ID: LIB3028-001-Q1-B1-A5
gactgacgtgactcgttcttcttcgtagctatcttcgtcctttgtcgttcgtgtgtttgctttttctctcacctcaaactgtcctgccgcggtgggacatgtagt

SEQ ID NO: 4833 - DNA, 415 bp, Glycine max
  Clone ID: LIB3028-001-Q1-B1-A6
cttcagtgatttttgcttaattactaaaccaaaccatttcttattccctcatcgaaaccttttctttctatatatttcccttttcaatatcatggcacctaacatcaccaccgttgttgccaatgccaccactgagcaattacccaaagctcatggaggaagtagtgggcgtgcctttgtgacttttcttgctggaaacggtgattatgtaaagggtgttgtgggtttggccaaaggactgagaaaggccaaaagcatgtaccctttggtggttgctgtgttaccagatgttcctgaagaacatcgtgcgattctcaaatcccaaggttgcattgtcagggagattgaacctgtgtaccctcctaagaaccagacccagttcgccatggcctattatgtcatcaattactccaag

SEQ ID NO: 4834 - DNA, 347 bp, Glycine max
  Clone ID: LIB3028-001-Q1-B1-A7
ggccaatgcaagcgtggttgatgtgggggccatagccacagtttgagtctcaggctctcagcatgtggaagcaacatgggaacggttatgtgtgttttctgttaataataaacaaaggctactcagaacatattagtgtttggtgtccttggataattggcatggaagcttgagcttgtgcagtatattaaaaccttaaagtttaaaataaaagtattaattaggttgatcttaatttgtgcgtatgatccgtgatatatatgatatgttgtcgcctgtgatatgatgattaagttagtgtgatatgtagtgatacactgtttaagaaagtaacttgtccattttac

SEQ ID NO: 4835 - DNA, 413 bp, Glycine max
  Clone ID: LIB3028-001-Q1-B1-A8
gtttgtagagaatctctcgatgatggcaaacagttgtgtttcaatggacaataataatatcctgggtcttctcaagcttcgaattaaaagaggcgttaatcttgcaattcgcgatgctcgtaccagcgatccgtatgtcgtcgtcaacatgggtgatcagaagctgaagactcgtgtcgtaaaaaacaactgcaaccctgactggaatgaagaattgaccctttctgtaaaggacgttaaaaccccaatacatctgacggtttatgacaaagacactttctctgttgatgacaaaatgggtgaggcagagatagacttaaaaccatatgttcagtgtaagcagatgggattgggcaagctcccaaatggttgttcactcaagagaattcaaccagatagaactaattaccttg

SEQ ID NO: 4836 - DNA, 402 bp, Glycine max
  Clone ID: LIB3028-001-Q1-B1-A9
cttctccttattcctcttctccttcttcttcttcctctccttcttcttcttcttcttcttcttcttcttcttcttcttgttgtaattcttcaacttcaatcctgtcttgtctctttctctctcgctcttttttttttttttgcttacctgcaaccggcttaagctgtggtaactccttcttttaattaatcactcttttgtttcggttattactcttattcttaatggccttaccagtgtgttgctcactgagaaaccaccaattttcagcatgacaaagataagtcctgaagttgaaatcaggatgccaatggaggcatttccaccaatttcagctgatgtgagctttatttctaatagttttccgaaatacaaactggatgttgataatcaagttctgga

SEQ ID NO: 4837 - DNA, 384 bp, Glycine max
  Clone ID: LIB3028-001-Q1-B1-B1
gctagaagcaataagatgaaaatgaaagtgcttgttttgtttgttgctacagttttggtagcatatgaatgccatggctcagactaccagaagttccctctccaaatgaaaactgggtttggtgggcaatacagcaatgaggtggcatgtgccagttggaggcttggcgtggaagcaaacaacgtagtcaagtggcaaactgttcctgcagcttgcggagagtacatagctgactacgttctaggagaccaatatagatcagattccaaaacagttaaccaacaagcttatttctatgctaaatccctcaaactcaccaacaaagatgtctttgtcttggacgttgacgacactactctctctaatctccagtattttgctaac

SEQ ID NO: 4838 - DNA, 384 bp, Glycine max
  unsure (1)..(384): unsure at all n locations
  Clone ID: LIB3028-001-Q1-B1-B10
ctggaaatgccatttatgatcncataggttctattgtagttggcaacttacttggaatggtagccatatttcttatccagagaaaccggcatgctttgattggtagagccatggatgaccatgatatggagaaagtacttcagtttttgaaaaaagacccggttgtagattccctctatgattgcaaaagtgaagttattgggcctggattcttcagatttaaggcagaaatagattttaatggagaaatggtggtgcaaaattatcttaaaaggactggtcgtgaagagtgggcaagacagtttcgtgaagctgctaagcagaaggatgatactgccatgatgaagattatgtcaaattacggtgaggaagtagttacagctt

SEQ ID NO: 4839 - DNA, 408 bp, Glycine max
  Clone ID: LIB3028-001-Q1-B1-B11
ggaacaagaagatatctgctggtgtacttggtgtagccacggctatttggatcttttttgagttgcttgaatatcacctgcttactctagtctgtcacatttccattctgttgcttgcggttttatttttgtggtccaatgcccatacctttattcacaaggcaccacctcgcatcccggttgttcatatccccgaagaaccaattctccaatttgcatctgcattgacaattgaaatcaaccgtggatttgctgccttgcatgctattggttctggaagagatttgaagacatttctcattgttattgttgggacgtggattatatcaattgtggggagctggtgcaatttcttgaccttgttctacattgcttttgttttgttgcatacggttcctgtcctgtatg

SEQ ID NO: 4840 - DNA, 411 bp, Glycine max
  unsure (1)..(411): unsure at all n locations
  Clone ID: LIB3028-001-Q1-B1-B12
ttcagtgaatangaggctctctgatgtcatgagcatgttgtcatcaagacaacctagctgtccacagttatacatgtatagctctgctgacagggttattcctgctgattcagtggaatcgtttgtagaggctcagcgtagggctggacatgatgtgagggcatgcaattttgtctcctcaccccatgttgaccactttaggaatgacccaaaattgtatacatctcagctcagtcagtttttggaggagtgtgttgttagtcgttgtaaatcttactaattctttacattccttggcttactcatacaccatatagttcatccattttgatttttgaaagcagccattccattaatggatggtgcgatggtgctatggtggttaggactatatcaaaagtcaaccacctc

SEQ ID NO: 4841 - DNA, 409 bp, Glycine max
  Clone ID: LIB3028-001-Q1-B1-B2
agcattagtactactgttaatgcaactagggttagtgatcttgagtccccaacatctaccttgtctgagaataatgcaccaccaattaatattactagtgttattgagtttgtgggttcttcagagagagggacggtgaaggaagagggagagcaagagtggaacaaattaggttatcatgaaagcttcacccatttgggagaatacaaagatggcaaggagaattcaatgcctttcacgtctagtctgcatgagttgacaatgaccatggcaaccacgtggggttctagcactagtggtgcacatgcacatgcacatgttgctgaggagggttgtttcaccaatcttttgctgaatgctaactccggtgcccggagtttgtcgccacaagacggtggagaatccaata

SEQ ID NO: 4842 - DNA, 384 bp, Glycine max
  unsure (1)..(384): unsure at all n locations
  Clone ID: LIB3028-001-Q1-B1-B3
tgggataaggactagtagtggtcccgtggatgatgactgttacctttaagtgccactgccactcctccttttctgttacacttaactttataaatacccaccccacccgcggtgtttctacgcagtgaatacaagccaaaagaacaacatggacattgatctttctcctcagttgcccaagaaagtttacggtgccaatggtggctcctactacgcatggtccccctccgaccttcccatgctccaccaaggcaacattggtgccgctaagcttgctctcaacaaaaacgcctttgctcttcctcgttactctgactcttccaaagtcgcttatgttcttcaaggtantggagtggctggaatagtgttgcctgaatcagaaga

SEQ ID NO: 4843 - DNA, 310 bp, Glycine max
  Clone ID: LIB3028-001-Q1-B1-B4
cgcaaaaccaaatttgattctcctgccaacttaaacctaaaaatggaaaatcctttctgatttccggccgaatcctagactctcggcctcatcggcgccggaaaaatggccgagtccattgcccgatgcgccgtccgcgccggcgtcctgccgccttctcgcattcggaccgccgtccacttcaacctcgcccgccgtggcgccatcgagtccttccgcgtcaccgttctcccttcaaacgatgacgtcgttcacgaaagcgacatcgtcgttttgtcggtcacacctcaattagtgaaagacgtgctgt

SEQ ID NO: 4844 - DNA, 400 bp, Glycine max
  Clone ID: LIB3028-001-Q1-B1-B5
gattgttgtgactcgttcttcttcgtcgttatcttcttcttttgttgtttgtgtgtttgttttttctctcacctgaaaatgtcttgctgcggtggtaactgtggttgcggaagcgcctgcaagtgcggcaacggctgcggaggctgcaagatgtacccagacttgagctacaccgagtcaaccaccaccgagaccttggtcatgggagtggcaccagttaaggctcaattcgagagtgctgaaatgggtgttcccgctgagaacgatggctgcaaatgtggagctaactgcacctgcaacccctgcacttgcaagtgaggtgttggagagctaaagcttcaagcagaaatggcccttagaaataatgataaaaactatatgtagtttcaaaacttcaaaa

SEQ ID NO: 4845 - DNA, 409 bp, Glycine max
  Clone ID: LIB3028-001-Q1-B1-B6
gatttacacgttccctaaaatctgttatcataatatgtcactgctttttcacgtcacttgtgtgactcttcaattcccacaagaatcaccttccctgtcttttagccactgctaaaactggtacttttccctttcgccccctcagaaaacaacacatttaacagatttcacgccaccaaccgtgtctttgtacagcataccttttgatcattcggtatgcaattccaatctccaaactcggatccatcttttacattcttcagatcatagaatctaatattgtatgcagttttgaaaaagaaaaaaaaaggagaaaaatttgatctttgtgtgattgtgttagattagattttattagattcattgtgtagcctagaaccctcatgaattagaatgcaatccaagaatt

SEQ ID NO: 4846 - DNA, 386 bp, Glycine max
  Clone ID: LIB3028-001-Q1-B1-B7
agaatgagtacggtgggagaagggaaggtgagtagtaatggtcatggatgttgcaaatcagggccaggctatgcttccccactggaagccatttctggtcccagacagtcgctcatttatgtaacctctgtctacacagggaccggaatagagaagccagactatttggcgacagtggatgtggatccaaactctccaacttattccaaagtcatccataagcttcctgttccttatttaggtgacgaattgcatcacacaggctggaattcatgcagctcttgccatggagacccctcagcagaccgacgatttctcatcgtacctgcactcgtatcaggtcgagtatatgtggttgatgtgaaaagaaatccaaaggctccatc

SEQ ID NO: 4847 - DNA, 395 bp, Glycine max
  Clone ID: LIB3028-001-Q1-B1-B8
agaaagcacatagaagagaaagaaagagaacaaagaggagaaagaaagtagttgaggaagatacaaacaatttttgcagattgttgagaatgcctttcaagaagcctcatcacacctcagacaagaactacataacaggggacgacggaggcaagttcgagatacaacctagaggactcaacattgtgtggggaaatgattctcgatactggaaaattccagaacaaggtcctgcggagctgatccaagtttcatggttggaggtatccggcgtggtaaacttaccaggtgtcaagaaatatacggttgaattcgaagtgagagttaaagacgatgggttcggttggagtggcacggacgtgctagtgatggctaagattgggaaaaccggaaaa

SEQ ID NO: 4848 - DNA, 389 bp, Glycine max
  unsure (1)..(389): unsure at all n locations
  Clone ID: LIB3028-001-Q1-B1-B9
ctcaccctcctcttcacacattttctgtgcgctctaacanacattctcgttcacactttcagattgtgtgaagatgggggcgggtggccgaactgatgttcctcctgccaacaggaagtcagaggttgaccctttgaagcgggtgccatttgaaaaacctccatttagtctcagccaaatcaagaaggtcattccacctcactgtttccagcgttctgttttccgctcattctcctatgttgtttacgacctcaccatagccttctgcctctattatgttgccacccattacttccacctccttcccagccctctctctttcttggcatggccaatctactgggctgtccaaggttgcatccttactggagtttgggtcattgcccatg

SEQ ID NO: 4849 - DNA, 388 bp, Glycine max
  Clone ID: LIB3028-001-Q1-B1-C1
ctctcccatcacttctgtgtttctctcttcacctacactttcctctttcaattcaattcaattcttctttttggttcagaaactctgtacagttaatcaaaccctacctcacctcaccggttttagctgttaatttaatatatagatagaaatccaaggaagaagatgaagcagtttgccgtccaaaacgtcgtcgttccatcccacgatgagattagcgttgtttgccccaagccccgccgcctcggcctcttcaacttccccgtcaacgatcccactgttagacccttccgctggcatctcagttaccatgttgagccatgtgattcaaactcatctggttcaaatcctctggacaacttactcaccaaggatggtgattttgatg

SEQ ID NO: 4850 - DNA, 386 bp, Glycine max
  Clone ID: LIB3028-001-Q1-B1-C10
atcgttttctacataatacaaacctctctaatttttgaagcttattatacccaatctcgatatgcagatcttcgtgaaaaccctaactggcaagacgatcaccttggaggtggagtcctctgacaccatcgacaacgtgaaggccaaaatccaagacaaggagggcattcctccggatcaacagcgtttaatcttcgccggaaaacagctcgaagacggcagaaccctcgccgactacaacatccaaaaggagtccacgctccacctcgtcctccgcctccgcggcggcatgcaaatcttcgtcaaaacccttactggcaaaacaatcacgctagaggtggagtcctccgacacaatcgataacgtgaaagccaagattcaagata

SEQ ID NO: 4851 - DNA, 141 bp, Glycine max
  Clone ID: LIB3028-001-Q1-B1-C11
tttttttttttcaaatgtaatcttgggcgggccggttgaaaaaacgtattgtgtttcgaattttttttcccctgccctgcaaatgcttctgtttgtatactagtaaataacaacttgttatactattttttcaattaagct

SEQ ID NO: 4852 - DNA, 396 bp, Glycine max
  Clone ID: LIB3028-001-Q1-B1-C12
caagtgatgttttcgactatcttgcaaggtaattttatgagaccaagaattaatgaggttgatgaactgctgacaaaaggggtcaatgtgactgtatacaatggacaagttgatctgatttgttcaaccaagggggctgaagcttgggttcataaactaaagtgggaagggcttaaaaatttcttggcgaaagatagaacaccactctactgcggaagtgacaaatctacaacaaaaggctttgctaagtcctataaaaacctatacttctattggatcctcaaagctggccattttgtacccactgatcaaccctgcgtggcactagacatgttgggtgcaattacacagtcaccagctacttgacatttgcatagaaaaggaaataatgttact

SEQ ID NO: 4853 - DNA, 393 bp, Glycine max
  Clone ID: LIB3028-001-Q1-B1-C2
aaaaaaggcaaagcttattcccccaagacttagctagcactagcaaacacctctatatctaaaatggtttcaatttctgatcatgaactggttttgatctttggtctcctaggtaacattgtgtcattcatggtgttcttagcacccttgccaaccttctatacaatttacaagaagaaatcatcagaaggatttcaatcaattccatatgcggttgcacttcttagcgcactgttgcttctatattatggcttcataaagaccaatgctactttgattatcaccatcaactgtattggatgtgttatagaagtttcatacctaacaatgtacattatatatgctcccacgaaacagaagatatccacttttggtaatgatactcattgccga

SEQ ID NO: 4854 - DNA, 426 bp, Glycine max
  Clone ID: LIB3028-001-Q1-B1-C3
aagctcaaagggcaaaggactccaaaacgggaattcaaatggggttgcctcacaaggactacacgaaccaacccccaaccccattctacgaccccgccgagctccgaaagtggtccttcttccgagccctcatcgccgagttcgtcgccaccctcctcttcctctacgtcaccatcctcaccgtcatcggctacaaccaccagacagccaccgccgccgagccctgcagcggcgtcggcgtcctcggcatcgcttgggcctttggaggcatgatttttgtcctcgtctattgcaccgccggcatatcagggggacacataaacccggcggtgacgttcgggttgtttttggcgaggaaggtgtcgctgacaagagctgttgggtacatggtggctcaggtgttggggggcataagtggggtggggc

SEQ ID NO: 4855 - DNA, 378 bp, Glycine max
  Clone ID: LIB3028-001-Q1-B1-C4
cttcagtgatttttgcttaattactaaaccaaaccatttcttattccctcatcgaaaccttttctttctatatatttcccttttcaatatcatggcacctaacatcaccaccgttgttgccaatgccaccactgagcaattacccaaagctcatggaggaagtagtgggcgtgcctttgtgacttttcttgctggaaacggtgattatgtaaagggtgttgtgggtttggccaaaggactgagaaaggccaaaagcatgtaccctttggtggttgctgtgttaccagatgttcctgaagaacatcgtgcgattctcaaatcccaaggttgcattgtcagggagaatgaacctgtgtaccctcctaagaaccagaccca

SEQ ID NO: 4856 - DNA, 407 bp, Glycine max
  Clone ID: LIB3028-001-Q1-B1-C5
cacacactctcatagctgtagcggcgacactaagatcggagaaagaatggcgaaaacgacgtcgttgctgctctttacactgctcctcttcggaaccctagctctcatccaggcgaagaaatcgaaggaggatttgaaggaggtgacccacaaggtttactttgatgttgagattaatggaaaagaagcaggtcgtattgtaatgggtctttatgggaaggctgttccaaacactgcagaagacttccgagcactttgcacaggggaaaagggaactggtaaaagtggaaagcctctccattacaaaggtagctcattccatagaattattcctagctttatgcttcaaggaggtgattttacacaaggaaatggaatgggtggagaatcaatttacggagagaagt

SEQ ID NO: 4857 - DNA, 162 bp, Glycine max
  Clone ID: LIB3028-001-Q1-B1-C6
gagagagttacgcgttatcttgtgtgcggtggtgctacttttcttcaattcaagttaattaataattatattcatgagagagatctttttgcttgaaatatttgcttcatatatctcataaattatgagttgttaaatgattaaatcaatttgattagtatt

SEQ ID NO: 4858 - DNA, 418 bp, Glycine max
  Clone ID: LIB3028-001-Q1-B1-C7
ctctctctctttctctttctcactctcctctgatatttctatattttggtgctctgtgtctctacgatctggatccaacggtccaaaatgttcggggcttgtgctgcttgttttcccaggttttagagctccaaaccttcagatccacctcattcgtctccagatcttccttccttgataacgttttcgggttcgagaaggcacttgtttgtttgtcgtacgaaatggagactaaaccgagttcggtgatggttacgctcagttacggcgcgttgacgtgcgccgcggaagttctcgcgactttgctagcttctgctgtcgtcaaagccacgcttttggccccggatctctaccggctgctattgaccaacacgcctacaaccaaaggagagagaaaaactcagagtcaagacaagca

SEQ ID NO: 4859 - DNA, 390 bp, Glycine max
  Clone ID: LIB3028-001-Q1-B1-C9
tggcatcttcttctggtagtttagacacctctgcaagtgcaaactccttcaccaacttcaccttctccacacaccctttcatgaccacttctttctctgaccttcttgcttctcccacagacaacaacaaaccaccacatggtggtggtggtggtttgtctgagagaactggctctggtgtccccaaattcaagtccacaccaccaccttctctgcctctctctccccctcccatttctccttcttcctacttttctattcctcctggtttgagccctgctgagcttcttgactcacctgttctccttaactcttccaacattctgccatctccaacaactggagcatttgttgctcggagcttcaattggaagagcagttccgggggga

SEQ ID NO: 4860 - DNA, 411 bp, Glycine max
  Clone ID: LIB3028-001-Q1-B1-D1
ctcgagccgattcggctcgagtgctattgggtgtcaaagctgtgatagctaaaagttttgagagaattcatcgtagcaatttggtaggaatgggtattgttcctctttgctttaaatctggtgaggatgctgacacattgggattgactggtcacgaacgttatactattgacctcccaagtaacatcagcgagataaggcctggccaagatgtcaccgtaacaactactaccggaaaatctttcacctgcacagttcgcttcgacaccgaggtggaacttgcttactttaaccatgggggcattcttccatatgtcatcaggaacctcattaagcagtgaagtcatggctgatgggaaatgttaaacaatgttgccactgcgtgtacacgttttgagtggtaatataatg

SEQ ID NO: 4861 - DNA, 358 bp, Glycine max
  Clone ID: LIB3028-001-Q1-B1-D11
ccaggaagggggcacactgtgcgagaccatttaatgaggaagagtgggacgatgaggaaattggaataccttgtgctgctttgactgcaccagttcccatcttgcctatgacatctgatggttctgttccaaatgacaatctccctgctagtggatgtactgtgtcagcatccatatcatgtctatcacgatcactgccttctcctggaggtctataatcctggtcaggaaaacattgttgaaggtgcatcaccttcagatgatttttttgagggcttggaagactacttggctggtttctcctctggccagaatactgaattcaacacaaacggaatgccgctactacaagtgatgt

SEQ ID NO: 4862 - DNA, 409 bp, Glycine max
  unsure (1)..(409): unsure at all n locations
  Clone ID: LIB3028-001-Q1-B1-D12
tanaggtataaagaatctcttccaaggttaatatacttctctaaccaaagtataatatatagcacattaaagttcataatactttataataaaaagtggacgcttgcatgagtacataaaatatttatacattatatttccactagccatcaatcatgtcgtaatacctgttgaggtgattcagtagactcgaagccgtgtcttattctttatggtttttataagcatatgacatttttctttttggaattatttattagtccaaattcttgcttgcataagattaactcactgcagcttgtgaagaattaaatttagttaccataaatgattttgcattaatattttttttcctttttgatatataaagatgttcttaaaatgattttttttctcgttttccaaagat

SEQ ID NO: 4863 - DNA, 403 bp, Glycine max
  Clone ID: LIB3028-001-Q1-B1-D2
gtttttctctattataatatagagaataactgcaattactctaagaatcctagcctcttgtgcaagaacaaacaacctagaaaacacaaaaaaaaaacaaaaaaaaaaccctaaaaatggcacgtcaacttgtgcttgcactgatttctgttgccataattggcatggccatggctaatgaggccccatctgcatccccaaaatcatctccatcaccaaaggcttcatcttcaccaaaatcagccgagtctcctctatcgtctcctcctgcccctaccccatcagatgagagtgatatctcagccgcacctgccccggcaagcgaccccatcgagctctatgctccggaacctgaacctttcgaggaccccttcaccaccccggaggagactgacccgggcga

SEQ ID NO: 4864 - DNA, 390 bp, Glycine max
  Clone ID: LIB3028-001-Q1-B1-D3
tgattacacaaggtcaattcatttgggcactgtctctgttccaaaaccctaatccttcgtcttccagaaaatggctgattctccccttgcaaggaattcaaggtccccttccccgtggaaagctcagtcgagatctaggtctaggtcaagatctaggtcgaggtctaggcctagacaaaggccaagatcccgttctagaagtcatggcaggtcaagatcaccaattcatggaaggtcaaggtcacccattcatggaaggtccgagccttcaaatcctggtgacacactttatgtaaccggtctatcttcaagggtcactgaaagagacctagaggagcatttctccaaggaaggaaaggtttcttcatgttttcttgtggtggagccccg

SEQ ID NO: 4865 - DNA, 379 bp, Glycine max
  Clone ID: LIB3028-001-Q1-B1-D4
atcagacggaggcgatcgattgggaattggtagtaatagtttagcgttgaagaatgatgtctgctgctgtgtgcggaagcaagagatctttcgtcgaagagcgtcctccttctccgccagtctctaagaggctccgttgttcctcttcgccgagtcgattacctcctccttcttccatagatcaacatcggtctcactttccacacatggatgagttggttcttgacatagctctccacgaatgtggcaatgatatagatgctgccatcaagatgttgaatgagctttgcttgggaattgccgatggaaatggaattgctgacaaatcggacgttgtcattaatctgggtgcaggtaaattggaaggtgattgaaatgc

SEQ ID NO: 4866 - DNA, 417 bp, Glycine max
  Clone ID: LIB3028-001-Q1-B1-D6
ggctgtagcttgttcgttaatgcagtctcattaaattgtgggatgtatattctatatatgcagagacaacgaggaggaggactgcagtatagggaagcacaaaactagtgaaagaatacaagtctcgttctatttttaatttttttcgtttctgatcagttaaaatgaaacgaggaaaaataattgtgcagctattccttgggggtttttggacctaaacatacacaatggtatgctccaattggttggttaatcatcaccccactttccttcaacttttttttcatatgtatatgtttttcgtatgtggaaatgtctctccgaggtctattcttgtagacaaattttagccacaggtacataccacagcatatacggatttgtcttactttgcattgaatcaaataaaatgttctt

SEQ ID NO: 4867 - DNA, 421 bp, Glycine max
  Clone ID: LIB3028-001-Q1-B1-D7
gattgttgtgactcgttcttcttcgtcgttatcttcttcttttgttgtttgtgtgtttgttttttctctcacctgaaaatgtcttgctgcggtggtaactgtggttgcggaagcgcctgcaagtgcggcaacggctgcggaggctgcaagatgtacccagacttgagctacaccgagtcaaccaccaccgagaccttggtcatgggagtggcaccagttaaggctcaattcgagagtgctgaaatgggtgttcccgctgagaacgatggctgcaaatgtggagctaactgcacctgcaacccctgcacttgcaagtgaggtgttggagagctaaagcttcaagcagaaatggcccttagaaataatgataaaaactatatgtagtttcaaaacttcaaaattatgtagtatgtattatgtt

SEQ ID NO: 4868 - DNA, 385 bp, Glycine max
  Clone ID: LIB3028-001-Q1-B1-D8
ggacttagagaagatgttaacaaatacttttttttaattatcgctgtatgtgtcacagcttgacatatgcatatgttgaaactgaagtgtctatctgtccaacataactaaaagcctaaaaccgcacaaaaagatcttagattgcttgtagaacgttgctgatctggctgcaagctcagcttcaccttgctacgtaatcttgcaggttcgaatttgattgattggttataggaatcaatgcatgccacgtgttttgctgaaggtggaggaagaaaccatgttttgtgaatgcggggatttcggctttcatataccagagtcaatgagtgtgcgctgtgggaaattttgagaacataaacgagccaacaaatgcaactgactactc

SEQ ID NO: 4869 - DNA, 312 bp, Glycine max
  Clone ID: LIB3028-001-Q1-B1-D9
ggtttatttgacagaggggagattttaggaggctgagaagcacgcatagagatgactgaagcttctgctggaatggggatgtccgtgggacaggaggacttcttgggaaggctgggtggcctggacaagggtcttgctcatgagggcaaatgacaaatcttggcctcagacttcatggggcatcctcaatttgggtcttgtaaactaataatgccttatcatctacttaatgccatccatcccccgatcatataatattctactagataagccataagtacaaggttagtgcatcaaaaaaaataataacaa

SEQ ID NO: 4870 - DNA, 419 bp, Glycine max
  Clone ID: LIB3028-001-Q1-B1-E1
ccttcttcttcttcttctctcgcgccgcaataataatactaaaacatgtccaactctgatggagccattaacgccgtccctcccaacgacgccaacaacaacacaatcgttgagtaccagcagcgaaccaccaccaccaccaccgccgccgccgccgccctcgccgtcaagaaaccgccttccaaggaccgccacagcaaggtcgacggccgcgggcgccgcattcgcatgccgatcatctgcgccgcccgcgtcttccagctcacgcgcgagctcggccacaagtccgacggccagaccatcgagtggctcctccgccaggcggaaccctccatcatcgccgctaccggctccggcaccactccggcgagcttctccactgtctccgaccacaagcccctcctccctccccctaaccc

SEQ ID NO: 4871 - DNA, 377 bp, Glycine max
  Clone ID: LIB3028-001-Q1-B1-E10
tgatgagtcaaatgttcatcataagtatttcaaggacaacccggattacaaatgccctgcttatagcactaaaaatgggatctacacagaagggtgtggattagacaacatagtgatgtcatggggacatgatgattacatgtatatggttgccaaggcaaatggcaccactttgccatctgcaggattgttcattatcagatatcattctttctatccattacacaaggaaggtgcatatactcacttcatgaatgaagaagacgttgagaatttgaagtggctcaaaatttttaacaaatatgatctctacagcaagagcaaagttctagttgatgtggagaaagttaagccatactatgtgtcactcattgaga

SEQ ID NO: 4872 - DNA, 424 bp, Glycine max
  Clone ID: LIB3028-001-Q1-B1-E11
atccgctccaaggttaaaacttaatgttaaaattaacctttaaaattcaaaacacaacacataaaatttggtggcaaaaaaataattccggcaaaccaactaatacccaaactcaaagccatagccatggccaccctaatttcagtttaggaacgtttcatatccaactttcactttcactttcactttcacttccacatctaattcctgttcaattttctatccctactcgtttattctattggcaacgggaagaagatggggttgtgatttgtaattggagaactgtgtgaagtggaggagggaggacactttccacggccacaatgcggtggtttccgttgagtactacctcaaactcggaaagagaacggaatagagagaacactagtcgtacttcggtgtatctcaatgtatatgatct

SEQ ID NO: 4873 - DNA, 399 bp, Glycine max
  Clone ID: LIB3028-001-Q1-B1-E12
gcaaccggaatttcatgcaaggatggaccacttttcgaactgccacacttgctgtatccggaaagggtttcattgcaaaggacatgtcattccggaacacggcagggccagtgaaccatcaagccgtggcactgcgtgtggattcagaccaatcagccttctacaggtgcagtgtggaagggcaccaagacaccctctacgcccactccctgcgacagttctaccgagaatgcgaaatctacggcaccatagacttcatctttggcaacggtgccgcagtgttgcaaaattgcaaaatatacaccagggtcccacttcccttacagaaggttaccatcacggcccaaggaagaaaaagcccacaccagagcactggcttttacatccaagatagctata

SEQ ID NO: 4874 - DNA, 378 bp, Glycine max
  Clone ID: LIB3028-001-Q1-B1-E3
cactcataacacaaagcacaaagcaaagctcatccttgagttaaaaaatggcagcagcttcttccatggctctctcatccccatccttggctggcaaggccgtgaagctgggcccatcagccccagaagtgggaagggtgagcatgaggaagaccgtcaccaagcaggtctcctcaggaagcccatggtacggcccagaccgagtcaagtacttgggcccattctctggcgagcccccgtcctacctaaccggtgagttcccaggcgactacggctgggacactgctgggctttccgcagacccagaaaccttcgccaagaaccgtgaactcgaagtgatccactccaggtgggccatgctcggagccttgggctgcg

SEQ ID NO: 4875 - DNA, 386 bp, Glycine max
  Clone ID: LIB3028-001-Q1-B1-E4
accaccaccaacccttaacattatattgctcatctgcgtctctcactgtctatctcacatagacaactcgatctaaccatggacctgggtcagatgcagagacagtggatcgactacaccaaatccctcttccatgagggcatcatggatggtcagtttctgcaacttcagcagcatcaagatgagaacaaccctgacattgtggtcgatattgtctctcacttccttgcagattccgatcggcttctcaaagatctcacctttgccataaatgataatagagttgacttcatacaagttgatgatcatgttcaccagttaacgggtaacacttcatgcacaagcgcacatagggtaaacactgcccgtattgctttccgcaacct

SEQ ID NO: 4876 - DNA, 111 bp, Glycine max
  Clone ID: LIB3028-001-Q1-B1-E5
attaaacatgaatgttagttttacgcatgaaatctcagctagctaatcaaaacaaacaaaatgtcacatttattggtgattagtattaaacctcttttgtggtaacttgtg

SEQ ID NO: 4877 - DNA, 407 bp, Glycine max
  Clone ID: LIB3028-001-Q1-B1-E6
aagaaatttaagtgaggagctagagaatgatgatgaagtctgctatgtgtgcagtggtggttgtagcacttcttcttctggcggaggtggggcccatggctgaggctgtgacatgcaccccaacagagttgagtccgtgtcttccagcaatcacttccggtgctaaaccttccaatgcttgttgcacgaagctgaagcagcaaaaaccatgcttatgtggctacctcaaaaacgctagcttgaagcagtatgttaactctcctaatgcccgaaaaaccgttgcttcttgtgggattccctttccaacttgttaattaattaagccttcttataattaaagtgtgggatatatatatatatatagataaacagtttaatttatacacactttgatcctacaaagcatc

SEQ ID NO: 4878 - DNA, 409 bp, Glycine max
  Clone ID: LIB3028-001-Q1-B1-E7
cagtggctcactgagacttgggcctgtggcccagcccatgaggatcaagtttacccctcgtcgaaaaaatcctacaagatcatcactgtattatgtgaacttggtggctattagagttggccggagaattgtggatatcccaccggaggctctagcgttcaatgctaacaccggcgccggcaccgtttttgattcgggtacggtattcacccgactggttgaaccggcctacaacgccgtccgaaatgagttccggcgacgaattgccgttcacaagaaacgcactgtgacaagcctaggagggtttgacacatgctacacagccccaatagttgcaccatcaataacattcatgttctccggcatgaatgtgacactcccaccggacaacatcttcatacacagcacg

SEQ ID NO: 4879 - DNA, 412 bp, Glycine max
  Clone ID: LIB3028-001-Q1-B1-E8
ctcgagccgtgagaaaggaagagggtttgtttccgttttgtttgtgaattgtaaagaaggaaataaaacattttgggaaggatttgaagtgggttattgttgtttgtggatttcttcattgttttgctctaaaaatggagagagattttctgggtctgagctcaaaagaaccattggctatgatgaaggaagagatgaatattgatattggaagcaaagacacaggtttcacaaatggagcagtggtaaaatggcccttcatgaacaaagtatatgtccatcctcttttgatgtcattcaatcctcctcaggtgaattctgtgaaccatcctcatggtatgaagatgttttcagttcccaatcaagcaatttcagtttccatgggacatccatccctaaagaatcaatttgc

SEQ ID NO: 4880 - DNA, 408 bp, Glycine max
  Clone ID: LIB3028-001-Q1-B1-E9
aaaatattaaataaaaccgccacaaatttctccatagttatgggcacttccattctcgacgccctgaacgttcgcgtggaaggttccggcgacaagtaccttgtcctggcccacggcttcggcacggaccaatccgcgtggcagcgcgtgctcccttacttcacccgcaactacagcgtcattctctacgacctcgtctgcgccggcagcgtcaaccccgaccacttcgactaccgccgttataccaccctcgacgcctacgtcgacgacctcctcaacatcctcgacgccctccgcgtcccccgctgcgcctacgtcggccactccatctccgccatgatcggcatgctcgcctccatccgccgcccggacctcttctccaaactcatcctcatcggcgcctcccct

SEQ ID NO: 4881 - DNA, 141 bp, Glycine max
  unsure (1)..(141): unsure at all n locations
  Clone ID: LIB3028-001-Q1-B1-F1
catcaacaaaaaacaagctgtgattgatgatttaaaaggttccaaagtgtaagggtangcaacctgataaaggatgataattgtctaccatgtaaacataacatttttattatcaataaagggtatatctgtaattctaat

SEQ ID NO: 4882 - DNA, 390 bp, Glycine max
  Clone ID: LIB3028-001-Q1-B1-F10
cggctcgagcgtgcctctagggttatcatatctccatttccatttcctctctctcagtttccaagaatcttaagctatgggaaagtcttacccaaccgtgagcgctgattaccagaaggccgttgagaaggcgaagaagaagctcagaggcttcatcgctgagaagagatgcgctcctctaatgctccgtttggcatggcactctgctggaacttacgacgtgagctcgaagaccggtggtcccttcggaaccataaagcacccctccgaactcgctcacggcgctaacaacggtcttgacatcgctgttaggcttttggagccactcaaagcggagtttcctattttgagctacgccgatttctaccagttggctggcgttgttgccgt

SEQ ID NO: 4883 - DNA, 284 bp, Glycine max
  Clone ID: LIB3028-001-Q1-B1-F11
aaaagagaaagataagcgaaacaaacaatctctgaatcgatgggctaaaagggaataaaaaagaaagagcttcaaatctggcaaatctcgtgggattgagggctcggtctgcgtcgaagcaagcttctccccatttgcacgacgacgaggaggagtgtaggccttggcgtcgaaggttaaccatgtctttgtcttgggcctccgccctcaggatcaccattctccttctcctcctcgccgcggtcatcgtcgcatgcttcactctcccaatcgaaaagatgatg

SEQ ID NO: 4884 - DNA, 374 bp, Glycine max
  unsure (1)..(374): unsure at all n locations
  Clone ID: LIB3028-001-Q1-B1-F12
gcggtggctgcaaaatcccagaacgataactttgagtatgtgtcattcaagacaatgatagaccctcgatcggaaaccttgcangggcaaactcattgttgaacgcattgccagaggaagtgattcagcacacttttaacctaaagagccagcaggccaggcaggtgaagaacaacaaccctttcagcttcctggttccacctcaggagtctcagaggagagctgtggcttagagagccctttttgcatgtgctaccacacttttgtccttttgggctctagctagtgctggtagcagtaaataagaatgaataaaagaaacaaaggcttagatgccctttgttaagtgtagaataacgggtatagtaactatg

SEQ ID NO: 4885 - DNA, 407 bp, Glycine max
  Clone ID: LIB3028-001-Q1-B1-F2
gtctctcacacactcctttcaatctccaattaattacttttcttcaatttgaagcgtgtctgaagttggttgaagcattgtgttattgttctggttttggtctccgaggtttgtgtcggattccgatgtattatgtaaaagaagctgcgcatgtcgaccccatgttcgtagctgataacaccaaccccaaggattattacaaagtgctggaggttgaatatgatgcaaccgatgaaaatatcaaattaaattaccgaagactcgcgctgaaatggcatcctgacaagcacggaggagatagtgctgttactgcaaaatttcaagagataaatgaagcttacaatgtattaagtgattctaccaagcgtttggactatgatttaactgggataagcaagattaaaaat

SEQ ID NO: 4886 - DNA, 397 bp, Glycine max
  Clone ID: LIB3028-001-Q1-B1-F3
gtttgataattttgctgaagtgcacaaactctatgaaggtggagttacactacctacaaactttcttagcaagatcgcccctataccagtgatcaaggaaatttttcgaactgatggcgaacagttcctcaagtatccaccacctaaagtgatgcaggtggataagtctgcatggatgactgatgaagaatttgcaagagaaacgattgctggtttaaatccagatgtcattaagattatagaggagttcccactaagtagcaagctagatactcaagcctatggtgatcatacctgtataatagcaaaagaacatttggagcctaacttatgtgggctcactgttgagcaggctatccaaaacaagaagttgttcatcttagatcaccatgactat

SEQ ID NO: 4887 - DNA, 390 bp, Glycine max
  unsure (1)..(390): unsure at all n locations
  Clone ID: LIB3028-001-Q1-B1-F5
cataacacaaagcacaaagcaaagctcatccttgagttaaaaaatggcagcagcttcttccatggctctctcatccccatccttggctggcaaggccgtgaagctgggcccatcagccccagaagtgggaagggtgagcatgaggaagaccgtcaccaagcaggtctcctcaggaagcccatggtacggcccagaccgagtcaagtacttgggcccattctctggcgagcccccgtcctacctaaccggtgagttcccaggcgactacggctgggacactgctgggctttccgcagacccagaaaccttcgccaagaaccgtgaactcgaagtgatccactccaggtgggccatgctcggagccttgggctgcgtcttcncggagttgct

SEQ ID NO: 4888 - DNA, 403 bp, Glycine max
  Clone ID: LIB3028-001-Q1-B1-F6
ctctgcacaacaattcgagattccaaccatcgatctcaattttcaaccttaacctctaagaatgtcttacgcttatctcttcaaatacatcatcatcggtgacaccggagttggaaagtcttgtcttctacttcaattcacggacaagcgctttcagcccgtccatgacttgaccatcggtgttgaatttggtgccaggatgatcacaattgataacaagccaatcaagttgcaaatatgggatacggctggtcaagaatcattcagatctattacaaggtcttattacagaggggctgcaggtgcattgcttgtttatgatataaccaggagggagacatttaatcatttggctagctggttggaagatgcaagacagcatgcaaatgcaaatatgactaat

SEQ ID NO: 4889 - DNA, 416 bp, Glycine max
  Clone ID: LIB3028-001-Q1-B1-F7
atctggtgcttcatggttaccctgatttgttgtttgagcagaaatcttggattgcggtgaatactgggagttttctgtttaggaactgtcagtggtctttggatttgcttgatgcttgggctcccatgggccccaaggggccggttcgcgaggaggccgggaagatcttgacggccaatctcaaggggaggccggcgtttgaggccgacgatcagtccgccttgatatacttgctgctgtccaagaaggagaagtggatggacaggacgtttcttgagaattcgttctacttgcacggttattgggccgggttggttgatcggtatgaggagatgattgagaagtatcacccagggttgggggatgagaggtggccgtttgtgacacattttgtccggtgttaaacgttttggaat

SEQ ID NO: 4890 - DNA, 276 bp, Glycine max
  Clone ID: LIB3028-001-Q1-B1-F9
tctagatcgcgagcggccgccctttttttttttttttttttttttgtgatctttgctcagaaatattaatggatacgattttttgaattatggaaataatcatctgtcaaatcaaatgtctctagttttataagttattgcatcaaagttgatcagtttctgagtgtatgtttattttctccaatgtcatactccgtgatgagtccaagattgtcaactaatttgtgatgtcttagatatcctgcacactagtaagatgaaattccaattactttc

SEQ ID NO: 4891 - DNA, 391 bp, Glycine max
  Clone ID: LIB3028-001-Q1-B1-G1
gcaaaatttcccaatttcgcgaaaccctaactagccctatggaactctctcgtctcttcgtttccgacacgtgcttcttctcccctccgattcgctgctccccttcgccggcgctgtccacgtttttcgccgtcaagaaccgccggagcaggaggaggagcagcttctgttccgcctccaatcccgacaccttggtcgccggcggtgccgccgtcgtcgctggggccggcgagaagcacgaggaggacttgaagtcttggatgcacaaacacggcctccctccctgcaaggttgtgctgaaggataaaccttgccccaatgattctcataaacctatacattacgtcgcagcaagtcaagatcttcaggttggcgatgttgcattctccgt

SEQ ID NO: 4892 - DNA, 385 bp, Glycine max
  Clone ID: LIB3028-001-Q1-B1-G10
gtgaggggtagtgatagaaggataaggtgaggtgacgataaaccgtggaaagtggaaacggtggtgtagtctgtgagtgtcattgtgaagttggagacaatgttagcttcttctctctccttcctccattcttgttcatcttcctctttcttattgtcaatttcacttcctaatcccaaaccctctcattccctacctttcgtgctcgaagccaaagacaggacccgtagggaagacaggtccgcgcgccacactcgcatcagaaagaatgtcgaatggacacccgagaggccgatgctgtccgtgttccggtcgaacaagcatctctctgtgcaggtgatagatgacaccaagatgcacacgctcgcttcgatttcgacaatgc

SEQ ID NO: 4893 - DNA, 412 bp, Glycine max
  unsure (1)..(412): unsure at all n locations
  Clone ID: LIB3028-001-Q1-B1-G11
agtcatcatccacaaacaatggcctcacatggttatgaatcatgcccgggatacgttgcaatgccgccacctatttcagctccctcactccaaggcagaccacagtttgcaccttacaatgctgtccctactgctccgcagtatggttataatcaaccataccctgcgccaccggtggggtacaatcatcctcgccagcaatcaaatcctgtcgaaagaaatgactatcaacaccctagatcacataattatgaaagaaatcaccatcaaggtantgggggtagttcaaggcatggatatcaatcatcaggaaataatcacaatgctaggtttaataattcacatggtagtcaccacagccaaagcttccaacctagagctcatcagaattggactccacganacaacccga

SEQ ID NO: 4894 - DNA, 377 bp, Glycine max
  Clone ID: LIB3028-001-Q1-B1-G12
cgcgtcgctgctccgtaccagtttcactgcataaatttgagagaaaactctgcaaacatgttggtttatcaggacctccttacaggtgatgagcttctctcggactccttccgttacaatgaaattgagaatggaatgctgtgggaagttgaggggaagtgggttgttaagggagcagttgatgttgacattggtgcaaacccttctgctgagggtggagaagatgagggagtcgatgacgcagctgttaaggttgttgacattgttgatacattcagacttcaggagcaacccgcttttgataagaaacagtttgttaccttcatgaagaggtttatcaagaatttgactcccaagctcgatgcagagaaacaaga

SEQ ID NO: 4895 - DNA, 361 bp, Glycine max
  Clone ID: LIB3028-001-Q1-B1-G2
gtaactgcctagattcttcagccaaagtagaagctgctcacagttccagaaccccttctggaatttcaaaaactagtccttcatctgttccttccaacttatctattctgtcatatagtgaagcaagtgatttctcaaatcttccaacaccaaggtctgagggcgaaatcttgtcttccccaaatcttaaggcctttaccttcaatgagctaaagaatgccaccaggaactttcgcccggacagtcttcttggtgaagggggatttggttatgtttacaaggggtggattgatgaacacacatttacagcttcaaaacctggatcaggaatggttgttgctgttaagaaactcaaacctga

SEQ ID NO: 4896 - DNA, 214 bp, Glycine max
  Clone ID: LIB3028-001-Q1-B1-G3
cggaagcaaagtttccgcgcattttgtcacataagaagaaagaagtgtccatccttttcttcttcgtttgtattgtttatgaatttttattattgtgtttttagacagttgtatggcactatatcacatgaatgcattttggtttgtaacctgctacgtttgcaaggggttgtgaagccaatttaataataaataaaaacaaatgctttctctc

SEQ ID NO: 4897 - DNA, 387 bp, Glycine max
  Clone ID: LIB3028-001-Q1-B1-G4
ccttgcccttggggcaccaccaccatcaccaaccggcggcggcgactatacacccgtcgcaaccgccgcagtgtcagccgcaacccgaagttcctcgccggagctccgatatggagaccgataaggatatgtcagctactgtcattgaggggaatgatgccgttactggccacataatctccaccacaattggaggcaaaaatggggaacctaaacagaccatcagttacatggcagaacgtgttgttggcactggatcatttggagttgttttccaggcaaagtgcttggagactggagaggcagtggctattaaaaaggtcttgcaagacaggcggtacaaaaatcgtgaattgcagttaatgcgcttaatggatcacccaaatg

SEQ ID NO: 4898 - DNA, 424 bp, Glycine max
  Clone ID: LIB3028-001-Q1-B1-G5
cagaattctcaacctcaaggttcacagaatgagaatgatccaaataatacaactatttttgttggtaatttggatcctaatgtcactgatgatcatctgaggcaagttttcagccagtatggagaattagtgcatgtgaagattccagcaggcaagcgatgtgggtttgtccaattcgcagacaggagctgtgccgaagaggcacttcgggtgttgaatgggaccctgttgggtggtcaaaatgttcgtctttcatggggccgcagtccttcaaacaaacaggctcaggcagatccaaaccagtggaatggtggtgctggttctggtggtggatactatgggtatgctgcacaaggttatgaaaattatgggtatgctcctgctgctggacaggatccaacatgtatggcagttatccggggta

SEQ ID NO: 4899 - DNA, 84 bp, Glycine max
  Clone ID: LIB3028-001-Q1-B1-G6
ctctagatctccttgaagcataaggtggttgttgctttgcttttttggagttattgtgaattctaattgtcaaatttgtttttc

SEQ ID NO: 4900 - DNA, 378 bp, Glycine max
  Clone ID: LIB3028-001-Q1-B1-G8
gtttagctttgatgatgatgttatggcaattggagatgtgttctatgctgaagtggaacgggaatgggtgatgcaaccgggtgggccaattgctcacaaatgcacgactctcattgaacctaatcggcttattttactcactgctcagcggtttattcagacattcctgggaaggaacttcgttgcattgcactttcggagacatgggtttttgaaattctgtaatgctaagaagccaagttgcttttactccattactcaagctgcagattgcatcttgagggtcgttgagagggccgatgcacctatcatctatctttctacggatgcagcagaaagtgaaaccggtctgcttcagtcactagttgtgttgaatgg

SEQ ID NO: 4901 - DNA, 402 bp, Glycine max
  Clone ID: LIB3028-001-Q1-B1-G9
cacaccatgaggatgaggaagacgacagtgatgaagaagactctgtagcagaggaatttcggaagtttggagcagctgatacatttagaatcccagatgaggttgatgtttctcatcttagttaggtccttcattattaagccattctagtgttatgcagctgagatttcctatactaattagtagttaaccccttcaaatatttgtggcttctatcaatgtgacaaccaatttgttcatttctagcagcattatggccgcaaacgtgataattgatacaataattgcagttgaaatacatagatttcaagtagactcgatgtatgaggactagtttggcgtgagattgtgaaagacttgagtagaaagattgttgattagaagtaaattcaatctcttctc

SEQ ID NO: 4902 - DNA, 400 bp, Glycine max
  Clone ID: LIB3028-001-Q1-B1-H1
cttctttctcacactcacagtgctcaaggtttcagcatcatcctcagtgattttctacaacaagtgccagcacccagtgtggcccgggatccagcccagcgcaggaaagcccgttctggcccgcggaggcttcaagctcgccccaaaccgggcctactccctccagctccccgctctatggtccgggcgcttctggggccgccacggctgttccttcgacgccggcggccgggggcgctgcgccaccggggactgcggcgggtccctgttctgcaacggcatcggcggaagcccaccggcgaccctggcggagttcaccctgggcaacgagcaggacttctacgacgtgagcctggtggacgggtacaacctacccatctccatcacccccttcaaggga

SEQ ID NO: 4903 - DNA, 364 bp, Glycine max
  Clone ID: LIB3028-001-Q1-B1-H12
ttagatagaaaaaatttcccccggcttccccccctaaaacccaaaaccctattgcgtgctttgcaatcgaccccgattatggccaacagtaacctccctcgaagaatcatcaaggaaacgcagcgtttgctcagtgagccagcacctggaattagtgcgtccccttcggaagacaatatgcggtatttcaatgtgatgatccttggcccaactcagtcgccttatgaagggggagttttcaagttggaattatttttgccagaagaatatccaatggctgctccaaaggttaggtttctgacaaaaatatatcatccaaacattgataagcttggcaggatatgtcctgacattctgaaagata

SEQ ID NO: 4904 - DNA, 379 bp, Glycine max
  Clone ID: LIB3028-001-Q1-B1-H2
ctgcgatctgtttcgtgttgtagctagctcctcgaaaatgctggcacgcctcgccgcgagtcgcttcaacgagatccgtcagattttccgtcagccttctagggctttctcaaccgctctgaactaccaccttgacacaccggacaacaaccctaaacttccatgggaattcaccgaggccaatcaagcaaaggttaaggagattttgtctcactatccatccaactataagcaatctgctacaattcctcttttagatcttgcccagcagcagcatggaggttggctacctgtttctgcaatggatgcggtagctaagattgtagaggttcctcccatacgggtgtatgaggttgccacattttactccatgttcaat

SEQ ID NO: 4905 - DNA, 353 bp, Glycine max
  Clone ID: LIB3028-001-Q1-B1-H3
gccttattatttacacactttttttaatatgcctggatatatatgaggccatatagcaaaaagttggtaccaaaaccaacatattagaagagagagcacttcattttagctagctagagaaaaaaaacaaagtgatagtgagaagatgttagctatggagggtaataagaagactaagcaatatggtcttgactctgccacttcttggtttggaagttgcatttcttcatgttcatcatcagaaaaagtgtcaactcacagaaagcttcctagaactgcttccgaatcatcagttaccaaccccatgaagaagcgtggaggatggaaagccataatctttattttaaggaatg

SEQ ID NO: 4906 - DNA, 379 bp, Glycine max
  Clone ID: LIB3028-001-Q1-B1-H4
atcaatctcccagcaaattcctgttggggctttagcaacagctctggctaatgcttctccagagcagcagaggacgatgctgggtgagaatctctacccccttgtggaacagttagagcctgacaatgctgccaaagtgacaggcatgcttcttgagatggaccagactgaagttctgcatttgctcgagtcgccagaagccctgaaagcaaaggtggcggaggcaatggacgtcctaagaaatgttgctcagcaacaggctggcggtactgcggatcagctggcttcattatctcttaatgacaaccttgtttcttaaggtttatattttggatttatttagtgacgatgggttgttattttcggcactggctctgat

SEQ ID NO: 4907 - DNA, 417 bp, Glycine max
  Clone ID: LIB3028-001-Q1-B1-H5
aaaaacatgaacgtaggatgagaaagatggtcggaaattgaggaagtagtaaaatgattcccaagatttctccgatgaacgaggatgggaagaacagaggaatcggaatagccaccgaaaacccttattatggaacctttcaaggcgtcgctaaccactatcctcctcaacaccaacaaccacccgttccctacgctaattattaccaacgacaaggataccacgtcgttccagtttatgccgttgctgaaggaaggcctgtgagagaacgtcgtcttccttgctgtggacttagtctgggttggttcttgtttataatgggttggtttcttggtggtgttccctggtacgttggcactttcattctaatgtttgtacatatggattgccgagaaaagcctggattgattgcatgcg

SEQ ID NO: 4908 - DNA, 405 bp, Glycine max
  Clone ID: LIB3028-001-Q1-B1-H6
gttttctctctagattctgctcttaaacgccgtcgttttcaaactctttttttccccttcgcttctctgtctttgtaaccgaaaggggggaaaatataattaacaccgatttcgcgaccaattcttcttctgcgttgaattgggacaacgagaaattggatctcagtttttggcaggaaataaaaattgcatttgagtgtaaaataacagagtatagtgtagggccttgttcttgatactgtgctaaatttgttggatggcggagaaatcatgcatcaagcgccttcagaaggaatatagagccctttgtaaagagccagtttctcatgttgtggctcgtccttctccaagtgatattcttgagtggcattatgtgttggagggaagtgaaggaacaccttttgc

SEQ ID NO: 4909 - DNA, 428 bp, Glycine max
  unsure (1)..(428): unsure at all n locations
  Clone ID: LIB3028-001-Q1-B1-H7
attaaaaataaaacattgtaaaaaatattatcaataccctttgagtgaccctgacctcggatccaagattcccagttaaatttcatagatgaaaataaaagatattttattaaagatgatctgacaaaaattaatcatctatatggggatgatgaaaaaatatcattaatacattttgtgataattttttattaatttcttttatttattagtttattaatttcgtgttgttaatacctaaaggacaaattaacttttcttagagaaataatttgaaaaaatgaggtttaatgtggagtatggaatatggatgttggtgcgagcagttgggaggaccaagcattgaaaatgaagacagggagaaaggacagcanagaaagctatgcaatggaaggtggaagacttgattccaaaccacaatgattcca

SEQ ID NO: 4910 - DNA, 384 bp, Glycine max
  Clone ID: LIB3028-001-Q1-B1-H8
gaaaattattttgaacacccttcatcgatctaaatgggtttggcaggatttctcagaaaactccaagatatctattctaaacataagctcatatccactgttttcttctgtctcttggtctcacctccgtccttcttctataccttctatgccacaagtcatttatccagtgtttttctcaccagtgaaggtgccgacaactctgtaggcgcaacctttcactatatcatagttattgcacaagttgaatgttttgccgttcttggcatatccatgttttccttgctaaagccactgctccatatcttagcctcagagcagaagatagacccagaagcggagttgagcatcaaaaacctcattttatcattgaccaaacccgcg

SEQ ID NO: 4911 - DNA, 407 bp, Glycine max
  Clone ID: LIB3028-001-Q1-B1-H9
aaatctgcttcttatttgattctctctcataaacaaattaaaacccttgtataaagactcttaggaaatatctctcttctttctaagcatatataggaggaggagagaaaatattttgctagcaagacttgatttgagatttgatcaacatcaattgttgtttgttgtcgtcgtcaaaatatgccaatggctaagggaatcagaaagctaagttcctggatcgaggttgccccagcacctatcatttacccaaagaaaccttctaacacacccactttggaaacaatcaccgaagaagaagaagctgccgccgagggattcgaaaatggcgatggtcaactataataaacgaccttctccaatttgatgtaacttattgttataagttgtttatgcatggtttgtga

SEQ ID NO: 4912 - DNA, 405 bp, Glycine max
  Clone ID: LIB3028-002-Q1-B1-A1
gcattgttcatttctgtctcactgagagaaactctctctctctctctctctctctctctagaaaccctattgcacgttttgcaatcgaactcgacaatggccaacagcaacctccctcgaagaatcatcaaggaaacgcagcgtttgctcagtgagccagcacctggtattagtgcctccccctctgaagagaatatgcgatatttcaatgtgatgatccttgggcctacccagtcgccttatgaaggaggcgttttcaagttagaactatttttgccagaagaatatccaatggctgctccaaaggttaggtttctaacataaatatatcatccgaacattgataagcttggcaggatatgtcttgatattctgaaagataagtggagtcctgcacttcagata

SEQ ID NO: 4913 - DNA, 406 bp, Glycine max
  Clone ID: LIB3028-002-Q1-B1-A11
ttgatgagtctttttaaagacctattttatattaaagttttatataaatttagcttctctttatattggacattattgacttataaattttttagaaaaattttatataaattatagttttatttatataaaatcaaaattatgattattcaaagcatgaaataaagatgaaaataggtgaactaaattctataaaagtcaagtttagaggactccatcatctgccactatgatggcgttgattggctcagtgtgtgccttgatggtctctatgcacttcaggtctgagattctccacactttcaccgttttgtccagggaagctgtgtatagaatgtcctctgctgtgtttattgccattgccgtgattagccccttgtgcatctgttaagtcatcatgtcaaac

SEQ ID NO: 4914 - DNA, 399 bp, Glycine max
  Clone ID: LIB3028-002-Q1-B1-A12
ttcagcgatttcgatctcgcatagcattctacaatggccactattccagttaaccccaagcctttcttgaacaatttgactgggaagcccgtaattgtgaaactcaagtggggaatggagtacaagggctatctcgtttccgttgattcctacatgaacttgcagctggccaacactgaagagtacattgagggacagtttactggaaatttgggagagattttaatcagatgtaacaatgttctctaccttcgaggagtaccggaggatgaggaaatcgaagatgttgcagaagactagatagtgataaaagctgctaatggctatgacataaaatgaactcgaattttctactgtttttgtatcttaacttaaatgtaggtttttttgtagttgtgt

SEQ ID NO: 4915 - DNA, 406 bp, Glycine max
  Clone ID: LIB3028-002-Q1-B1-A2
attcaacttaagaagatcaatatggccaccaccactacccagcctccctctaatatctgttttttccttctgttgttgcttctagcacactttcatttgggcataagccaacttgagctgaattactactctaaaagctgcccaaaagctgaagagatcatcaaggaacaagtcacacaactatataacaagcatggaaacactgccgtttcgtgggtcagaaatctcttccacgattgcgtggttaagtcatgcgatgcatcattactgttagcgacggtgagcgatgtagtgtcggagcagacatcggatagaagttttgggatgagaaacttcaagtacgtaaacactatcaaagcagcggttgagaaagaatgccccttcacagtgtcatgcgctgacattg

SEQ ID NO: 4916 - DNA, 338 bp, Glycine max
  Clone ID: LIB3028-002-Q1-B1-A3
ctcgagcgaacattattagtactagcactgtactttgccgaaactttcttgactctcctgtttcgccaattcacctcccaaattggaaagtgtgattcaaaagcttaaacgttgcttttgataaaggcgaacagcatcttttccccctcagccatttacaggtctagttgaagctagcagtctaaaaatggagatgtaaaccagataatccattattacaatatgttggattaggtcactcggaatgcctttgtcaagatttttttctattacagtacatcgcatatattggttgtatactgctccgtagaataaataagatcatattaataccacac

SEQ ID NO: 4917 - DNA, 226 bp, Glycine max
  Clone ID: LIB3028-002-Q1-B1-A4
caacaacaacaacttccatttgatgtttggttccccttgtgatttggcatcctttgatttcaaggaggatatgcaacgaggagtagtatggatggatgctcttcagaaacagcctgatatccctacttggtaccagtgaaaatgacagcttaaagcttgaaacctcctcatcatcttcatctatcatggactcttttattttccctctaaaatggttggcaccccc

SEQ ID NO: 4918 - DNA, 383 bp, Glycine max
  unsure (1)..(383): unsure at all n locations
  Clone ID: LIB3028-002-Q1-B1-A5
tttctacacatccctagctctgtcgttccgtcgttgacgatggcgtttcgggtgcgaagccctgacctccgctctctctttcttctctctctcttgtccatcgcttccgccaatgtcttcttcgaagagcgtttcgatgacgggtgggaaaatcgatgggttaaatcagattggaaaaaagatgagaacgtggctggggagtggaaccacacctctggtcaatggaatggagacgctaatgacaaaggtattcaaaccagtgaggattacagattctatgctatttcagctgagtaccctgaattcagcancaagggtaagacactagtctttcaattttctgttaagcacgaacagaagcttgactgttgtggtggctacat

SEQ ID NO: 4919 - DNA, 397 bp, Glycine max
  Clone ID: LIB3028-002-Q1-B1-A6
agccattcaggttggatacaggcatattgactgtgctagtgcgtataagaatcaagcagagattggttctgctcttaagaagctttttgatgatggtgtggtgaagcgtgaggacttatggatcacttccaaactctggtgttcagatcatgcaccagaagatgtgccaaaagcattggataaaacattacaggaattgcaacttgactatcttgacctctatctgatgcactggccagtccgcatgaaaagtggaacatttggactcaataaagaatatcttgagcaaccagacattcccaatacatggagagcaatggaggcactctatgactcagacaaggctagagccataggagtgagcaatttctcttcaaagaagcttcaagatttgtta

SEQ ID NO: 4920 - DNA, 402 bp, Glycine max
  Clone ID: LIB3028-002-Q1-B1-A8
gtaaatctttcagacagagtagttttgtccatggtcaactcacatggatggactctcgaggtgctaagccttgatggttgtaaaagagttggtgatgctagcttgatggcaattgcaggcagttgcccattgcttgctgatctcgatgtttccaggtgtgcaatcactgatacaggtatcgcagcccttgcacgcggaaagcagattaaccttgaggtactttctttggcaggttgtgcattggtttcagacaagagcgtgcctgccttgaaaaaaatgggctgttcccttgctggattaaatatcaagcgttgcaaaggaatcagcagccgctctgtcaacaagcttcaggaacatctctgcatgtgtgacatcctctactgaacaggaaatgcctcagca

SEQ ID NO: 4921 - DNA, 404 bp, Glycine max
  Clone ID: LIB3028-002-Q1-B1-B1
gtcgtctcaagggccaactcatgatgagattgattttgaattcttgggaaacgtgagcggtgacccttacattctccacacaaacgtgtttaccaaaggccaagggaacagagagcaacagttctatctctggttcgaccccaccagaaacttccacacttactccatcatctggaagcctcaacacatcatattcttggtcgataacattcccataagggtgttcaagaatgctgagactattggcgttcctttcccgaagaaccaacccatgagaatctattctagcttgtggaacgctgatgactggccaccagaggtggtttggtgaaaactgattggtcaaaagcaacctttacagcatactaccgcaatttcaaagccacagagttctccacctcttc

SEQ ID NO: 4922 - DNA, 398 bp, Glycine max
  Clone ID: LIB3028-002-Q1-B1-B10
ttcatatcccacggaaacacagccaggcttgccatggagcacggcgatatatagttggcccatatctgcggcatgattgcctcagatgagaaacgccatgagactgcatacacgaagatactggaaaagctatttgaggtcgatcctgacggtacagttatggcgtttgccgacatgatgaggaataagattgccatgccagcacacctcatgtatgacggccgtgatgacaacctgtttgatagctactcttctgtcgcgcatcgcattggggtctacaccgccaaggactatgctgacatacttgagtttctggtggggaggtggaaggtggagcagctaactggactttcaggcgagggaagaaaggctcacgaatacatttgcgggctgccgcc

SEQ ID NO: 4923 - DNA, 403 bp, Glycine max
  Clone ID: LIB3028-002-Q1-B1-B11
gggcggtcaagaaatctcaaaaacaccgtcctcttctaagagaacactaagtcagggttcagttgatatatatgctgctcagtgcaaaaattgcttgaaatggagagagattgatacacaggaagagtttgaagagattagaagtaaagttgctgaggaaccttttctttgcagcagaaaggctaatagttcctgtgatgaacctggtgatattaaatatgattcctctcggacatgggtgattgacaagcctaacctcccaaagactccacaaggttttaagaggagcttggtgcttagaaaagattactccaaattggacgcttactacatcacacctgcaggcaaaaaactgagaacccgcaatgagattgctgcgtttctaaaagataatccagaattc

SEQ ID NO: 4924 - DNA, 408 bp, Glycine max
  Clone ID: LIB3028-002-Q1-B1-B12
ctgccatggaagcacattttcacctgcggagtttgtgcagcatgcagggggcactgacaccacgcaccctctaaggcacatcactgttattccttctgcatttgggtgatcttaattccctttttttgtgtgtaattaggcctattctcggttctgcgtcgtatagcgtgtttggaaatacgttgagatgtaagaaatcacgttgagacgtaaaaaatcatcaattctgggatgtggaagttataactattaggtgaaacctagcactctataagatagagcagcggaagaatttgattcaggtgtctacgttatgtgatatctttaatttaggcagggtatatattttacaggagttttttgttaactacgctaactgcattaacaaacaatctccaattgagattg

SEQ ID NO: 4925 - DNA, 381 bp, Glycine max
  Clone ID: LIB3028-002-Q1-B1-B3
gagaaaagcaaaaacaacaatgaaaaggatatagaagctactgtagtgagtggtaatggaacagatacaggacaaataattacaactgccattggtggtcgagatggacaaccatatcagacaatctcttacatggctgaacatgtggttgggactggttcttttggtgttgtttttcacgccaagtgccttgaacctggtgaatctgttgccattcataatgtgttgcaatacaggagatataagaatagggaactccaagttatactcacagttgactatcctaatgttgtcaaactaatgcactacttcttttcaactaccgatcacgatgacttgtaccttaacctggttttggagtaagtacctgacactgtctac

SEQ ID NO: 4926 - DNA, 346 bp, Glycine max
  Clone ID: LIB3028-002-Q1-B1-B5
tttcatttcagagccattaggtatatggaatctaccagatctatactcactcctctagtgctcctcgtcctcttctctctagccaaagggcttcacaatcccgcatgtgatgctgcctatctacatgaccatgatggcgcaaccctccaagtgttccatgtgattcagccattgttccccattcatgccctctaaaccaatgtcatgggaagagattgtcctatagctacaagccaaggaccaagccatgatgcagtaactttctaaattagttgctacaagatcgcctgtctaactgcctcagggagacatatcagtcagattcctacatatatagtgagggcca

SEQ ID NO: 4927 - DNA, 407 bp, Glycine max
  Clone ID: LIB3028-002-Q1-B1-B6
ccctgttggatagaatggaggttgttgctattgctgggtatattactgatgagaagatgcatattgctagagattatctggagaagaccactcgtgaagcttgtggaataaagcctaaacaagtggaagtgactgatgctgctattcttgccctaatagaaaactactgccgagaagcaggggtcaggaatcttcaaaagcacatagaaaaaatttaccgaaagatagcgctacaactcgtgaggcaaggggaaatgattgatgcaaccgtggaaccaataaaagaaaatatagactctgatgaatttggtcaaaatacagttcaaaataagaactccgagttggtggagggtagtgatcctgaaaaagagggtgaaacctctgataaagttgacaaggtgcaaaca

SEQ ID NO: 4928 - DNA, 403 bp, Glycine max
  Clone ID: LIB3028-002-Q1-B1-B7
tagagaatgatgatgaagtctgctatgtgtgcagtggtggttgtagcacttcttcttctggcggaggtggggcccatggctgaggctgtgacatgcaccccaacagagttgagtccgtgtcttccagcaatcacttccggtgctaaaccttccaatgcttgttgcacgaagctgaagcagcaaaaaccatgcttatgtggctacctcaaaaacgctagcttgaagcagtatgttaactctcctaatgcccgaaaaaccgttgcttcttgtgggattccctttccaacttgttaattaattaagccttcttataattaaagtgtgggatatatatatatatatagataaacagtttaatttatacacactttgatcctacaaagcatcttgacacaagcattca

SEQ ID NO: 4929 - DNA, 389 bp, Glycine max
  Clone ID: LIB3028-002-Q1-B1-C1
ctacgttctaggagaccaatatagatcagattccaaaacagttaaccaacaagcttatttctatgctaaatccctcaaactcaccaacaaagatgtctttgtcttggacgttgacgacactactctctctaatctccagtattttgctaaccatggatttggtgtggaaccacacaatacgacggcgtttaagaactgggttcttgatggcgaggcattcgcactgccagagactcttaaaatgtacaacaaactgttggctctcggcatcaagattgtattcttatcagaaagaccactgagtctaagggatgtaacagccaagaacttaaaggaggttggattcaacacatgggagaagttaattctcaaggattcatctgagtact

SEQ ID NO: 4930 - DNA, 409 bp, Glycine max
  Clone ID: LIB3028-002-Q1-B1-C10
tagacacgtaatcaaaaccatgcagatacgaacctgccactccatcaccacccaaacccttccacaacttccgtgttcttctagaaaagcccaccaccgccaccttcttccgccgttaaacgctgcggtttccgcggcgccgttcaaagcccggaaggcccactcaatgcctccagaaaagaaagaaattttcaagtccttggagggatgggcctcggagtgggtcctaccgctgctgaagcccgtggagcaatgctggcagccacaaaacttcctccctgacccctcccttccgcatgaagagttcagccatcaggtgaaggagcttcgcgaacgcactaaagagttacctgatgagtactttgtggtgctggtgggtgatatggtcaccgaggacgcgcttcccact

SEQ ID NO: 4931 - DNA, 404 bp, Glycine max
  Clone ID: LIB3028-002-Q1-B1-C11
ggagaggaagattctgaagatggtggaccatccgttcctccctacgctctacgcggagttcgaggcttcgaatttctcatgcattgtgatggagtattgctccggtggggacttgcactcccttcaacacaaccaccccaataaccgattctctctctcctctgccaggttttacgcggctgaagtactggttgcgttggagtatctccacatgctgggaatcatctacagggatctgaagcccgaaaacgtgttggtcagatcagacggtcacatcatgctttccgacttcgatctctctctatgctccgatgctatcccagccgttgaatcccctgactgttcactggaccccgcattcgcacccgcgttacgctacactcgccagtactccacccccttct

SEQ ID NO: 4932 - DNA, 398 bp, Glycine max
  Clone ID: LIB3028-002-Q1-B1-C12
ttcttctctttctcaaatccctatcttcaaaatttcaagattatcactttaaagacagatttttttttttttgacaaaaaaatgactctggctatggctgtttggagtgctggtcttcacttcagtgctgctcgtagtagcttgagacctttggagaaaaccatttgcactgcccctttcttgaaggcgtcatctgggtttgctgctactaagccattctgcatccttaacacaacaagattgtcatattctggaactacaattatccctcgagcagcacctgttactgatgtgaaggatgggaatcaaggtgagactgataccattccaactcccgtagttataattgaccaagactctgatcccgatgctaccgtggtggagataacttttggtga

SEQ ID NO: 4933 - DNA, 391 bp, Glycine max
  Clone ID: LIB3028-002-Q1-B1-C5
cattttggccgttcaattctgagtcttcgtcaagaacaggttcactccatttccatggaagggtcaagcttggaggctgagttggaatcctttcagcaacacgtcactgaccggttccttgaactcacttcggttgttcatgatgatttgctttcgctctcgtgggttgggaagctccttcattgcttcctgtgttgccaagaggaattcaaggccattctccacagccacagggctcaggtgttgagacccccattggatcgcatggtgtctgaatactttgagcgcagtgtgaaggctttagatgtttgcaatgccattcgtgacggtattgagcagattcgccaatggcagaagctgttggagattgtgctctatgcattggggcatc

SEQ ID NO: 4934 - DNA, 293 bp, Glycine max
  Clone ID: LIB3028-002-Q1-B1-C6
atctctttatgtacggtccggtcgttgaagggtcagagatagagcggggttcccatcaatataccaaacttcatcgtcatcgttaaatacttcaacaactacagcgacgtcgtcagtatgtatcgagtgaaagatcacaacgtcttctcgagaatggtactgtactacagcggccatgtggcaaagtcgacgttgcaggcgcatgaaaatacgtggtttcaacgatgggatgcgcccacggatgattccgacaacttccgatggttcgggtctagcacgaattgcgatccata

SEQ ID NO: 4935 - DNA, 393 bp, Glycine max
  Clone ID: LIB3028-002-Q1-B1-C7
aaatcttcatttgcatacttctacgtttatgttattttccacttaaaaggttagatctatgttctatagtttacatgggtctgtatattttctttcacttacaggttctggtaggttttatttctgttaatgttcattaagtctttttatcgatgtgaagatctttcatatttatgttttgtaattgtaatatactttgagtttgaaaacgtgggtatttggttgataagcttgagcagattagtcatgcaatgtggttggatttgttttttgacttttcaagtttttactcatttctgatctttttccatatatgagtcagtttctgccatagcatttgtggcctaacatgctctttataaatatgttagctataatgacatttaattacta

SEQ ID NO: 4936 - DNA, 407 bp, Glycine max
  unsure (1)..(407): unsure at all n locations
  Clone ID: LIB3028-002-Q1-B1-C8
ccatccgtcacgccgtgacccaacggggccccttgtggatcatcttccaacgcagcatgatgatcaaattgaatcaagagctgatgatttcctccgacaagaccatcgacggtcgcggcgccaacgtggtgtgtagggacggcgctggcctcaccattcagttcgtgaacaacgttatcatccacggagttcgcatcaagaacatcgtacctaaggagggtggcatgattagagactcttacaaccatgttggcctgagaacagagagtgatggtgatgccatctccattttcggagccagcaacgtttggatcgatcatgtttccctctctaactgtgctgatggtcttatcgacgtcatccatggctcnactgccatcaccatctcaaattgccacatgaccaaa

SEQ ID NO: 4937 - DNA, 405 bp, Glycine max
  unsure (1)..(405): unsure at all n locations
  Clone ID: LIB3028-002-Q1-B1-C9
cgaagatgttactgttggtaacttttttgctgctttacttggaaacaagtcggcacttactggtggcagtgggaaggttgtggacagtggacctgatgatcatatatttgtatactatactgaccatggaggtccaggggtgctcgggatgcctgctggtccttacttatatgcggatgatctgattgaagtcttgaagaaaaaacatgcttctggaacgtataaaaacctagtattttatctggaggcatgtgaatctgggagtatctttgaaggtcttcttcccgaagatatcaatatttatgcaaccacagcttccaatgcagaagaaagtagttggggaacatattgccctgnggagtatcctagtcctcccccagaatattcaacctgcttgggtgatct

SEQ ID NO: 4938 - DNA, 400 bp, Glycine max
  Clone ID: LIB3028-002-Q1-B1-D1
gcatgaatcttgccattggtgacattcgcgccgagcatgaggcgcattcgagggagcttgttgagaaaggcatgaagatggaggctgaccttagggcaaatgagcctttgaagaatgaggtcatgcaactgcgatctgaagttaagaaacttaacaatctcaaacaagaactgacagggaaggttcagacactcactcaagatgttgcaaggttacaagcagacaatcaacaaattcctatgatgagggctaagattgatggcctgcaccaagagctaatgcatgccagaaccatggtggattacgaaaagaaggcaaacatggagttcatggaacagaggcagtcaatggagaaaaatttggtttccatggcccgggaagttgagaaattacgtgctga

SEQ ID NO: 4939 - DNA, 409 bp, Glycine max
  Clone ID: LIB3028-002-Q1-B1-D10
cgagaacaccgcaacgatgaaagagggtcgggccgaggcctccatggtaatgttcggagccctcgacgagctcttcgagaaaacccgcgtccgaccaaaggacgtgggtgtcctagtagtaaactgcagcatcttcaaccctacaccatcgctctcagcaatgatcataaaccactacaagatgagagggaacattctgagctacaacctcggaggaatgggttgcagcgccgggatcattggtgtggacctggccaaggacattcttcaggcgaacccaaataactacgcggtggtggtgagcacggagatggtggggtacaactggtaccaggggaaggataggtctatgcttatcccgaatagcttcttccgcatggggtgttccgcggttctgctttccaaccgt

SEQ ID NO: 4940 - DNA, 402 bp, Glycine max
  Clone ID: LIB3028-002-Q1-B1-D11
caaattgtgattttccctgaatcttatacaatctttggaaataaagtgacttggatgtaatcacatgtaaacattagaatgaagataaaatattgttctctccaactaaaaagctctactgttactattgtctgaatttatacatgagtgatgtaacatataaacattaaagatgaaaacaaaaatgttctcttcaaaccaaagtgctctaatccttgccagtattgtcagaagttattcgagaatgatgtgttaaatcttagcttgcttactgaaaatgggaacaccaaggatgacctgaagttacctacagatgagagtctgcttactcaggtttgtacaaaccaactgtttttgtgtgtcgcaattgcagcctggaagtttatgatcttggatacattg

SEQ ID NO: 4941 - DNA, 406 bp, Glycine max
  Clone ID: LIB3028-002-Q1-B1-D12
gcatgtcttcctccggctatagttgttgcagatctcggatgttgtaaaattagtgtatgatgtgaagctatgggctggaaaatgtggatgtaggagatttcgggacgaaaggcctcaaaacgcttcgtcgtttgtggttactgagtcctgagtgatcttgtcatccgacctttgccatgacaggtgcgcttgcttggcaggtcaaaatatgttaataaaaaaagttttattggtttagggagagatcgcacgggagttgcccggggtctctctctcgtgtggtgtgtggtgtttgctgtgctctccttttcgttatgccttttattattacctatctgtcgctccactccgtattacgactctggatcagagggatacatcagaggattcgctccaactcctatcg

SEQ ID NO: 4942 - DNA, 358 bp, Glycine max
  Clone ID: LIB3028-002-Q1-B1-D2
atttttcaagtgacttaaggtttcaaacctaggaagttggaagtcatggcagcaacattgatggcagcaacaagttctggcactcttaaagcaactcctttcctaggccaaggcaagggtgccaatgccaatgctcttagggatgttgtttccatgggaactgggaagtacaccatgggcaatgatttgtggtatcgaccagacagagtgaaatacttgggaaccttttcagctcagaccccttcatacttgaaaggagaattcccacgggattatggattggacactgctggcttatctgctgaaccggaagcaattccaagaacagggctcttgaggttatccatgggagatgggc

SEQ ID NO: 4943 - DNA, 408 bp, Glycine max
  Clone ID: LIB3028-002-Q1-B1-D6
cgaaccgtgcacccctttgtattttgaagcgatcaacacgcgcaaccactgccatgatgatgcaaatcaacatcacctccaccacctcaatcgtcacggcgttctcttcggatcattcgacgaatgttctaccttgagccatgtccaacctcgttcagattcgcgtcaccgccgacgctagcgatggcttcgactctccggcgatgcataaagcagccaacagcagctcctacagcaatcgcacctttctctcgctcagccgcgccaaacagttccccggcgccgccaagttcaagcgcttcatacttcgttttgctctctccaacgtcgttattgtcgcctccagactcagttcgtgtatgggatggacacctcaccacccttcttcggtttcctccacgtcaaggg

SEQ ID NO: 4944 - DNA, 390 bp, Glycine max
  Clone ID: LIB3028-002-Q1-B1-D7
aaatggtgctgttgaaacttgtggtcaaagctttcaccgatttgacaagtaccttaacttttcaaatcctcacatcgcaagaaattttgatccaaatgcttgtggttgggcatacgggatgaacatgtttgatctgaaggtgtggaaaaagaaggatatcaccggcatatatcacaagtggcagaatatgaatgaagacagggtgctgtggaagctggggacgttacctccggggctaataacgttctatgggttgacacatccactagataaatcatggcatgtacttggtttgggttataatccaagtttggatcgatcagagattgagaatgcagcagttgtacactacaatggtaatatgaagccatggttagaaattgccatgac

SEQ ID NO: 4945 - DNA, 406 bp, Glycine max
  Clone ID: LIB3028-002-Q1-B1-D8
tgcaattcccccttttggaagatggttccacagtcagtgataacgcaagtctccgattcaagtggcgtgaatgcgatatcaaacgtttcttctggccacggattctacgattggttgttcgaatgtcacgggttctggcacaatgccactctcaacatcccctcgttcctcttcgtcttctacttggcacttcaagccaggcacagcttactcaaactctcccttgcgcgctcctatataatcatttcatataacctttgcctctggctcattactctgctcaatctcgcttggtgctttctccaggcatgggagtgcacgtctgggagaaagttgacatggaacctgttatccttgttcactacttccggaatgctgtttttggaagtgagcttgctggcttttt

SEQ ID NO: 4946 - DNA, 395 bp, Glycine max
  Clone ID: LIB3028-002-Q1-B1-D9
agcatctttacctcttccattttatacaccagtatcgctctgtatttgtttcatcctcctaactgaaccctaatttcttctgggaaactctattttctctaatatggagcaatactggtctgggagtgccatcaatgaaaacaaaggaatggtagataatttgcatcgttatggagtaatcacatctagaaaggtagctgaagtaatggaaaccattgatagagctttgtttgtacccagcggcggcggactccaaccttatgtggacagtcctatgccgattggctacaatgccaccatctctgcgccgcatatgcatgccacctgccttcagttgcttgagaagaatttgcaacctggaatgcgtgttcttgacgttggctccggaacgggat

SEQ ID NO: 4947 - DNA, 398 bp, Glycine max
  unsure (1)..(398): unsure at all n locations
  Clone ID: LIB3028-002-Q1-B1-E1
gtgttcatggacactggaagcatcacgatgtcaccgttaaggacgagaagacccttctcttcggtgacaagccagtcactatttttggacacagaaaccctgaagagatcccatgggggtcaactggagctgacatcattgttgagtccaccggagttttcaccgataaggacaaggccgccgcacatttgaagggtggtgcaaagaaggttattatttctgcccccagtaaggatgcccccatgtttgttgttggtgtcaacgagcacgagtacaagccagagcttgatattatttccaatgctagctgcacaaccaactgccttgccccacttgccaaggttatcaatgacaggtttggcattgttgangggtttgatgacactgttcattccatc

SEQ ID NO: 4948 - DNA, 415 bp, Glycine max
  Clone ID: LIB3028-002-Q1-B1-E10
agagagaaagaactgacctcagcggcggcggcggcggcaacagaagaacaaccaccaccacacacaatgggtcgcgtgagaacaaaaacggtgaagaaatcctcccgccaggtgattgagcgttactactcgcgcatgaccctcgacttccacacaaacaaaaagcttctcgaagaagtggccatcatcccttccaagaggctgcggaacaagatcgcgggtttctccacgcatctcatgaagcgcatccagaagggtcccgttcgcggcatctccctcaagctccaggaggaggagcgcgagcgccgcatggacttcgtccccgacgtctccgccatcaacaccgaccacatcgaagtcgacaaagaaacccttgacatgcttcattccctcggaatcaacgacatccccggca

SEQ ID NO: 4949 - DNA, 318 bp, Glycine max
  Clone ID: LIB3028-002-Q1-B1-E2
ctctacccgttcgtctccgtggtggcatgcatatcgtcgtcaataatcacactggtatcttcggtaccctacaggtctagagctctgaaaccattgacaacgtcgaggccacgatgcaggacaaggatggaatcccccctgagcagtaacgtcgcatcttccccggaaaggaacttgaggactgacgcacccatcggagactacaaaatgcgtaatgaatcaagccttcacctcgtcctccgtcacctttgtggcaggcagatccgcgttcgaatcctcaccggcaagacaaataccctacaagtccagagctccgac

SEQ ID NO: 4950 - DNA, 124 bp, Glycine max
  Clone ID: LIB3028-002-Q1-B1-E3
agaatcacgaaaaaggaataatccacaaccatggcatggaaaatgacgaacgcagcatcgaagattttaagccgaaaccgcgtcctttaccgattcgttgcctccacacgtcccctccgcaccg

SEQ ID NO: 4951 - DNA, 388 bp, Glycine max
  Clone ID: LIB3028-002-Q1-B1-E5
ggattcaaagccattgcccttactgttgataccccaagactaggacgcagagaagctgatatcaagaacagattcacactgccaccatttttgacattgaagaactttgaaggattggaccttggaaagatggacaaagctgatgactctggacttgcttcatatgttgccggtcaaattgatcgtactcttagctggaaggatgtgaagtggcttcaaacaatcaccaaactgccaattctggtgaagggtgtgctgactgctgaggacacaaggatagctgtacaaagtggtgcagctggaattatagtgtccaatcacggagctagacaacttgattatgttccagccactatatcagccttagatgatgttgtcaaagctgctg

SEQ ID NO: 4952 - DNA, 399 bp, Glycine max
  Clone ID: LIB3028-002-Q1-B1-E6
gggtgggcttgtgaaaacggattggagcaaggtcccattcacagcctcatacaaaaacttcacttcacaagattcttcctccaatggccaatcactggacgccacggggcaggcaaagatcagttgggtgcaaaagaattagatgaattagaattaatgcactgataacagacgtttccttcaaggccttcctccagaatgcgctattgcatgagaatatgaaattcaatgttgcatatcactagtaaatgatcctcatgaacgtgacacatatgtgttgcctattacgttaagtgactttcctagtgtaattagctcaattaaacctgttactattgttggtttgtgctttgttgatcactactccattgtttgttgcgatagatacttagaccgtgc

SEQ ID NO: 4953 - DNA, 398 bp, Glycine max
  Clone ID: LIB3028-002-Q1-B1-E7
catttggaaagtgttgtttttctttttttcatttgcattgcaaagcaaaaaccttgcaaattgcaatggcttccaacaaggttattgccaccatcttggttctttctctccttgcctactcaacatcattcaccaatgcatgtggcacatgccacccaaaacctactccttctccccctcctccatcagggaagtgccccaaggacacattgaagctaggggtgtgtgctgatgttctaggacttgttaatgttgttgttggttcccctgtctctagcaagtgttgtgcattgcttgaaggtttggctgattcggaggctgcactttgcctttgcactgctattaaggccaatgttcttggaatcaacttgaatgtgcctatcacactcagtgtgcta

SEQ ID NO: 4954 - DNA, 399 bp, Glycine max
  Clone ID: LIB3028-002-Q1-B1-E8
gagaaagggaaaggttttctatctgatctagctgtggataatcatgaggtgaaggaaacagattttcccttttcagagaacaataatgagcttttttcagtttcaggaaatgagggactaagagaaactgaagtggttgtggttgaaacattttttaagtccatgatgtttggtggagaggagaaggatgttttgtcttcagttgtgacagataagttacttagagagagtgaggaaccaaatgaagtctatggtgattcatctttgcctctaactgatgtggcttcagaggaaacaagtgttccaaaatcagatgacagtgaccaggttgctccaaccataattgagaaatcattggatttggagccaactttggacgagacagttgaggaaccatca

SEQ ID NO: 4955 - DNA, 400 bp, Glycine max
  Clone ID: LIB3028-002-Q1-B1-F11
cgcaattcaaaactctcactccgttataagcaccaaatcctgatggcaccagcggcagagaagaagccagcggagaagaagcccgcagaggagaagaagtccacggtgggagacaaggctccggcggagaacaagccataggccggaaagaagcttccgaaggagggaggcgccggcggctaaaggaagaagaagaagagaaacatgaagagcgtggagacatacaagatctacatcttcaaggttctgaagcaggttcaccctgacattggtatctcaagcaatgccatgggaatcatgaacagcttcatcaacgatatcttctataagcttgcccaggaatcttctatacttgcccgctacaacaagaatcgcaacatcacttcaagggaaattcaga

SEQ ID NO: 4956 - DNA, 408 bp, Glycine max
  unsure (1)..(408): unsure at all n locations
  Clone ID: LIB3028-002-Q1-B1-F12
caattgatgagggtttatggagccttaatgtggtcacttgggaaggtgctgaagacacctgaagtaatgcgagtgtatattggctccttcaatgacaagcctgtaaatgatgctgccactggtccacttgggaaggaactctttgaaaaggaacaggatgatctactctcggatctgaaagatgtaccaaaagcagcttgtgatcgaagaatcaatgagtttgtaaaacgggcccgagcagccaagatacatgcttacattatcagccatcttaaaaaggagatgcctgctatgataggcaaagctaaagctcaacaaaagctcatcgataatttggcagctgaatttggaaaggtacaaagggagttccatttacctcctgncgattttccaaatgtagagtttttc

SEQ ID NO: 4957 - DNA, 406 bp, Glycine max
  unsure (1)..(406): unsure at all n locations
  Clone ID: LIB3028-002-Q1-B1-F4
cggttaaagtaattcgaaacaagcaaactagtcaatctgaaggttatgggtttattgagtttaatagtcgtgctggagctgagagaattcttcaaacatataatggggcaataatgccaaatggggggcagagtttcaggttgaattgggcaacttttagtgctggtgagaggtcgcgccacgacgattctccagattacaccatatttgttggtgacttggctgcagatgttactgattatcttcttcaggagacatttanggctcgttataactcggtgaagggtgcaaaagttgtcattgatangctaactggccggaccaagggatatggctttgtaaggttttcagatgagagtgagcaagtgagggctatgactgagatgcaaggggttctttgctcaac

SEQ ID NO: 4958 - DNA, 358 bp, Glycine max
  Clone ID: LIB3028-002-Q1-B1-F5
acccacattattagcactaacgataagaagaagaaaaagtcgtctctattgagccgcctcagggtggccgtgcagaatgtgaagttgctactaaacgccaccgtactcagccacgcgtggcatgctgcaatcattcgccgcggcgtttctctgagcaaacgccagatcagtttcaacgatcgaccagggttgatgatgtgcactgcttccgatgaaactgattcagaggatttggtttctcgagcgcataaccttcataggatcataagttgtccctccgatgatgatatcgattagagagcagagatgtctataaataatttcagacgccagcttaagatggagaggcaaatctcgc

SEQ ID NO: 4959 - DNA, 349 bp, Glycine max
  Clone ID: LIB3028-002-Q1-B1-F6
gttttcgcctctctctctctctctctctcttgcaaccttttctctgtttcttctaaaagtcgcagcacagcataagataagccttcgtcatcttcgtcttatgtgattgacgtgtgtctacgacggtgatccatttctgtagcgtctggtgaaaagctaacttgttcactctaatacgtgtacagtgctaaagggtaaactttgaaacctagcttcctagttgaatcatcagaagcttagaagtcgaatccatatttttctggacgtatagactttcgttgatttccctgagaaatgatgatgatgcttgaagatatgggattttgtggggatttggatatgttttctg

SEQ ID NO: 4960 - DNA, 396 bp, Glycine max
  Clone ID: LIB3028-002-Q1-B1-F7
gtcgagccgaatcggctcgaggttttttttgccccttcttagttcgcgctccctctgccaaattttccacctaagagcgagaaggcaaaaatctgtgatgaaagacgaagcaagagagaagttcaataagttgcagcttgcctagaccatatttttttttgttcacaatttaatatatggtaacaagcctgtggtgtggccatagcaagaagggagagaaatcaaaataatttaaggttgagatgaggaagtgtgagctctgtaacagtcacgcgaagttgttctgcgaatcagatcaagccagcctcctgttggaaatgcgatgctaaggttcacagtgcaaacttcctcgtcaccagtcatccgacgattcatcgctgccatgtttgtcaatca

SEQ ID NO: 4961 - DNA, 405 bp, Glycine max
  Clone ID: LIB3028-002-Q1-B1-F8
gtcaataatgagtaatatgaagttattaaattctgtgctgcaagtgaatcaatttgcaatagatgttgaagttgtaggacaaggcaagccacaaaatggtcttaagggaggaaatgaagctctggattttctggatgttgaaaagctccattccctgtctcagaatgaactgttggaatgttttcattcattgggagatcaattgatctatttatggaaaatatttctaaagttccatagggataacaaatcaaggattttaggatttttacgtgatgcatgggtgaaggaccggaaagctgaatggtcaatatggatgctatattctaaggtagagatgcctcatcattacataaacagtaagagtgaagagtcttcccatcgtggtgtacacagacgagtttc

SEQ ID NO: 4962 - DNA, 404 bp, Glycine max
  Clone ID: LIB3028-002-Q1-B1-F9
ggaagaagaacttacctacaagctaatgaaggatcagctagaattgctcaagcattggcatcaatgactagcttacgtggttcctctcaggctgtgttggaaggtagccatggctccacacgctctgaatgtggggagtggaagcacggtggcctcagtcacacgtgcagggttcacagttagagcacagcaacaacaagtgaatggtggtgaggtacaaacttgccgtaaggcagtgctttcacttgttgctgctggatttaccaatggctcttttgttcatgctgtgcttgctgatgcccaacctatcaaagttggaccatctcctccaccttctggctgattacctgtaacattgaactcagatgaaccaagagaccttatgctgccattgacagataagt

SEQ ID NO: 4963 - DNA, 403 bp, Glycine max
  Clone ID: LIB3028-002-Q1-B1-G1
gttccacggtggcgggtgggtgagcgggagcaacgattcggttgcgaacgacgtgttctgccggcgggtcgcgaggctctgcgaggcggtggtggtggcggtggggtaccggctggcgccggagaatcggtatccggccgcgttcgaggacgggctgaaggtgctgaattggctggcgaagcaggcaaatttggcggagtgcactaagtcaatgggggggaggaggaggttggagggtcagcacaagcatattgtggaaacctttggggcatcagtggttgagccttggttggctgctcatggaaatccatcaaggtgtgttcttcttggcgtgagttgcggtgcaaatattgcagactatgtggctcgaaaagctgtagaaacaggcacacttttggaccct

SEQ ID NO: 4964 - DNA, 410 bp, Glycine max
  Clone ID: LIB3028-002-Q1-B1-G10
attccattcttttgaatccaaagccacagtcaccagatcaaaatccccaaaacacatcatcgactgaatcgaacaaatgagagagaaagagaaccatccttcgacaaactccgaggacgaccaccgatcctccttactggatctggcgcgtgccgaaatcacggaatcctctaactccaagacccgaacctgcggttcgggtcttggttcgggttccggcacctctgagcctcaggctcccttcccggaccaggtcctcgagaacgtgctcgagaacgttctccacttcctctcgtcgcggcgcgaccgcaacgccgcctcattggtgtgccgctcctggtaccgcgccgaggccctcacccgattcgagctcttcatcggcaactgctacgcgctctcccacactcgcg

SEQ ID NO: 4965 - DNA, 393 bp, Glycine max
  Clone ID: LIB3028-002-Q1-B1-G11
cggatatccacttcctcttcttctcttcccatttcccttccaatctcctaatttctcttcagcttctgggttctccattttccttcgtcttctgcatctgcattccgtagattcagttctcgtcggaaaatggacgttcgccgaagacccattcctccctccggcgatcgccgacaaacccagaagctgaagaacaccgccaccaccgattcgcagactcttctgcctctctacctcaccaacgccctcttcttcgcggtgttcttctccgtggcctacttcctcctccaccgctggcgcgagaagatccgcaccgccactcccctccacgccgtcacccccgccgagaccgccgccatcgtctccctcgtcgcctccgccgtctatctcctc

SEQ ID NO: 4966 - DNA, 374 bp, Glycine max
  Clone ID: LIB3028-002-Q1-B1-G12
caatcatatagaaaccctaatttgttacacctagcttcttccttcattttctcatcatcaatattcaacaacatggctaatttgcaaggagggcctgactttgacaaaatctttcacttcctctccatttgcatccttgctttcatcaatgaaggctcttcctccctctcaagtgcattcatgaatgaaccatggtcatggggcctaagcattcccataagtttgtacgtgaaattcgcacttgagattcacactcaccttggaatctgcgttggggttggagtaccctctttggtctattggggtgccacacgtggtgccattgattggtactgggaagcagcattgaagttcaaccacgagatcttcaagac

SEQ ID NO: 4967 - DNA, 408 bp, Glycine max
  Clone ID: LIB3028-002-Q1-B1-G2
aaaagaccaggaaagatcccaacagtgagaaaccaggcgagatatatgttccaagagatgaaaacttcggtcacttgaagtcatctgatttccttacatatggaatcaaatccttatctcagaacgtgatacctttgttcaaatctataatatttgacttaagggtcacatcgagtgagttcgatagcttcgacgaagtgcgtggtctctttgaaggtggaatcaagctgccaacaaatatactgagccaaattagccccttatcagtcctcaaggaaatcttccgcactgatggtgaaaatacccttcaatttccagcacctcatgtaatcagagttagtaaatctggatggatgactgatgatgagtttgcaagagagatgattgctggtggtaatccaaatgtaa

SEQ ID NO: 4968 - DNA, 342 bp, Glycine max
  Clone ID: LIB3028-002-Q1-B1-G4
ccctgttggatagaatggaggttgttgctattgccgggtatattactgatgagaagatgcatattgccagagaataactggaaaaaaacaactcgtgaagcttgtggaataaagcctaaacaagtggaagtgactgatgctgctattcttgccctaatagaaaactactgccgataagcacgggtcaggaatcttcaaaagcacatagaaaaaatttaccgaaagatagcgctacaactcgtgaggcaaggggaaatgattgatgcaaccgtggaaccaataaaagaatatatagactctgatgaatttggtcaaaatacagttcaaaataagaactccgag

SEQ ID NO: 4969 - DNA, 399 bp, Glycine max
  Clone ID: LIB3028-002-Q1-B1-G5
tttcgttaacgcatccttcgacctcgctactatacccttcaacgacggctattctccgctcttcggagctagcaacgttgttcgctccgaggatggatacggcgtacaactccgcctcgatcgctacacaggttcgggtttcatttcctccagtatgtaccagtatggattcttcagcgcgagaatcaagttaccatcgaattatagtgctggtatttgcgtggccttttatacatcaaacggtgatgtgttcgagagtcccatgatgagttggactttgaattcctaggtaacgttgccggaaaaccatggcggtttcagacgaacttgtacggcaacggcagcacaaatcgtggccgtgaggagcggtaccgtctgtggttcgatccaaccaaagaa

SEQ ID NO: 4970 - DNA, 400 bp, Glycine max
  Clone ID: LIB3028-002-Q1-B1-G6
gttaagtcagagatactgaggattatgaaggaagcttctcacagtctgaagcagagtttgccactgttagcacggagaagaacgagaaacatttttccttctatgtaattttaactctaatttctttcttttttttagttttatcacttgagagttcttttaatgtatattttttgtatgtatttttaggccgttctacctccagggattgacccttttgtgtatgctagggaatacaacgttcatcctgacataataagcgtacatcctgacataataagcattgggtttgcattcctctattcctcagttgtttttgcaattttatcatagataaggaactggttagaggaaattatcatatggtgaattatcgtgtgtattttctagcaaggttata

SEQ ID NO: 4971 - DNA, 409 bp, Glycine max
  Clone ID: LIB3028-002-Q1-B1-G8
cgttaaattcactgccatctgcatttacctccaatacgacgccctttccttcctctccgttaagtggaaaaccaagtctgctcaccagttaacggaatccgaccaattcttctcagatatcgttacaggtccattcgagaaatttatgcaggtgacaatgatcaaacccttgacggggcagcaatactcagagaaagtggcagaaaattgtgtggccatctggaggtctctcgggatttatacagattcagaagccgaagcaatagacaagtttctttctgttttcaaagacctaacattcccaccaggctcctctatccttttcactgtctcacccaatggatcattaacgataagtttctctagtgatgaaaccattccagaagttacgagtgctgttatagagaat

SEQ ID NO: 4972 - DNA, 352 bp, Glycine max
  Clone ID: LIB3028-002-Q1-B1-G9
ggcagtgctggtcaccggagttccatagccggttcattaaagctttagatgtccctcgatgttctcaaacatctactcagaacgaaattaaggaactcatgacggtggattagctgacaacttcagaagtccagactcatttacaaaacaagcgacttcatacatagcgagttccagttgctacaactccaagttttagtcagtcagctgtatatctagcatgcttgtgcacgcacactgaatccattaagggtggcagttctgatactcctcacagtccactccatcaatccacacactcgggggaatcaccatcgaccacataaggtgaccacatgatggatcatgatga

SEQ ID NO: 4973 - DNA, 402 bp, Glycine max
  Clone ID: LIB3028-002-Q1-B1-C2
caaatgaaaactgggtttggtgggcaatacagcaatgaggtggcatgtgccagttggaggcttggcgtggaagcaaacaacgtagtcaagtggcaaactgttcctgcagcttgccgagagtacatagctgactacgttctaggagaccaatatagatcagattccaaaacagttaaccaacaagcttatttctatgctaaatccctcaaactcaccaacaaagatgtctttgtcctggacgttgacgacactactctctctaatctccagtattttgctaaccatggatttggtgtggaaccacacaatacgacggcgtttaagaactgggttcttgatggcgaagcattcgcactgccagagactcttaaaatgtacaacaaactgttggctctcggcatc

SEQ ID NO: 4974 - DNA, 66 bp, Glycine max
  Clone ID: LIB3028-002-Q1-B1-C3
cataggaattgttaattcagaacattgctgcacaatctcgtggaaccaaaacatttcttaactttc

SEQ ID NO: 4975 - DNA, 147 bp, Glycine max
  Clone ID: LIB3028-002-Q1-B1-D3
cccggattaagggtttcgctgctcccaaaaaggcaggcctgaaactttccaaaccaaatggaagttgcaacccaaagaatgccacctgcccaaaattgaatccaaggagaattttgaaaaactgccggaaaagccactagtttttgt

SEQ ID NO: 4976 - DNA, 403 bp, Glycine max
  Clone ID: LIB3028-002-Q1-B1-D4
caaaaatattattaagatgatcaacattattggagcacttgttccactctttggaatttcccttccacagttgtgtgtaagcacaagacacataaacccttgtgcctgcaatcacaacttttggtgagtctgctgtggatgtatggaacaatgacaatcttcccacccttttcaaggctgattaacctccttatgggaaggacttttgtaaacaccaacccactgggacgttttgcaatggccaattagctactgatttcactgctgacacattgggtgtcaagacctatgctccagcatatcttatcccacatgcatcatggaaaaacctccttattggagcaaactttgcttcagctgcaactggttatgatgaaaatgctgctactttgaatcacgcgat

SEQ ID NO: 4977 - DNA, 359 bp, Glycine max
  Clone ID: LIB3028-002-Q1-B1-F2
ccctaacccgcttcgaaacgtggcttcctcatgctcgcaaaagctctctcgaagaaaaccttcgtcttcttcgtctacgtcgtctcaacacacacccgggtctacacggatcgtttaccgagaatctcggatcccatcggaatccgatttcccgatctggcagcagaactggttcaacgcattgctcttcgtcatgggtctcggattcttcgccctcaccattttcctcttcctcactctcgactctgacatcgctccttcttccaccgtctccgcctctgccactgacgctttctccgaacgcgtcgatgtgcaggttacttaaggcacggttctgaagcttatgcacgagaagacca

SEQ ID NO: 4978 - DNA, 394 bp, Glycine max
  Clone ID: LIB3028-002-Q1-B1-G3
cagaaatattattacgatgatcaacattattggagcacttgtgctactcgttgcatttctcttcctcagttgtgtgtacgcacaagacacaacaacccttgtgcctggaaacataacttttggtgagtcagctgtggatgtagggaacaatgactatcttcccacccgtttcaaggctgattaccctctctatgggatggacattgttatatagcaacctactgggaggttttgcaatggcaaattagctactgatttcactgctgacacattgggtttcacgagctatgctccagcatatcctagcccacatgcatcagggaaaaacatccttattggagcagactttgcatcagctgcatctggttatggataaaatgctgctactttgaat

SEQ ID NO: 4979 - DNA, 135 bp, Glycine max
  Clone ID: LIB3028-002-Q1-B1-G7
gatgtatttgcgttttttagttctaattggcaactcttggtgtttattatggtgttggtttcctgtgttgattgtttgcaatgctgaaaccttggatatggaattgatcgtgatatatatagtatcatttatttt

SEQ ID NO: 4980 - DNA, 174 bp, Glycine max
  Clone ID: LIB3028-003-Q1-B1-C6
ttctatgtcatatatatgagcatatgctctttgttcatttgcaaatgcaaaataaacactggagcggctttaggtaatttgactttgagtaagttttgtctaattttatacttggtggggaatagaagtatttattggtgtatgttgttcatctttcttcagtattgcctctaa

SEQ ID NO: 4981 - DNA, 352 bp, Glycine max
  Clone ID: LIB3028-003-Q1-B1-H7
ctgcggaattcaaggccgcagctaagcgagcgtgtcaagtcaaatttgaggatgctcaatccacttatccacttatgatggaggatgcacttccatacatttgcatggatattacgtatcagtatacgttgctcgtcgatggatttggcctggatccttggaaagagattatagtagcaaatgaaattgaataccaaggtgctcttgtggaaggagcatggcctctaggcagtgccatagaagccatatcttcattgcccaaatttaataaattgatgtattttatataacacttaaagagaagtgggcttcctttaattactaaataaaatgaagctcgatgtatatccaa

SEQ ID NO: 4982 - DNA, 265 bp, Glycine max
  Clone ID: LIB3028-004-Q1-B1-A2
gtaagatcaagtcattgggagtcaaaatggttatctctggagaaggatctgatgaaatctttggagggtatctatatttccacaaggcacccaacaaagaagagtttcaccaagaaacatgccgcaagattaaagcactccacaaatatgattgcttgcgagccaataaatcgacctttgcctggggtctagaagccagagtaccatttttggacaaagagtttatcagagttgcaatgaacattgatcctgagtgtaaaatgat

SEQ ID NO: 4983 - DNA, 248 bp, Glycine max
  Clone ID: LIB3028-004-Q1-B1-B7
gttgaagaatgagtttcctcaacttttgtccatcaaagactccctcgttaagtatgtattccagccaaatcagaaaaaggcataacataacttggacatgttatgttagtttaccgttttaatttacatcttcttctgctgaccatttcagattttccttcgtgtgttttgttgcatttaattttaatgttatatttgtattttttattatgatatgaataaactagttgttacctacttaattttaa

SEQ ID NO: 4984 - DNA, 78 bp, Glycine max
  Clone ID: LIB3028-004-Q1-B1-C3
gacgacgcgaccacgcctacgtaaagctcggattcggctcgagcagaaagaaccccaaaagacctttctggcgatgcc

SEQ ID NO: 4985 - DNA, 205 bp, Glycine max
  Clone ID: LIB3028-005-Q1-B1-A1
ttacaagtagataattgtaagaagtccaatttcgggcaacaacgtttgtaatgcagaaataggtcattagcattgtaaatctccaggcgataaatggaatatcaaatggaagacgccgcatagcttctggtgtgacaaaaaaaaacaaaaaaataaaaccaaaaaaaaaaacaaaaaaactaaaaaaaagcacaaaaagaggcaa

SEQ ID NO: 4986 - DNA, 323 bp, Glycine max
  Clone ID: LIB3028-005-Q1-B1-B4
ctcgagccgcaaaaattcgggaagactagtgactgtggttcacctagatcaactctaaagtgctggaatgaggaagatgaggaagagtagtttccttaagtgtctttattattctgtccttgtgaaaataagtctggttttccagatacgttattgtttttctttgttgtcttttttagcttctgttagagaccatttgggcatttagacctttattgtttctattaccatttgaacatcgaatggattaataaatcactttgtttgcgtgcaaaaaaaaaaacatatctcttctacaaacaaaaaaaacaaaaaagaaccga

SEQ ID NO: 4987 - DNA, 114 bp, Glycine max
  Clone ID: LIB3028-005-Q1-B1-E10
catttttcattacctttgtaaccttcgagaaatgtcacttgcatcatgaaaaaaacacaagattggaaaaaggaatgtaatatgtttgaagtttttctttctagatcttaaaat

SEQ ID NO: 4988 - DNA, 130 bp, Glycine max
  Clone ID: LIB3028-005-Q1-B1-F1
attcgttttaattattttctattttttcacctttgtaaaatattacgtgtaaacatgtatcatacatctaattcaagttcttatgatgttaataatacgtggctgggccacagatttccttttagataaa

SEQ ID NO: 4989 - DNA, 117 bp, Glycine max
  Clone ID: LIB3028-005-Q1-B1-G10
atgatacagtctatcaaatggacaataaaaggttcagaattagatagttatcctacgtttttattggggatgtagcaaatagtatacttaatttaggccagacttttttaagttaaa

SEQ ID NO: 4990 - DNA, 103 bp, Glycine max
  Clone ID: LIB3028-006-Q1-B1-B9
ttttgttatcaaaacggtcctttaaataacatcaaatttacccttgaacgacaaaaaaaaaaaaaaaaaataaacaacaaaaaaaaaagaaacaacaacagaa

SEQ ID NO: 4991 - DNA, 233 bp, Glycine max
  Clone ID: LIB3028-006-Q1-B1-C7
ctcgagccgattatgacagaaaggctctagacaatacgcttcgtgcattctgtaaatcctgatctttgtgctccatgtttctattgcagctttatccaattccttttagtgagtttttgtatgttgttatataacctcacttgtttttttcttatgtactttggatggcaaccatggttcccattatatacgcaagagtatattatttgaaattgaggcatgatcaataatta

SEQ ID NO: 4992 - DNA, 288 bp, Glycine max
  Clone ID: LIB3028-006-Q1-B1-D5
ggaatacattgataaagttgttcttgttttttcttcagcttgcaataaggctaagcttcttaaagtgaaagtgttaattgctgataaagagtatgagagtgctattgctgagtctggttttcttcttaaggaagatgaaaataatttagaggcattgttgttacgtggtcgtgcatattactatttagctgatcatgatgttgccacgaggcattttcagaaaggtctccgcctagatccagagcatagtgaactgaaaaaggcatattttggattgaaaaatctact

SEQ ID NO: 4993 - DNA, 362 bp, Glycine max
  Clone ID: LIB3028-007-Q1-B1-D3
ctcgagccgtttcgattagagggttgggctggtctgtacaaggggataattccatcaactgtcaaagctgcacctgctggtgctgtgacatttgttgcttatgaattgacatcagattggttagagtccactttcaattgattttttcccattttttcttcatgattagtgatcatattcttttttgaaatacaagttgattccctcgtagtataggaagaaagtgtgagggatatgctaattttttgtaatgatagtggtagttgataagattgaacttcctttaagatggaagatttgtccttgatgcttgcgtctgatttggaattcaaaatgtaaatttcaaaaatggtgcaaaagcc

SEQ ID NO: 4994 - DNA, 362 bp, Glycine max
  Clone ID: LIB3028-007-Q1-B1-G5
ctcacaacagcagctgcagcagcaatggctcccaaacgaggtggaaaggctccggctcttgccgctaagaagaagcctgagaaggtcacgaatccgttgttcgagaagcgtccgaagcagttcggaatcggaggggcgttgcctccgaagagagacttgactaggttcgtgaagtggccaaagaatgttcaaattcagaggaagaagaggattctgaagcagaggttgaaggttcccccagctttgaaccagtttaccaaaactcttgacaaaaacctagcagcaagtctgttcaagttgcttctgaagtacaggcccgaggacaaagctgaaaagaatgagagggtcttgaaaatggctca

SEQ ID NO: 4995 - DNA, 166 bp, Glycine max
  Clone ID: LIB3028-007-Q1-B1-H3
ctcgagccggctcgagctacttcagcttcaactaacgtattgctttttatagataaatgtctgtgactttgtgtaaagtgttgtgccagtggatatagatttggcttaggctttaggaacacatggatggatcgtgcaaatgcgatgaagtgatttgttttaagaa

SEQ ID NO: 4996 - DNA, 303 bp, Glycine max
  Clone ID: LIB3028-008-Q1-B1-A4
accggattgtgggtgctgcgttggtggagatggacggtgccgtcgttaaacaagagcacacggcgaggctgttgattcactccatttcccccaattgccaattcgacacattcctttgccacaacaacaacaataatgaatattgaatcccttgttacgtctttggaagtggttcgaataattaattcaataatgaagtactagtgcattttaatcaaatcctttacatatttaattggactgcaccagcttcaagtaattaatatatctggaaggctgaggatatgcttcaatttggctttg

SEQ ID NO: 4997 - DNA, 292 bp, Glycine max
  Clone ID: LIB3028-008-Q1-B1-B2
cccgggattcatatgggtctaactactgttaagcttgttctagctcaattggtgcattgttttaattgggtgcttccattggacatgtctcctgatgagttagacatgaatgagatatttggactcacaacgccaagaagtaagcatttgctagctacaccagtttatcgactagttgattaagttaagagatcgaggttaataatgcgcagtaaggtttatttacatatatttgtagtttgtttaaatttcaatgagtcatgtgaaattaaaattaacaatttttctaaaa

SEQ ID NO: 4998 - DNA, 359 bp, Glycine max
  Clone ID: LIB3028-008-Q1-B1-D11
gctggcccaaggttcgtggtgttgctatgaaccctgttgagcatccccacggaggaggtaaccaccagcatatcggtcatgctagtactgtcaggcgtgatgctcctcctggacagaaggttggtctcattgccgcaaggaggactggtcgtcttaggggacaagctgctgcaactgctgctaaggctgataaggcttaaatagaacgttgttagggttattttatttgattgcatgtttttcagttttgtttttattttttctgatagtttgtttgttaaactatttgggcacccttttgagaaccattttcttcccaacatatggagttttcaatagacggtcttctattatttgtt

SEQ ID NO: 4999 - DNA, 261 bp, Glycine max
  Clone ID: LIB3028-008-Q1-B1-E6
gaaatttatatattttgtaatggcccaatcgcgtataacatagcagagaattgttgtatctttagtattattatccccacccatcctattacaagttccttgggggtgggggatgtggcagttaatgtatacagcttagctttatatgttactctaatatgtattatatgtaggttttatcaaattttttgtcggattttcaagattgtctccgtgacttgtcgaataaaaacattttatggatagctttccttgtgaaaa

SEQ ID NO: 5000 - DNA, 95 bp, Glycine max
  Clone ID: LIB3028-008-Q1-B1-F4
cactgatagctggcatggcaaagtgcaaactataataaatcatcatcttatgtaaacgatttccattacagcaagggttgtccttaaaatttcac

SEQ ID NO: 5001 - DNA, 256 bp, Glycine max
  Clone ID: LIB3028-008-Q1-B1-G11
ctcaagattcgaggatcgagatttgccagctccccgtgggtgatgggattaccctgtgccgccgcatcatctgatcattttctcttcatctagatttttcatgacagatattcctttcattaaaacaggttgcgtgaatggtggagttctcaaatgttctactgtcttttctagatctttgtgtgtttcttgtcacgctagaaatttagctgaaaggatacaaatcaacatttatcttatttatctacttgctaaa

SEQ ID NO: 5002 - DNA, 417 bp, Glycine max
  Clone ID: LIB3028-008-Q1-B1-H6
caaaaagaaaaagaaaaaaaatatgaagttcgctataaacaacatattgtcccctttatttcttcttgactttggttttgcacaacagggggatcttgacatatcaagatttggaggaaaaccaaatacaaatataggccaggctttcttaagtgcctggactcaagcatgtgcatcaccaactgctgtcaaaattgtgattccagctggcacataccaaatgggtgcagttgatgtcaaaggtccttgcaaggctcctattgaggttcaagttgatggaacaattcaagcacctgcaaacccaactgaccttaaggcggctcatcaatggtttgttgttcaatatgttaactctttcaacctgtcgggtaaaggtgtttttgatggtcaaggggcaactgcttggaaacaaaatga

SEQ ID NO: 5003 - DNA, 301 bp, Glycine max
  Clone ID: LIB3028-009-Q1-B1-D10
gttaaataattgaagtctcaacactaatgtaggttattggtgttgtttattttaagtttttctttttttcaagaacacacaactagatatttgattttcatgatcataaattttcttagcttgaaggatgggaataatttccgatagttgtttattaattttggattatttagcaatccaattttcatttcaattcaattcatggactatgtattttgagcgttcccgatcatggagaaagtaggatatagcctgataaacattccatttaacaaaacatgcatgggacattcaaacatgt

SEQ ID NO: 5004 - DNA, 267 bp, Glycine max
  Clone ID: LIB3028-009-Q1-B1-E11
cattgattggtgatgatttgtaagctccaatatagatgcaaacttagacaagtggggtggatttgttaattcatgtttcttgttgcttacatttttaattttcctcttttgttttttgagctgcttgtagagttggctttagagatttgttacatatcgggaagccatggtgtactttgaagcaagattgtatgtatgggtagagaacctctactgatatatataaatcgcttcttttgcatacagaaaggatttccaacttgtgta

SEQ ID NO: 5005 - DNA, 198 bp, Glycine max
  Clone ID: LIB3028-009-Q1-B1-G5
gtatcaaatttcagtcacatattggctgtgtacatagggttatattattgatgcactgtatttgtattcaaattccaattccaaatggtgaacatatttgattgctgttagtttcccaggttatgtagactatgtgacaatgcagcattatttggatttgcccgaaagaaaaaaaaaagaaggaaaaaaaaaagtaat

SEQ ID NO: 5006 - DNA, 108 bp, Glycine max
  Clone ID: LIB3028-009-Q1-B1-H8
taagcaagggcctccgatcgaggttatcaagatgtgaattaattccggtccggtaccagcatgcatacaatctttcgctaaactgagtcattatagaacgtggattgt

SEQ ID NO: 5007 - DNA, 97 bp, Glycine max
  Clone ID: LIB3028-010-Q1-B1-C4
attagtcatttcaaaattttcctatttcgtgtatcaaatttgttcatatgggagaaaacaatggaaagtgtggcactttaactttcaccttatttca

SEQ ID NO: 5008 - DNA, 112 bp, Glycine max
  Clone ID: LIB3028-010-Q1-B1-E12
ttttacgtgatcaactaaaaacatgtactctctgtttgtatgtatgccctaccaatgtgtctcttaatatcaatatcaaaaagagagtgttcaagttaatgtttggattcca

SEQ ID NO: 5009 - DNA, 412 bp, Glycine max
  Clone ID: LIB3028-011-Q1-B1-A2
ctcgagccgaatcggctcgagcgaaccaatttggttcttctcttctctctatcgtcttcttcctctgttccattagggtttccttttctccctcggagcttccaattgaaatccaattcctcaatacctccacactttctcgttcggaaagctcgcgaattcgaaagacatcgacggctccacgtgatacgttttcttcctctctggttatcaatgttggctactagtgcagttgcatctttgcccgtattaccaccagtgagaagaggtggccaccacattgaacagaatgttgtttccacattgagctttccaagacgattactgacaactaataattcaatacctctgagtggtacacacttttcatttggcagaggagctcattctactcacacagcaactataatat

SEQ ID NO: 5010 - DNA, 415 bp, Glycine max
  Clone ID: LIB3028-011-Q1-B1-A4
ccaccaccacgccctctgcataaattctctttattccttcgttgctgccgccgccgccactagctaggtttcccctctcacctttctcagcttctcctcaccaccccaacatagtttcttatttttaagtgaaaaaaaccatcatcacgtcacccttggtaagacctatatatccttcactattcttccgacaaatgtttcagtgattcacactaatccacccctgcaactaaacaaaaaacatcctaaatatctgtcttattgttctttatatttttagtaaagaaaaaaaaagaagagaaaaccctattcactctgaaagtggcgaagatgagtttgggaaccgcggaggaggaatcgggttccgaaatcaacatcccggcggaaatccactggcacatgctggacaagtcaa

SEQ ID NO: 5011 - DNA, 249 bp, Glycine max
  Clone ID: LIB3028-011-Q1-B1-D4
caaaaagcaaagtagcagacctgcgtttactctgtttctcaatctgcacttaatgacagattcaccgcttgaggccatgcacgagccctaactcttgtcagccgtcgcagttcgcagttcgcacttctcacgcccggtcgcgctgttcatccacggggctactccgattattcacacagacgttctgaagtcgttcgttatggctggcaccacgttttctgctgcacgctagattgctgtgacgacttc

SEQ ID NO: 5012 - DNA, 405 bp, Glycine max
  Clone ID: LIB3028-011-Q1-B1-G4
ctcgagccgtccaaataaaaaaaaaaaaagaaaaaggaaggagataggaaagggttaattgaatccaaaaaaaagaagagaaaaacaaaatgggcagggtttggacttcgatgatagcattgttgctttgcctgatgacatcatcggttcggggcgaggacccttacatttactacacatggaacgtgacctacggcaccattgccccattgggtgtcccccaacagggtatcctcatcaatggtcagtttcccggccccgaaatcaactccaccagcaacaacaacgtggtcatcaatgtcttcaacaacctcgatgagcctctcttgttcacagggatggtgtccaacagaggaaaaactcttggcaagatggcacattgggtgcccagtgccctacccccca

SEQ ID NO: 5013 - DNA, 137 bp, Glycine max
  Clone ID: LIB3028-011-Q1-B1-H10
tgcattctaacaactatgaaagagtttacaaacctacacgatagccacactggtcaatttgtatcatgcaatgaattgtcgatgactttgatctgtacaatacttgcattaattgatgatatcaatgcaatttcata

SEQ ID NO: 5014 - DNA, 295 bp, Glycine max
  Clone ID: LIB3028-011-Q1-B1-H9
aaatataatgaagaccgaagttaatccgtctataaattaggatgaaggtccttttgtcaaaatctgaatggtttactcttctattccatctatgccagtagctggaggagatgctatgctctttaggtaccaaataacgtggttgataggatttacttgcatcttattttgggaatgttaatgataccaatgtcactagagctctatatatttttttgtctgatgaacaatactcaatatattttcaatcttgattaatgttgctcaataaatcaaggaaaatgaacagattcag

SEQ ID NO: 5015 - DNA, 333 bp, Glycine max
  unsure (1)..(333): unsure at all n locations
  Clone ID: LIB3028-012-Q1-B1-A1
cttctttctttgtgccattgatgtacccccaggtgcaggtgcaggagcaacaggttttctctcctccgcatcaatcgaaacgccctctctttgacacgattggtcacaattttcaggctccaaggttgccccttttggattcagggcaagaggtgtttggtangaggcagcaaacacagctgccattgtttcctcaccatatgcaacaacaacaacaacaacaacaatcaatgggtttgccatctgctaaacagcagaaggtgagttccaccggagacgatgcaagccaccagtttcaacaggctatatttgatcagttgtacaaaactgctg

SEQ ID NO: 5016 - DNA, 356 bp, Glycine max
  unsure (1)..(356): unsure at all n locations
  Clone ID: LIB3028-012-Q1-B1-C11
cttgttttggggtttcgccacgccaaaggtgttgtttctgtggggatgttttccctttcaattanggctgaatgctatcccaacattgacccatttggctcctttgagcatttttgctgattttgttgacattgtagccaagagtgtggtgatggtggatgatgtctttgtgttcatgaagaataggcctcctttgaaagcctttgggggctggtccgtgtttctctatggtttaggtgtggctgtgtatgcatttgaggggattggattggttttgcccttggaagcagaggccaaggataaggagaagtttggtggggttttgggtgtaaggatgttccttaattctttgttgt

SEQ ID NO: 5017 - DNA, 347 bp, Glycine max
  Clone ID: LIB3028-012-Q1-B1-C12
caccacgatggcgaccaaagcgatggaggtggtgaagggtctggacgtgaaacggtacatgggtcggtggtacgagattgcgtgtttcccgtcgaggtttcagcccagtgacggcgtcaacaccagagccacctacgctctcagagatgacggcaccgtcaacgttctcaatgagacttggagtggcggcaaaagaagcttcattgagggcactgcttataaggccgatcccaacagtgacgaggccaagttgaaggtcaggttctgggtgcctccgttcttacccctttttcccgttactggggattactgggttttgtacattgaccaagattatcagtttgctc

SEQ ID NO: 5018 - DNA, 343 bp, Glycine max
  Clone ID: LIB3028-012-Q1-B1-D10
ctgagaaaaggtcacctgactctgatccgtcacctaagaaccctgagaatgagtttttgaccacgactcctgggaacaaacagaccctcaatgaccttacaattcataaaattttatcacagcacgcatcagatgaattctaccttgggcaaacagacggcggcgactactggacttctgatgccgggccactacaggcctttaagacgttagcaagaatcttgatgagattgaaaagaaccttatagagaacaacaataatgagacattgataaaccgctatgggccggctaaaatgccttacaccttgcactatccttctagtgacgacggattgactttc

SEQ ID NO: 5019 - DNA, 289 bp, Glycine max
  Clone ID: LIB3028-012-Q1-B1-E9
aagagagattgtgaccgttgtttgttggttcgttttgggagtagaggcggaccacctgctccaggatttgtggtgtgacatagatatagttgtacaaattatttcgggaaccgaagaaaacaatttgtaggccagaaagtagtggacttaaatgttgtgaaaattctaagatagaatcgttaaagattaggaatagaaccgggagaattagtgttttttgagtttaccttgtacacattactacagtaaatagatggaacggcctccttcgaaaaaaaaaaataaagac

SEQ ID NO: 5020 - DNA, 69 bp, Glycine max
  Clone ID: LIB3028-012-Q1-B1-G9
ataatgcatgatgtaaaatcattttgtattctaatggtgtgaggttgtagagtttcttattataactaa

SEQ ID NO: 5021 - DNA, 224 bp, Glycine max
  Clone ID: LIB3028-013-Q1-B1-A2
tggaattttggtgatctctttttatttgatatgaatttgtcttgcaatgcttttgactatgaagttgattgctaaattattgaatcagtgttttgcagaatatctgtaatcatttcaagattgtagttctaaggattcttgtttcttcaaaatctttaatgttgctgtttaatttttgttggctacttcctttactgtctccaatgtctcattaatcattttaa

SEQ ID NO: 5022 - DNA, 206 bp, Glycine max
  Clone ID: LIB3028-013-Q1-B1-C6
gcttaacggttttgaggaatatgtatgggatgaaaatggtgatcaagtttcctaacagagtttaggcttaagatttcctgtcccctaaagttgttagtggaaattgtacagagtacatgatcatatgaatgtaacttgtaaattgctttactcaatataatttcgttgccatgtcatgtatggtatttaaaaaacaagaaaacagt

SEQ ID NO: 5023 - DNA, 320 bp, Glycine max
  Clone ID: LIB3028-013-Q1-B1-E12
cagaagcagctgctgcaggagattggggtgaggctgttccagctcctgctccagctccagttccacaagctggtgcgcctccagctcaagcttttcctcctgctactggctgggactagcttttgacaagagattttattccatggtgtcaaaaccatagtttttcttcccctcggctcagaaacttcccttccaagattttatttgttagaaaagaaacatcatttacttgatattgaatctcagtaaaattttgtttgttgacatattgaaggaaacttcatcgtttaaaatttaaatgtagtaatttaattgtttca

SEQ ID NO: 5024 - DNA, 224 bp, Glycine max
  Clone ID: LIB3028-013-Q1-B1-E4
ctgagagtgtgtgtgtgacttatggagtccaattcagagttcgacgtgattatcatcggagctggcgtcatgggcagctccaccgcctaccacgccagcaaacgcggccttaaaacccttctcctggaacagttcgacttcctccaccactgtggctcctcccacggcgaatcccgcaccatccgcctcacctatccccaacactactactaacctttagtcat

SEQ ID NO: 5025 - DNA, 353 bp, Glycine max
  Clone ID: LIB3028-013-Q1-B1-F3
catcgatcgtgtttctcgctaatttgcgtcttccttcgtttccaagtcagcgttaagggtttagtttggtgcgtgccatgaagatcgaggaattggacgatggagagtgtagtagggacgaggaagagaagtgtgagaggcagattgtgagcgttgatgcgaagagagcgttggttggagctggtgctcggatcctgttctaccccacactcttgtataatgtgcttcgtaacaagattgaagctgagttcaggtggtgggatcaaattgacgagtttttgttactgggcgctgttccgttccccaaagaagttcctcacttgaagaagcttggtgtgggtggtgtgattact

SEQ ID NO: 5026 - DNA, 71 bp, Glycine max
  Clone ID: LIB3028-013-Q1-B1-G10
caacaatttcagatttgccctaacaatgttgctaacaaggaaaaatgcaatataatcagagtaaagatcat

SEQ ID NO: 5027 - DNA, 158 bp, Glycine max
  Clone ID: LIB3028-013-Q1-B1-G5
acatccccccctcttgcttaatgcaaaaatgagcctatctttatgattattgtaataatctacgatgtgtttataattttggacttgagatgtgtcaagggagatttcgagtttacattaataactaacattttccgatctaaacgatattagttatt

SEQ ID NO: 5028 - DNA, 418 bp, Glycine max
  Clone ID: LIB3028-013-Q1-B1-H2
ctcgagccggatcctgcacgttcagggaggccaatgcggtaaccaaatcggttccaagttctgggaggtgatatgcgacgagcacggcatcgatcctaccggaaagtacaacgacgaaggcaacagcggcatccaactcgagaggatcaatgtctattacaatgaggcctctggcggaaggtacgttccgagagccgtgcttatggatctcgaacctggaaccatggacagcatcagatctggcccctacggcaagatcttccgccctgacaacttcgtcttcggccagtccggcgccggtaacaattgggccaaaggtcattacaccgaaggcgccgagctgatcgactccgttctcgatgtcgttcgcaaagaggctgaaaactgcgattgcctgcaaggttttcaagtttgccac

SEQ ID NO: 5029 - DNA, 412 bp, Glycine max
  unsure (1)..(412): unsure at all n locations
  Clone ID: LIB3028-013-Q1-B1-H3
ctttgttctttttgtttttttttttttaatttaaatgcacatgcagtctcttacttatatttatgtttacaaggtctaaacctcatagatgtaataattctggtgaaaattgcagataattagggaaatagcgaccttaaagctcctacggcatcccaacgttgttagattatatgaggtcttggctagcaaaacaaaaatttatatggtacttgagtacgtgaatggaggggagttatttgacataattgcatccaaaggtaaacacatcgaaggtgaaggtagaaagctgttccaacagttaattgatggggtgagctactgccacactaaaggtgtcttccacagggatctcaagcttgagaatgtactagtggataacaaagggaacatcanaataactgattttggt

SEQ ID NO: 5030 - DNA, 239 bp, Glycine max
  Clone ID: LIB3028-013-Q1-B1-H7
tttggtttcattcaaccaattttatttccaatacgtactgtgtattaattcagttcttttttattgatgtaaataagatttagcttctatttggccaaaggattttccacacctgagaatgaggatcatggtatggtatagttcgtgttactgttcccaccatttttgccgatgattgtattcaaagtgagatacattattgaataaattattgtttttttttttaaaagaaagaatgc

SEQ ID NO: 5031 - DNA, 85 bp, Glycine max
  Clone ID: LIB3028-014-Q1-B1-A12
aaatattgtaccattggtttggttgggctcaaaatgtcatttctagtcttcctccaaaaatgaagtttattttctagtctttaaa

SEQ ID NO: 5032 - DNA, 385 bp, Glycine max
  Clone ID: LIB3028-014-Q1-B1-B9
ctcttggcatcttgtgttgtgtccctcttttaagctaattccttctcttaacacaattggttgtgccaattgccatagtcaccaaccaattaacaaaggtatatatatcatcatatcatcaccaaatgaaaaatattgggttgttttttcttgtggtggtggctacttttgtggtggcagccacagctggtagcttttaccaagactttgaaataacgtggggtggtgagcgtgccaaaatctatgagaatggaaaccttctcacactctcccttgacagagcctctggctctggctttcgttccaaaaaagagtacttgttcggaaaaattgacatgcagctcaagcttgtgcctggtaactctgctggaacagtaactgccta

SEQ ID NO: 5033 - DNA, 325 bp, Glycine max
  Clone ID: LIB3028-014-Q1-B1-D12
acataaaagtttcttatggcatagaaaacatgtagtcctcctattcgtacacagtcaagtttaactcaacaaacaaagaaactcaaagatgagagtataggaaatacaaatacaatactagagtcattctgtacaaaggtttgggttcatcatgtaataagacaatacacatcaaaacacttcctcgcccgtctgagtattactttccaagttaataaaactattttgtataggtttccacattgggatatatacagcaaaataattgtataaatattatgtatcccatcttgtatattacgtatttacgccagcaatgtcattg

SEQ ID NO: 5034 - DNA, 280 bp, Glycine max
  Clone ID: LIB3028-014-Q1-B1-E2
cccccaactccaagctctgttcatcgtctaccgcgctttcttttcaaccagaactatgattaagctttttaaagtaaaggaaaagcagagagaacttgcagaaaatgcaagtggcggaccaactgttaagaatcaaagtgctggagagttgcatcgtcacaaagatataagtgagctgaatctacgagaatcatgtagcatgcgattccccaatggcaaagatgatctgatgagatttgacgttacaggtcgacgtgatgatggatatgacgtaggtggc

SEQ ID NO: 5035 - DNA, 339 bp, Glycine max
  Clone ID: LIB3028-014-Q1-B1-G1
ttagatttaacttttttcattaataaaaattaacaaataatatttgtgaataaaaaagtaaaagactatgcaaagcacgttgtaactgtacgtcatcgccaactttgaacaacagcaaacactcttgccccaactagcaagcacaatcaaatcaaaataattcccttacaaaactacccacatgcacaacattcctttagccaactactttgttgctgactaaattaattaatttaactcctaattaaaagacacctgtacacacccaaccactaatcacaaattaacatgaacatactttcatcacgcactctctacatatctatctacctttccatg

SEQ ID NO: 5036 - DNA, 255 bp, Glycine max
  Clone ID: LIB3028-015-Q1-B1-C12
ggcaaaagaagcatgtcaagattcttaccttggcagggcacattgcataaatgagaaaaagggctgtccttgagttttgttatgaattcaaatgtcacatctaccatttttatatttggatattttgatgtgatgtgcaagtttgagttctttatcaatttatgaggagtaaaacaggtgtagaaggcttctacttaaataactagtatatgatttggtttcttgcctaaaaaaaaaaaaaaaaaaaataataag

SEQ ID NO: 5037 - DNA, 235 bp, Glycine max
  Clone ID: LIB3028-015-Q1-B1-E8
gaaagttaataagggttcttgaaattattggtatgcaataattttgaactgcgtggtagtgtgggaattcattatatagcttttgttcgttgttatctagaagttttagtcatttgtaatatcatatgtcgtgaaaaatttgtatctggtatatatgtacgttatgggcgattttgttatttttatatatacattccttggttgcaatgtaaatttgaatatggtcatgtcaaac

SEQ ID NO: 5038 - DNA, 88 bp, Glycine max
  Clone ID: LIB3028-016-Q1-B1-B1
gcaatagtgtagtacctacccttttaagttgtaaggcacagatttgcattttccatgttttatatcattgcattagctttccacttca

SEQ ID NO: 5039 - DNA, 232 bp, Glycine max
  Clone ID: LIB3028-016-Q1-B1-D4
ctttctttccttacccacctacgtttccttcagatgcgaccaattccatcgtcagcaggaacacaccccttttgcctactgagctttacctctcactcgtcaactgtgtctctgagagggttcaagcctggtttttgctctctatgccattccaacaggatgggcaagtgggagggttgtggaaagttaggaagaatgaggccaagtcatatgagtgcttatgaattttctc

SEQ ID NO: 5040 - DNA, 245 bp, Glycine max
  Clone ID: LIB3028-016-Q1-B1-G10
gaaatccgctccaaaatagaaatttccggaaatcctccccagaaaaggaaattccacaaaacaaaaacgcaccgatcatgtggcatcgatcctactacggggagcaaacattagatggattgtttatatgatattgtacggttttttttgttttaacttttgcttctctttacattgtatttgtttgaagaaaaaaataagcagcttcaagaaatgggataagatacacaaacttccattttgca

SEQ ID NO: 5041 - DNA, 219 bp, Glycine max
  Clone ID: LIB3028-016-Q1-B1-H1
ggatgccccgggctacacgaagtcggcacgagcgatcctccgggcagcagttttcggtgtgctccttgtggttgccagcgcccacaggaccatcgtcacggtcgtggaagagggggagagggagggaggatgcaaacagcaaatccggagtgccgagaacttaaaagactgccactccttcctcggtgacgcatccgagcccaaagaatctcagcacta

SEQ ID NO: 5042 - DNA, 303 bp, Glycine max
  Clone ID: LIB3028-017-Q1-B1-A10
actggctacaagttcaagccagaggctcacaatccgtattttgtcatcgatgacgaagaggaagaggctgccgcagaggccttgaagcttgaagatgaatttgaattgtaatttctttcaaaatacaaaattagttgttgaacaagttggtaccatgctcagcaatgctctcaggtttcatctcaacagccagtagaaatttgcatgttacattttatgggtatagtcattattcataaatcattgtgctatattttgtgttctggactcatgccagtttttgcattagtgttataatatcct

SEQ ID NO: 5043 - DNA, 245 bp, Glycine max
  Clone ID: LIB3028-017-Q1-B1-B3
ggagcaggatatggaagaaaaattgcattaagttgctggggttgagattctgtcttcgtgactagttagagatgaaaaaaactggtcacacttctctttccaaacacaatcagagccttttcgatcttcctactcccaagagcatttcttcatgtggcaagtaatattcttttttttttttgtggttatatatttaacaattgtaagattttattgagaaagaaaagatttattatacttttaaa

SEQ ID NO: 5044 - DNA, 376 bp, Glycine max
  Clone ID: LIB3028-017-Q1-B1-B5
tcggggaattccaattccacattttcaagaaataaggaggcaaaaatgttcatatatgaattggaattatttgttttcttattaggcctatcctgaagccaaaggaaatgagatcggaattcctcggggaattccaattccacattttcaagaaataaggaggcaaaaatgttcatatatgaattggaattatttgttttcttattaggcctatcctgaagccaaaggaaatgagatcggaattcctcggggaattccaattccacattttcaagaaataaggaggcaaaaatgttcatatatgaattggaattatttgttttcttattaggcctatcctgaagccaaagggaatgagattgggaattcttcgggg

SEQ ID NO: 5045 - DNA, 350 bp, Glycine max
  Clone ID: LIB3028-017-Q1-B1-F4
cacgtttgaagtccagcatgaagagcaagaacgggttgccactcaaagtgaatttggaaaccaaagtgaaggccaagatgggaaatttgaaaaccccaaaagtgggaatcagagtctcctgcgacggaatcagagtcactcttccctccggcaagaaaccggcaacggcgtccacttccaacgctaagtgcgacgtcgatgttcggttcaagatctggaagtggaccatttgatccacgtaataatgtacaccatacaacacagaggtgtgtaatgtgttaattgcttgtttgttttcgttttcctgcctttcctttcagcttcttttactttggtataattttcgagaa

SEQ ID NO: 5046 - DNA, 273 bp, Glycine max
  Clone ID: LIB3028-018-Q1-B1-C7
gcctttttgaacatacaaggatgtatttaatcaatcaagttggttggttggttttgagcaaattgtaacatgagtttctcatttgttgctagatatagatgttttctggaatgggaggtgcgccttgtaaaatcgagacaacgcacgcggtgtattgatcattttatgatatacataatggtgggatagctttctttgaacatttcccaactcttttaagtaattggaacacttttacacatgttcatatatatcatgtattcagtattcaaa

SEQ ID NO: 5047 - DNA, 205 bp, Glycine max
  Clone ID: LIB3028-018-Q1-B1-D2
ggacaagtgaagaatgagcaaaccttgtgaatggtttttctaattacctctggcttaagtagctctagtatacaaacaaaatatagccttttttaggtcctaatttatataacacagtgcccagtgtacaattacacagttgctccactgcctttatattgaattatgcatcatcagtaatatactttggacttctcgttgaaaa

SEQ ID NO: 5048 - DNA, 337 bp, Glycine max
  Clone ID: LIB3028-018-Q1-B1-D3
ctgaacaagggtttctctttctctttctctgtctgcttcttcactttctctcgtttcaatcgaaaaaaatcatgggcagaaaattcttcgtcggtggcaactggaaatgcaatgggaccactgaggaggtgaagaagattgttactactttaaatgaagctaaagtccctggagaagatgttgtagaagttgttgtgagccctccttttgtgttccttccttttgtaaaaagtttgctgcgccctgatttccatgtctcggcccaaaattgttgggttcgcaaaggtggtgcttatactggagaggttagtgctgaaatgcttgttaattttggaat

SEQ ID NO: 5049 - DNA, 151 bp, Glycine max
  Clone ID: LIB3028-018-Q1-B1-E1
acattttgttgccttttctacccttctcaataataaatatttatctatgctttcgcgaatcagcttgtagtttgtggatgaagctcagctgctttctgtttcttgcttcctttcttttgttttaaaaaagaattcgctttctgtttggcaa

SEQ ID NO: 5050 - DNA, 370 bp, Glycine max
  Clone ID: LIB3028-018-Q1-B1-E9
ctcaaaggagggtcacaataaggtggccttctttagctacttctacctagcttttaacattggccaactcttctcgaacaccattctggtctattttgaggacgaaggaatgtgggctcttggtttctggctgtctgcaggctccgcctttgctgcattggtcttgtttcttgtatgcaccccaaggtatagacacttcaagcctagtggcaaccctctctccaggttcagccaagtccttgtggctgcatcaaggaaatccaaagttcaaatgtcatcaaacggagaggacttattcaacatggatgcaaaggaggcttccaacaatgccaatagaaagattctccacactcacgggttcaagttcttg

SEQ ID NO: 5051 - DNA, 342 bp, Glycine max
  Clone ID: LIB3028-018-Q1-B1-H2
ctcgtggagtgatccggtggacgcaataactgcaggcagctctgacttcagtgcaagcaagcatcaaaacattgctttaaaagcatcaattcagcgtttctgcaagttccaattttccaactatccacagaaacggtcgtttgaaaaaaagctgttaattcgggagcgatatggaggtcgaactcaaagagctgcacgccgatcttcaatctctgagccaatcgcttcccgatccatctcaccatgatttgctccgcaagattcaattgcgtgttggggaacttgcgaagattgcaaaggcagcacctgttcgacgctctaaagttgaggatatgagtgctg

SEQ ID NO: 5052 - DNA, 398 bp, Glycine max
  Clone ID: LIB3028-019-Q1-B1-A4
cggctcgagggaaaagaaaaaccagctttcttcaagcacctagatttcctctctctctaaatggcgttctcttcttttctcggcagagtcctcttcgcctccgttttcatcctctccgcttaccaagaatttaattcttatggagttgatgggggacccgcagcaaaagcactcagaccgaagtttgatgcctttgcacatcaagtacattctaaagttggctttcaacttccagatattgatatgaaatttttagtggctggggctattgctctcaagggccttggagggattcttttcatactcagcagctcttttggagctttccttttgcttttgcatcaagtgatcactactccaatactgtatgatttctacaattatcacagtgaggacaa

SEQ ID NO: 5053 - DNA, 244 bp, Glycine max
  Clone ID: LIB3028-019-Q1-B1-A6
tcaacaaagaactatgctttggatgagattgtggaagtggaatgagtctaaattatttgtaattttgaatctggacatgctatcgcagttactagcctaaggtttttttaagtcaaaaacatgaaagaatttgtatcatattctctctgttatctacccccttgacttcgattttctatgaactacattctgtgtccagttgctcatatctttaccccgcttcttatttaatcagtaaaaacag

SEQ ID NO: 5054 - DNA, 164 bp, Glycine max
  Clone ID: LIB3028-019-Q1-B1-C3
gtcaactgctaacaagagaactgttgggctgaagtaagaagagttctttaagttctttctagtcatgagagatcatgtgatgtgatactctagtgttatctatacctgatcatctaattgcaaaagtgagtaataatacgtgtaaaattttcgtaaagatgaag

SEQ ID NO: 5055 - DNA, 105 bp, Glycine max
  Clone ID: LIB3028-019-Q1-B1-D3
cacaacgcaactaccaacgttgtccccttctacgttcccttcctagtcggcacatgacgatgccttctacagatgcttcctctcagcacaaaggcgtccacgggg

SEQ ID NO: 5056 - DNA, 174 bp, Glycine max
  Clone ID: LIB3028-019-Q1-B1-D4
tgaaggcttaattgaaattacacacacacctatccatgcatcatcaattgagtactgttagagagtgtgatgatgagggtcatagtccgtagacaatttgttactccttgtacttatccttggaggtctaccggaaatatttttaatgaagatttttaacattgctttgagtca

SEQ ID NO: 5057 - DNA, 362 bp, Glycine max
  Clone ID: LIB3028-019-Q1-B1-E12
ggaaagtatagtcaaagcttgtgcttgttttggtcaaaaaaaaaaaaaaaaaaaaaaaaaaaaaaaaaaaaaaaaaaaaaaaaaaaaaaaaaaaaaaaaaaaaaaaaaaaaaaaacaaaaaaaaaaaaaaaaaaaaaaaaaaaaaaaaaaaaaaaaaaagggggggccccccataaataaccccgccaacccggaaattaattccggcccggtacttgcaggggtacaagttttcccaaaaggaatcctaataaaaccttggggcaaacagggcaaaaccggttccctgtggaaaattgttacccgcacaaatttcaacacaacataagacccggaaccaaaaattttaaaccctgggggcc

SEQ ID NO: 5058 - DNA, 385 bp, Glycine max
  Clone ID: LIB3028-019-Q1-B1-F11
tcggggaattccaattccacattttcaagaaataaggaggcaaaaatgttcatatatgaattggaattatttgttttcttattaggcctatcctgaagccaaaggaaatgagatcggaattcctcggggaattccaattccacattttcaagaaataaggaggcaaaaatgttcatatatgaattggaattatttgttttcttattaggcctatcctgaagccaaaggaaatgagatcggaattcctcggggaattccaattccacattttcaagaaataaggaggcaaaaatgttcatatatgaattggaattatttgttttcttattaggcctatcctgaagccaaaggaaatgagatcggaattcctcgggggtaccgagct

SEQ ID NO: 5059 - DNA, 102 bp, Glycine max
  Clone ID: LIB3028-019-Q1-B1-F3
atttataatgtaaaagaaagagagatataaaaaaaaaaatgagagatgtttgtgaaatgttttcaatgaaaagtgatttatggattattactctttagtaaa

SEQ ID NO: 5060 - DNA, 395 bp, Glycine max
  Clone ID: LIB3028-019-Q1-B1-H3
caagatatgagttggacggtttgggatagatggattctcggagacaatcctaccctcagggaacttctagagtggctgaaggcaaagggcttgaatgcttacagtatttcttgtgggagttgcctgctctataatagcatgttccctcggcataaagatcgaatggacaaaaaggttgcagatctggcaagggaagtagccaagtttgaaattcttgcgtaccgtcgccatttggacgttgttgtggcatgcgaggatgatgaggataatgacatcgacatccctcagatatccatttatttccgttagtaggttgctttcatcttgatagaggtgtgtttgagacttaggtgaaaaacgacagcatgtttgactctcatgcttcatattcataa

SEQ ID NO: 5061 - DNA, 57 bp, Glycine max
  Clone ID: LIB3028-019-Q1-B1-H7
cacgcgtacgtaaactcggaattcggctctaggactgctgcgaggtctactcgcctt

SEQ ID NO: 5062 - DNA, 323 bp, Glycine max
  Clone ID: LIB3028-020-Q1-B1-B4
cttccatggctatgctgcagcaccaacaattgcagcacttttctgctttctatacttcttccacaggagactatgttgcagacacccccttttgacagactaccccatcctcggcatgctgccacaattactcttcaacctgtggcgtgcccatgattttttcactgagatattgaaacggcatggaccaacaggtgagttcactggaccttggtttaccagcatggactatttggtcacttgtgaccccatcaacgtccaccacatgctgagcaagaatttccacaactacgtcaagggacccgagtttcgtcacatttttc

SEQ ID NO: 5063 - DNA, 309 bp, Glycine max
  Clone ID: LIB3028-020-Q1-B1-B8
aaatggttaaagatgaatgcaacttgtcctctttgcaagtataatattctcaagggaaatgaacaggtgtgacaatactaaaggcgatcaaagatatattatatcaagctgagttttattatataacagctcagggttttcaaccgctgatgcgtatatgtagataatatcaagacatgacaaaatagaacgtctcccaatttgctcggtttagctgtcattgttttgttgcttaattgcttcagtacagaaaaaggtagatgtaagaacgaaaggtgccgtatagagatcttttacataagtcgactg

SEQ ID NO: 5064 - DNA, 277 bp, Glycine max
  Clone ID: LIB3028-020-Q1-B1-F6
ggatagccatggctgttggaattgtgaaattttagctagagaagcaagtctctaaaggggtccattgtggtcctcatggaacaggcttatgttaaatcatacatttcacgatcagcatgtctactttgtacattttgcgtgtagtttttcttttcttcttcttagaatagtagtagctagtcttcgcatttataaattctcgttgaaaaatgaaaaatagagtttatttatcccaaataatatatacaaatgtacatttaagaaagataaagaaagt

SEQ ID NO: 5065 - DNA, 370 bp, Glycine max
  Clone ID: LIB3028-021-Q1-B1-A3
caagatggacttactggagttatgggcaattttcggccccggcgtctccagcgccgtcttcggcgccggatggtggatctggcttgacgccgtcgtctgcaataccgtcaacgttcccttccttcaataccttcccggaattttcgcatctcttgcgggtttgatgttcaactgcgttagaaaagaagacatcgattattctccctacgacgaaagcgagtggggactgaaactgtggctcttcattgcaaatgttgtatcctttggttcataacctggattagcaggcctgctgattcaagattcacttggataaatccgccccttcagtttggactggagttgcaagtgttttgcactgtgtttttgt

SEQ ID NO: 5066 - DNA, 389 bp, Glycine max
  Clone ID: LIB3028-021-Q1-B1-A4
cacttgcgtgctgtctccacagacgatgccaaggcatttgccgagagagaaaatacgtttttcatggaaacatctgctcttgagtccttgaatgtcgataatgccttcaccgaagtgctcactcagatataccgcgttgttagtaggaagactcttgagattggggatgaccctgcagccttgcccaaggggcagaccatcaatgttggcagtagggatgatgtctcagctgttaaaaagtctggatgctgctctgcttagtttcacaagccttttgcagcagaatagaataatatctacatgtgcatgattcaaccaattctcaacattttggagtccaagtgaaatcttttaaaaactacactttcctttttaggtagtttttccca

SEQ ID NO: 5067 - DNA, 222 bp, Glycine max
  Clone ID: LIB3028-021-Q1-B1-B10
aattatggatgagaaatattggtattgatattttcccaaatttaggaccttgatacttagaacccatagtcttgcgatcaagaattttcatttttgttgtttcatgccatcagcttataatcctggagtttgagccccccccttttggttgaaataattaagactcgtttggattgctcatgcgtggttgaaatttgattgtctagtgaaagttttgttaaa

SEQ ID NO: 5068 - DNA, 286 bp, Glycine max
  Clone ID: LIB3028-021-Q1-B1-B8
ggtgcatactacagctactgcaaggacattagaatttctctaaacaaaggcatacactactttgtagtatttgtaagtacttctgtaagtgatcattgagccttgaggcttgccctgaccctggtgagcccttgggacccaatcacataaacttttcattatcaaaaaaaaaaaaatgatggatggtctgattgttctacacataacacattgatagttttcatcaaaaaaaaaaaaaaaaaaaaaaaaaaaaaaaaaaaaaaaaaaaaatacaaaaaaaaataaa

SEQ ID NO: 5069 - DNA, 107 bp, Glycine max
  Clone ID: LIB3028-021-Q1-B1-C6
atggggggccaaggattcttctatttgtagggtagtggcactttcaaagaaggccaaggattctattcgtagggtagtggcactttcaaagagtttctttctctttt

SEQ ID NO: 5070 - DNA, 85 bp, Glycine max
  Clone ID: LIB3028-021-Q1-B1-E8
ttcaatgccagtgtatccatcaatatatttatgcttattacatcccaaagaaataaatattttatatgatttgagtgctagcaaa

SEQ ID NO: 5071 - DNA, 346 bp, Glycine max
  Clone ID: LIB3028-021-Q1-B1-F1
atcataaaattgccatccaaaagctcaataatactgaataattataattataatatgtattatacaagcgaaatagatgacatgctccctacagtagaagcctcaatatctccacaaattatcgtgttcaaggtttaaatagttttaaaataaccattaaaagtcaaacaaatggggaaggatgtacagtaaccacaagttatatgctgcaccaagaataagtgagaaatctggatgcaagtggattctcatgaaaatgccatatatatatctcataataaatccgtgttccattaatgtcaaactgcgatgggagaccttgtcctggtttaaaaaaaaagaaaaa

SEQ ID NO: 5072 - DNA, 247 bp, Glycine max
  Clone ID: LIB3028-021-Q1-B1-F4
caaagatctttcgttcagcttcatgttctacaatgaaaagcctctgccttgggccgtttcttgctgctaatgccccagttggtataagagccgatggaggccacttaagcagaaagtgctttcaaaagcaacttcacttccactcacgttgtgtctgcattctcttcatgcatatgttctgcaactatatcagtgatgccagaactagaagagaagcaagtgtctgatggagagaaagctaatttgc

SEQ ID NO: 5073 - DNA, 162 bp, Glycine max
  unsure (1)..(162): unsure at all n locations
  Clone ID: LIB3028-022-Q1-B1-B4
cccacctggtttttatcacgacattccttaaaatcattgcaatttaatttgtggcatatcatatatcgaaggcctcaaagaatagacagcacagaaatatcagcaaaacccgtttcttttgacaacacagtctaanaaaagacagcacaccaaagatataat

SEQ ID NO: 5074 - DNA, 53 bp, Glycine max
  Clone ID: LIB3028-022-Q1-B1-C8
acgcgtacgtaaactcggaattcggctcgcgtcttcaaccccttttctttctc

SEQ ID NO: 5075 - DNA, 67 bp, Glycine max
  Clone ID: LIB3028-022-Q1-B1-D9
ctttcgggacacccaaataagtgaactttttttgtgcaaaaaaaaaaaataaaaaaaaaaacaaaaa

SEQ ID NO: 5076 - DNA, 52 bp, Glycine max
  Clone ID: LIB3028-022-Q1-B1-E8
aatgaatgtgttcctcaaatgtcgtctttgcagaatggcaagctctggagtg

SEQ ID NO: 5077 - DNA, 375 bp, Glycine max
  Clone ID: LIB3028-022-Q1-B1-F12
cgtgcctctagggttatcatatctccatttccatttcctctctctcagtttccaagaatcttaagctatgggaaagtcttacccaaccgtgagcgctgattaccagaaggccgttgagaaggcgaagaagaagctcagaggcttcatcgctgagaagagatgcgctcctctaatgctccgtttggcatggcactctgctggaacttacgacgtgagctcgaagaccggtggtcccttcggaaccataaagcacccctccgaactcgctcacggcgctaacaacggtcttgacatcgctgttaggcttttggagccactcaaagcggagtttcctaatttgagctacgccgatttctaccaatttgctggcgttgt

SEQ ID NO: 5078 - DNA, 141 bp, Glycine max
  Clone ID: LIB3028-022-Q1-B1-F4
ctttgcacttgtctccgaattagttatctgggagaagcattattcccattcgcgagagattagggctagcatgaaggttacaggcgggggtgtgatcatcggcatggccgtggtgggtgcaccgatgatggcgcaagccat

SEQ ID NO: 5079 - DNA, 115 bp, Glycine max
  Clone ID: LIB3028-023-Q1-B1-A8
gcagatacacgagttagacaaccggtggatattagacatttaatgctttcagaacttcattttgtaattattgttatattgtggaatatatcacttcatagattttttttcaaaa

SEQ ID NO: 5080 - DNA, 133 bp, Glycine max
  Clone ID: LIB3028-023-Q1-B1-B11
taagtctaaaagacttattgctgaagatgattcctcattagccaagtaaaatggtattctggtagtaaaccagtaaaaaaaatttcaaacaaaatagtgtaattttactttataaaagaggaaagtctcactt

SEQ ID NO: 5081 - DNA, 363 bp, Glycine max
  Clone ID: LIB3028-023-Q1-B1-D1
ctcgcgttcaaagccggcacctccatctacacgcgcttcatcggcctctgcggcggcgaaaacggcgtcgttcccgaaacagttctcgcccttactccccaacagcttcggcagattggggtttcggggcggaaggccagttaccttcacgatttggccaggaagtaccagaacgggatactctccgattccgccattgtgaacatggatgacaagtcgctcttcaccatgcttaccatggtcaatggcattggctcttggtctgttcacatgttcatgattttctcactccacagacccgatgttctccccatcaatgaccttggggtcacgaaaggggttcagcgtctctacaacctcgag

SEQ ID NO: 5082 - DNA, 339 bp, Glycine max
  Clone ID: LIB3028-023-Q1-B1-F4
cttgctcaccatacaatcaacggttgcaaccttaggccaggcgatctccttggaactgggacagttagtggtcctgagccagagtcccgtgcatgcttgctagaattaacatggaatggacaaaacacagtgtcagtgaatgagttaaatcggaaatttcttgaagatggagacgaagtcatcttaactggatattgcgcaggaaatggttactctgttgggtttggtacttgctcaggcaagattgtacccgcagctccatgaggctagtatcattccatagtcttttccacttgtggtgggaggagttgtatcaagagcctgcttgtttaatttacg

SEQ ID NO: 5083 - DNA, 158 bp, Glycine max
  Clone ID: LIB3028-023-Q1-B1-F6
cgagtagttaaagaatacaacatcagaaatccttttgattgcagaataatttactttgactagagaagggtaaacttcgtgtataaattgcatgaaaatggttgtacatggagcttgggcgcatgcaattcaaagaggcataaaaaatggattatcaa

SEQ ID NO: 5084 - DNA, 148 bp, Glycine max
  Clone ID: LIB3028-023-Q1-B1-H1
ctcagctgtcagaatccattcaggagtcatgaaagaaaccgctaactgaacaaccaaggtaagaaaaaaaggtgttaatttgagcaatcgtcctcgtgccagtttcagatctcgctgagaaatcattgtataataatgggggtgtcaa

SEQ ID NO: 5085 - DNA, 147 bp, Glycine max
  Clone ID: LIB3028-023-Q1-B1-H11
ctgctcccttttgcagttcccttgtgtttaactccattttcactaatgtaactacacctgtgtagcataaaaatctgtatgagaaccattatatttttatatattagaaatttgggtccccagaaaaaaaaaagaaaaatataaatg

SEQ ID NO: 5086 - DNA, 361 bp, Glycine max
  Clone ID: LIB3028-023-Q1-B1-H4
caagaagcaatcttctgtctggaaacttcaagcacaaccaaaagaggctgttaccgttgaaaattctgcacctgtacaggtcaatggtcctaaaattgctccaccagaagagaaggatgaccataatggaaaaccctctggtcctagcacttctgctgatgcatcttcaatttctgcatttatgaaccaagtttcagatcttgttaaacttgtggactctaaagatattatggagctgcaactcaagcaagcaaactgtgaactcgtgataagaaagaatgaagctttgctgcctccaccagctacatttgtagctccagtgtcacaaccatttccatatcccacaaattctcttccagca

SEQ ID NO: 5087 - DNA, 244 bp, Glycine max
  Clone ID: LIB3028-024-Q1-B1-B6
gttgtttactcactccagttgagttcaatgtcctctcaccgttttgagcacttaaaaggggagtgctttgtaaggtcgatgttactatagctgtcactttttttctctacagttccataatgcaacaacggggagagccgttcatcttctatgcttctaaacgcatttttccttgtacttcactctcaatcccttcagagttcaaactttcaagttatgaatataagaaaaacacgttatttta

SEQ ID NO: 5088 - DNA, 179 bp, Glycine max
  Clone ID: LIB3028-024-Q1-B1-C11
tttaatcttacatgtttcaagagacaatgtaagattaaattactcctcgttgtatatgtcgcacatgagcaatgaataaggcctcaaaatcaataagtcctatatattgctccaaaattcgatatgaactacaaagtactaatccttaaacctgagattttagtcttgcatagagtaaa

SEQ ID NO: 5089 - DNA, 313 bp, Glycine max
  Clone ID: LIB3028-025-Q1-B1-A11
caaagattttccttcacctggacttggctcaagatattgagttgggtttgcttgatcatttctattatctcacttgtgggttccatccaaggcctttcggttagtatcaagaaatacaagcccttccaagcagaacaatagaactttcatacttagtattccaacttgagccaagagtttctattgagggcgacaaaatttgtattactatgttttgaaatagttgttatattttcaattctcgaaatcgagacaacttgttatactaaagtaatataataaaatgtttactttgctaaaaaagtcaaattta

SEQ ID NO: 5090 - DNA, 341 bp, Glycine max
  Clone ID: LIB3028-025-Q1-B1-B11
aaaatggtatagtggtgtggaccctagtggcatcttggaccagtcatgtagcagttctcaatggctagatttctggacttgaaaaaaacaagcgagccacactttgtgctgcatctgcatgtgtgatgttttgtttcctccgagagaaggaacaaaagattggttgattggttggctcttgtgctgccagcaggtccaaaacattccagcctagccaagaaactcgaaggaagttttgtaggcttgatttgataggcgagagaattaagatagcctcactcaattcaattgtgtagagatttggcaaaaaacaaataatgtgcaatgtctctgtctgttca

SEQ ID NO: 5091 - DNA, 196 bp, Glycine max
  Clone ID: LIB3028-025-Q1-B1-E11
gcagatttacactagagcgacaaacacctagatgtactggttataatttatgtagtattgatgcaccgctgaagtgaaattttgtttttttctgtttgagacatacctcatgctagattgcatcagtttgacggttgctaaattcatgggttatttccttttgcatccttggtaatatatttgacacaaggctttc

SEQ ID NO: 5092 - DNA, 241 bp, Glycine max
  Clone ID: LIB3028-025-Q1-B1-F8
ctcgagccgaatcggctcgagatcatgttatccgtagcttcaactttctgtaacttcttgtataggcaaaggtttcaaaccttcaatctagccttctcttgcgtttgccaaaatgttatggtgaatagggaaggaaaaagatggaaaaaaatgtgactgtttcatgtactgatattgtaaaagctgctaaaagtattcaaattacaaaatgtaaaaaaaatgtaaaatgacttctctgttg

SEQ ID NO: 5093 - DNA, 233 bp, Glycine max
  Clone ID: LIB3028-025-Q1-B1-G10
cttgtggtgaaccttgcaaggtacaaggctgcaatatttcaagtcaagtttgcaataatcataagtgacttgtctattctacaccaacttcttttttcccttgtatttctcaaatcttttcatagttatctctggttgtagtattgagttacagcataatattcttactggcctcagtagatctgcgcgacaatatccagtttttaatattacaagcaaaatcttgtctataa

SEQ ID NO: 5094 - DNA, 224 bp, Glycine max
  Clone ID: LIB3028-025-Q1-B1-H10
tggaattttggtgatctctttttatttgatatgaatttgtcttgcaatgcttttgacaatgaagttgattgctaaattattgaatcagtgttttgcagaatatctgtaatcatttcaagattgtagttctaaggattcatgtttcttcaaaatctttaatgttgctgtttaatttttgttggctacttcctttactgtctccaatgtctcattaatcattttaa

SEQ ID NO: 5095 - DNA, 324 bp, Glycine max
  Clone ID: LIB3028-026-Q1-B1-B6
ctggatctgtagcgggtttgaagagggtaaaatctttttgtgaaagacatgcaagaaagtggtcaatgactacagaataaaatccacaaattaaggcggctactattttgtattgaatacctagcttctcaaatatccaatttttacaaaattggatcgttttacgaataattgggttctcaaatatccatttttttgtgccagctctagtttatcactagcttttaaggaaggattctccaagtatctaggtgtttatcaattggtatttgtgtttattgttgtatctaaaaaattatatattttaaataattttgtgacgct

SEQ ID NO: 5096 - DNA, 239 bp, Glycine max
  Clone ID: LIB3028-026-Q1-B1-D1
acggctgtgattgtgtaattttacatctttacatacaaaatttaaagtctttgtattttgtatgtaaagatgtaaaattatgattattaggtggtgcatgtgtcgcgtcatgggccaatgttatcctctgcttttaagttggaagaggcccaactcatgtgtgatgtacggctgtgattgtgtaatttaatttgcaaaatcaaaaataacaccagagtcatatatatgcatctcttaaa

SEQ ID NO: 5097 - DNA, 273 bp, Glycine max
  Clone ID: LIB3028-026-Q1-B1-E1
gtttaccttcacttcagatgttcggcacaaaatgctcactgttctatctagcaaatattaggtagatggtgttattagttcatgtatatgcaaagataatagggtaagcttgccggcatttaggagggtactttgtatcaatcaatgattatataacatttactacaggtgactatactttgaacttatcttaatttattgatgttattatgaaaattatataagcaactagatgtagttgactagtaaaaaaaaaaaagaaaaaaaaacaaa

SEQ ID NO: 5098 - DNA, 69 bp, Glycine max
  Clone ID: LIB3028-027-Q1-B1-H9
caacgaccaaaaaaaatgaggggggaaacaaaaataaaggttatgtaattaatggttataaatgctaaa

SEQ ID NO: 5099 - DNA, 69 bp, Glycine max; identical to SEQ ID NO: 5098
  Clone ID: LIB3028-027-Q1-B2-H9

SEQ ID NO: 5100 - DNA, 353 bp, Glycine max
  unsure (1)..(353): unsure at all n locations
  Clone ID: LIB3028-028-Q1-B1-E7
gtaaaaactagtgaaacttctgagtttgatagtgaattattagatgactttgcctccaatggcagtgtgaatggctcattcaacagcttggatagattgcccctgctacccgagtaataactacgttcacttaattgtatactcataatggagattagatataaacacgtgtcgcaagggtgatgtgaaattgtacaagtcatgtaatttttaaacatatagaaaaacattttttaatgctttttgaagcgttaagcaataagatgtacaacataccaaattatgatgtcactaatataatgtgttattatttcatgtacaaaataatagtgttaagttgacttgatcaaaan

SEQ ID NO: 5101 - DNA, 233 bp, Glycine max
  Clone ID: LIB3028-028-Q1-B1-H3
tcttccggctcctcgctcaattaacccctgcgctccgtccttccgcttccgggaaccgtatcaactcaatcaaaaggggttataacggtaaccacaaaatcaagggataacgcacggaagaacatgtgtgcaaaaagcgcaaaaaaagcgaagaaccctgtaaaggccccgtttctggggttttttcacatgcgctccgcccctgagaagcatcacacaaatctacactcaca

SEQ ID NO: 5102 - DNA, 338 bp, Glycine max
  Clone ID: LIB3028-029-Q1-B1-E5
ttagaatatcgtgggcagtgttctgtgaaccccccaaggagaagatcatcctgcagccacttcccgagcttgtcactgagacagagccagcacgctttccacctcgcacttttgctcagcatattcaccacaaactattcagaaaggatcaggaaggtctcccaaattgatcactgcaggcatcacatttgtatttgtttgcttgtcttatgaattacttcttagttcttatgggttgtactaataaactaggccttgcatgtcggtgtggcctcatcaatcatcatgctaagtttgttttatcctttattaaatactattgatattaatcgtgtttg

SEQ ID NO: 5103 - DNA, 161 bp, Glycine max
  Clone ID: LIB3028-029-Q1-B1-G10
tgggaagtaggtctgtttcatatagtatttcatgtgctttgtgcatgtcagctattatatttggtgtgttgttactggtatctaagctacaataacttgtggcctatttttcacatgagatacatttcatgggtgctataatttagaatttggacctgtca

SEQ ID NO: 5104 - DNA, 128 bp, Glycine max
  Clone ID: LIB3028-029-Q1-B1-G11
ctcagttgaaaggggaaaaagaagtacatcgttaacatttttgggtttcctcaaaatatacttgagtttatcattggattgaatctatattaaagtctgatagcaatgtttaaaaaactggatcttaa

SEQ ID NO: 5105 - DNA, 377 bp, Glycine max
  Clone ID: LIB3028-030-Q1-B1-D3
cgctcaccttttcttctctctcttctttctctcctctgctgctttctcatggaactactgttctggtgggtctccaacgatgtaaacagccttgtcactcttctgggtcaaaacttccttgtttttctgccttttgttgctgctcattagcttcaccattctatatggttttcactttcatgttaatttttctatttctcatttctgcatcctcttggatttgtctatttgtgtggtgactgtatttcattttttgtgattattttctacccttttgccttgtttgatggatttggtgaagtctatctatttatcacttctgttttactttccgtgttcgtttgtgcatagactgacacatttgatagtcaagacac

SEQ ID NO: 5106 - DNA, 278 bp, Glycine max
  Clone ID: LIB3028-030-Q1-B1-D8
tgctgacaaatattgggatctgtattctaacgagtcacttgagcatgaccttcccggtcaccttctccgctaccccatcggggttgccagtgaaggagatgtcaccgagctgccaggatttgaattctttcccgacaccaaggctcgcattcttggtggcaaagctgactacctcccccctattctcactacttaatttgattttgtactttgttacaaacttgttattgcttacatcctaatctgtgttttcattactacttagtaataaagaagct

SEQ ID NO: 5107 - DNA, 334 bp, Glycine max
  unsure (1)..(334): unsure at all n locations
  Clone ID: LIB3028-030-Q1-B1-E11
gctagacagagtttgtattactggatggagaatgaagcaaaatcccgaataagccgcagttcaggctagtcatcctagttttcgtattgtattaaacatgtaatgaaaggttcaggagttactcaatgtgctgtcagtatgattttttgtgtgaaaatctgtttttaatatttttgttccaaaaggccagcttgttattggaacctgaagttgagtgttctcttgtaaactttgtattttgttcttatatctctttttatataaaacatcatttattgtaatgataatatttattgagtgatgattcanaanaaaaaaaaaaaaacaaaanana

SEQ ID NO: 5108 - DNA, 297 bp, Glycine max
  Clone ID: LIB3028-030-Q1-B1-F2
gctgagcttaaggtgaaggaactcaagaacggacgattggccatgttctctatgtttggcttctttgttcaggccattgtcaccggaaagggtccattggagaacctcgccgatcaccttgctgaccctgtcaacaacaacgcctgggcctatgccaccaacttcgtccccggaaagtgagcgtcaaagaacgaaatgacttttgagagtttttagatttgtgtttggtgaagtacttcagataatgtgaattatcttgtgtatccgaatccaacttaatgttacttgctttttaca

SEQ ID NO: 5109 - DNA, 325 bp, Glycine max
  Clone ID: LIB3028-030-Q1-B1-G12
caacagcctccatggaggcttgaacaagctcgctgagttgttggaggtcgagagggttgggattagccatcaggccggctccgatagcttgctcacttcctgtacattcaggaaattgaaggataatttctttagtggctccttggagaagtatgcaggtgtcttgtatgggttaggtgttgagaatggacaaggttctcattgaggacaaaagaagatgataaaacttgttagatctctctttgtttgagctgcttctgtatatctgttgaaataccaatttctattaatgtaaacctttggcattaagtgtctttattaaaaa

SEQ ID NO: 5110 - DNA, 261 bp, Glycine max
  Clone ID: LIB3028-032-Q1-B1-D10
agctggagaaggagggatacagaatcattggaaacgttggagaccaatggagtgacctcctgggaagcaacaaagggactaggacttttaagctgcctaatcccttgtactatgattaagctctcaaatcaagcctctaagttgctccttaatttctatgaaataagatcctgagtattattacttagtcatgtaggggcactgaacaatgttgttttcccttttcgaggctttcatgaattatgagctcttgttccatta

SEQ ID NO: 5111 - DNA, 408 bp, Glycine max
  Clone ID: LIB3028-032-Q1-B1-G5
ctctagaggatcccctcggggaattccaattccacattttcaagaaataaggaggcaaaaatgttcatatatgaattggaattatttgttttcttattaggcctatcctgaagccaaaggaaatgagatcggaattcctcggggaattccaattccacattttcaagaaataaggaggcaaaaatgttcatatatgaattggaattatttgttttcttattaggcctatcctgaagccaaaggaaatgagatcggaattcctcggggaattccaattccacattttcaagaaataaggaggcaaaaatgttcatatatgaattggaattatttgttttcttattaggcctatcctgaagccaaaggaaatgagatcggaattcctcgggggtaccgagctcgaattcc

SEQ ID NO: 5112 - DNA, 73 bp, Glycine max
  Clone ID: LIB3028-032-Q1-B1-H11
gacgtcggatgcacgcgtacgtatagctcgagattagttcggggtcgacgatcagaatattcggtagcagatt

SEQ ID NO: 5113 - DNA, 71 bp, Glycine max
  Clone ID: LIB3028-033-Q1-B1-B4
gtaaactcggaattcagctcgaggattggttctggaggttgacacgtcccgtgtatcttccacactcagtt

SEQ ID NO: 5114 - DNA, 69 bp, Glycine max
  Clone ID: LIB3028-033-Q1-B1-F8
gcacgcgtacgtaagctcggttcagccacagttgggagaaaaaaaaaggttgtgcgagatggcacgtac

SEQ ID NO: 5115 - DNA, 221 bp, Glycine max
  Clone ID: LIB3028-034-Q1-B1-A1
tatgcatctgtccaagctgcaaagttcatagctcaatagtccttttaattttttgttctctcaagtgaaatttcaatcctttttattgtctttttttgcatgcatgaacaacacaagaggaaggggttgtagctagtcaaatggagggtctaaatattatatcatcacatcactgtcagcaagtttaatttaaactttcaaatcattacattttagcaaaa

SEQ ID NO: 5116 - DNA, 232 bp, Glycine max
  Clone ID: LIB3028-034-Q1-B1-H5
tgcggcggcttccgcgctcactgactcacagtacttggtcattccgcagtggccacctgtaacacggcactcatgtgctgtcagatggttaactacagcagcaagggatcagggaggagcggttatcttagtaaaacgccaggataaggttacgaatcagtaagtaagacgggtatgcaggtgtttgtccatcagctccggccccctgaagagtagcagcaaactggacact

SEQ ID NO: 5117 - DNA, 344 bp, Glycine max
  Clone ID: LIB3028-035-Q1-B1-B10
caatcctgagttctcaaggattggacaaatatggttctgaggctttgcttgtcaacttcactgctattatcacagtcttatttggtgcctttgttgtgttatctgctctagctgatgctcccccagcccctgccgcagatgactatgaagccatatagacacttctgtttgtaagtttgtctcatttttactttatggaataatctcatgtctgctataagtttatattgggagtcggaagaaggaaataatttattgtttgtattcttggacataaagctcgtaattaatcatcaatttcaatatattaaccctaaaatgtgaaattagtcgttgggttaaaa

SEQ ID NO: 5118 - DNA, 159 bp, Glycine max
  Clone ID: LIB3028-035-Q1-B1-C3
gcacttgatatttttaaatacttgtttagatgttacagtcccactcttacatgtataaaaggatctacttgtccacattatccttcaattttgggtttgggcaatgtgtttctagtgaataaaaagagagaatgatagttatgatagttatgatagaaa

SEQ ID NO: 5119 - DNA, 242 bp, Glycine max
  Clone ID: LIB3028-035-Q1-B1-D3
tgcccttgttgagcaccggatttgaattgaggccaactaatttctttgagagaaatccagtccttaagaccctttctcctggcattgttaaatttccaggttgtgagaaaccctagatttgcttttgagctttgtcactttaagtacaatattgttgatcgatagatccggagaaacattatctttttactaatatcggtcatatgtgctaaggtgagaaaaataataattttgaataaaaa

SEQ ID NO: 5120 - DNA, 165 bp, Glycine max
  Clone ID: LIB3028-035-Q1-B1-E7
ctattctgtatcaaatttcagtcagatattggctgtgtacatagggttatattattgatgcactgtatttgtattcaaattccaattccaaatggcgaacatatttgattgctgttagtttcccaggttatgtagactatgtgacaatgcagcattatttggaaa

SEQ ID NO: 5121 - DNA, 257 bp, Glycine max
  Clone ID: LIB3028-035-Q1-B1-F6
ctcgagccgattatcaagtaaacaaccaacagaattgggactgtgacttctctggtttggctgtcataacacataaggatccatcacaaaatggatgccaattccctgtaatgatttctagtagttcttctttgcttcttcatggagggctttcagaaatccttaagaaagcattgagggtgtatatttttgtcatgtttttgctatagctgaaagatttaggcaatggtggagtattttagaatgtgttctgacaa

SEQ ID NO: 5122 - DNA, 183 bp, Glycine max
  Clone ID: LIB3028-035-Q1-B1-G4
gacttgtatatttacctgtgaagtttcatcattttcttgttttgttcataattggcatgagctgctgcattgaacctagaagtgagtctctggctctctccaacgagaaatcatatgtaatgtaattcttgcacacccattaaatatgagaaagaagtatacatcaaataaattaatttttga

SEQ ID NO: 5123 - DNA, 220 bp, Glycine max
  Clone ID: LIB3028-036-Q1-B1-E6
ctcgagccggaaagattccaccattcaaggatcaagaaactgttaaaacaaaatatccaagtttctatgacaaattagaaacaatttgtgtacaaaaatgttaatttgtacatgttgttggggtttgtttggaggttagttttataatatactttgtagataaggtattgtaaaaaaaaataaaaaaaaaaaaaaaacataaaaactgaaacaaacaaaa

SEQ ID NO: 5124 - DNA, 315 bp, Glycine max
  Clone ID: LIB3028-036-Q1-B1-F8
tatggatctgatgccattcccttctcttttttgtcaataataccaaggatttttaatcttgctagagggatgaacaaggaaacacaaagggatgctgtgaccatcagatgagcaacaatgttgtaaatgtagagtatagctaactttattctgcaactgtatcccaagactcattatcctcaattgtattattacaaattacatactaggtgtcattgcaaagcaccaggcacagtactgacgcctgtgttgttgatattgatactttatttataaaaaaaaagtttcttggatttttttttcaaaaaaaatgag

SEQ ID NO: 5125 - DNA, 288 bp, Glycine max
  Clone ID: LIB3028-036-Q1-B1-H10
gcaagtactgtacggcattgcaatggtcaccagtcaacagccaaggaacgctcactatagctcctacacctcacttcagggtgctgcgtgtccaaagcggcttggggaagaagacagtgacaatgtacactttacaaataggtggattgtctatatatggaatggtgacataataaatagtactactagttttgcttaaatcttgtgcctacattcattcagtgcaattacaattttaatacgttaaattaatgagttatagttcattgaattgttaaaaagaaactc

SEQ ID NO: 5126 - DNA, 118 bp, Glycine max
  Clone ID: LIB3028-037-Q1-B1-B10
agcagattgactgctaatgatgttatacaatctccatgaatatatttgcaagcccttgttaagactccttaattcacggaaatcaagctttagttattttcactagcttaattaatta

SEQ ID NO: 5127 - DNA, 313 bp, Glycine max
  Clone ID: LIB3028-037-Q1-B1-D3
caactattggagcatcgaggatatctggtcgtctatgcaattactcaatggagattaaacctagctatatgcatgcctatataaatcatatatatgatgatatataaacctaagctcttgtagagtgtgttcaggcttaataacatcattaggtctgtttatatgagtagtctaagtttggtgtttgtaatgcatgatgtgagttaagaattaatttagttatggattgaaatatatagtaacttatatactacatgtgcattctcctattatcgtaaataatatggttgttgtaccataaaaaaaaaaaata

SEQ ID NO: 5128 - DNA, 322 bp, Glycine max
  Clone ID: LIB3028-038-Q1-B1-B10
aaaaaacagaaaaatacttttcttccaaaaaccttggttaaatatttacataccattaaaggatttcccaaagcggcaacatttaaaaggaaattcaaaccaaattgccccttaaggtggacaatataggattcaaagaaccgattataaaaagggaaacccaagatttaacaatctcaatgcccaacacacttcccagaaaagaccgttctcttttccatttcatccaaagactcctgccctgattcaagggacacataggatttcatctgttcttcttgcatcacatcatctacacaatatgacattccaacacacacca

SEQ ID NO: 5129 - DNA, 96 bp, Glycine max
  Clone ID: LIB3028-038-Q1-B1-B12
atgactttctcaagccaaagtgcatgcatgcctcagtcatttcagatgtatttcattctgtgtattaagaaacagatatcagagtagaaaaagaaa

SEQ ID NO: 5130 - DNA, 123 bp, Glycine max
  Clone ID: LIB3028-038-Q1-B1-C11
gcaaaattcttaaccttgtaatttacctgtacgcttaaatttaagttatttaaaaacacgtgattattataaaaaaacagttatttttttaatatatcaggtaacttttgtgtgttaaaaata

SEQ ID NO: 5131 - DNA, 193 bp, Glycine max
  Clone ID: LIB3028-038-Q1-B1-C2
ggagctagtaggataagagaaaaatgttatagtgtcgacatcattatttcatattttgggggccaagatggaaaggaatgacagatctttgaaccctcataattttgtaagtagcatgtaaagcaaaattattacatgataccagtagaatgacatcatatgtaacaatattttgtgaaaaaaaaataaaaac

SEQ ID NO: 5132 - DNA, 342 bp, Glycine max
  Clone ID: LIB3028-038-Q1-B1-F5
gggcaatttagcttgcacatactcaagcattccaccattgtggcaaagccaaggtcattttagactccaccacatgatcatgatcatatgatcaatccccttaattttttcttttttcttttcccttttctttactctgtattgtatcaatgcttgaaaatggggttgttccaaaaatgtcatatatatttggcctgctaatgggtattgtaaatctctgaacttgaagtgatgcacggttttgagatggttttctaataaacctacacttttgtctctaaaaaaaaaaaaaaaaacaaaaaaaaaaaaaaaaaaacaaaaaaaaaaaagagaaaacaataa

SEQ ID NO: 5133 - DNA, 319 bp, Glycine max; identical to SEQ ID NO: 2016
  Clone ID: LIB3028-039-Q1-B2-A10

SEQ ID NO: 5134 - DNA, 68 bp, Glycine max
  Clone ID: LIB3028-039-Q1-B2-C5
atagaagacaaatgacgtcgcatgaacccttacttaacctcggaattcggttcaacaatggcggatcc

SEQ ID NO: 5135 - DNA, 80 bp, Glycine max
  Clone ID: LIB3028-039-Q1-B2-F6
gatttttgtaccatcatacttcaattcaatgcctacatccttttaaatcaatatatcaaaattacagcgtttatttaaaa

SEQ ID NO: 5136 - DNA, 224 bp, Glycine max
  Clone ID: LIB3028-039-Q1-B2-G3
cagaaagatccagcactcactcgtccaacttcgtctctctctcgttccgaccaagatgtcgatcaacagcgaatctacgccgccaccggtgatcggaaaaatcgggccttacaccgtcttcatgacgccgccgtccacacccaaacccgccgacgacaaccccgttaccaccaccaagatcgcatctccgccgcctcagattcgcaaagccgttcgttcgccca

SEQ ID NO: 5137 - DNA, 320 bp, Glycine max
  Clone ID: LIB3028-039-Q1-B2-H1
caccatggtaaacggaatccgtacaacacacatgaaactcaacatctcacatgtgtcatttctgtgtcatgacctgaactcttctttcctgggaatctcatgaggctggatctccgttctgtgagtcataatgctcgcagaagtatgccaaagcttgggatcaggacacatgattgaagttttgcgggatatgctgcgacaagtgcaactgtgtcccatctaggacttatcgaatcattgaccacagtccctgctacacggacatgattaataccaatggcaatgacaaatgcacttggacaagatacaagttcatcatc

SEQ ID NO: 5138 - DNA, 381 bp, Glycine max
  Clone ID: LIB3028-040-Q1-B1-A3
cacccttctttgaatgttctcgcacatcacacccatgacactcctcctgctccatattctcctcgttcatgcggaggaatccaatggaccgtggcatctcctccacagaaaccaccgaattgttgccatgcacatgtcacttctccacaaggatcgcattatcatcttcgaacgcaccgacttcggtctctccaatctaagcctccccgacggtagatgccacaacaacccaaacgaattggtcctcaaacgcgaatgtaccgtgcactccatcaaatacgacgtcgcagccaatacattccgcgctctcattgtccaaaacaatgtcatggtgctcctccggttcggtctctcccgacggaatattagtccaaaccggtg

SEQ ID NO: 5139 - DNA, 356 bp, Glycine max
  Clone ID: LIB3028-040-Q1-B1-C4
ttgaaagcggaaaacatattgattaataggcaaaatgaaacgagcagaacatgttatgttatactagaaattgttcttaactcgttgaaatacaggttgtaatgtatctaagagactgagtattcacacttgacagggattaggtaattaaaataagaataaatttggtggcctaaaaaagagacgcccaggtatgtggtgagaagctaaggccaaacatctccttcagccctgtaaagctcaataactttgcaacaaccgcagcactctccacgatgtgattcatatcggtgctgctccatatgcgattcgccagctgcttcctccggcgctttgaatccaattcaatgccccac

SEQ ID NO: 5140 - DNA, 120 bp, Glycine max
  Clone ID: LIB3028-040-Q1-B1-E10
agtattctgcataagacaatggatttggtggtgatggacgattaaacacttacatgtaagcaaagatgaaaacaagataattgcataaatgtttttcttttatgaaaaaaaaaacaaaag

SEQ ID NO: 5141 - DNA, 284 bp, Glycine max
  Clone ID: LIB3028-041-Q1-B1-C3
catcacccttccaattccaaacatccactaggttcaagcatgaccccctgaagctgctatgcttcacttggataaataaaagcaccaatctctactctgaatttggattctggcttcctgtcattaactatacacatattatgctacattatctgttggagatgatgttttcttttcaatgttccaattcttcttcgcctttgaattagtacgtgtatttctgtggcacttttgcgttactcgtgtaccttgagtcccattgctatacaacttattttatgatg

SEQ ID NO: 5142 - DNA, 401 bp, Glycine max
  Clone ID: LIB3028-041-Q1-B1-E1
caagcctccgccgcaattttccggccatgtacctcgaaatcgaggtttttgaccggctcttccggtaaacttaaccgggaagtgactatgcggccaatggggtgccctccttctgcctctttcaaggttgaagccaagaagggagagtggttacctggcttggcctccccaacttacctcaatggcactcttcctggtgacaatggatttgaccctctggggctagctgaggacccagagaacttgaggtggtacgttcaagccgagcttgtgaatggacgttgggccatgttgggtgttgcaggaatgttgcttcctgaggttttcaccaagtttggaatcatcaatgcccctcaatggtatgatgctgggaaatcagagtactttgcatcttcctcaac

SEQ ID NO: 5143 - DNA, 339 bp, Glycine max
  Clone ID: LIB3028-041-Q1-B1-E8
tttgaaattatctctaaaatggctcattgatcattcaatgtgtatatgtgactttttttattcctgggaacccaaaccatttgcactatctcaatcattattcaatataacctaataatgaatgaacatattaattgaaccatgccagcacacattattgcaatgttttacccttcaaaagtgagtgtcctccaacgctttctccgccttttaacgcacaatgggttctttgcaaaaacaatattgccgtcaaagaacggtgtagaaggaggagaagaaatagcgtatgctcttactcctccttcgaagcttctaataagaaacaagtcaatatgtttg

SEQ ID NO: 5144 - DNA, 369 bp, Glycine max
  unsure (1)..(369): unsure at all n locations
  Clone ID: LIB3028-041-Q1-B1-G3
cggattttgtgattgggagagaaaccgacccagttgtgctactgcgaatgccgctgtcccgtgcaattcgaaggttctgaagaacaagggtttagaattagggtcttaaaccaactcaacctactttgtgggtaaaattagggattcaggtctaagttgaaaaattagggttttggcaagtcccctaaatgtcgacgggcaaacccagagacggtgagtttcagatggtcccggcgccgggaacctcaaagccgccccttccgccggtaacagcaactaatgcgatagtggaatatactccggtctccctcaaagaggatgangangacctagaaatcaagctccgacggattatcgacaatgttcccg

SEQ ID NO: 5145 - DNA, 276 bp, Glycine max
  Clone ID: LIB3028-042-Q1-B1-C12
ctcctatgcagatgggactcctcgctacctacgtccactcgcagccgtacgctctgaaagcttccgtcgtcgccgctatctcagcgacgagccgtgcgatgtgtcaaaccaaatggacagcagagttcaaattggtagcagcatttcagccctcattgctaggattgcatacgatgagaatgtagttgggtttgtgttggatggagtgggaaatggtgacatacgtaggaatacaatgtacctcattgtggattcaaacagcactgtcatgcaaat

SEQ ID NO: 5146 - DNA, 275 bp, Glycine max
  Clone ID: LIB3028-042-Q1-B1-E2
caagaacggacgattggccatgttctctatgtttggcttctttgttcaggccattgtcaccggaaagggtccattggagaacctcgccgatcaccttgctgaccctgtcaacaacaacgcctgggcctatgccaccaacttcgtccccggaaagtgagcgtcaaagaacgaaatgacttttgagagtttttagatttgtgtttggtgaagtacttcagataatgtgaattatcttgtgtatccgaatccaacttaatgttacttgctttttacaa

SEQ ID NO: 5147 - DNA, 383 bp, Glycine max
  Clone ID: LIB3028-042-Q1-B1-G3
cctaaattgtggtcagccctagatagagggggggtgttgaaagtcccacatgacggatagctgtgggcaaaaggagacatgctaaagtctcacatcaactaaaaatagtgtcgagataaactatataagtgagaaacaattctcaccttactagccggttttgtaggattgagttatactcataactcgctttctgacacttcatattaaatcacttcatatgttcatgtttcattgtctaaatcctttgtttcccacttttccttgttggaatttatgttttgcagatgggagatgtggcgaaggaccttgcagctgggactgttggaggggcagcacagttgatatgtggacacccattttgacacatcaaggtcaagctc

SEQ ID NO: 5148 - DNA, 375 bp, Glycine max
  Clone ID: LIB3028-042-Q1-B1-H2
ctcgatcactcgcacgcgctcctatattcgctcctccaacgtcgctctctcgagcaaccacaacaccatcttcagcacatggtcagtttttttcattctaagtcgctctcttccttttttcggttatccgatttgttctcacgcagcaaggactaaatgcgcgaatttcgagttttttttttgttggattttgtggcaacggaatttctgagctgggttcgtaattgatgtgatcgtttaagttgaacggtgccttttggaattttctgaaaaagaataaatcgtggcgttttcagatctgatttcggtgtttcgattgagtttttcccgacatggtagcttaatatgataggtacattgcggatttcagtttac

SEQ ID NO: 5149 - DNA, 240 bp, Glycine max
  Clone ID: LIB3028-043-Q1-B1-D11
gaacttattcgtaataattttatgcttaaagcaaaatgatgcctgttggtgttagaaatgtaagttatgatcctttgaagggagagatgttcatctcccaaaattttgattcccattgtttatcgataatattatatatagtgaacaacagttgagacttgcaaaacggtggctctgttagttttaccataacgaggctacgtaacaagagcaaaagtggctgttaagttagttttaaaa

SEQ ID NO: 5150 - DNA, 197 bp, Glycine max
  Clone ID: LIB3028-043-Q1-B1-G2
cttgtgttactacggtagatgccaaatgagtggaagttgttcttgtttgagtttgctttagtaagaatccctttttcagtttgcagaatctcttgtatttattgtgttactatatattgtactaggtctcgtgggaaataaaatttttataaattttaattttataaagttacaaaaactttaaagaagaaattttc

SEQ ID NO: 5151 - DNA, 54 bp, Glycine max
  Clone ID: LIB3028-044-Q1-B1-D2
cacgggtacgtaaactcggaaatcggctcgaggacaaatatgaagtcgttccaa

SEQ ID NO: 5152 - DNA, 90 bp, Glycine max
  Clone ID: LIB3028-044-Q1-B1-D5
gacgtcggacccatgcgtacgtaaactcggacgtgagcaaaaggccagtcaatcgcaagcaaccgtaaaagggccgcgttgcgtgcgttt

SEQ ID NO: 5153 - DNA, 223 bp, Glycine max
  Clone ID: LIB3028-045-Q1-B1-A4
tgaaagtgaaaccagcgttggcgcatttcgtcgtacaatttatactttttcggtcatcgtcgtaaatgatgatatataattatttcgggcttactcggatgcctttgttaatttgtgaatcaattttgcatcggatgccatgaaactaatgtaaatttgtgctaatcaaatcatcataaggtaatgatttagtgtaatgctactacgctcgcaactattttca

SEQ ID NO: 5154 - DNA, 333 bp, Glycine max
  Clone ID: LIB3028-045-Q1-B1-C4
aaaaaaatctataacaatgacctccaaataataaaatgttaggccgtttatattgttataagtattgtctggatttcaatataggggccaaagctttttttacaataaatttgagtcacaatcaaacgcatatgtaggacctgcacttaatagcaattctttgttgacttccaagtgtagcattggcttcggcacatctttatgtttggatgggtacgtgaatgtatagaaaaaaaaaaaatagagatgagagttagaggagaaatgcaccaagttgttgattcaaatgtttggtttcatgttaagaatcatgagaattgatttttatctcta

SEQ ID NO: 5155 - DNA, 404 bp, Glycine max
  Clone ID: LIB3028-045-Q1-B1-D2
ctcgagccgaaaaaatctcaacaaaatttgagcatgccacatatggagcttaggtctaccttcaccacctgcttctttctcttgattctcatcctggctctccctcgtttctcaagaggggaatctgaagcattgcatacagagatatatgagattgattatagaggtccagagacacactcttcaggtgttcctcctcctcatcacttccatattggtaagcagcattcaacttctcatcctcaaaaaggctcagtcagaggaaccaaagctttgggcttaagggatagcacttacgatgaaaataaggtcaagaaagtacatgaatgatcatcacgaagctttacaaattaaatggagtatgactttgattagtgctctcatacataaatatttttgttaga

SEQ ID NO: 5156 - DNA, 137 bp, Glycine max
  Clone ID: LIB3028-046-Q1-B1-D5
agcgggaaatggacgagaattgcattgtctcacagtcggagccgcattagttatcacctttgtataacatgtattccagttttgctgcattattcagataatatataatacataaatatatgaaagattttccaaaa

SEQ ID NO: 5157 - DNA, 361 bp, Glycine max
  Clone ID: LIB3028-046-Q1-B1-E1
gggacaaatccaagctggaatcactcttgatgtccctcccgccccccaactgagttgaacactgataagagacagatcacaagaaacaccagcagctataaaaacctgagacgaatttagatgtgggaagggagacaagtgttgggaaccatttttgtgacgtggagaagaaaacgttttgattgtcgtctatttttgttttcacatcgttattggtttattttccccactgtacctattattgaagctgtatcctatactctgattgagttcaggctgggagcgagaatctcagccagtacttgtttcattccacgggatctttaccgatattcaaaaattggttcgccacttaaaagag

SEQ ID NO: 5158 - DNA, 334 bp, Glycine max
  Clone ID: LIB3028-046-Q1-B1-F11
aagaactctaggatttggaagaatgctcaacctttcattgattggcttcagaatgcagaatcagaaaccgaggaagaataatttgtcctacattctccgttacttatgtttgcttgcttgtgttatgtcctttatttccaattaagggtcttgttggccccatgtgttgttcaactactatacttgctaaaaacttggtgtgaggggtgcatggttgctggactagtatagcatgtacgcgtcagtgagttttgtgttgtgttgttctaatgtattttggtttttggttggtgatgattatgttttctgttttaataaaacgtgtcttgataat

SEQ ID NO: 5159 - DNA, 297 bp, Glycine max
  Clone ID: LIB3028-047-Q1-B1-A11
gaaacagagctcccctttcttttattcatgtatacatataccactgttgtgtggttttaaatttttttgtacgagggaaagggaaggaaaatgtttcttaatccattatgcctttttatttcaccagtttgcatatctgaacattttccatttctttccctcgtgtaaagtttgttgtacacttatgtaggcaatttcacatattgtcctgtttgtttggggaatagcttctgtatttattatccgtatagctttattcttaatttggagatattgacaatggaagatgttgttttt

SEQ ID NO: 5160 - DNA, 215 bp, Glycine max
  Clone ID: LIB3028-047-Q1-B1-A6
gaaacaaaaaccgttattccccagtcaaaatggtatgatttttgtcgtgtcattttcgtgttgtgtccttggtttctatcctattttctgttatagtgagttcttagctagctgttttgggatcgtagacgctgaaacttaaaaatgcttgattttggtacacattatcttttatgactatagcaagaccagtgtacatatagtaaaaggaactg

SEQ ID NO: 5161 - DNA, 269 bp, Glycine max
  Clone ID: LIB3028-047-Q1-B1-C11
gagtgcaagcacttgcttcgacttgatgatggtgctgagattgtgaggggtaggactcaatggaggcccaaacctttaagcagcaactttggtcatgttttgagtcaggttccagttccagcagaaagcacctgaatcttatcttattgattggcatcactggaggaggagtggcataaattcatagagagctttgcttgtttttatcaaatctacgtatcttaaaatatatataaaagaaagtgtgttaaaaaaaaagtaaactaact

SEQ ID NO: 5162 - DNA, 212 bp, Glycine max
  unsure (1)..(212): unsure at all n locations
  Clone ID: LIB3028-047-Q1-B1-C4
atgtgcaccttgctgcggctctctgcanatgtattgagctgtcatgtatgcagaaaataaattactttatttataagtggtatcttctattanggacataacatgatttgcatagcattatttgccataggaattaagaattttttgcaaataaccagctttatgatttggaaatgaagattgaaaagataattgcaattactttaaatttt

SEQ ID NO: 5163 - DNA, 216 bp, Glycine max
  Clone ID: LIB3028-048-Q1-B1-D5
ataactaatacatacatagttaggtgccaactataatccagcggaagatatggtgcaactatagggtgccgtttttgtatcattaattggattgttgataaaacactttttttttggattccagagcccaggtttctacatagccaggggctttagattatttattttttccccattactgttttttttaattattattgcattgcaagcgccaga

SEQ ID NO: 5164 - DNA, 112 bp, Glycine max
  Clone ID: LIB3028-048-Q1-B1-E5
ctgtaattttcttatatgtgtattatacgaatgagaaaatagttggaaattcgttagggacaagaaataatatagaagatgtttatatgatcccgtttttgtttccaggtaa

SEQ ID NO: 5165 - DNA, 260 bp, Glycine max
  Clone ID: LIB3028-048-Q1-B1-F12
gattgttctgaggttgcaatgccagggttgcaagcatgtctcccaacacgctattaagaggtgcaagcactttgagattggtggtgacaagaagggcaagggaacatcactcttctagtttgagaattaggatttagagctttatgtttcagcaatgttggaatgttttgtttctctctggattttttctgctagttatattttattattttgcaacaccttggtaatgagaaattaaaactaatttggcccatttcacc

SEQ ID NO: 5166 - DNA, 334 bp, Glycine max
  Clone ID: LIB3028-048-Q1-B1-F5
acgctttcttctatcttcaggcaaatcaaattaaaatcacaacacccccaattcccgaaaccctaaccctacctcctcgcagccatggctaagaaacgaaagcttcgatcctctgaccccgagcccagcaaacccatcgagccacagcaacaggaccaagagccagttgaactcgaccaacagcaacaacaacccaaccccaaacaaaccctagaagatcctaacacgatggccgtcgacgaatcaaaacaggaagaagaagaagaagaagaagacgaagaaccccaaaacgccgaaagcgaagaagaggaagaggaagctgaggaacaacaag

SEQ ID NO: 5167 - DNA, 91 bp, Glycine max
  Clone ID: LIB3028-048-Q1-B1-F8
aaaaattaaaaaaaaaaaaataaaaaaaaaaatttaaataaatcaacaaaaataaaaataaataacaaaaaaaaaaaaaaaaaacaataac

SEQ ID NO: 5168 - DNA, 234 bp, Glycine max
  Clone ID: LIB3028-048-Q1-B1-H12
cttcaatgcagtatcaaagtggtaatagactttagtcaatgttgtgtctctgtgtcattaaaattcgttaccccaccccacaccatgcaggcccttgatgctttgtggtgtctttgctcagtcatgctagctgttcatttagacaaatgatttttgatttaatctctcatgtttgaatattttgaaatggattttattaaatcaattgattgatccctatgttttttggtcaaa

SEQ ID NO: 5169 - DNA, 229 bp, Glycine max
  Clone ID: LIB3028-049-Q1-B1-A2
tatgcatctgtccaagctgcaaagttcataactcaatagtccttttaattttttgttctctcaagtgaaatttcaatcctttttattgtctttttttgcatgcatgaacaacacaagaggaaggggttgtagctagtcaaatggagggtctaaatattatatcatcacatcactgtcagcaagtttaatttaaactttcaaatcattacattttagcacacattgctgg

SEQ ID NO: 5170 - DNA, 463 bp, Glycine max
  Clone ID: LIB3028-049-Q1-B1-B2
aattgctcaccattcattgtgcctattatatctcccttttgggttaggatgctcaagcaggaagatataattgctcaccattcattgtgcctattgaagagattgctgaaattatttcagccaaatacccagaatatcaaataccagcactagaagaggtgaaggaaattaaaggtgccaagttaccacatttaacctcccagaaacttgtggatgctggttttgagttcaagtatagcgttgaggacatatttacggatgcaattgaatgctgcaaggaaaagggttacctttaatcgattttagccacgaagttgaaaaaataaaattgtcgaagatgattgttagttcgtactattttcagattcctggcaatgatgcctcttgacatgtactccatttaatgcatgatgttttcttaataaattgaccagggaaataattcttttggtttgtctgaata

SEQ ID NO: 5171 - DNA, 363 bp, Glycine max
  Clone ID: LIB3028-049-Q1-B1-B7
ggaggaatgaacttgacctgactctggaaccattatattcctgtcaccttggatgcttttgaatactttctttgaggtggatgatattatatagctttggtatggcatttgacaacatatttgagggcttatatatgcctctatgttttgtggttttccctactctgcagacgttaatgtttattgtgtgttgtaagtttataatttggtcacaaggctaggctttcttaagtggaagctttgctatatatagttaagttgctgaaagacaggtctcgtatctgaactaattaagcgttgagtttgtccttgtttgctaattgctaataacagtatatacaatatataattattttaaatcga

SEQ ID NO: 5172 - DNA, 457 bp, Glycine max
  Clone ID: LIB3028-049-Q1-B1-E2
gctgacagaatcaacaagatgctggcagtgctcgagaagaacatcttgtgggtgaaccctgactgtgggctcaagacccgtaagtacactgaggtgaagccagccctcacaaacatggttgccgcagcaaaactcatccgcaacgaacttgccaagtgaatggtataagaaagtagaatcttccaagtcatttggttctgctttatattataatacaccaaagaaaaattttctctatattgggttgtttcaataactgtgtgtggaatatttaggtgtcttagcatgctctgtgagcaattgattcttcctcaacccctccccccttatttttccccactcctgttttccctaatgaatgttgtatctttgcggcttcgccgcaatccttattgatctggaattttaccagttttgtgcaaataactatgagcatctatatcgagtatttcaaaat

SEQ ID NO: 5173 - DNA, 85 bp, Glycine max
  Clone ID: LIB3028-050-Q1-B1-E11
ctgatatttgggtcctatgaggaagtccaaagtctaatttgacaaaacaataaatatatgcatgacaagttagtattcaacgata

SEQ ID NO: 5174 - DNA, 224 bp, Glycine max; identical to SEQ ID NO: 5021
  Clone ID: LIB3028-050-Q1-B1-F12

SEQ ID NO: 5175 - DNA, 323 bp, Glycine max
  Clone ID: LIB3028-051-Q1-B1-D6
gatacagcacatgatgagactaggataaataaggtggagcctgaccctgagcaagatggaagcattgatcttggggtaaacacgccactgttggggtcgacttcaaggacataagttgaagatgatattcaagttagccaagaaaaaatcctgacaattgatttctgatgagtttctggcaatgttttttcaaccatcagttgccaactttacagcttttagttgctgtttctgattactgttgcaatttttatctttttcagcccaaatcttgattacaaatatttatggagtattaaataataaacaagtttagtgacaaa

SEQ ID NO: 5176 - DNA, 82 bp, Glycine max
  Clone ID: LIB3028-053-Q1-B1-D6
cttgggagaacaggtctagtttcagagccggcatgtgcatgcttaccgactttctctattgggggtcgtattagatcttggt

SEQ ID NO: 5177 - DNA, 185 bp, Glycine max
  Clone ID: LIB3028-053-Q1-B1-E11
aaaaacaaaacatatcaacccttctacaaattaaaaagaacacaaaaaaataaaaacaacagggcggcctccgataactcagctcgtcaacgcggaaattactcccggaccggtaccttcaggcttaccatttttccgcaaagtcagtcctcttaaagcttggcttcacgatggtcacaacggtt

SEQ ID NO: 5178 - DNA, 357 bp, Glycine max
  Clone ID: LIB3028-054-Q1-B1-G5
atcgaaaggttgttttcaagtcaactcaatggcacttccctcaggtttagtttccatgttgatagtactttttggtatggttttggtagttggggttgaggcaaaggcaagggctttctttgtatttggagactcactggttgacagtggtaacaacaattacttagcgaccactgcacgggctgattcccctccttatggcattgactatccaactcgtagaccaaccggtcgtttctccaatggcctcaacattcccgatcttatcagtgaacgaataggtggcgagtccgtgttgccttatttgagtccacaactaaaaggtgaaaatcttctgaatggagccaattttgcttc

SEQ ID NO: 5179 - DNA, 75 bp, Glycine max
  Clone ID: LIB3028-055-Q1-B1-A10
acgcgtacgtaagctccgaattctgctcgagaacactttccgccgttccactctctacacattctcccgctctct

SEQ ID NO: 5180 - DNA, 207 bp, Glycine max
  Clone ID: LIB3028-055-Q1-B1-E1
cacgaattttcttgcactatggataaacatacatatactggtaatgaggaactttcaagcaacgatctcgaaggactacaaattactaatgggctggagtgtaagataccttgcagttcatcttaggtctcacatgttttagattacctgggactttttgtttccgctaacaaagctaaaaagaattttgtatccaccacagttcag

SEQ ID NO: 5181 - DNA, 364 bp, Glycine max
  Clone ID: LIB3028-056-Q1-B1-A5
tttgaaggacttcaaaatttttatggatgctatggaagcagttaaggataaaggggttgtggttgcagtggcatctccagaggatgtagatacggccaacaaggaccgtcccgacttctttcaagtgaagaaagccctttagtttcagtatctattccccgcatggatttgaaattgtatcttttcttaaaatttcatacatcgaaacaaatgtttccttgattatttgtttaaataggttaactggctggagctagatacgagaatttattattactttcgtccctggaatatttttttaactaattcaaatcgtttgagaaagttggttattttagttaataacattaaatgttaacaacag

SEQ ID NO: 5182 - DNA, 368 bp, Glycine max
  Clone ID: LIB3028-056-Q1-B1-A7
ctcgagccgaatcggctcgagctccagccaattaacaaagggttcgaggaggctgaagaggaggagtaagtctggtggaggttcagggctaaggctgaagaaattagcttgtcttgcagcccttgtaccattagctaagatattggcttgtagtctcataagttcagttctgcctagtactaattatctatttaatttgtgtttgtgtttgactccttcatcttgctctcgggacatatcacggtgcctgtgttttccgcacgccacattgatatgttatacgagtgcattattgtattttgagtgattatttcaataatgagtgtactcctttccctgttgacttgttaaaaatacaggtgtaactg

SEQ ID NO: 5183 - DNA, 148 bp, Glycine max
  Clone ID: LIB3028-056-Q1-B1-G6
gatgttatgtttctctttgctgtactcctttgaaaattagtacagaatgattgtacagaaaagaaacagggtaatggtgtacctgaataaaaacaaaaaaaaaaaaaaaaaaaaaaaaaagaaaaaaaaaaaaaaaaaaaaaaagaac

SEQ ID NO: 5184 - DNA, 221 bp, Glycine max
  Clone ID: LIB3028-002-Q1-B1-F7.F1
cattgtcctaatctttctgcacatcgttcttcattttcggtcttacaattctactgcgtctgtcttaagggttctctaatatttctactacttcttgtagtgttaaagttgtcagctactagtcctctaagtgtttggtgttgtagtaggcagagccgaattaacatgttcattcagtgtgacgtgtgtaagtgagagtgggaacagggatttgttgcgcg

SEQ ID NO: 5185 - DNA, 532 bp, Glycine max
  Clone ID: LIB3028-007-Q1-B1-F6.F1
gaccttagaaagagaaggaaaaaaaaaacttgtgtttcttgggaagccatgagcaccaccgagagtcaaagatataagggcacagtgaaatggttcaacgaggagaagggtttcggtttcataactcccgaagatggtggctctgatctcttcgttcactacagtgcgatccaaaccgacggcggcttccgaccttgtcggagggtcagtcagtagagttcctcgtcactcaggacgacagcgggcgagccgggccgtcaacgtgacgaccaccacggttaaatctagtgacagcggtaacggggaaaactctggtggtgatgctgccaatgttgagaaataagtgagaatgaattattggagtttcctgaattgcgagtatgatatttatattgatagttggacaatatactagtccattggtattttatattttattatattatctctggttattggcatttggttccaacttgtaatacatttatcatgtgtttacgtggttatgtagtaagttgttggatgtgtcaaa

SEQ ID NO: 5186 - DNA, 534 bp, Glycine max
  Clone ID: LIB3028-007-Q1-B1-F6.F2
ggaccttagaaagagaaggaaaaaaaaacttgtgtttcttgggaagccatgagcaccaccgagagtcaaagatataagggcacagtgaaatggttcaacgaggagaagggtttcggtttcataactcccgaagatggtggctctgatctcttcgttcactacagtgcgatccaaaccgacggcggcttccgcaccttgtcggagggtcagtcagtagagttcctcgtcactcaggacgacagcgggcgagccgcggccgtcaacgtgacgaccaccacggttaaatctagtgacagcggtaacggggaaaactctggtggtgatgctgccaatgttgagaaataagtgagaatgaattattggagtttcctgaattgcgagtatgatatttatattgatagttggacaatatactagtccattggtattttatattttattatattatctctggttattggcatttggttccaaacttgtaatacatttatcatgtgtttaacgtggttatgtagtaagttgtttggatgtgtc

SEQ ID NO: 5187 - DNA, 646 bp, Glycine max
  unsure (1)..(646): unsure at all n locations
  Clone ID: LIB3028-010-Q1-B1-A12.F1
catgtcctaatctttctgcaccatcgttctccatttttggctttacaaaaccactgtgtctgattaagggttctttaatatttccaatatttcttgtagtgaaaaagttgttagctaaaagaagaccaagtttttggtgttgtagaaggaagagaagaattaacatgaaaattcagtgtgacgtgtgtgagagagctccagcaacagtgatttgttgcgcggatgaggctgctttgtgtgccaaatgtgacgttgaagttcatgctgcaaacaagcttgcaagcaagcaccaaagacttcttcttcaatgtctatcaagcaagcttcccacatgtgacatttgccaagacaagccagcattcatattttgtgttgaagcagagcactcttctgtcaggattgtgatgaccaattcattcagccggaagcctttccgcgaaccaccagcgcttccttgctactggtatccgagtggcctcgagttctaattgcacatagacaatgaaaaagtcactcggagcctcctaataggagtgcacaacaagtttctgcgaaaatccctctcagctagtgcctagcttcacatcctcttgggctgntgatgacttattgggactancagggctttgaatcaccctgagaaaag

SEQ ID NO: 5188 - DNA, 521 bp, Glycine max
  Clone ID: LIB3028-010-Q1-B1-A12.F2
ccatgtcctaatctttctgcaccatcgttctccatttttggctttacaaaaccactgtgtctgattaagggttctttaatatttccaatatttcttgtagtgaaaaagttgttagctaaaagaagaccaagtttttggtgttgtagaaggaagagaagaattaacatgaaaattcagtgtgacgtgtgtgagagagctccagcaacagtgatttgttgcgcggatgaggctgctttgtgtgccaaatgtgacgttgaagttcatgctgcaaacaagcttgcaagcaagcaccaaagacttcttcttcaatgtctatcaagcaagcttcccacatgtgacatttgccaagacaagccagcattcatattttgtgttgaagacagagcactcttctgtcaggattgtgatgaaccaattcattcagccggaagcctttccgcgaaccaccagcgcttccttgctactggtatccgagtggcctcgagttctaattgcaccaaagacaatgaaaaaagtcactc

SEQ ID NO: 5189 - DNA, 496 bp, Glycine max
  unsure (1)..(496): unsure at all n locations
  Clone ID: LIB3028-011-Q1-B1-G8.F1
acaggtgtttgaaggaccaacattcaagattctggaacggtgcagctgttgttgctttctgttcctctgttgccgtttgcctgatgcagacttagttttatgttttttgatctaaaagccatagcaatgtcttttatcggtacccagcaaaagtgcaaggcttgtgagaaaacggtttatcccgttgatcagctttctgctgatggtactgcttatcacaaagcttgcttcagatgctctcactgcaaaggaacattaaagctgagtaactattcctcaatggaaggtgttctttactgtagcctcactatgagcagctcttcaaggagagtggctccttcagcaagaacttccagtcacctgcacagctagctgataagacaactcctgagctgacaaggtctcctagtaaagctgcgagcatgttttctggcacacaagaaaagtgtgcacatgtggganaactgcttatccattagagaacgtaacagtggaa

SEQ ID NO: 5190 - DNA, 446 bp, Glycine max
  Clone ID: LIB3028-011-Q1-B1-G8.F2
agcaggtgtttgaaggaaccaacattcaagattctggaacagaggcagctgttgttgctgctgctgtggctgcggctgcccgtttgactgatgcagacttagtaagatgaatttagatctaaaagccatagcaatgtcttttatcggtacccagcaaaagtgcaaggcttgtgagaaaacggtttatcccgttgatcagctttctgctgatggtactgcttatcacaaagcttgcttcagatgctctcactgcaaaggaacattaaagctgagtaactattcctcaatggaaggtgttctttactgtaagcctcactatgagcagctcttcaaggagagtggctccttcagcaagaacttccagtcacctgcaaagctagctgataagacaactcctgagctgacaaggtctcctagtaaagctgcgagcatgtttttctggcaca

SEQ ID NO: 5191 - DNA, 670 bp, Glycine max
  unsure (1)..(670): unsure at all n locations
  Clone ID: LIB3028-027-Q1-B2-G6.F1
ctcatcctcttctttctctctctaccattgccatggatccctacaagcaccggccatccagcgccttcaattctcccttctggactacaaattctggtgctcctatttggaacaacaactcctctttaaccgttggagctagaggtccaattctgctggaggattatcatcttgtggagaagcttgcaaattttgatagggaacgtatcccagaacgtgttgtccatgccaggggcgctagtgcaaagggtttctttgaggtcacccatgacatttctcacctgacatgtgcagatttccttcgagcccctggagttcagacgcctgtaattgttcgtttctcaactgtcattcatgagcgtggtagccctgaaaccttgagggaccctcgaggttttgccgtgaagttttacaccagagagggtaactttgaccttgttggaaacaccnttcccgtcttctttgtacgtgatggcatgaagtttccagatatggttcatgctcttagacccaatcccccagancacatccaggagaaattggaggatccttgacttnctctctcactttcccagaagccttcacatgttcacctttttatttgatgatttgggtgttccacagattacaggcatatggatgggtttggagttacacatacacactgatc

SEQ ID NO: 5192 - DNA, 478 bp, Glycine max
  Clone ID: LIB3028-027-Q1-B2-G6.F2
ctcatcctcttctttctctctctaccattgccatggatccctacaagcaccggccatccagcgccttcaattctcccttctggactacaaattctggtgctcctatttggaacaacaactcctctttaaccgttggagctagaggtccaattctgctggaggattatcatcttgtggagaagcttgcaaattttgatagggaacgtatcccagaacgtgttgtccatgccaggggcgctagtgcaaagggtttctttgaggtcacccatgacatttctcacctgacatgtgcagatttccttcgagcccctggagttcagacgcctgtaattgttcgtttctcaactgtcattcatgagcgtggtagccctgaaaccttgagggaccctcgaggttttgccgtgaagttttacaccagagagggtaactttgaccttgttggaaacaaccttcccgtcttctttgtacgtgatggcat

SEQ ID NO: 5193 - DNA, 355 bp, Glycine max
  Clone ID: LIB3028-028-Q1-B1-B8.F1
ggagtttgtaaccatgcttttcacttccattgcataagccgatggtcaagacccgtcaagtatgtcctctagataatagcgagtgggagtttcagaaatacggtcactagaactttgatgcggctgagctacttccatcttggacatttggattgtagcatttctatcaactttatagctctacatgttgtctttgcttgcctattggagttttattcaaaagagtcacttctaaatgctttcgcatatagttacgcccccagttcctaattcgatcatatccttctctaacaatgtggcaaaacggtggtgttaattcactcaatgacaagatttatggaatattatagcatgc

SEQ ID NO: 5194 - DNA, 383 bp, Glycine max
  unsure (1)..(383): unsure at all n locations
  Clone ID: LIB3028-028-Q1-B1-B8.F2
ggagtttgtaaccatgcttttcacttccattgcataagccgatggctcaagacccgtcaagtatgtcctctagataatagcgagtgggagtttcagaaatacggtcactagaactttgatgcggctgagctacttccatcttggacatttggattgtagcatttctatcaactttatagctctacatgttgtctttgcttgcctattggagttttattcaaaagagtcacttctaaatgctttcgcatatagttacgcccccagttcctaattcgatcatatccttctctaacaatgtggcaaaacggtggtgttaattcactcaatgacaagatttatggaatattatagcatgcaaaaaaaaaaaaaaaaaaaccananna

SEQ ID NO: 5195 - DNA, 549 bp, Glycine max
  Clone ID: LIB3028-028-Q1-B1-G1.F1
caaaagcaaaagatgaagatccagtgtgatgtgtgtgacaaagtggaagcctccgtcttctgtcctgcagatgaagctgctctttgccatagcttgttatcgcaccattcaccgcgccaacaagcttgcaaccaaacacgcccgtttctctctccactaccccacctccaaagacttccctctttgtgatatatgccaagagaggcgtgcatatctattttgccaagaagacagggcgttgttatgcagggaatgcgacgttcctatccacagagccaatgagcatacccaaaagcataacaggtttcttctcacgggtgtgaagctctctggtacttgtttagatcctgcttcgtcctccaccaattacaccaataataatagagtcactggctctgaaggaagatacgacgctcgatctagtatgtactagaccagatcatcagttttcaatgaagataatgcaagtatttcttcttgctaggttgtagactacgtggcttagtgacactgggttcgattttctactagcagcatttcttgagtact

SEQ ID NO: 5196 - DNA, 557 bp, Glycine max
  unsure (1)..(557): unsure at all n locations
  Clone ID: LIB3028-028-Q1-B1-G1.F2
caaaagcaaaagatgaagatccagtgtgatgtgtgtgacaaagtggaagcctccgtcttctgtcctgcagatgaagctgctctttgccatagctgtgatcgcaccattcaccgcgccaacaagcttgcaaccaaacacgcccgtttctctctccactaccccacctccaaagacttccctctttgtgatatatgccaagagaggcgtgcatatctattttgccaagaagacagggcgttgttatgcagggaatgcgacgttcctatccacagagccaatgagcatacccaaaagcataacaggtttcttctcacgggtgtgaagctctctggtacttgtttagatcctgcttcgtcctccaccaattacaccaataataatagagtcactggctctgaaggaagaaacgacgctcgatctagaatgaacagacccagatcatcagtttccaatgaagaaaatgcaagtaattcttcttgcaaggntgaagacaacgtggctagtgacactggttcgatttaactagcagcatttctgagtacttgattgaaacaata

SEQ ID NO: 5197 - DNA, 573 bp, Glycine max
  Clone ID: LIB3028-031-Q1-B1-F2.F1
ggaattattaattaggtgtttacatgggattaatgaaacctagctagaaaggaaaatgatgggagaacaagggagtgtattttatatatatatatgtaaaaatttgtgtattgtttgtagtggttaaatttgtgaaaaaggtaaaaggttttttctttctttctgggtatacatactaaagggtttttgagagttcagtctgctttgagatttgtgttttggatgatggaggaagctcagggcagttctagttccctgccacctttcctcaccaagatttatgagatggtggatgatccttcaactaattccattgtttcatggagtgccaccaataggagtttcattgtttggaaccaccagagttttcaagggatttgttacccaaatactttaagcacaacaacttttccagtttcatcaggcagctcaacacttacggctttagaaagattgatcctgaacaatgggaatttgcacatgatgattttgtaagaggtcagccacatcttttgaagaacatccataggcgcaaacctgtccatagccattctttgcagaatatccagggtc

SEQ ID NO: 5198 - DNA, 488 bp, Glycine max
  Clone ID: LIB3028-031-Q1-B1-F2.F2
ggaattattaattggtgtttatgggattaatgaaacctactgaaggaaaatgatgggagaacaagggagtgtattttatatatatatatgtaaaaatttgtgtattgtttgtagtggttaaatttgtgaaaaagtaaaaggttttttctttctttctgggtatacatactaaagggtttttgagagttcagtctgctttgagatttgtgttttggatgatggaggaagctcagggcagttctagttccctgccacctttcctcaccaagatttatgagatggtggatgatccttcaactaattccattgtttcatggagtgccaccaataggagtttcattgtttggaacccaccagagttttcaagggatttgttacccaaatactttaagcacaacaacttttccagtttcatcaggcagctcaacacttacggctttagaaagattgatcctgaacaatgggaatttgcaaatgatgattttgta

SEQ ID NO: 5199 - DNA, 553 bp, Glycine max
  unsure (1)..(553): unsure at all n locations
  Clone ID: LIB3028-034-Q1-B1-B10.F1
agccagcttngatggaacggaacagaagtgctcgtacctttgagtgggaggattcaatagacaactcacaacaagcaagacagccaaggaggaggaaaaggaaatggagttcgttggaagaagagacactaagggctggtgtaaaaatgtttggagaaggaaactgggcaacaatccgaagtttttacagtaacatatttgaaaatagaagtggagttgatctgaaggacaagtggagaaacatgatacggtgacactaacgcgctactttcatgtgtatatcttggtaatgacaattttgacagcagcttctctctatgcaatcaagctttgttaaaacaccatccaaatcgtacagttagtgaggaccaactggtatccaaggccctttcaaacacatcattcatccccgcgttttggtttcaatggctcagctgaaggttcccccattatggtatgctcggtacgaaaagaaatcatggcaatttcgaggtcttaattgtattagttaacattgaatttcgtatgatggtggtttttgtttcatctggat

SEQ ID NO: 5200 - DNA, 528 bp, Glycine max
  unsure (1)..(528): unsure at all n locations
  Clone ID: LIB3028-034-Q1-B1-B10.F2
agcccagcttgatggaacggaacagaagtgctcgtacctttgagtgggaggattcaatagacaactcacaacaagcaagacagccaaggaggaggaaaaggaaatggagttcgttggaagaagagacactaagggctggtgtaaaaatgtttggagaaggaaactgggcaacaatccgaagtttttacagtaacatatttgaaaatagaagtggagttgatctgaaggacaagtggagaaacatgatacggtgacactaacgcgctactttcatgtgtatatcttggtaatgacaattttgacagcagcttctctctatgcaatcaagctttgttaaaacaccatccaaatcgtacagttagtgaggaccaactggtatccaaggccctttcaaacacatcattcatncccgcgttttggtttcaatggctcagctgaaggttcccccattatggtatgctcngtacgaaaagaaatcatgcaatttcgaggtttaattgtattagttaacattgaatttcgnatgat

SEQ ID NO: 5201 - DNA, 675 bp, Glycine max
  unsure (1)..(675): unsure at all n locations
  Clone ID: LIB3028-037-Q1-B1-G7.F1
ctgaggtgcaataaggttatgagtgctgttttctcttcttgaacttctctttaatcctcagatcctggattaaaggaaaaacataaacatcagccagaaaattcctgagccttgttttacatctttcttcaggaaggaaaagaagaagcaaaatgtcattcacaggaactacagataaatgcaaggcttgtgataagactgtttatgtggttgacatgttaactcttgaaggtataccttaccataaaaactgcttcagatgcagtcactgcaaggnatacctaacgatgaacacctactcctcaatggatggtgtcctctattgcaagccacactttgaacagcttttcaaggaatctggcaatttcagcaagaactttcaaacagcaaagtcttctgataaacaaaatgagacgaataaggcccccaacagactgtcatccatgttcagtggactctagacaaatgctcagtttgttcaaaacagtctatcctctgngaaagatgacactggaaggggaatgctatcacaagaattgctttaggtgtgctcatgcaggtttgcacctcacacattcctcttatgctgccttggatggtgtctctactgtaggcacattttccacagcttttcatggagaaagggactatcatcatgtactcaatctgctaaca

SEQ ID NO: 5202 - DNA, 559 bp, Glycine max
  unsure (1)..(559): unsure at all n locations
  Clone ID: LIB3028-037-Q1-B1-G7.F2
ctgaggtgcaataaggttatgagtgctgttttctcttcttgaacttctctttaatcctcagatcctggattaaaggaaaaacataaacatcagccagaaaattcctgagccttgttttacatctttcttcaggaaggaaaagaagaagcaaaatgtcattcacaggaactacagataaatgcaaggcttgtgataagactgtttatgtggttgacatgttaactcttgaaggtataccttaccataaaaactgcttcagatgcagtcactgcaagggatacctaacgatgaacacctactcctcaatggatggtgtcctctattgcaagccacactttgaacagcttttcaaggaatctggcaatttcagcaagaactttcaaacagcaaagtcttctgataaacaaaatgagacgaataaggcccccaacagactgtcatccatgttcagtggaactctagacaaatgctcagtttgttcaaaaacagtctatcctctggaaaagatgacactggaaggggaatgctatcacaagaattgctttangtgtgctcatgc

SEQ ID NO: 5203 - DNA, 658 bp, Glycine max
  unsure (1)..(658): unsure at all n locations
  Clone ID: LIB3028-049-Q1-B1-C11.F1
gttgcacacggtgagntcggctggctttaaattgncaatgggtggcttcctcttgatattgctaggatgtgggggcgtcattggcttgaacaattgctggcacccagttctgatgccacaatgcctacattctctcattcaaattacttgtccttgccccttatgagtgtgctcaacatagctagagagtatggattgcaatcatctacagcctcctctgatgagattgacttttgtgctgtatgcctggagaggccatgttcagtggctgcagaaggatgtgggcatgagctttgtgtaagatgtgcactctatctttgctcaacaaacaatgtttcttctgaaatggttggccctcctggctctatcccttgccccctatgtagacatggagttgtctcttttgttaagttgccaggttcccaagcaaaagaaaataaactacatgtgtctcttggcctgtgtaccccatgcatgctacatccacgtgacctagacaagccatccctttctcatacaccagaggttggaagaaatcgtgtagcttctgttcccttcgagatactctgccccgtcacttgtagtccatttccatctatggcaattcccttatgtacctgcaatgatggtccatgtccatcatttgaacctagagaag

SEQ ID NO: 5204 - DNA, 519 bp, Glycine max
  Clone ID: LIB3028-049-Q1-B1-C11.F2
gttgcacacggtgcaagtcggctggctttaaattgcaatgggtggcttcctcttgatattgctaggatgtgggggcgtcattggcttgaacaattgctggcacccagttctgatgccacaatgcctacattctctcattcaaattacttgtccttgccccttatgagtgtgctcaacatagctagagagtatggattgcaatcatctacagcctcctctgatgagattgacttttgtgctgtatgcctggagaggccatgttcagtggctgcagaaggatgtgggcatgagctttgtgtaagatgtgcactctatctttgctcaacaaacaatgtttcttctgaaatggttggccctcctggctctatcccttgccccctatgtagacatggagttgtctcttttgttaagttgccaggttcccaagcaaaagaaaataaactacatgtgtctcttggcctgtgtaccccatgcatgctacatccacgtgacctagacaagccatccctttctcataca

SEQ ID NO: 5205 - DNA, 552 bp, Glycine max
  Clone ID: LIB3028-050-Q1-B1-G11.F1
gttcaattcccttttgtctgaggtgtgtgcattcttgtttaactcctctttgttcctcagacatcccagaagggaaccaaaaataaaaaataaaaaaataaacacaatcaataaaggggagaaaacaaacatgtcattcacaggaactcttgataaatgcacagcatgtgacaagactgtctatgtggttgacttgttaactcttgaaggaattccttaccataaaaactgcttcaagtgcagtcactgcaagggatgtcttacgatgtgcacatactcctcaatggatggaattctttattgcaagacacattttgaacagcttttcaaggaatctggcaatttcagcaagaacttcgcaaagtcttctgagaagcaaaatgagttgaatagaacccccagcaagctatcttccatgttcagtggacccaggacaaatgctcagtttgcacaaaaacagtatatcctctggaaaagatgacacttgaaggggaatgcttccacaagacttgctttaggtgtgctcatgcagggtgccttctcacacattca

SEQ ID NO: 5206 - DNA, 591 bp, Glycine max
  unsure (1)..(591): unsure at all n locations
  Clone ID: LIB3028-050-Q1-B1-G11.F2
gttcaattcccttttgtctgaggtgtgtgcattcttgtttaactcctctttgttcctcagacatcccagaagggaaccaaaaataaaaaataaaaaaataaacacaatcaataaagggggagaaaacaaacatgtcattcacaggaactcttgataaatgcacagcatgtgacaagactgtctatgtggttgacttgttaactcttgaaggaattccttaccataaaaactgcttcaagtgcagtcactgcaagggatgtcttacgatgtgcacatactcctcaatggatggaattctttattgcaagacacattttgaacagcttttcaaggaatctggcaatttcagcaagaacttcgcaaagtcttctgagaagcaaaatgagttgaatagaacccccagcaagctatctttcatgttcagtggaacccaggacaaatgctcagtttgcacaaaaacagtatantcctctggaaaagatgacacttgaaggggaatgctttcacaagacttgctttaggtgtgctcatgcagggtgcccttttacacattcaaactatgctggccctggaggggttctctactggagg

SEQ ID NO: 5207 - DNA, 367 bp, Glycine max
  Clone ID: LIB3028-053-Q1-B1-G10.F2
gggttaacgaatggaagcggatccacgagtgaagagagtttacagaggcaaaagctcagggatggagaggctagcgatgaagaggaggaatacgaggcaaaggacatcgaggtggaggaagtgatcgatcttacagaagaggtccttcaccttgagtatggtcaagagtgagttttataggtggacttggattcgaacattttattcactttttgaggtttagttgggcagcttatttcatctttgtaaaacccaattttgtagtctttcattaattttttttttttatgtggaaggaattccttttactcacaaatttaacgtgaaagacatttttgctgccttctttgggcgaaagtgttcactc

SEQ ID NO: 5208 - DNA, 421 bp, Glycine max
  Clone ID: LIB3028-001-Q1-B1-C8
gcatgcctgccggtctactctagaagatcccctcggggaattccaattccacattttcaagaaataaggaggcaaaaatgttcatatatgaattggaattatttgttttcttattaggcctatcctgaagccaaaggaaatgagatcggaattcctcggggaattccaattccacattttcaagaaataaggaggcaaaaatgttcatatatgaattggaattatttgttttcttattaggcctatcctgaagccaaaggaaatgagatcggaattcctcggggaattccaattccacattttcaagaaataaggaggcaaaaatgttcatatatgaattggaattatttgttttcttattaggcctatcctgaagccaaaggaaatgagatcggaattcctcgggggtaccgagctcgaa

SEQ ID NO: 5209 - DNA, 102 bp, Glycine max
  Clone ID: LIB3028-002-Q1-B1-B4
aaactgggttgttgaggccagttctcacattttgcttgtcctgagtgtaaaagtattgttatattacaagaacagtttttaatgccaaaatataaaacgtac

SEQ ID NO: 5210 - DNA, 261 bp, Glycine max
  Clone ID: LIB3028-002-Q1-B1-E11
tgaaccttgatactctattaattagatgttgacgccgatatggtttggattgtaattaggaatagtacactaggaggatttcagtctctatccatgctggatgagaatggatttgctactcatcctactatgcctttaatttgactactatgcttgcttctattcaacctatgtcaagataagcaagtcaagttaatgcttctagtaatgttcaacttttttgttatacttcagttaatgatactttatcaggttgatctt

SEQ ID NO: 5211 - DNA, 256 bp, Glycine max
  Clone ID: LIB3028-002-Q1-B1-F10
tgaaatgcccgacaatcaaatcatgaatccaaaaacttcacaaatgtatcactgatgctgttgctgagtaattagtttggtttctgatatatgtccctcctcagcagtcttatcatactcaatcagaaaacaatggataaatgtacaaaatctgtttcgaatgatggagttggctataacgattatggatttaacattaatgtttaccaattaccataaatgttgataacttcctttttagaacgtttttttgaac

SEQ ID NO: 5212 - DNA, 287 bp, Glycine max
  Clone ID: LIB3028-005-Q1-B1-C4
gtgattacctgagttgaggctcattctattgtagtacagtgaggaacaaggaagacataatagtactttacttgggaccaaaatgtatggttctctgaacacatatatgtatctgagtttgttttaggcaacatttgatccatgtcaaggaaggtacaactagtagtttttattattttttttttccaagatggatgtgaaaaaaaaaaaaaaaaaaaaagccataaaaaaaaaaaaaaaacaaaaaaaaaaaaaacagaaaaactaactacgcacacaaaaaacat

SEQ ID NO: 5213 - DNA, 214 bp, Glycine max
  Clone ID: LIB3028-005-Q1-B1-F11
gattcactggaaaaacagtggtcttgcttaaggactttattcacagtggcaagagaagtatcaaaaagcgcaacaaggggttctgtggatgctcaaggccttcaactaatgaggactaagtgagaaaatttagaatcattttgttgtaagtaccttctttaattggtatgtgtctaatcttagcataataattttaattttaaaaaacaaaacc

SEQ ID NO: 5214 - DNA, 281 bp, Glycine max
  Clone ID: LIB3028-005-Q1-B1-F2
ctctagaggataaccccggggaattcaaattccacattttcacaaaataatgaggcaaaaatgttcatatataaattggaattatttgttttcttattacgcctatcctgaagccaaaggaaatgagatcggaattcctcggggaattccaattccacattttcaagaaataacgaggcaaaaatgttcatatatgaattggaattatttgttttcttattatgcctatcctgaagccaaaggaaatgagatcggaattcctcgggggtaccgagctcgaa

SEQ ID NO: 5215 - DNA, 409 bp, Glycine max
  Clone ID: LIB3028-005-Q1-B1-G4
ttcaaggttctaaaaggaaaaattataaccctggttaccctgcaaaggaacgttattaaggttggtaataaaacccctaaagctattggaaataccggaaccccaacccggacccttaggaataataacaggacccccattaataaagatgatgacaacaaccttcgctcaaattcaccttaaaaacagcacttcctgataaaataaggtaaggatgtgacccaatttgtaaccggctttgtttaaaaaattgcactccagcttaattatgtgacaattgtctctgaaaacagttttaagtatcctaatttttcagattcttgctggtcaagcagcatgtatggcttacctataatatggagtgcatgaatttgtttcaaatgttggcataatttaaatcaatataaac

SEQ ID NO: 5216 - DNA, 214 bp, Glycine max
  unsure (1)..(214): unsure at all n locations
  Clone ID: LIB3028-005-Q1-B1-H3
tccaaccaaggaacccatgggaaaccccttcaagaaaatcaccaaccgggttaaggcaccaaaaattaaaaccagcccggaaccaaaaaattacaaggcggcaacggtaccttcccggaacaaggttccttgccaaaacttggtaaaggtgattaattccttgctttccntgtgtaaaaaaaaaaaannnaaaaccacaaaaacaaaaaaggac

SEQ ID NO: 5217 - DNA, 102 bp, Glycine max
  Clone ID: LIB3028-005-Q1-B1-H8
tattccttcaacggcacagctgatatctagcttattctgttcaacagtcaatttactgtcatagatgtcatcgatgtgtgtctaaaactaaggcgccactgc

SEQ ID NO: 5218 - DNA, 117 bp, Glycine max
  Clone ID: LIB3028-006-Q1-B1-D1
ttttgttatcaacacagtcctttacataacatcaaatttacccttgaaggacacaggtatcatgtgatgagatcaatcaagcacaacaaacttcaccaagcctgaagtttgaactgt

SEQ ID NO: 5219 - DNA, 303 bp, Glycine max
  Clone ID: LIB3028-007-Q1-B1-E4
tccaaggaaacccaaaggaaaaaattggttgaactgaaattcttggaaaattcctattttgattactataaaatgaaaaagagaatgcaagatgagattgatggtttattgcggagaatggaggcaacaaagcagcaatgggtttaattttatttttgttgcttttccttatgttttcttattcaggatactgctaaatgtgtaatttattgatatgtgatgtgttggtattgaggtggttcccagaatggatggttttcaatttgataaaaacaagttttttggtgtctaaaaaaacaaatc

SEQ ID NO: 5220 - DNA, 414 bp, Glycine max
  Clone ID: LIB3028-007-Q1-B1-F11
ctccgagtcatactatgctgtttattaaatctctcttcccctcctgatcttagatctcgtcgtctgacactactcttaagatcttctgccataaacctccaaacccttctcttatccattgctctctttggccactgagatcatagaccaactctgccatatacaatctttatgtgcttttacagctatatctgtttctgaatcatgccacacttttgaagtccaaacgcattcaactaggaatcaaggtacaaagtacctacacgcctccatattttttgtacttgcatgaaaaactatttgttttcaccttccaaggctgtatatacataaattcagcaactgttgtcctgtgctagaagcaaagtcaagaacaacttgatctttgttcaactggtggatcatttgggctgt

SEQ ID NO: 5221 - DNA, 565 bp, Glycine max
  unsure (1)..(565): unsure at all n locations
  Clone ID: LIB3028-009-Q1-B1-A6.F2
gnaaggaaggcacgcatcaaagaggatccatctctgaaacatattttggaggagatagagactggcggtcctgctgctatgatgaggtactggaataatgaggaggttttgcagaagttgggacaagccatgggtcttgccaattcgggagatgcaggtgcctctgctgaaaattctggggcagatgagaccgaagatttgggaaatgaagatgaatcaattgttcatcatactgctagtgttggtgatgtggagggcttgaaaaatgcactagcctctggtgctgacaaggatgaagaagattcagagggaagaactgctttgcattttgcctgtggatatggcgaggtaaaatgtgctcaagttctcctcgaggctggagcaaaagtggatgctttggataagaataagaacactgctctccattatgcagctggttatggcagaaaggaatgtgtggcccttctccttgaaaatggtgctgcagttactctccagatatggatggtaaaactccaatcgatgttgcgaagctaaacaatcaaaatgaagtcctaaagctact

SEQ ID NO: 5222 - DNA, 570 bp, Glycine max
  unsure (1)..(570): unsure at all n locations
  Clone ID: LIB3028-009-Q1-B1-E3.F2
ngggcaaattccaattcccaattcccaattcgaaacccttattcctttcaaagaaccaaattgagtgatcgtgatggcaccaaagcagagaagaagccagcggagaagaagcccgcggaggagaagaagtcgacggtgggagacaaggctccggcggagaagaagccaaggccggaaagaagcttccgaaggagggaggcgccggcggagaagggaagaagaagaagagaaacaagaagagcgtggagacatacaagatctacatcttcaaggttctgaagcaggtccaccctgacattggtatctcaagcaaggccatgggaatcatgaacagcttcatcaacgacatcttcgagaagcttgcccaggaatcttctagacttgcccgttacaacaagaagcccaccatcacttcaagggaaattcagaccgcggtcaggcttgtgctgcccggtgaattggccaagcacgccgtctctgagggtaccaaggctgtcaccaagttcactagctcttgaactgactattatgccccttcgcttcgatctaggtgtctctgttaggaatata

SEQ ID NO: 5223 - DNA, 153 bp, Glycine max
  Clone ID: LIB3028-009-Q1-B1-E3.R1
tttaaaacatccctcctcgataggaataatatacgcctccccattcaccacctacttccatacaaacaaggatcaaccaatcccatattcttcacttacaaattgctctcccaccaagacaaatccccccccacctcaacatcaaacatcttc

SEQ ID NO: 5224 - DNA, 176 bp, Glycine max
  Clone ID: LIB3028-009-Q1-B1-G2
gtttgattgatatgtcgcatagctacttcatatgtgactacttgttgtactcgtatttaggatgatatgaaactgaattttatcttgtgccttatcattaaggaatatcattgtgttccaattaaattgaatgtcaaatcaatgaaatgagggggaaaaacattggcttctgaaaa

SEQ ID NO: 5225 - DNA, 379 bp, Glycine max
  Clone ID: LIB3028-010-Q1-B1-A2
ctatcttgcctctcttcttctgctactgctgctcaacccacacaccaccctgggagcgcagaacctcatgctaccctaccataacggcgccctcctcaaaggaaccattaccgttaacctcttatggtacggcagcttcaccccaatccaacgctccataatcctcgacttcattaactcgttaagttccaccgcgggggccccacttccctccgtagcatcgtggtggaagaccacggacaagtacagggggggatccactacaatcgtcctaaggaaacaaatcctagaacaaacttattccctcggaaactacctcaacggaacacaactagtctctctctcctcacgcttcgaccacctcaacgccatcaacgtc

SEQ ID NO: 5226 - DNA, 566 bp, Glycine max
  Clone ID: LIB3028-010-Q1-B1-A9.F2
gtaaattaatttctcgtatcgaaatcatttccaccaccacaatttttttttatttccgtttactaaagattagtaattgtttggtttgtgtgtagattttgattcgattcgattcgattcagtcgaggttttaagcagcagcaagatgtctgggcgtggaaagggaggaaagggattgggaaaaggaggagcaaaacgacatcgtaaggtgctccgcgacaacattcagggaattacgaagccagcgattcgtcgtttggctcgcaggggtggcgtgaagcgtatcagcggtttgatctacgaggagactcgcggtgttctcaagatcttcttggagaatgtcatccgtgacgccgttacttacacggagcacgctaggaggaagaccgttacggctatggacgttgtttatgcgcttaagaggcagggaaggaccctctacggatttggtggttagggtttttgcttgattttcctcgccagggaaaagtcttgctgtcaagaaaaacaaacgaggcatggattggggtagtttttttttattttttatggtggtgtttgtagtg

SEQ ID NO: 5227 - DNA, 585 bp, Glycine max
  Clone ID: LIB3028-010-Q1-B1-A9.R1
cccccactccccacccccccacccccccccccccccccccccccccccccccgccccccccccccccccccccccccccccccccccccccccccccccccccccccaccccaccccccccccctctcccaccccccccccccccccccccccccccccccccccccccccccccccccccccccccccccccccccccccccaccccccccccccccccccccccgccccccgcccccccccccccccccccccccccccccccccccccccccgccctcccccccccccccccccccccccccccccccccccccccccccccccccccccccccccccccccccccccccccccccccccccctccccccccccccccccccgcccccccctcccccccccccccccccccccccccccccccccccccccccccccccctccccacccccccccccccccccccccccccgctccccccccccccctcccccccccccccccccctcccccccccctcccccccccccccccgcccctcgtcccccccccccccccccccccccccccccccccccccccc

SEQ ID NO: 5228 - DNA, 264 bp, Glycine max
  Clone ID: LIB3028-010-Q1-B1-B2
cttttggcatccaaatagttgattaatttcagcgacttgtcttaggattttggacccctttttcgcttgtaactaggttgctctcatctcatggctttgtatcaaactatcctagttgtaacaaggatttggttttaatcttgaagggctgaatgtatttaattattactattatatttgcttactttgcaacttctgtttttgctttgaagattctcattttgtaatgttggaattagtattgatagatttataaattcggag

SEQ ID NO: 5229 - DNA, 134 bp, Glycine max
  Clone ID: LIB3028-010-Q1-B1-H3
aaatgctactagtcccttttggtggcattctatgatattatgtttttatgtattttggtgtatcactccttgggccttgtttgcctttaatgagagtggcttattaatatcaatatatcacctaccaaactaaa

SEQ ID NO: 5230 - DNA, 407 bp, Glycine max
  Clone ID: LIB3028-010-Q1-B1-H4
ctctttttctctctctacactcaccaatggacgactctcacaacaggaagcgacttcgccaccactccccaaagcacccccgactttgttctaactcctccgacactcacccacttgactcgccccagtttcaactctcccgcgtcgacccggaccttctcaacatgctcaatgatgccgagaacgtcacggagcgtgaccctaccatgcagggtcttgactctgttattaagagtttcgaggaagaaatactttctccgcttccgaacccgaatctagcgtccgaagcagaggtgtttaatccgaacctagggtacttgttggaagcatccgacgacgagctagggttgccgccggcggtagcgcccggcgaggatgcgacaaatccccaaacacttgattcgggc

SEQ ID NO: 5231 - DNA, 260 bp, Glycine max
  Clone ID: LIB3028-011-Q1-B1-D12
agaagatgctgcttcccatgtttctggtactgaacccatcccggcatcaccctaataacgagatcttcattttcaaccctataatttcatctttgtagcattgtcaaattacgagttactgctttacgaattataatatgggagtgacaagtaattagagagatactgttctgagctgtgtatgttcaatttgccatttggaggttttctgaatacatatgccctataatatgaggaaaagaaatgaaattcaggaattc

SEQ ID NO: 5232 - DNA, 302 bp, Glycine max
  Clone ID: LIB3028-012-Q1-B1-B6
gccaaacttcaaaatgcaacatcagtggaggaggccctagagattgctcgggaatccttgcaaggcgaagctgctgtctagtaccgatcttggtaacatcattctgtaatttatcttctcttacggccagattatcagtgactatctgtcatcatctgagtagggattgctccttaagagaataattttcattacattctcagtcacctgacattagtaatggtttttaactggaatgtctaatttggatttgatctggtgccataaggtatccttgaattttctcaatataaaagaatggc

SEQ ID NO: 5233 - DNA, 225 bp, Glycine max
  Clone ID: LIB3028-012-Q1-B1-F3
ctcccgggtcgaaagacttgggtcatagtgtaaattcttgttttctacatagtcaatgttttagcatattgatatcaataaattgtggaaatagaatagtattacttttagttataacttttgagaacgagaatgtttgacctgtacatgtatcagtatttttgactaagagttgttcgttttgagggtttacaagacgaacgtgtaccaacaatcggaagccag

SEQ ID NO: 5234 - DNA, 235 bp, Glycine max
  Clone ID: LIB3028-014-Q1-B1-E8
gttacgagtgatgattattaatttattattattatgattattatgagtttatctatgtataatagagagagagagagagagatcttacagcatttatataatgaaccatttattgtaggtgttagtgagaaataagaggaattttgatatcctcttttattatattgttatgatttcagtgtgtaatatacatattcattcaatgaatttaaaatacagggaaacaaggcaatgc

SEQ ID NO: 5235 - DNA, 565 bp, Glycine max
  Clone ID: LIB3028-015-Q1-B1-D2.F2
cctcgttctctgaattttaattgacttttctcccctcataaaaaaaacctaccaatggctcccgcaaggcagagaagaagcccgcggagaagaagccggcagagaaggccccagcggagaagaagccgaagcggagaagaagatatcgaaggaaggaggaagcgagaagaagaagaagagaacaaagaagagcgttgagacctacaagatctacatcttcaaggtgttgaagcaagtgcaccccgacatcgggatctccagcaaggctatggggatcatgaacagtttcataaacgacatcttcgagaagctcgcccaggagtcatcgcgtctcgctaggtacaacaagaagcccaccattacttccagggagatccaaacggcggtgcgtttggtcctccctggggagttggccaagcatgccgtttctgaaggcaccaaggccgtcaccaaattcaccagctcttgattggtttcgtgtgtttatgtcagggttttctgttagcccgatttaattagggtttcttttcctttttatttctttgagtatgtagatgtaaaatta

SEQ ID NO: 5236 - DNA, 67 bp, Glycine max
  Clone ID: LIB3028-015-Q1-B1-D2.R1
ctttttcacaaaaccgcaattatattctttaaaaataaaacgctttaatcctacatctacatactca

SEQ ID NO: 5237 - DNA, 224 bp, Glycine max
  Clone ID: LIB3028-015-Q1-B1-F9
caaggtttggttgttcgttgaggacaattgagtgaagcaattatctgagtatctagattttattcaggtggaattttttgatcttaaacagaggataagagtgtaagttgttttgttacgatttatttttccacttattttagttggctggtgactctaattatactactcaactttggcatagccattattgaagttttccatttttattttacaaaccaaag

SEQ ID NO: 5238 - DNA, 310 bp, Glycine max
  Clone ID: LIB3028-016-Q1-B1-C2
tagagttcaaccaactagtgatgcctcaactaactaatcaggtccaactgggtataacggcggtggtgtcttcgtatgctagtcgatttgatgattctttgatatagtcagcttctcgtgttatctctaatggtcattgtgtggcaatttactatagttctaatttgtcaaaagtatattactttctttttttcgcgggggcactgctaagtcgcattttgtcctcgtcttctttaatgttgacactttctgtagtacctttttatttaaagattaagtaattagtagtttcaaaaaaaaaaagagagag

SEQ ID NO: 5239 - DNA, 347 bp, Glycine max
  Clone ID: LIB3028-017-Q1-B1-G12
atgacattagccaaagttgatatgttaagttaatattggtgaagtgaagctcttcttcttacgatagggtgctcgtgaaagagaaagagggaaccattcgagattcgtgtggacatattagctaaacgtcgtgacttttggattccaagaaaaggcaattaaggaatggaatggttggcctttaatggcaaggacgacctttaataatccgggtgggaacttgaggaaagggacaggaatgaacccagtaggagaattttcctttccaaaataggatcgaataaacctatgttaccggaacagttctagcagttacgagacatgcattataagtagcacaaaattcc

SEQ ID NO: 5240 - DNA, 159 bp, Glycine max
  Clone ID: LIB3028-018-Q1-B1-A3
gagaaactttgtaatgtaccagctaacatttcatctactagtatgtccgaagtgaatgtacttatgtcaaaactattaaaaagtggcctgctggataacttgaagtgcttcatataactgttccaaaatgacaatcagacacttaacagaaagcacaag

SEQ ID NO: 5241 - DNA, 225 bp, Glycine max
  Clone ID: LIB3028-018-Q1-B1-H7
tcgtctctgcctgctcgacaacttcgttcgtatatgttctttttattcaagttatttattgttgtgaatgtctgggagtgaacagattcttgagtgagtatttaaactgtaagatatgggaagataaaattcaaataaagccatttatggcctatggggcgtgtaaataataccctaggaagtttgtaattatagttcatggatatttctttgcaattcttaaaa

SEQ ID NO: 5242 - DNA, 253 bp, Glycine max
  Clone ID: LIB3028-019-Q1-B1-D7
aaacataattatcacccccacaaggtcatatttatgtatgggtcccagtaatctcatgctttggtttttctttttttcattcttttagatgtcaatatgtgggatatgatgtttgtagcttgagttcaaagtgctctatttccaatggggtatcaattattatatttaatcacatgccaatggtgcaaaaaaagaacaggatcgaccaataacaacaaataaagtacgaatcggttacaagagagtaatacag

SEQ ID NO: 5243 - DNA, 135 bp, Glycine max
  Clone ID: LIB3028-021-Q1-B1-A1
atgcgatgtggtgagtgaattgcagagtccgcaatgggaagtgtatgaagcgtaatcaaacttgaattgaattgaagctctgttccttcaagtgacgacaatctcgagggtcaccgaagatctcgggtcgtcacc

SEQ ID NO: 5244 - DNA, 180 bp, Glycine max
  Clone ID: LIB3028-021-Q1-B1-B11
gcccaattgtaaatgactatgtaccatatcaaccaacacaagctgcaattttaagggaaaatgcagcgacctgtggttactgcagctgaagctgctatagttgattgtgtcgtttggatgatgattgctccctacaaatattctaatattttttactttctaaaacaaaatggattgaac

SEQ ID NO: 5245 - DNA, 115 bp, Glycine max
  Clone ID: LIB3028-022-Q1-B1-G4
atgtataaaaggatctacttgtccacagtatccttcaattttgggtttgggcagtgtgtttctagtgaataaaaagagagaatgagagttatgatagttatgatatgaagaggag

SEQ ID NO: 5246 - DNA, 53 bp, Glycine max
  Clone ID: LIB3028-023-Q1-B1-A12
aaaaaaaaaaaaaaaacaaaaagaaaaaaaaaaaaaaaaaacaaaagataaat

SEQ ID NO: 5247 - DNA, 561 bp, Glycine max
  Clone ID: LIB3028-024-Q1-B1-C10.F2
cctcgaacccggccacttcgccatgtccgagcaaccatgcttgccatcgggaaggccacctccgtcgacatctgccgcttcttctccaaacctggcccctacgtgtcctgcgacacgatggagtttctattagcgcgctacgacggcgagctagacgtggatgcggtggactccgaggggaggacgacgatccacgtggtggtgagggaggggcacacgagggttatccggttctgcgtcacgatggggggaaaccctaatcgcgtggattcgaaggggtggaccccactctactacgcagcgtggaaggggcacgtgaaggctgcggagtgtttgttggaatgctccaacgtgaagtgcgtgagggacagggaagggagaagaacattttctgttgtcgcggagagtgagcacgaacattctgttattgacaaagtccagaaagaaacaaagagccgcgctggtttttaattagattggattctggctgtttatgggtattttggtccaattctgctgggggaagaaattgaagtggtgaagactaaagacaaatattgc

SEQ ID NO: 5248 - DNA, 143 bp, Glycine max
  Clone ID: LIB3028-024-Q1-B1-C10.R1
ccccccccctccccccccccccccctccctccccccgccccaccccgcccccccgccccccccccccctccccccccccccccccccccccccccccccccccccgcccgcccccccccccccccccccccccccgccccccc

SEQ ID NO: 5249 - DNA, 356 bp, Glycine max
  Clone ID: LIB3028-024-Q1-B1-D9
aggggatccaccaagacccttggcaacttcgttaaggctacttttgattgcttgatgaaaacctatggattcctgacaccagaattctggaaggagactcgcttctccaaatctccattccaagagtacacagatctattggcaaaaccaacagggaagactctaatcttggaggaggaaagggtggatgcttgatttgctagttttggttttatggatgttttagagacattgttatttacctttgttggttctgtgctttacttttggttttgatagacggtggtatgtctctgtatggattttgattgtttcaagttttaatttaattgactgtagttttgaataaaaagact

SEQ ID NO: 5250 - DNA, 91 bp, Glycine max
  Clone ID: LIB3028-025-Q1-B1-C3
gtatctacagtttctggtatttagtaattaaacaaagtggaagcacaacttgaatgataagcaagaaacaattttcggtacaaatcatggc

SEQ ID NO: 5251 - DNA, 347 bp, Glycine max
  unsure (1)..(347): unsure at all n locations
  Clone ID: LIB3028-025-Q1-B1-G2
aacagatcctcagaggcaccactgagtacatgcaccccatgaatcttagcaccattatggccatcgattccaggacttgatcaatgcctccttccttccttcgttttttcaatttctctcgcaagtcttcacaagacataattaagttgtagttggtcatattctatctatttgtgccccttaattaagtttatttcatcttctcatgatgatcccctagctagtgcatgtggtttgtgctgcaaagttatcatgtactggtttgcccctccaattgttattgctctcttggaagtaattttggtctgtcaccagcaataaaatgttttctggtccttaaacaangn

SEQ ID NO: 5252 - DNA, 162 bp, Glycine max
  Clone ID: LIB3028-026-Q1-B1-A1
atatacacttgcaaatttgtgtggcttcataatcatcaggatagatctgaaccttcacttcaaatctatttccaagatcattatattacctgttttgcctaagttactggtgtaattactcctccttatataaactttatcatgtttgaattttaactccat

SEQ ID NO: 5253 - DNA, 295 bp, Glycine max
  Clone ID: LIB3028-027-Q1-B1-C10
atcttcactcagaccaaccttctctgagaaggtggacaccaccccattcgggactgtagttgagaatttctatatgactgatgccattacaagggcatcaaagataatggcacaatgcactgccatgctgttgaagaagtgaaacatggattttttattttttggtttcaataaagaagattcacgtttttcccttcctggccatgcaagattgcttgccaaaaacttattggatgttggaagtatccaatacattaaaactaggatttatctgttccatttgtacaaaatcaat

SEQ ID NO: 5254 - DNA, 345 bp, Glycine max
  Clone ID: LIB3028-027-Q1-B2-A1
atccggtccaaggcgaaaaccggttgaataagctcaagaattgagatttgtgggtggtacttgacatggattgaggaatgaagcgactttgtcatgttatttggttggcgattgtgttgttgctaggaaattttcgaaaatgtgtttctcagttgccccaagtcctgattagtctttccccccaagtgtttggatatgttctatgttgtggagtatcggtgttagtcgaggctgggcacttcatggacgatttaagggatctgggacagtttgaactcctaggtgaagaaaatgattctcacaaagcagtaccgatgcatacactcagctagctgtcaatgtact

SEQ ID NO: 5255 - DNA, 329 bp, Glycine max
  Clone ID: LIB3028-027-Q1-B2-B4
gcaaaattcatatcagattcagaggctattctggtgggttcagcaagaaatgtagtacttggaggagcgcaactcggatgacttgttttggggtactaattgctttgcttattttatgtttttatgattttgtatttgtattcttttatggtgaattttttatgatattgttgtaaacccaacatatgtagaagaatcttttcatttaggtgtgcaacttcgtgctgagtagtttactacgaagttgggtgcacccgtggttgcttccacgtgaaaatttcgtacataataatacttccaaattcgtgttcaaaaattcataacccagt

SEQ ID NO: 5256 - DNA, 297 bp, Glycine max
  Clone ID: LIB3028-027-Q1-B2-C10
atcttcactcagaccaaccttctctgagaaggtggacaccaccccattcgggactgtagttgagaatttctatatgactgatgccattacaagggcatcaaagataatggcacaatgcagtgccatgctgttgaagaagtgaaacatggattttttatttttcggtttcaatcaagaacattcacgtttttcccttcctggccatgcaagattgcttgccaacagcttattggatgttggaagtatccaatagattaaaactatgatttatctgttctatttgtaaaaaactgatac

SEQ ID NO: 5257 - DNA, 192 bp, Glycine max
  Clone ID: LIB3028-028-Q1-B1-H10
gcatttggagaatgtgtactactctgaaatgaaagatgccggtttctttgaagcagattggaactgatgtggtatcgactgctagattagattaataaggcctcaatgtactaattgctgggcattcgttcacgaaatttgtaaataaagtaaatattttagtagatacattttttaaatgaaaaaatattg

SEQ ID NO: 5258 - DNA, 133 bp, Glycine max
  Clone ID: LIB3028-030-Q1-B1-B8
gacagctacaattatgacagctgatttacaacacgaatgtatttatccatttaagacgtagacgtatcgcacctgcaagtgttgcgtgctttttatatgaacaaacgatcctcatttcattccgtgtttgacc

SEQ ID NO: 5259 - DNA, 355 bp, Glycine max
  Clone ID: LIB3028-030-Q1-B1-G6
actccattccagaatgcttcgttacctgttggtgttcttcttattgggcttgggaacccgggtggagtcacacgaggaatcgggtcattggagctgcgagtccgagtcggagatccgagtcgagactgagttcaaacccggtgtaatcacactggatggtcacgctgatgattggaaggacattgatgggtcctactttcccctccttcccgcccttgacccagatgctgaaaatgaattcaaagggggaaagatgagcgttaaaagtgtccatgatggccgcgatatcttctttctgctgcaagtagatggtgactatgcccaatccaaaagtgaaagcaataaatgtccaacc

SEQ ID NO: 5260 - DNA, 171 bp, Glycine max
  Clone ID: LIB3028-034-Q1-B1-A9
tctacgctagctgatccctcggggaattccagctccacaatttcatgacacaaggaggtttgcgtgacacaatggaatctggaattaatgtcgtcttcgtacttcggcctacacttacaccctctgaattgagatctgaattcctccgcgaagacaaagtcgatgcgtaca

SEQ ID NO: 5261 - DNA, 285 bp, Glycine max
  Clone ID: LIB3028-034-Q1-B1-G12
gttcctttcaaccaaagtacaagaagatgaggaacattataggtttggtttctagagctattatacctaagttttgggtggtgggtgtaaatagtggcttggggaagaagacagtgacaatgtactctttacaaataggtggattgtctagatatggaatggtgaaataatatgtagtacaactaggttttcctaaatcttgtgcctacattcattcagtgcaattacaattttaatacgttaatttaatgagttatagatcattgaattgttaatttgacacgc

SEQ ID NO: 5262 - DNA, 163 bp, Glycine max
  Clone ID: LIB3028-034-Q1-B1-G8
gtgaagataatttcggctctttacaagtaaagaatgaaattttcatatggtagatttagttgatcaatataattattgttttaatttaattccttgaattaatttaattattgttcttcgacactttattcagtatattattaatttttttagaaccaaaaat

SEQ ID NO: 5263 - DNA, 265 bp, Glycine max
  Clone ID: LIB3028-036-Q1-B1-C3
gtcttctgacccattggagactggatcacaagctgcacagcttgtcatcgacatccgcaagaggaaaggctttaacgaagcagatgactcctctctccgagtttgaagacaagctttagattgtttgaactatttaacttacttttgaacttagccgaatttatttctcatatgaacaatgttacttaagatttaagttttgtccacttttgtttgtggttttgtcccttaatgtagtacttctgttaagactgctgaaatacag

SEQ ID NO: 5264 - DNA, 185 bp, Glycine max
  Clone ID: LIB3028-038-Q1-B1-A7
gttgtatagtgcacgagtcaaaattcaactttattgtggctgtgttatattcatggcgtaatctttctattctcttggtcgtcatacaaaatcactgaatgaatttcacgatagcaaaatgccgcagctgtagtaagatggtattgcttgcaattgaagagactatggatgtttatttgaaacag

SEQ ID NO: 5265 - DNA, 241 bp, Glycine max
  Clone ID: LIB3028-039-Q1-B1-A5
ggtgacatgacttccttttaaatatcaggtgcagtccatttatatttcaatggcttattgtggtgacatgacttccttttaatttaaaatcggtagggggcgaatgtgaagtgcggtttagtttttaaggttaataactctaaatcctcgtatcctatactttataatgtttctatctacttattaatcttcttttgtatgataaataataatcttcttttgtatgagtaaggagggaagg

SEQ ID NO: 5266 - DNA, 258 bp, Glycine max
  Clone ID: LIB3028-039-Q1-B1-B6
gtagctataatcatgtgtttcagtcatcctcagtttgtttattgagaataagaaacgagacttgctctttcaatatgtatttaggagaataaaattatcttaggacatgaagtgcctacagcaagcggattctggattcatataggtggaatttttggtggaagtggattatcttgaatcctgtatttcatagatggacttcgtgtagcaatgagtatttaattatttagtcgaaagatgttgcatgtctaaaagggg

SEQ ID NO: 5267 - DNA, 208 bp, Glycine max
  Clone ID: LIB3028-039-Q1-B1-C2
gcatttcttaggaagatatgcagggaaaattgtgtaatcttcaatgtccctcatgagagtctcttaaatgttgggcagattttctatgtatagcatagccccatatccttgtgattgccattttttttgcaaaatgagctgagtgtagcatatgaacaacactttgcttatggtaatcaagatacaattcgggattgacttaggagag

SEQ ID NO: 5268 - DNA, 70 bp, Glycine max
  Clone ID: LIB3028-039-Q1-B1-C6
caagtcaatgcctacatccttttaagtcaatatatcaaaattacagcgtttatttaagagaaaggagggg

SEQ ID NO: 5269 - DNA, 310 bp, Glycine max
  unsure (1)..(310): unsure at all n locations
  Clone ID: LIB3028-039-Q1-B1-D7
ggcggggttggcttctgttttctcctggtttgggtcaagattaacccttttatcagcagacctgacagtgcaagcatttcccagacctgcatttctatagattgctaagtcatctgcctatataaaaagttttgaccatatgttaaaaatatggatgatgatgatgattgattgtgatttgagccgcagttgaaatgtgtaagcactttaaatgtaaggttgcaaacatggttgttacgtcgtttccatgcattggatgaaatttcctgtgtaaagatcaggcgttgactcagggggagggnggggngag

SEQ ID NO: 5270 - DNA, 253 bp, Glycine max
  Clone ID: LIB3028-039-Q1-B1-H11
agaaacaaccgcaagatggataacgatgagccctatggtgaagcaaggatgacaaaggcacaacctagtgcttttcatctttagtggcactatttggatgccaaaacgttaatttcagctacttgtcttatgattttggacctttttctcccttgtaactaggttgctctcatggttttgtatcaaacacccgtgacgtgttttaatcttgaaaggctgaatgtatttaattattattattaacagaatagag

SEQ ID NO: 5271 - DNA, 286 bp, Glycine max
  Clone ID: LIB3028-039-Q1-B2-A6
ctatatacacactactcttcagccttttcatatttcacaacaaccctttgccaccaaaccagatcactgatctttttgctttgctcattcctgagtttgaaaaccatagaaccacttcactacacaacacttactgtgccctacaggaatcgagttcaatcgcagactcaggctcatggagtgtgaacgacctgagagcctgtgagaatgctggacatgtctaggacaatgagacgcatgatcgtcggcacatgtgtagcgcacgctgttggtggcaagacgacac

SEQ ID NO: 5272 - DNA, 89 bp, Glycine max
  Clone ID: LIB3028-039-Q1-B2-B8
gtgcaactgatactgatggtgattttcctgttaagttttgattcaagagtaataaagactcttctctatggtactataaaaagatatat

SEQ ID NO: 5273 - DNA, 136 bp, Glycine max
  Clone ID: LIB3028-039-Q1-B2-F2
gtaaacaacatagaggaagaatgacaggaatatcctatcgagggaatcatatttgcttcggaagatatgctcttcaagcacttgagccagcttggataggatctagacaaatagtaacggcatcgaggccagtgtc

SEQ ID NO: 5274 - DNA, 375 bp, Glycine max
  Clone ID: LIB3028-039-Q1-B2-F4
ctttgctcagtgaagatgcatctcaggatgctgctggaaaccctatgaacctttggagcttcgacgacctgccttccatggcaggagtcttctgaacaccttcatatccctttttatgtaaataaagctacaagaattgtgatcgtgatgttggtgatggaatccacagcaagaaaaccaacctgcttaaagcatatgtggagtttacttatcttgtagctaatgcagtataggactatatataggtttttatagggtatcctttgtgtgaaactcatcagacctcgttttcaggggattttctgtttgatgtccataaggattatcaattatgttatatatggtctgggatacagccaaaaacgccgcaacaat

SEQ ID NO: 5275 - DNA, 186 bp, Glycine max
  Clone ID: LIB3028-039-Q1-B2-F5
atgaattttaaggttgctaagtccaatgattatcaccaacacaacattacctcaaagaatgttgcatgttaacagtagtcgtatctttgtaaatgtgtgtttcaaattcaatgtagcaatcatgggacttatgtacgtttctaatcgtagtgtgtgatagtagaaagatttgaatttctcttcaag

SEQ ID NO: 5276 - DNA, 342 bp, Glycine max
  Clone ID: LIB3028-040-Q1-B1-G7
cgatactaaacataaaatagatatctatatagatagataatttgaaacaaaatcaattaaaatatggaaaaggtactctaggggggattttttgtcttttcctagagtccgattcctattccttcttgtttgtgtcgaaatagaaatattctaaaaatatcaataaaataatcttttttaaccccttcctgaaaaatcctatatcttagtttctattttttccaacttagaatatttctgccatataatattttattgcatataatacgtagtgaacaaataaaaagagagggggttggggaatttgattaaacaaatttaatttcctcaattaacttgtaa

SEQ ID NO: 5277 - DNA, 122 bp, Glycine max
  Clone ID: LIB3028-041-Q1-B1-C11
tacatttataagtttttcaatatatccttacaaagctttttttttaaaaagctttgtaaggataaatttataactttttcaatatatccttacaaatttatatttgttaaaataaacacaac

SEQ ID NO: 5278 - DNA, 233 bp, Glycine max
  Clone ID: LIB3028-043-Q1-B1-D4
aaggcgaaaaacccccttccatgaacaattttgccagaaggaatgccaaattcaaataaccaaatataaataaaacaaaagcatttgttttgcaataaaaaaggcgcagattaaggtgaaccatgtattaagtgttgtatatttattatatatataatccttaaaacttttatttttacaaaaaaaacatcaaaaataataaaaacaacaacaaactggcaacaaccaaaagt

SEQ ID NO: 5279 - DNA, 181 bp, Glycine max
  Clone ID: LIB3028-043-Q1-B1-F6
tgggttgttttatcactgtagtatttgattaattaatagtaactatgttagttcatcagttcactttgcatggatagatgctactagggaaattaaagttatcctcctttcgccttgggacctttcttgctccgttgagtatgtagaagtattgcagatttaaaatagaaacttgcgatgc

SEQ ID NO: 5280 - DNA, 187 bp, Glycine max
  Clone ID: LIB3028-044-Q1-B1-A4
aattgatcaatcatatgttctatgttcgtgaatatgcgtggaagtggagacaacctgttgataaatttgtagctgaccctgtatgtgtctgaactttaacactgattgatgaaatttgcagctcacttggtatttattcaaggagattggatcagatcaagctacttcaatggaggttctgagattc

SEQ ID NO: 5281 - DNA, 204 bp, Glycine max
  Clone ID: LIB3028-044-Q1-B1-B3
cccaaagggacaaaaaggttgtggttatggcatacctagagagcttgctgccacagccaagcccctaaaaacaggacttcatttttttgaacttggcaactgctcctcctatattgtctaatgatgttcatacctgcgctttgttctgtgcgttatgaaatgtaatgaaggggggacaattttcagtctcaatggaggcaacac

SEQ ID NO: 5282 - DNA, 137 bp, Glycine max
  Clone ID: LIB3028-044-Q1-B1-E2
gaatccgttgcatcattagaaaaaaaattgtcaagggtggtggtagatttggtaacggatttgaatctcggaatgaaaacataaaaaagcaagtgggttttggtatttaaataagactcatccgcaaatcaactcac

SEQ ID NO: 5283 - DNA, 328 bp, Glycine max
  Clone ID: LIB3028-044-Q1-B1-E7
aaatgcttctagagctatcataacatcatcatcttcaaagagatgtgtagaagagtatggaaatggagagtgcaatttccatgctttcctttgttggttccaataaaagtaatgtgtggttttgtaacttttcttttgagggattttctatttcatgttgagttgggtgcctcattacatgtgtttcaggttcagggtgtcttgtgtcctggactacatgataggtgttgagggttgttctgttatcggaatacagaacacttgtactgtggttttctcatgttttggtgctatagtctcgagcatttcttgcgtttaaaaaagaggg

SEQ ID NO: 5284 - DNA, 576 bp, Glycine max
  unsure (1)..(576): unsure at all n locations
  Clone ID: LIB3028-044-Q1-B1-F5.F2
caacggcacagcaggtggtnggaagcatcagtgccaatgacaagaaagcagtgtacaggcacattgtgaagtcagaagtgaatctcaatgctattattagtgggaaagcaggcttttcttccaacacgccttcttcaattaatccaaacatatcatgtgaaagtaagactccacaagtagaggatatacaagatggttctagtgtgcttcacctggcatgcataattagtgattctgcaatggtagagctgctcctacagtatggtgcagacataaatgctattgattctagagggaggacacctctacattacagcactatgagagggaagaatgcaactgcaagagtgcttattacaaggggggccaatccacttgccgtagacaaagaaggcaacactccttttaagcctgcaacggaacctgacactgcaggcaaagaaactcttgctctaaaccagcaaatcgcatgccctcaaaacttaatagaaaaatgattcatggggtcaccttgtgttcgagatagaaatttggcaagagagcaattgacaatgtgtacaggaccaactttgtttt

SEQ ID NO: 5285 - DNA, 244 bp, Glycine max
  Clone ID: LIB3028-044-Q1-B1-F5.R1
actgttataagaaatgtttattttctttctttcttttctttttcggaaaaagtcgcatcttccattcttctcttctattatctattgctctataaaacaaagttggtcctgtacacattgtcaattgctctcttgccaaatttctatctcgaacacaaggggaccccatggctcatttttctattaagttttgaggggatgcgattcgccggtttagggcaagagtttctttgcctgaagtgtc

SEQ ID NO: 5286 - DNA, 264 bp, Glycine max
  Clone ID: LIB3028-046-Q1-B1-H9
attgaatccaacatagtgattgttctttttgatcaattgacggaattgtaacttttttaatccatttactgtcttaccgctcttggattcgtttttccttctttttagactggaaatagcttacgagaccttgtatgtgtatccgaaagctgtctacatatgcctcacttgtactactgttagatctagttgcttgatgtaagagattcacacatgataattttcataatatatatcctattatctcatcacacatgtcgaagt

SEQ ID NO: 5287 - DNA, 239 bp, Glycine max
  Clone ID: LIB3028-047-Q1-B1-B11
tccaaaacaaacccaaaaattggttggggggctaaaaggtgattgttacaaaaggcaatatacctttgccggttggaatccccaggataaggaaaattaaaacaaaggccaaataatgggggacaaaatgggaattccacaaggcccctggcaagaaaaatttccaatttagccaacaatgaattgccggttttaacttaaggcaaccaaattcctccagaacaaacctgtcccttaaa

SEQ ID NO: 5288 - DNA, 254 bp, Glycine max
  Clone ID: LIB3028-047-Q1-B1-C12
tccaaaatggaacttgtaagggtgcttccaattgaaaaaaacaaggtcaatgtggcatgctttcacccttttgctggggaaggacaattttatggaacaaaggaaggaaagcttagggcccccaattatgacggtgcccatgcattgaatggaactggaccaagttactttcctgaggaaacaaccgttggggtcattcattgaccaaggtttaaacaaatgattggccatgtaattcaaacatcggcttcaaa

SEQ ID NO: 5289 - DNA, 261 bp, Glycine max
  Clone ID: LIB3028-048-Q1-B1-E1
gaaatttatatattttgtaatggcccaatcgcgtataacatagcagagaattgttgtatctttagtattattatccccacccatcctattacaagttccttgggggtgggggatgtggcagttaatgtatacagcttagctttatatgttactctaatatgtattatatgtaggttttatcaaattttttgtcggattttcaagattgtctccgtgacttgtctaataaaaacattttatggatagctttccttgtgaaaa

SEQ ID NO: 5290 - DNA, 417 bp, Glycine max
  unsure (1)..(417): unsure at all n locations
  Clone ID: LIB3028-049-Q1-B1-A3
gacataccttctccagccatgtcttggtggggattccaaaactttgatgtttgtgaacatctcacctgatccatcttcaactggagagtcactttgctctcttcggtttgctgctggagtgaatgcctgcgagattggtatcccgcggcgtcagacatccacacggtcccttgattctcgtttgagcagcggctaaaagagaggccacactcattatccataataaccaaagtaactgtcatttgtaatgctttggatgggataaaagttgtctttgacccatgtaactgtgttaacttttagagaaatgagcttgtataaaattgattgtagaggctaagctttagcctcaggggtgcaacaactgattatcatttagttgtgacattattatattcaatttattgaaacananng

SEQ ID NO: 5291 - DNA, 471 bp, Glycine max
  Clone ID: LIB3028-049-Q1-B1-C6
gaagaggtcactgccggaagaagggagcaacaccatctttcattttccggcgatctcttgtttcttccatcatcaccgttttccggcgatccctaatcctcgcaaacagaaatgacgacatcaaggcgccttgcggacaggaaggtggagaagtttgagaagaacatcacaaaaagaggatttgtgccagacactaccactaagaagggaaaagactaccctgttggcccagtgctgctcggtttcttcgtctttgttgtcattggatcatctctcttccagataatcaggacagcaacgagtggaggcatggcttaaatggagctttgttttggattttgtgtcatcttctctttcttagcctcctcgtataaaatgctaatacttctctacatgtactgtacttgtactagaccctgttcctgttcatgttttaatgaactttataagaattttgaattaaaacaagtg

SEQ ID NO: 5292 - DNA, 504 bp, Glycine max
  Clone ID: LIB3028-049-Q1-B1-E6
tgacgatgagtggagccagcacaatgcaaagaaacttattgatacacgtcaaaacggattgcgcaattcaattcctaagcactttccatattttcacgttgaatttggtcgaaacaagggttttgtccatgttattgatgatgaagagcagtttaacatcagccttggcttgaatgtcataagaggcatgctacatttggcatatgaggacatgtataggcgacgacgctacgaggctgtggaggtacaagagcaagcagttgaaagcttttccaaagagtggaaacattttgactggacaaaacagcttcatgaaacttcgtaacaaacattttacagataagttaatgtacattaatattgctcatgtgccacggtacactgtaactttactgatagaaatgaattttgtactgaacacccccctttagaagaacaaagtgaaataatgctcattcgttgttcaaaaaatcgtaaaagaatctatcatatactatgcaccac

SEQ ID NO: 5293 - DNA, 118 bp, Glycine max
  Clone ID: LIB3028-050-Q1-B1-B3
tatttttgtgccatgaaaatagcataaatttgtgtgtaaattatgtccatataaagtgttatacacttggaaattgacataatttacacacaaatttatgctatttttgtgccatgaa

SEQ ID NO: 5294 - DNA, 570 bp, Glycine max
  unsure (1)..(570): unsure at all n locations
  Clone ID: LIB3028-051-Q1-B1-A12.F2
agctgcccgaagtgtgagcgggcaggtccaaactccagnaagagtccaatacttagattatctatctatcaccctcagagtcgaaccagacacacttccacgtcaccaccaccaccgtggaaggtggagcgtgaggctgtttccggtaacctctcccggcggcgctgagtggtgatcaaggaaatgggtcagacgctgagttgcgtgcaacagcacgaggaccatggtgtgctcttccctgcacttgcaagtggagaattggaggttgttgaggccatggtggaggaagaccccactgtgttggaacacaccattggctgtgacaggctttctcctctgcatgtcgctgctgccaatggtcggatcgaggttctttccatgttgttggataggtctttcaatgttgacgtattgaatcgacataaacagaccccgttgatgttggctgtgatgcatggaaagactggttgtgttgagaagcttattcatgccggagcgaatatattgatgtttgattctatacgtcgaagaacttgcttgcactacgctgcttattatgggcatatagac

SEQ ID NO: 5295 - DNA, 378 bp, Glycine max
  Clone ID: LIB3028-051-Q1-B1-D2
tccaagggcttcaaacccggtatccattccgacccgtccgggcctgctcagtaactggatatcgggtacggactgctgcacatggaccggagtagaatgccactataacagcacccgggtccaaagattattcttaacgggtcaaaaacccgaaaccatcttatcgggtaccatctcacccaccctctcaaaactcaaactcctcgatggactctacctcataaacctcatcaacatttcgggtcccttcccaaattttcttttccaacttccaaatctccaatttatctatctagaaaacaacaatctctcgggtcgaatacccgataacatcggtaaccttacccgattagatgtactcagtttaactggtaaccg

SEQ ID NO: 5296 - DNA, 268 bp, Glycine max
  Clone ID: LIB3028-051-Q1-B1-H11
gaacacctactaataagtaacaatccaataattgtctttctcatgcctaaaaataccctttggatacgcattgtgtatatttttcgttgctacatttgcaacattactaggagagttaactagggcctttacatattgtcggcaaggtgattagcttgcacagagaaataagttttgttttgtttgaatacgaattcacacaattcttgtattttatgaattatcataattccaattctttaacttttttttaagagacaactaccac

SEQ ID NO: 5297 - DNA, 240 bp, Glycine max
  Clone ID: LIB3028-052-Q1-B2-D7
tgaagatagagaatgtcaattgttccctgtaacagtaaacctgtatgccatgtaagctagatgaagatagagaatgtcaattgttccctgtagtagcaaactagcaatcttttgcattcttttaagaaaactattatcaggatgagttgggacattgtttaggatgtaattgatttgatgcatttggattatatagatattgtttggatccttgtcaaagaagaaaaagaagaagagaac

SEQ ID NO: 5298 - DNA, 369 bp, Glycine max
  Clone ID: LIB3028-054-Q1-B1-H2
aactaaggttgattcccctcctagcagtgtgtcaacaaatggggtttcttccccttcagtgccagcaaactcagaatcatctgatgctgctgcttccaagtctcccattcaggagcaagtttcaggcaccaaagaggacaaaaatgtggataccaaagatagtgagagtgattcctcaagtggggttcctagtgaatcattccctaagcctgttgtgactgtgaacattgaacccgagccaaaggtcgtgcagcaggatatagtagacatgtacatgaaaagcatgcagcaattcactgagtcactagcaaaaatgaagctccctatggacttggaaagtgaaccaactagttcaggaaattcaaccac

SEQ ID NO: 5299 - DNA, 361 bp, Glycine max
  Clone ID: LIB3028-054-Q1-B1-H9
cggtgtggatcaacaactcgtggccgagatgacccgtctcgccaaagagttctttgctttgccaccggacgagaagcttcgttttgatatgtccggcgccaaaaagggtggattcattgtctccagccatctccaaggggaatcggtgcaggactggagagaaatagtgacatacttttcgtacccaaaaagagagagggactattcaaggtggccagacacgccagaagggtggagatcggtgactgaggaatacagcgacaaagtaatgggtctagcttgcaagctcatggaggtgttgtccgaagcaatggggttagagaaagatggtttaagcaaagcatgtgttgacatgggacag

SEQ ID NO: 5300 - DNA, 152 bp, Glycine max
  Clone ID: LIB3028-055-Q1-B1-B4
gattaaaatgcagcaatgatgccagtttgaatagtcctgagtcttttcaagatcgtttatggacttcagattccatgttaaagtgagcacgtggtcctgtaaaattttctaacattttcttgtcagagagaaaaaaaaacgaagacacgaac

SEQ ID NO: 5301 - DNA, 117 bp, Glycine max
  Clone ID: LIB3028-056-Q1-B1-C6
cggttgttacgctgctgcacattctcacgaaatttgtcgaccctgaaaaaatttgccagaccttccaccctgaaattgttatgtcaaagttgccttacttgttgatcaacactcact

SEQ ID NO: 5302 - DNA, 492 bp, Glycine max
  Clone ID: LIB3028-009-Q1-B1-E3.R2
tgataggaataatatacgtctctgtattagcaactaattccatacaaagaaggatcaacaaatcccatattcttcacttacatttttttttcaccaaaaagaaaaaataaaccaacgcttcaacataaaacatattcctaacagagacacctagatcgaagcgaaggggcataatagtcagttcaagagctagtgaacttggtgacagccttggtaccctcagagacggcgtgcttggccaattcaccgggcagcacaagcctgaccgcggtctgaatttcccttgaagtgatggtgggcttcttgttgtaacgggcaagtctagaagattcctgggcaagcttctcgaagatgtcgttgatgaagctgttcatgattcccatggccttgcttgagataccaatgtcagggtggacctgcttcagaaccttgaagatgtagatcttgtatgtctccacgctcttcttggttctcttcttcttcttcccttct

SEQ ID NO: 5303 - DNA, 253 bp, Glycine max
  unsure (1)..(253): unsure at all n locations
  Clone ID: LIB3028-010-Q1-B1-A9.R2
aacttaaatagaaactataaattgatttacgaaacgatttttaaaagccaaaataattctacatttcaacgggagtgagttacattcactattaatntggggnnaccccaaacccccccccaaaaaaaacccccaaaaagaggggtttttnnaaaaaaaaagggggccccccccttttttttttaaaaaaaaaaannnaaaaatattttttttttggggggggggccccttttttttcccccccctttttttt

SEQ ID NO: 5304 - DNA, 504 bp, Glycine max
  unsure (1)..(504): unsure at all n locations
  Clone ID: LIB3028-015-Q1-B1-D2.R2
ttttaacaaaacggcaattatattatttaaaaataaaaggctttaattttacatctacatactcaaagaaataaaaaggaaaagaaaccctaattaaatcgggctaacagaaaaccctgacataaacacacgaaaccaatcaagagctggtgaatttggtgacggccttggtgccttcagaaacggcatgcttggccaactccccagggaggaccaaacgcaccgccgtttggatctccctggaagtaatggtgggcttcttgttgtacctagcgagacgcgatgactcctgggcgagcttctcgaagatgtcgtttatgaaactgttcatgatccccatagccttgctggagatcccgatgtcggggtgcacttgcttcaacaccttgaagatgtagatcttgtaggtctcaacgctcttctttgntctcttcttcttcttctcgcttcctccttccttcgatatcttcttctccgccttcggcttcttctccgctggggcct

SEQ ID NO: 5305 - DNA, 421 bp, Glycine max
  Clone ID: LIB3028-024-Q1-B1-C10.R2
tatcgaaataatattaaatagatagttaaaatcattacatcaagagtgtttggtgggtgagctcccaacaatagaaggtttagtttctcattgtcaagaaagacttacaaatacaaaaaaagacaaaggaagtggaataaaatggaggaagatggagaagaatgaagatgtaatgctctaaatgaatagcataaaatgaatacttagccttgaattttgatcactttaccccagatccttcatgctcttcgccgtttgttcccgtaacaatatttgtctttagtcttcaccacttcaatttcttcccccagcagaattggaccaaaatacccataaacagccagaatccaatctaattaaaaaccagcgcggctctttgtttctttctggactttgtcaataacagaatgttcgtgctcac

SEQ ID NO: 5306 - DNA, 489 bp, Glycine max
  unsure (1)..(489): unsure at all n locations
  Clone ID: LIB3028-044-Q1-B1-F5.R2
ggaaaagtcgcatcttccattcttctcttctattatctattgctctataaaacaaagttggtcctgttcacattgtcaattgctctcttgccaaatttctatctcgaacacaaggtgaccccatgaatcatttttctattaagttttgagggcatgcgatttgctggtttagagcaagagtttctttgcctgcagtgtcaggttccgttgcaggcttaaaaggagtgttgccttctttgtctacggcaagtggattggccccccttgtaataagcactcttgcagttgcattcttccctctcatagtgctgtaatgtagaggtgtcctccctctagaatcaatagcatttatgtctgcaccatactgtaggagcagctctaccattgcagaatcactaattatgcatgccaggtgaagcacactagaaccatcttgtatatcctctacttgnggagtcttactttcacatgatatgtttggattaattg

SEQ ID NO: 5307 - DNA, 477 bp, Glycine max
  Clone ID: LIB3028-051-Q1-B1-A12.R2
ttttttttttttttttttttttttttttttttttttttttttttttttttttttttttttttttttttttttaaatttttttggtgggttttttttaaaacccccccccccttttgggggggggggggaaaaaaaaaaaaaaaagggggggggttccccaatccccccgggaaaacggttcccaaaaaaaaaaaccccaccccccccaaaacgggggggttttaaaaaactagggggcctggggaaaatggggccaaaaggaaaccaaaaaaacccccctttgggggggttttcccaaaaaaaaaaaaaccctttttaaaaaattttggggccgggggggaaaaaaaaaaaccacaaaaggtttaaaagctaaaaaaaaccccccaaggtttttaaatggaaaccccccgggaaggggggcaaaaaatttttaaaaaaaaccccagggccaaaaagttttaaaaggtgtttttcccc

SEQ ID NO: 5308 - DNA, 238 bp, Glycine max
  unsure (1)..(238): unsure at all n locations
  Clone ID: LIB3028-002-Q1-B1-F7.R2
taaattctnacaaattcaaactgcttttattgacataggtcagcgagttgcattcatggagttatgggctcacaccccattctcttgctagaaaaggattccttctttcctgtgggggcgcgagggggcggctttatcggactctttgcacctgtgcagcctctacaatcatcctgaggttggcaaccaccttacataccttggcctcgtgctccgttgagtggttctcttttggcct

SEQ ID NO: 5309 - DNA, 523 bp, Glycine max
  Clone ID: LIB3028-007-Q1-B1-F6.R1
tttttgacacatccaacaacttactacataaccacgttaaacacatgataaatgtattacaagtttggaaccaaatgccaataaccagagataatataataaaatataaaataccaatggactagtatattgtccaactatcaatataaatatcatactcgcaattcaggaaactccaataattcattctcacttatttctcaacattggcagcatcaccaccagagttttccccgttaccgctgtcactagatttaaccgtggtggtcgtcacgttgacggccgcggctcgcccgcatgtcgtcctgagtgacgaggaactctactgactgaccctccgacaaggtgcggaaccgccgtcggtttggatcgcactgtagtgaacgagagatcagagccacatcttcgggagttatgaaccgataccttctcctcgttgaacatttactgtgccttatatcttgactccggtggtgccatggcttcctagaacacagttttttttttccttctcttctaaggt

SEQ ID NO: 5310 - DNA, 432 bp, Glycine max
  Clone ID: LIB3028-007-Q1-B1-F6.R2
tttttgacacatccaacaacttactacataaccacgttaaacacatgataaatgtattacaagtttggaaccaaatgccaataaccagagataatataataaaatataaaataccaatggactagtatattgtccaactatcaatataaatatcatactcgcaattcaggaaactccaataattcattctcacttatttctcaacattggcagcatcaccaccagagttttccccgttaccgctgtcactagatttaaccgtggtggtcgtcacgttgacggccgcggctcgcccgctgtcgtcctgagtgacgaggaactctactgactgaccctccgacaaggtgcggaagccgccgtcggtttggatcgcactgtagtgaacgaagagatcagagccaccatcttcgggagttatgaaaccgaaaccct

SEQ ID NO: 5311 - DNA, 535 bp, Glycine max
  Clone ID: LIB3028-010-Q1-B1-A12.R1
gaagcataaggacaaggaaaatttattccccaaaggcatggattctatgctatccagcaaaaaaacaccttaagtacaatacttaatcaactccacacaacttgtgaaaattatcgttctcataataattgaatatacaacatatcaacatgtctgaatggaatagttttttttgggaaaataatattcttttttgacaatttactaatagagcttaaaaaaaaacaattattttcccaaaattaatcttttccaatcatgcatgcaccatcccatatggcaagccacgtacttagccgagatcgggcacagtaaaatactcatcatcatcatcatcatttaggacttcaatcctaggctttttgtgggacatgtaggatttggaggttttgtatgaagaacactgctactgttatgagtttcgggaagctgaggtacttcagctgcagccaaggcttcctgagcaaatttgttcgccgaaaatacccacatcttgtagccatttctagctctgcaaaactgcagagattccttt

SEQ ID NO: 5312 - DNA, 394 bp, Glycine max
  Clone ID: LIB3028-010-Q1-B1-A12.R2
gaagcataaggacaagggaaaatttattccccaaaggcatgggattctatgctatccagcaaaaaaacaccttaagtacaatacttaatcaactccacacaacttgggaaaattatcgttctcataataattgaatatacaacatatcaacatgtctgaatggaatagttttttttgggaaaataatattcttttttgacaatttactaatagagcttaaaaaaaaacaattattttcccataattaatcttttccaatcatgcatgcaccatcccatatggcaagccacgtacttagccgagatcgggcacaggaaaatactcatcatcatcatcatcatttaggacttcaatcctaggctttttgtgggacatgtaggatttggaggttttg

SEQ ID NO: 5313 - DNA, 120 bp, Glycine max
  Clone ID: LIB3028-011-Q1-B1-G8.R1
aagtaaaaatatgagaaatgattaaagttacgggagaataattaaaaactaaaaagggcacacatacaaaaaggtggtttaaaaaccaaaatgtatttgaaaaagaaaagggaattgggg

SEQ ID NO: 5314 - DNA, 270 bp, Glycine max
  Clone ID: LIB3028-011-Q1-B1-G8.R2
aaggaaaaatatcagaaatgatcaaaggcccgggggaacaatcaaaaaccaaaagggccacacatacaaacccctggttaacaaaccaaaatgtttttgaaaaaaaaaaggcaattgaaggaacccaccttcaagattctggaacaaaggcagcttttgttgctgctgctggggctgcggctgcccctttggctgatgccgacttaggaagaggattatagctccctttctccttaaaaagccgggaaaaggggggcttgcaatacaaaa

SEQ ID NO: 5315 - DNA, 400 bp, Glycine max
  Clone ID: LIB3028-027-Q1-B2-G6.R2
taaatactaacaaatacaaacggcatttattgagataggtcaacgagttgcattcatggagttatgggtacacacaacataatattgcaagaaaaggattagttctttcaggtaatccaaaatcacatccttatcgtactctttgcacgtctgcaactctaacaatcattctggagttggcaacaacattaaatatttggcctcgtgctgagatgagaagctatcttttggcctagagaacggtcagcctgagaccagtatgatatccagacactgcggatctcatgggtgacccgtgggtcagataaagcatcaacccatcggcgagcaaatctatcttgcctgtcaggtgcccaagaccggtatctctctccgggctgcttgaagttgttctccttct

SEQ ID NO: 5316 - DNA, 444 bp, Glycine max
  Clone ID: LIB3028-028-Q1-B1-B8.R2
gggggggggggggggggaaaaaaaacaaaaaaaatttgtaagggggaaaaaaaaaaacacctttttcccctttttgggaaaagggttttttcaaaaaaaaaaagggggggggtttttttttggaaaaattttaaaaagacttttttttaaaaaaaacccaatggggaaaaaaaaaaaactttggggggtaaaaagggggaaaaaaaggccaaacaaaaatccacaaaagaaaagttccacccccaaaaaaattttggggccctttttttaaaaacccccccttttttttaaaaaaaaaatttcgggggtttaaaacattttttttttcaagggaaaaaaaaaaaattttaaaaaattttttggccaaaatttaaataataacaggggggatgggggggttaattttttttttatgggggaaaaaaaaaaaaaaaaagggggggg

SEQ ID NO: 5317 - DNA, 282 bp, Glycine max
  Clone ID: LIB3028-028-Q1-B1-G1.R1
tgtggttgggaatagagaataaaaaataaaatcataaagtttcagatttttacaaataacaaaaataaagacgatattttccaacagatttttacaaacagtttatgaccgcgaggtcctagatattttgatcaatggatgactagtttcaggaacggcaggccatagtgtctccacttgttcgcttttggtcctgaaacgcccagggatgatcaaagttctccttcttacagaaaccattaggtgcaaacgaagcaccaaggaggtcttcaaaacagtaac

SEQ ID NO: 5318 - DNA, 425 bp, Glycine max
  Clone ID: LIB3028-028-Q1-B1-G1.R2
tgtggttgggaatagagaataaaaaataaaatcataaagtttcagatttttacaaataacaaaaataaagaagatattttccaacagatttttacaaacagtttatgaccgcgagggtttagatattttgatcaatggatgactagtttcaggaacggcacggccatagtgtctccacttgttcgcttttggtcctgaaacgcccagggatgatcaaagttctgcttcttacagaaaccattaggtgcaaacgaagcatcaaggaggtcttcaaaacagtaaccgggtattgtttcaatcaagtactcagaaatgctgctagttgaaatcgaaccagtgtcactagccacgttgtcttcaaccttgcaagaagaattacttgcattttcttcattggaaactgatgatctgggtctgttcattct

SEQ ID NO: 5319 - DNA, 227 bp, Glycine max
  Clone ID: LIB3028-031-Q1-B1-F2.R1
aaaaacaaaaaaagagggaccagaaaaaaaaatgccaaaatcccaaagggggggcaacttttaaccaaaaaaaaagaatatgtaaccccacatttattacaggaaaaagggggggcaccccaagccaaaaggaaaaaccaattgcaacaaaatttgccctgctttgcaaaaaatcccccaactttcctgggggggatataacacccccaaggtccccccaaaaatgg

SEQ ID NO: 5320 - DNA, 319 bp, Glycine max
  Clone ID: LIB3028-031-Q1-B1-F2.R2
aaaaaaaaaaaaagggggggccgaaaaaaaattggctaaattttttagggggggccatcttttaaccaaaaaaaaaaaatgggttccccccctttataaaaaaaaaaagggggggccccacaagctaaaaggaaaaaaaaatggcaaaaaaatttgctttttttttaaaaaaaacccccatttttttggggggggtttttaaattccaaagggtccaaaaaaaatggggattattttgggcaaaaaaaacctttttttaaaaagggggtttctggatttttaaacaaacagaattttttgtaaaaaattgttcccaaaa

SEQ ID NO: 5321 - DNA, 518 bp, Glycine max
  Clone ID: LIB3028-034-Q1-B1-B10.R1
gaaaaattctacgacttaattactagacaaaagcatacgttggattaaaaatttacatagctatcatactcgtagccgtatcaaggaataattgaatatacagatgaaacaaaaaacaccatcatacgaaattcaatgttaactaatacaattaagacctcgaaattgccatgatttcttttcgtaccgagcataccataatgggggaacttcagctgagccattgaaaccaaaacgcggggatgaatgatgtgtttgaaagggccttggataccagttggtcctcactaactgtacgatttggatggtgttttaacaaagcttgattgcatagagagaagctgctgtcaaaattgtcattaccaagatatacacatgaaagtagcgcgttagtgtcaccgtatcatgtttctccacttgtccttcagatcaactccacttctattttccaatatgttactgtaaaaacttcggattgttggccagttttcttcctgaaacatttttacaccagccct

SEQ ID NO: 5322 - DNA, 413 bp, Glycine max
  Clone ID: LIB3028-034-Q1-B1-B10.R2
gaaaaatctacgacttaattactagacaaaagcatacgttggattaaaaatttacatagctatcatactcgtagccgtatcaaggaataattgaatatacagatgaaacaaaaaacaccatcatacgaaattcaatgttaactaatacaattaagacctcgaaattgccatgatttcttttcgtaccgagcataccataatgggggaaccttcagctgagccattgaaaccaaaacgcggggatgaatgatgtgtttgaaagggccttggataccagttggtcctcactaactgtacgatttggatggtgttttaacaaagcttgattgcatagagagaagctgctgtcaaaattgtcattaccaagatatacacatgaaagtagcgcgttagtgtcaccgtatcatgtttct

SEQ ID NO: 5323 - DNA, 94 bp, Glycine max
  Clone ID: LIB3028-037-Q1-B1-G7.R1
aaactaaaatactaatttttattttatgttgggttgaaggcaaatccggggacaaattggggagcatatgagacggggtcccttaggttatttc

SEQ ID NO: 5324 - DNA, 375 bp, Glycine max
  Clone ID: LIB3028-037-Q1-B1-G7.R2
aaactaaaatactaatatatattatatattgggttgaagtgcaaatcggcagacaaattggggaacaatatgagactgtgtcccttatgttattacacagtagtgatatgatatcatatcactgcaggagaaaaacctccaacaaaagggtaaaaaatatattgtatttaacaactctttgtttaaatacataataaacctctcaaattagcttacaattaaactaatttgtaaaaagaaatgttagacagtggaattcaaccagacaaaagagtgtgccaacaacactctaacaaaagacacctttttatatatagtaggatcctgaaagaagggaggaagcagctcatgtcctatgcttcattttgaggcttt

SEQ ID NO: 5325 - DNA, 112 bp, Glycine max
  Clone ID: LIB3028-039-Q1-B1-A7.R1
gaagtataaggacaatgaaaatttattccccaaaggcatggagtctatgctacccagcaaaaaaacaccgtatgtataatacgtaatcaactccacactagctgggaaaagt

SEQ ID NO: 5326 - DNA, 251 bp, Glycine max
  Clone ID: LIB3028-039-Q1-B1-A7.R2
gaagcctatggacaggggaaattttatcccccaaaggcgtgggttttatgccctccattataaaaacccggaggaacaaaacttaatcaactgcgcacagcttgagaaaacaattgttctcatactaattgaatatacaacctatcaacatgttttaatggagtacttttttgtgggaaaataatatttttttttgacaatctactgggggggcttaaaaaaaaacaatttttttcccataataaatcttt

SEQ ID NO: 5327 - DNA, 217 bp, Glycine max
  Clone ID: LIB3028-049-Q1-B1-C11.R1
tttctctttttttcttttccctctttttctccctccctttttttccccctctttcctccccctcttttcctttccccccaaaaaaaaaaaacaccccgggaaaaaaggaaaccaaaaaaaaaaaaaccaaaaaaaaaaagccaggaaaaggaaaaaaactcaaaaaagggggcaaaaaaacccgaaaaaggggacaccaaagggggggcccgccggc

SEQ ID NO: 5328 - DNA, 302 bp, Glycine max
  Clone ID: LIB3028-049-Q1-B1-C11.R2
cccccctaaaaaaaaaccttcccgggaaaaaaggaattccagggggcgaaaaccaaaaaaaaaatctcacaaaacggaaacaaattcaacacccccccccaaaatttaaaaaaagggccttttccgggggggggtggggttgctaaaaccccaaaatggggtttataaccaaccaaaaaacctgagcaccaaaaaggatctgaaaaaaatttttttttttttaaaaaaaaccccgagttaaattattgggggggggtaaaaaaaaaaatgggggacggaccctggggatttataggggcccc

SEQ ID NO: 5329 - DNA, 113 bp, Glycine max
  Clone ID: LIB3028-050-Q1-B1-G11.R1
gaatacgtaataaacaaacctctcaagttgttagtttacaatgaaactcaaaaagatattgttacaaattttttcactgtactgaatttaaaccaaagaccttgctcaatatt

SEQ ID NO: 5330 - DNA, 275 bp, Glycine max
  Clone ID: LIB3028-050-Q1-B1-G11.R2
ggggaaaaaattttgaatacataataaacaaacctttcaaggggttagtttacaatgaaactcaaaaggatttggtacaaatattttcactggactgaacttaaaccaaagaccttgctcaatattttgaaagaagggggtggggggaattgaaacaattcatgtcaacttccagtctcattcaagaggggtctttttttttgttggggcctcatgagaagctgggggggctggctcttgggatggctcctttagtagggggggggtagaggaac

SEQ ID NO: 5331 - DNA, 264 bp, Glycine max
  Clone ID: LIB3028-053-Q1-B1-G10.R1
tttttttttgagtgaacctttcgcccaaagaaggcagccaaaatgtctttcacgttaaatttgtgagtaaaggaattccttccacaaaaaaaaaaaaattaatgaaagacaacaaaattgggttttaaaaaaaaaaataagatgcacaactaacacacaaaaaagagaaacaaataatcagaaacaattcaaccaaaaacaactcaatcaagaaaaaaactaaagaaaaaaagaaataatcaaaaagataaaataacaatcacc

SEQ ID NO: 5332 - DNA, 370 bp, Glycine max
  Clone ID: LIB3028-053-Q1-B1-G10.R2
gagtgaacactttcgcccaaagaggcagcaaaatgtctttcacgttaaatttgtgagtaaaaggaattccttccacataaaaaaaaaaattaatgaaagactacaaaattgggttttacaaagatgaaataagctgcccaactaaacctcaaaaagtgaataaaatgttcgaatccaagtccacctataaaactcactcttgaccatactcaaggtgaaggacctcttctgtaagatcgatcacttcctccacctcgatgtcctttgcctcgtattcctcctcttcatcggtagcctctccatccctgagcttttgcctctgtaaactctcttcctcgtggatccgctttcattcgttaacccctcgagc

SEQ ID NO: 5333 - DNA, 651 bp, Glycine max
  Clone ID: LIB3028-024-Q1-B1-C10.R3
tttagtttctcattgtcaagtaagacttacaaatacataaaaagacaaaggaagtggaataaatggaggaagatggagaagatgaagagtaatgctctaaatgaatagcataaatgaatacttagccttgaattttgatcactttaccccagatccttcatgctcttcgccgtttgttcccgtaacaatatttgtctttagtcttcaccacttcaatttcttcccccagcagaattggaccaaaatacccataaacagccagaatccaatctaattaaaaaccagcgcggctctttgtttctttctggactttgtcaataacagaatgttcgtgctcactctccgcgacaacagaaaatgttcttctcccttccctgtccctcacgcacttcacgttggagcattccaacaaacactccgcagccttcacgtgccccttccacgctgcgtagtagagtggggtccaccccttcgaatccacgcgattagggtttccccccatcgtgacgcagaaccggataaccctcgtgtgcccctccctcaccaccacgtggatcgtcgtcctgccctcggagtccaccgcatccacgtctagctcgccgtcgtagcgcgctaatagaaactccatcgtgtcgcaggacacgtaggggc

SEQ ID NO: 5334 - DNA, 657 bp, Glycine max
  unsure (1)..(657): unsure at all n locations
  Clone ID: LIB3028-024-Q1-B1-C10.R4
tttagtttctcattgtcagaagcttacaaatacaaaaaagccaaaggaagtggaataaaatggnnaggaagatggagaagaatgaagatgtaatgctctaaatgaatagcataaaatgaatacttagccttgaattttgatcactttaccccagatccttcatgctcttcgccgtttgttcccgtaacaatatttgtctttagtcttcaccacttcaatttcttcccccagcagaattggaccaaaatacccataaacagccagaatccaatctaattaaaaaccagcgcggctctttgtttctttctggactttgtcaataacagaatgttcgtgctcactctccgcgacaacagaaaatgttcttctcccttccctgtccctcacgcacttcacgttggagcattccaacaaacactccgcagccttcacgtgccccttccacgctgcgtagtagagtggggtccaccccttcgaatccacgcgattagggtttccccccatcgtgacgcagaaccggataaccctcgtgtgcccctccctcaccaccacgtggatcgtcgtcctcccctcggagtccaccgcatccacgtctagctcgccgtcgtagcgcgctaatagaaactccatcgtgtcgcaggacacgtaggggccagg

SEQ ID NO: 5335 - DNA, 316 bp, Glycine max
  Clone ID: LIB3028-010-Q1-B1-A12.F3
tttactggtgcccgctactcggctagtacgtggcttgccatatgggatggtgcatgcatgattggaaaagattaattatgggaaaataattgtttttttttaagctctattagtaaattgtcaaaaaagatattattttcccaaaaaaaactattccattcagacatgttgatatgttgtatattcaattattatgagaacgataattttcacaagttgtgtggagttgattaagtattgtacttaaggtgtttttttgctggatagcatagaatccatgcctttggggaataaattttccttgtccttatgcttc

SEQ ID NO: 5336 - DNA, 653 bp, Glycine max
  unsure (1)..(653): unsure at all n locations
  Clone ID: LIB3028-010-Q1-B1-A12.F4
tggcggttttgtatgnaagcaacactgctactgttatgagtttcgggaagctgaggtacttcagctgcagccaaggcttcctngagcaaattgttcgcccgaaaatacccacatctgtaagccattccagctctccaaactgcagagattcctttttctcaggtgattcaaagcctgttagttccaataagtcatcaacagcccaagaggatgtgaagctaggcacttgctgaggaggaattttcgcagaaacttgttgtgcactcctattaggaggctccgagtgacttttttcattgtctttggtgcaattagaactcgaggccactcggataccagtagcaaggaagcgctggtggttcgcggaaaggcttccggctgaatgaattggttcatcacaatcctgacagaagagtgctctgtcttcaacacaaaatatgaatgctggcttgtcttggcaaatgtcacatgtgggaagcttgcttgatagacattgaagaagaagtctttggtgcttgcttgcaagcttgtttgcagcatgaacttcaacgtcacatttggcacacaaagcagcctcatccgcgcaacaaatcactgttgctggagctctctcacacacgtcacactgaattttcatgttaattcttctcttc

SEQ ID NO: 5337 - DNA, 384 bp, Glycine max
  unsure (1)..(384): unsure at all n locations
  Clone ID: LIB3028-010-Q1-B1-A12.R3
gctctgtcttcaaacaaatnatgatgctggcttgtcttggcaaatgtcacatgtgggaagcttgcttgatagacattgaagaagaagtctttggtgcttgcttgcaagcttgtttgcagcatgaacttcaacgtcacatttggcacacaaagcagcctcatccgcgcaacaaatcactgttgctggagctctctcacacacgtcacactgaattttcatgttaattcttctcttccttctacaacaccaaaaacttggtcttcttttagctaacaactttttcactacaagaaatattggaaatattaaagaacccttaatcagacacagtggttttgtaaagccaaaaatggagaacgatggtgcagaaagattaggacatgg

SEQ ID NO: 5338 - DNA, 670 bp, Glycine max
  unsure (1)..(670): unsure at all n locations
  Clone ID: LIB3028-010-Q1-B1-A12.R4
cttcttgctatggtatccggatggcctcgngttctaattgcaccaagnacatgaaaaagtcactcggagcctcctaataggagtgcacaacaagtttctgcgaaaattcctcctcagcaagtgcctagcttcacatcctcttgggctgttgatgacttattggaactaacaggctttgaatcacctgagaaaaaggaatctctgcagtttggagagctggaatggcttacagatgtgggtattttcggcgaacaatttgctcaggaagccttggctgcagctgaagtacctcagcttcccgaaactcataacagtagcagtgttgcttcatacaaaacctccaaatcctacatgtcccacaaaaagcctaggattgaagtcctaaatgatgatgatgatgatgagtattttactgtgcccgatctcggctaagtacgtggcttgccatatgggatggtgcatgcatgattggaaaagattaattatgggaaaataattgtttttttttaagctctattagtaaattgtcaaaaaagaatattattttcccaaaaaaaactattccattcagacatgttgatatgttgtatattcaattattatgagaacgataattttcacaagttgtgtggagttgattaagtattgtacttaaggtgttttttttgct

SEQ ID NO: 5339 - DNA, 485 bp, Glycine max
  unsure (1)..(485): unsure at all n locations
  Clone ID: LIB3028-011-Q1-B1-G8.F3
ggtctcctcagtaagctgcgagcatgttttctggcacacagnaaagtgtgccacatgtggcaaaactgcttatccattagagaaggtaacagtggaagggcaggcctatcacaaatcatgtttcaagtgttcacatggtggatgtcccataacgccatcgaattatgcagcccttgagggcattttgtattgcaagcaccacttctcccagctttttaaggagaaagggagctataatcatctatanagtctgcatcagtcaaacgggcagccgcagccacagcagcagcaacaacagctgcctctgttccagaatcttgaatgttggttccttcaattgccttttctttttcaaatacattttggtttgtgaagcaggtgtttgagtgtgtggcctttttggtttttgattgttctctcgtgactttgatcatttctgatatttttacttannaaaaaaaaaaanaaaaaaaaananaananaa

SEQ ID NO: 5340 - DNA, 304 bp, Glycine max
  unsure (1)..(304): unsure at all n locations
  Clone ID: LIB3028-011-Q1-B1-G8.R4
cttacagtaaanaacaccttccattgagggtagttactcagctttatgttcctttgcagtgagagcatctgaagcaagctttgtgataagcagtaccatcagcagaaagctgatcaacgggataaaccgttttctcacaagccttgcacttttgctgggtaccgataaaagacattgctatggcttttagatctaaattcatcttactaagtctgcatcagncaaacgggcagncggagccacagtatctttaacaacagttgtctgtgtttcagaatcttgaatgtttgtttcttcaaacacc

SEQ ID NO: 5341 - DNA, 381 bp, Glycine max
  Clone ID: LIB3028-011-Q1-B1-G8.TA
tcacgaggggaacaatcaaaaaccaaaaaggcccacatacaaacacctgcttcacaaaccaaaatgtatttgaaaaagaaaggcaattgaaggaaccaacattcaagattctggaacagaggcagctgttgttgctgctgctgtggctgcggctgcccgtttgactgatgcatacttattaagatgattatagctccctttctccttaaaaagctgggagaagtggtgcttgcaatacaaaatgccctcacgggctgcataattcgatggcgttatgggacatccaccatgtgaacacttgaaacatgatttgtgataggcctgcccttccactgttaccttctctagtggataagcagtttttccacatgtggcgcactt

SEQ ID NO: 5342 - DNA, 463 bp, Glycine max
  Clone ID: LIB3028-028-Q1-B1-B8.F3
aaaaaaaaaaaaaaaaagaaaaacaaaaaataaaaacaaaaaaaaaaaaaaaaaccaaaaaagaaaaaaactgataaaaacataaaaaaaagtaacaaaaaaaaagacaaggcgggcgcccccatgtttaaagtgttcacatccgtggatgtaccataacgccgtcccattatgcagcccccgatttccttttgaatggcaagcaccacttctgccagctttttaaggaaaaagggagctataatcatattactaagtctgcaccaaatccccaaacaaatctagccccagctataaaagggaaaaccccgggggccccaaaggggggcctaccccatacttaaagggggggcccttttccccctttttaaagggaaaaaccggggggccccccttttaaaaaaaattgccccccccccggggagggggggtcttttatttttccccccgggggttttttttt

SEQ ID NO: 5343 - DNA, 309 bp, Glycine max
  unsure (1)..(309): unsure at all n locations
  Clone ID: LIB3028-028-Q1-B1-B8.R4
ccacgttttgccaattgttagnanagggatatgatcgattaggaactgggggcgtaactatatgcgtaagcatttagaagtgactcttttgaataaaactccaataggcaagcaaagacaacatgtagagctataaagttgatagaaatgctacaatccaaatgtccaagatggaagtagctcagccgcatcaaagttctagtgaccgtatttctgaaactcccactcgctattatctagaggacatacttgacgggtcttgagccatcggcttatgcaatggaagtgaaaagcatggttacaaactcc

SEQ ID NO: 5344 - DNA, 348 bp, Glycine max
  Clone ID: LIB3028-028-Q1-B1-B8.TG
taatattccataaatcttgtcattgagtggaataacaccaccgttttgccacattgttagagaaggatatgatcgaattaggaactgggggcgtaactatatgcgaaagcatttagaagtgactcttttgaataaaactccaataggcaagcaaagacaacatgtagagctataaagttgatagaaatgctacaatccaaatgtccaagatggaagtagctcagccgcatcaaagttctagtgaccgtatttctgaaactcccactcgctattatctagaggacatacttgacgggtcttgagccatcggcttatgcaatggaagtgaaaagcatggttacaaactcc

SEQ ID NO: 5345 - DNA, 160 bp, Glycine max
  unsure (1)..(160): unsure at all n locations
  Clone ID: LIB3028-028-Q1-B1-G1.F3
gccgtgccgttcctgaactatcatccttgntcaaatatctaaaccctcgcggtcataaactgtttgtaaaaatctgttggaaaatatcttctttatttttgttatttgtaaaaatctgaaaccttatgattttattttttaattctctattccccaccac

SEQ ID NO: 5346 - DNA, 327 bp, Glycine max
  unsure (1)..(327): unsure at all n locations
  Clone ID: LIB3028-028-Q1-B1-G1.R3
agacttcacacccgtgngnagnaacctgttatgcttttgggtatgctcattggctctgtggataggaacgtcgcattccctgcataacaacgccctgtcttcttggcaaaatagatatgcacgcctctcttggcatatatcacaaagagggaagtctttggaggtggggtagtggagagagaaacgggcgtgtttggttgcaagcttgttggcgcggtgaatggtgcgatcacagctatggcaaagagcagcttcatctgcaggacagaagacggaggcttccactttgtcacacacatcacactggatcttcatcttttgcttttg

SEQ ID NO: 5347 - DNA, 650 bp, Glycine max
  Clone ID: LIB3028-031-Q1-B1-F2.F3
cgcaaactgtccataccttctttgcagatatccaggtcaaggggtttcttcgctgactgaatcagaaggcagagttttaaggatgagatagagaagcttaaacatgacaaaagaacaacttcttcgggagttagagatgcatgaacaggagtggaaaatgtatgaggtacaattacaacactccaatgatcgtttggaaaagttggaaaagaagcaagaaaatttggtttcttctgtctctcaagtgttgcagaaacctgggattgccttaaatctcttgctgttgacagaaaacatggatagaaaacggaggttgccaagaagtggtctctttagtgatgacgctagcattgaagatcatatggaaacttcccaagtattaccaagggaaaatgcagatggtgcttctattttctcatcgagcacagaacggttggatctccttgagtcatccatgacgttttgggagaatattacacatgatgttggtgacgtctttgttcaaagtcatttaaacttggattttgatgaatctacaagttgtgcagatagtccagctatatcttgtgtgcaactagaagttgaagatcagcctaagtcacatggaatcaacgtgagttctgagccagctgtagttgcggctcctgatc

SEQ ID NO: 5348 - DNA, 431 bp, Glycine max
  Clone ID: LIB3028-031-Q1-B1-F2.R3
gagctgcctcgatgaaactggaaaagttgttgtgcttaagtatttgggtaacaaatcccttgaaactctggtgggtcccaaacaatgtaaactcctattggtggcactccatgtaaacaatggaattagttgaaggatcatccaccatctcataaatcttggtgaggaaaggtggcagggaactagaactgccctgagcttcctccatcatccaaaacacaaatctcaaagcagactgaactctcaaaaaccctttagtatgtatacccagaaagaaagaaaaaaccttttacctttttcacaaatttaaccactacaaacaatacacaaatttttacatatatatatataaaatacactcccttgttctcccatcattttcctttctagctaggtttcattaatcccagtaaacaccaattaataattcc

SEQ ID NO: 5349 - DNA, 605 bp, Glycine max
  unsure (1)..(605): unsure at all n locations
  Clone ID: LIB3028-037-Q1-B1-G7.F3
ttcagttgccacctccacattcctcttatgctgccctggntggtgtcctctactggaggcaccatttccacagcttttcatggagaaagggaactatcatcatgtactccaatctgctaaccacaagaagaatgtcactcctgaacctgctgaacctgcagcctgaaggagatgaagagccaccaaagccagaagaatctgattctgaggaacacacagaagaaaagcctcaaaatgaagcataggacatgagctgcttcctccctttctttcaggatcctactatatataaaaaggtgtcttttgttagagtgttgttggcacactcttttgtctggttgaattccactgtctaacatttctttttacaaattagtttaattgtaagctaatttgagaggtttattatgtatttaaacaaagagttgttaaatacaatatattttttacccttttgttggaggtttttctcctgcagtgatatgatatcatatcactactgtgtaataacataagggacacagtctcatattgttcaccaatttgtctgccgatttgcacttcaacacaatatataatatatattagtatttttagtttaacca

SEQ ID NO: 5350 - DNA, 463 bp, Glycine max
  Clone ID: LIB3028-037-Q1-B1-G7.R4
tgtctacattccactgactggttgacagtctgttgggggccttattcgtctcattttgtttatcagaagactttgctgtttgaaagttcttgctgaaattgccagattccttcgaaaagctgttcaaagtgtggcttgcaatagaggacaccatccattgaggagtaggtgttcatcgttaggtatcccttgcagtgactgcatctgaagcagtttttatggtaaggtataccttcaagagttaacatgtcaaccacataaacagtcttatcacaagccttgcatttatctgtagttcctgtgaatgacattttgcttcttcttttccttcctgaagaaagatgtaaaacaaggctcaggaattttctggctgatgtttatgtttttcctttaatccaggatctgaggattaaagagaagttcaagaagagaaaacagcactcataaccttattgcacctcag

SEQ ID NO: 5351 - DNA, 637 bp, Glycine max
  unsure (1)..(637): unsure at all n locations
  Clone ID: LIB3028-037-Q1-B1-G7.TA
atatattatatattgtgttngagtgcaaatcggcagacaaattggtgaacaatatgagactgtgtcccttatgttattacacagtagtgatatgatatcatatcactgcaggagaaaaacctccacaaagggtaaaaaatatattgtatttaacaactctttgtttaaatacataataaacctctcaaattagcttacaattaaactaatttgtaaaaagaaatgttagacagtggaattcaaccagacaaaagagtgtgccaacaacactctaacaaaagacacctttttatatatagtaggatcctgaaagaaagggaggaagcagctcatgtcctatgcttcattttgaggcttttcttctgtgtgttcctcagaatcagattcttctggctttggtggctcttcatctccttcagctgcaggttcagcaggttcaggagtgacattcttcttgtggttagcagattggagtacatgatgatagttccctttctccatgaaaagctgttggaaatggtgcctacagtagaggacaccatccagggcagcataagaggaatgtgtgaggtggcaacctgcatgagcacacctaaagcaattcttgtgatagcattccccttccagtgtcatcttt

SEQ ID NO: 5352 - DNA, 613 bp, Glycine max
  unsure (1)..(613): unsure at all n locations
  Clone ID: LIB3028-049-Q1-B1-C11.F3
gtacttctgttcttncgggntaactctgccccgtcacttgtgtccatttccactatggcattcccttagtacctgcatgaggtccatgtccatcatttgaacctagagaagtagaaacacaggatggattacctcatcactctcaagcatcaacagtggatcaggataaaattgaagggccaagactagataaaacaacctgctctagcatgttttggggtagaagaagttgcagcagggagcaccaatgcaattcagaaataaatgcttgactcgcaccatgcttgtacgacacatacaagtgtcgtggatactgggtacactatagatcaacaggatcagtccacaattttcttattaaccagcctcaaatagtgaaactcgggatctctctagaagagaaaaaactgctctgcagatcctcttggctgctcaggttgtatggtaggtgatagacacaattctggcgtttcagcaacacaaccaccctctggatatgtcctttttctgatatttagggagcgtgtgtgaaattagtttcagtttcgtgagatttttattgtgatttattgtaattggatttcattttatccaggaaagtgtcttctttaag

SEQ ID NO: 5353 - DNA, 462 bp, Glycine max
  unsure (1)..(462): unsure at all n locations
  Clone ID: LIB3028-049-Q1-B1-C11.R4
gggtacacaggccagnaccactgtagtttattttcttttgcttgggaacctggcaacttaacaaaggagcaactccatgtctacatagggggcaagggatagagccaggagggccaaccatttcagaagaaacattgtttgttgagcaaagaagagtgcacatcttacacaaagctatgcccacatcctttgcaccactgaacatggcctctccaggcatacagcacaaaagtcaatctcatcagaggaggctgtagatgattgcaatccatactctctagctatgttgagcacactcataaggggcaaggacaagtaatttgaatgagagaatgtaggcattgtggcatcagaactgggtgccagcaattgttcaagccaatgacgcccccacatcctagcaatatcaagaggaagccacccattgcaatttaaagccagccgacttgcaccgtgtgcaac

SEQ ID NO: 5354 - DNA, 571 bp, Glycine max
  unsure (1)..(571): unsure at all n locations
  Clone ID: LIB3028-050-Q1-B1-G11.F3
ctcagtttgcacaaaacagtatatcctctggaaaagagacacttngaggggaatgcttccacaagacttgctttaggtgtgctcatgcagggtgccctctcacacattcaaactatgctgcccttgatggtgttctctactgcagggtccactttgcacaacttttcatgggagaaagggaactacaaccatgtgctccaagctgctgcacacaggaggactggttcctctacacctccactactagaggagccatcacaagagccagcaccaccagcatctcatgaggaccaaacagaagaagagacacctcttgaatgagactggaagttgacatgaattgtttcaattccctccatccccttctttcagaatattgagcaaggtctttggtttaagttcagtacagtgaaaatatttgtaacaatatctttttgagtttcattgtaaactaacaacttgagaggtttgtttattatgtattcaaaatttttaaacannnnnnanannanaanaananaanaaaaaaaaaaaaaaanaaaaaaaaaaaaaaaaaaaaaaaaggggcggc

SEQ ID NO: 5355 - DNA, 363 bp, Glycine max
  unsure (1)..(363): unsure at all n locations
  Clone ID: LIB3028-050-Q1-B1-G11.R4
ctttgcggactcttgctgnaatagccagtatccttgnaaagctgttcaaatgtgtcttgcaataaagaattccatccattgagggagtatgtgcacatcgtaagacatcccttgcagtgactgcacttgaagcagtttttatggtaaggaattccttcaagagttaacaagtcaaccacatagacagtcttgtcacatgctgtgcatttatcaagagttcctgtgaatgacatgtttgttttctcccctttattgattgtgtttatttttttattttttatttttggttcccttctgggatgtctgaggaacaaagaggagttaaacaagaatgcacacacctcagacaaaagggaattgaac

SEQ ID NO: 5356 - DNA, 660 bp, Glycine max
  unsure (1)..(660): unsure at all n locations
  Clone ID: LIB3028-050-Q1-B1-G11.TG
tttgaatacataataaaccaaacctctcagttgttagtttacaatgaaactcaaaagntattgttacaaatacttttcactgtactgaacttaaaccaaagaccttgctcaatattctgaaagaaggggatggagggaattgaaacaattcatgtcaacttccagtctcattcaagaggtgtctcttcttctgtttggtcctcatgagatgctggtggtgctggctcttgtgatggctcctctagtagtggaggtgtagaggaaccagtcctcctgtgtgcagcagcttggagcacatggttgtagttccctttctccatgaaaagttgtgcaaagtggaccctgcagtagagaacaccatcaagggcagcatagtttgaatgtgtgagagggcaccctgcatgagcacacctaaagcaagtcttgtggaagcattccccttcaagtgtcatcttttccagaggatatactgtttttgtgcaaactgagcatttgtcctgggttccactgaacatggaagatagcttgctgggggttctattcaactcattttgcttctcagaagactttgcgaagttcttgctgaaattgccagattccttgaaaagctgttcaaaatgtgtcttgcaataaagaattccatccattgaggagtatgtg

SEQ ID NO: 5357 - DNA, 485 bp, Glycine max
  Clone ID: LIB3028-028-Q1-B1-G1.F5
gtcctccccattacaccaatataatagagtcctggctctgaggaagaacgacgctcgatctagaatgaacagacccagatcatcagtttccaatgaagaaaatgcaagtaattcttcttgcaaggttgaagacaacgtggctagtgacactggttcgatttcaactagcagcatttctgagtacttgattgaaacaatacccggttactgttttgaagacctccttgatgcttcgtttgcacctaatggtttctgtaagaagcagaactttgatcatccctgggcgtttcaggaccaaaagcgaacaagtggagacactatggccgtgccgttcctgaaactagtcatccattgatcaaaatatctaaaccctcgcggtcataaactgtttgtaaaaatctgttggaaaatatcttctttatttttgttatttgtaaaaatctgaaactttatgattttattttttattctctattcccaaccac

SEQ ID NO: 5358 - DNA, 631 bp, Glycine max
  unsure (1)..(631): unsure at all n locations
  Clone ID: LIB3028-028-Q1-B1-G1.R5
atcaagttctgcttcttacanaaaccattagtgcaaacgaagcatcaaggaggtcttcaaaacagtaaccgggtattgtttcaatcaagtactcagaaatgctgctagttgaaatcgaaccagtgtcactagccacgttgtcttcaaccttgcaagaagaattacttgcattttcttcattggaaactgatgatctgggtctgttcattctagatcgagcgtcgtttcttccttcagagccagtgactctattattattggtgtaattggtggaggacgaagcaggatctaaacaagtaccagagagcttcacacccgtgagaagaaacctgttatgcttttgggtatgctcattggctctgtggataggaacgtcgcattccctgcataacaacgccctgtcttcttggcaaaatagatatgcacgcctctcttggcatatatcacaaagagggaagtctttggaggtggggtagtggagagagaaacgggcgtgtttggttgcaagcttgttggcgcggtgaatggtgcgatcacagctatggcaaagagcagcttcatctgcaggacagaagacggaggcttccactttgtcacacacatcacactggatcttcatcttttgcttttg

SEQ ID NO: 5359 - DNA, 568 bp, Glycine max
  unsure (1)..(568): unsure at all n locations
  Clone ID: LIB3028-031-Q1-B1-F2.F6
aacttgtagnatcatcaaaatccaagtttaaatgactttgaacaaagacgtcaccaacatcatgtgtaatattctcccaaaacgtcatggatgactcaaggagatccaaccgttctgtgctcgatgagaaaatagaagcaccatctgcattttcccttggtaatacttgggaagtttccatatgatcttcaatgctagcgtcatcactaaagagaccacttcttggcaacctccgttttctatccatgttttctgtcaacagcaagagatttaaggcaatcccaggtttctgcaacacttgagagacagaagaaaccaaattttcttgcttcttttccaacttttccaaacgatcattggagtgttgtaattgtacctcatacattttccactcctgttcatgcatctctaactcccgaagaagttgttctttttcatgtttaagcttctctatctcatccttaaaactctgcctttctgattcagtcagcgaagaaaccccttgaccctggatattctgcaaagaatggctatggacaggtttgcgcctaatgattgtcttcaaaag

SEQ ID NO: 5360 - DNA, 400 bp, Glycine max
  unsure (1)..(400): unsure at all n locations
  Clone ID: LIB3028-031-Q1-B1-F2.R6
tgtagttgcggctcctggtcttgntgcatcaaaagacaacctgtcgaaacagctcctctgactactggtgttaatgacatattctgggaacgattcttgacagagaatcctggttcgtcagaaatgcaggaagctcagtctgaaagagaggattctgatggcagaagtaatgccaaattttggtggaacattaggaatgtaaataaccctccagaacagatggggcattcttagcaaagcagagcaaacttagttgcaattgattattccttttagcttgtgatgcccctcaattttcatgtaataaatgtaggtatacatattctatatttttggttaaatgattgcatcctctatagaatttagtcaatttttatactgctcactctcttttagttct

SEQ ID NO: 5361 - DNA, 452 bp, Glycine max
  Clone ID: LIB3028-014-Q1-B1-C7-SP6B
atttatattgggtgctagtgagtgatggcgatgagggtgtgaattctaaaaggaaagaacagctgagctggtcagaaaatcaatggcatcatccttgggttttgagttcctgacgaagaagccttacagtcctccatcctgggcatcccatctccaccctttaccttcccacttcttctctcttgcccatcttcccactccaattcacagatggaaccttcccaatctgcccaccaataccgagctgtggatcaagcgagacgacctttccggaatgcagctgagtggtaacaaagtgaggaaattggagttcctgatggccgatgccattgcgcaaggcgccgactctatcatcacaatcggaggcattcagagcaaccactgtcgcgccaccgccgttgccgccaagtatttaaaccttgactgttttctcatcctccgcacttctgacc

SEQ ID NO: 5362 - DNA, 506 bp, Glycine max
  Clone ID: LIB3028-014-Q1-B1-C7-T7C
acaaaatgtttccgccaaccgtggactgggacaacattaactggtcaactagaaggccacagatggatttccctgtgcagtctgctatctgtacactggaagatgtagatgttatcaaggaaggacaggctaggattgctggatatgcactttcaggtggtggccgtggcattgagagagtggatgtatcagctgatgggggtaagacctgggtcgaggctcgtagataccagaaagacaatgtggcgtatgtgtcagatggacctcaaagtgacaagtgggcttgggttctctttgaggccacattagacgtaccagcgaatcctgagatcgtagttaaggcggtggactcagctgcaaatgttcagcccgagaaggtagaagacatatggaatctgagaggaatcctcaacacgtcttggcatcggatcaaaattcagagatctttgtgcgttgaaagatctaagctgtgaaattaagtacgcagctgatcacttggagcaagc

SEQ ID NO: 5363 - DNA, 368 bp, Glycine max
  Clone ID: LIB3029-007-Q1-B1-G6
ctgttctctcacacactcactctccttctctctcctattgcggctagggtttgggtttttcactttcagcctctccattccttcaaccttcttcttctctttgatctctgatggagacgttccgtgtttagtagcaagggttagttgaggccttgtgtttggaaacgtacggtgtcgttttggagttgggaaaacaaataattctgagagatggcaaccacgaacccttttgatttgttgggtgacgacgctgaggacccttctcagctcatcgccgccgagcaactcaaggcggcggctgctgctgcggctgccaccgccgctcccaagaaggcgccggctcagcagatcaagccggctcagctccc

SEQ ID NO: 5364 - DNA, 397 bp, Glycine max
  Clone ID: LIB3029-002-Q1-B1-D1
tatttctcacactcgcaagtctcaagcaactcacacaggaagcggcaaacaaagcacacagaaagtaaaaagcggaaattaaggagcggtggtgacggtggtagtgaataaataaaagcagcaccataccatggggggagaagaagtagcaagagtcaaagcagagttgttcgacgacaacgaaagcgatcgcaacgacgacgacgttttgagcgagagcaaggactcgggagtgacgacggctcacgcagtgaaagaagagatggatgacggcgccgctaactggtcttcgtcgtcgtcgacttcgcccaaaccgatggaagggttgcacgaggtgggcccccctccgttcctgaagaagacgtttgaaatggtggaagaccctcacaccaaaccc

SEQ ID NO: 5365 - DNA, 406 bp, Glycine max
  Clone ID: LIB3029-002-Q1-B1-F9
aaaaaacaccatgatgcttggggagacccaccgcccaaatccaaccgtacacgtgccaccgtgggcgccggagatcttctcaccatacaccggcaatgccgattactctccgtactccatgcaagaagcacttagtgcacttcagcactacgaatccaccgatgctgagtcagactcggaggttccgtctcgggaaccggaagtcccggtggacgcttactcctgcgaccatttccgcatgttcgagttcaaggttcggagatgcgcacgttgcaggtcgcatgactggaccgactgtccgtacgcccaccccggcgagaaggcacgccgccgtgatccccggaagtaccattactccggcacggcttgcctcgatttccgcaaggggagttgcaagaagggtgac

SEQ ID NO: 5366 - DNA, 394 bp, Glycine max
  Clone ID: LIB3029-012-Q1-B1-G1
ggcctcagccgcatcacccaccactttctctctcctccactccgctacgccttcctcctcctccaccgccacctccgcctccgcctccccctcgcgcgtgcagctcatctcctccctccgcgcccgcccgcgtgcgccgcctgggtttcgccgcagcggacccgctgctcgcggcgagtgtagcggcgcgcgtggcagcggtgcgaggatgatgaaagggcgctaggggggtggtgtcgatggcgaagaagagcgtgggggacctgagcgcggcagacctgaaagggaagaaggtcttcgtcagggccgacctcaacgtcccgctcgacgacacctagaggatcaccgacgacaccagaatccgcgccgcgattcccatcatcagagatctcat

SEQ ID NO: 5367 - DNA, 392 bp, Glycine max
  Clone ID: LIB3029-012-Q1-B1-B5
gttcccgatgaacttgttaagctgatagatattctgaaccctaaaaacaagcctggaagaattacagtcattgttagaatgggagctgagaatatgcgagtgaagcttccacatcttatcagggcagttcgcagagcaggtcaaattgtcacttgggttagtgaccccatgcatgggaacaccattaaagctccatctggacttaaaacccgctcttttgatgcaataagggctgagctgagggcattctttgatgtgcatgatcaagaaggaagctacccaggaggggttcatttagagatgacagggcagaacgtgacagaatgtgttggaggctcaaggactattacttatgatgacttgagctcacgctaccacacacattgtgatcc

SEQ ID NO: 5368 - DNA, 379 bp, Glycine max
  Clone ID: LIB3029-011-Q1-B1-F1
ctttgaacactcatcaccatggccaagcttgttctttccctttgtttccttcttttcagtggctgcttcgctctgagagagcaggcacagcaaaatgagtgccagatccaaaagctgaatgccctcaaaccggataaccgtatagagtcggaaggtgggttcattgagacctggaaccctaacaacaagccattccagtgtgccggtgttgccctctctcgctgcacccttaaccgcaatgcccttcgtagaccttcctacaccaacggtccccaggaaatctacatacaacaaggtaatggtatttttggcatgatattcccgggttgtcctagcacttatcaagagccgcaagaatctcagcaacgaggacgaagcc

SEQ ID NO: 5369 - DNA, 408 bp, Glycine max
  Clone ID: LIB3029-011-Q1-B1-F11
ctgcacgtcgacactagaggatcccctcggggaattccaattccacattttcaagaaataaggaggcaaaaatgttcatatatgaattggaattatttgttttcttattaggcctatcctgaagccaaaggaaatgagatcggaattcctcggggaattccaattccacattttcaagaaataaggaggcaaaaatgttcatatatgaattggaattatttgttttcttattaggcctatcctgaagccaaaggaaatgagatcggaattcctcggggaattccaattccacattttcaagatataaggatgcaaaaatgttcatatatgaattggaattatttgttttcttattacgcctaacctgaagcaaaagaaatgagatcggaattcctcgggggtaccgag

SEQ ID NO: 5370 - DNA, 387 bp, Glycine max
  Clone ID: LIB3029-011-Q1-B1-F2
ctggagactcatggttcaactgtcagaagctccatctgcctgagaattgcgggtatgaattccagatgcagtatggatccattggttggtcagtaggtgctactcttggatatgcacaggctgcaacagacaagcgtgtaattgcttgcattggtgatggcagttttcaggtaacagcacaggatatttcaacaatgattcgctgtggacaaaagaccatcatctttctcatcaataatggaggttatacaattgaagttgagattcatgatggtccatacaatgtgataaagaattgggactacactcgctttgtggacgctatccataatgggcaaggcaaatgctggactgccaacgtacgtacagaggatgatctgactgaag

SEQ ID NO: 5371 - DNA, 384 bp, Glycine max
  Clone ID: LIB3029-011-Q1-B1-F3
caaaaggctctctcacgcagtcgcagtgagtgaaaaggaaaaccctaattgcggtattctcagtgccttcgagagaaagaaaaaatggcagataatcttgttctccgtggcaccatgcgcgcccacaccgacgttgtgacggcgattgccactcccatcgacaactccgacatgatcgtcaccgcctcacgcgacaaatccatcatcctctggcatcttaccaaggaggacaagacttacggtgtcccccgccgccgcctcaccggccattctcattttgtccaggacgtcgtcctctcttctgacggccagtttgccctatccggctcctgggacggcgagctccgcctctgggaccttgctgctggcacctccgctcgccgc

SEQ ID NO: 5372 - DNA, 383 bp, Glycine max
  Clone ID: LIB3029-011-Q1-B1-F4
gattctagcaagcagagcttttgtcaattttctattgaccttctcggtggaggaattttagtggacaaaactggagattggatcacacttatacaaaattctccaattagtaacttgttgagagttgctgcttggaagaaaggctgtttaatggttaagattgtgatgtctggaaatgcagcagtcaaaaggagtgattgggcctcattggtacaagtgtttttaacaaacagcaacagtacagagcattttgatgcatgtaagtggacaaaatcagaaccacattcctgggaattgatcttcccaatagaggtatgtggtcctaataatggttttgaaatgtggagttctgagtgggcaaatcaaacttcatggcatttgag

SEQ ID NO: 5373 - DNA, 373 bp, Glycine max
  Clone ID: LIB3029-011-Q1-B1-F5
ggtgaagcgtgaggacttatggatcacctccaaactctggtgttcagatcatgcttcagaagatgtgcccaaagcattggataaaacattgcaggatttgcaacttgattaccttgacctctatctgatccactggccagtgcgcatgaaaagcggatcagttggattcaagaaggaatatctcgatcaaccggacattcccagcacatggaaagcaatggaggcactctatgactcaggcaaggcaagagccataggagttagcaatttctcttcaaaaaagcttcaagatctcatgaatatagcaagagtgcctcctgctgttaaccaagtggaattgcacccaggatggcagcagccaaagctgcatgca

SEQ ID NO: 5374 - DNA, 385 bp, Glycine max
  Clone ID: LIB3029-011-Q1-B1-F6
ctttgttttgagtttgaggaatataagaaaaatgaaaatgggtaaaggaattgtttttattgttgctctggtggccatttgccttggtgggaaatgggtggaagcgcaggtgcatcatgttgtcggagcagaccgtggttgggatcaaacctccgacctcgtttcttggtctgcaagcagagtcttcagggttggagaccaaatttggctcacttactctgtggctcagggattagtcgctgagctgaaaagcagagaggaatatgaggcatgtaatgtgagcaaccccatcaacgtgtacacagagggtttgcatactatccctcttgagagtgaaggaatgaggtattttgtgagcagcgagccagagaattgcaaaaatggt

SEQ ID NO: 5375 - DNA, 385 bp, Glycine max
  Clone ID: LIB3029-011-Q1-B1-F8
ctcgagccgctcgagccgaatcggctcgagcaattttggttaagagtcttgaaaaagcaagagaaaaaaaaataccaaccatggcaaccatttctgatcaacctagagggtcctactcctatggaacctcatatggagcaccctatggaaccacgtatgagaccaacaccagcattaacaacccaccttcacgccaaacagtgaagttcataactgctgccactattggcatcacactcttgctcctgtctgggttgaccctcacaggcactgtcataggtttgatcattgcaacccctcttcttgttatcttcagccccatccttgtccctgctgcgtttgtgctgttcctagttgcttctggctttttgttctctgggggctg

SEQ ID NO: 5376 - DNA, 381 bp, Glycine max
  Clone ID: LIB3029-011-Q1-B1-G1
caagaggcatttgaattttcgtgttttgatcagaatccaaggaaaacatcacataatttcggaatcacaagttaaagtttcatgtagcagacgaagagaaaagaatggtatcggaggatttggagaaacatgaattggatgaattgcagaaacaattggggaataagctaaaatttgaatccgcaacttcggctctaaaagctcatctccaatacacgtaaccatcagcatctcgatcgcttcacaaaaccttttaattgggtaaaagacaagttgccactgtgttgagaagcacgtatagagcagcatctttctggaaagctggactgggccattttgagtatgatcaattacatgttgtcgaaagcttctgagaaagag

SEQ ID NO: 5377 - DNA, 394 bp, Glycine max
  unsure (1)..(394): unsure at all n locations
  Clone ID: LIB3029-011-Q1-B1-G10
gggttcctctttccttctctagcacaatttacaatctcaatggctggaatttgctgtggtgttgttggagaaggtgacactccggctccactcgagcccactcctcgcccctccaggcgccggagtttggacatcttacctttaaaatatatcgccgacatgcccatgccgccgccggagggtttacggaagcgtcccaagctcaacctcagggactgcgataacgcaattgaaaattgcgacgaatccactggacacaaggtgacgaagaaggaatccaaagtagactacgacgacgacgtcgtttcggaaactaagaacgtaactgtttcggaagttgaagaagaatctcccaagttcggcgtgacgtccgtttgccgcangagaagagaca

SEQ ID NO: 5378 - DNA, 223 bp, Glycine max
  Clone ID: LIB3029-011-Q1-B1-G11
gttttgtttggagaggaagaggagcagaggcagcaagagggagtgatcgtggaactctcaaaggaacaaattcggcaactgagcagacgtgccaaatctagttcaaggaaaaccatttcctccgaagatgaaccattcaacttgagaagccgcaaccccatctattccaacaactttggaaagttccttgagatcacccctgagaaaaacccacagcttcggg

SEQ ID NO: 5379 - DNA, 297 bp, Glycine max
  Clone ID: LIB3029-011-Q1-B1-G12
gttctagatcgcgagtggcgccccaaatccttcttcaccatttctggggaggttgacactaaggccattgagaagagtgcaaaggttggattgggtttggccctcaaaccctaaagaattttgagctattctgacaagagcattgaggtagtaggcattaggaaagcacatagttgtctgttagactgaattgtttgttcaaggttgattgtcttggacggaagtgttcatggtattttgatgcattgagcaattcaaggttgtattgtataaataagtgatatagactatttctat

SEQ ID NO: 5380 - DNA, 410 bp, Glycine max
  Clone ID: LIB3029-011-Q1-B1-G2
ggatcactcggggaattccaattccacattttcaagaaataaggaggcaaaaatgttcatatatgaattggaattatttgttttcttattaggcctatcctgaagccaaaggaaatgagatcggaattcctcggggaattccaattccacattttcaagaaataaggaggcaaaaatgttcatatatgaattggaattatttgttttcttattaggcctatcctgaagccaaaggaaatgagatcggaattcctcggggaattccaattccacattttcaagaaataaggaggcaaaaatgttcatatatgaattggaattatttgttttcttattaggcctatcctgaagccaaaggaaatgagatcggaattccccggggggtaccaactcgaattccctatagtgag

SEQ ID NO: 5381 - DNA, 386 bp, Glycine max
  Clone ID: LIB3029-011-Q1-B1-G3
caaactttccccatcgtcatctttttcctcatttcagtctcagattctctcctttgacaatcctaacccaacctcatcttccaacaccaccacccagttttatgggtttgactgtaccttaaacccaacacagaacgagatggtgtcagtgtcagtccccaacatgagaaaaccacggttcccaactcaaaccgcaaaaggttcaccgaaaaatcaaaactttgaaacaaaaacctcacatggtaagaggtctccagctcatgctcaagatcacatcatggctgaaagaaaacgaagagagaaactcagccagagcttcattgcccttgcagctcttgttcctggcctaaagaagatggacaaggcttctgtgttaagggacgcta

SEQ ID NO: 5382 - DNA, 380 bp, Glycine max
  Clone ID: LIB3029-011-Q1-B1-G5
gagaaaacaagaagtagtgagaagaagggagagaatggaggaaaaggcaaaagctgagcagaagaagataggtatgaccgagacttggttgaagaagcaccgtcttctttacaatggagccactagacaccctcttattattagcattcgcgatggcaccatcaacactgcttccttcaaaacatggctcgcacaggattacttgttcgttcgggcgtttgtcccatttgtggctagtgtgctgataaaagcgtggaaggaatcagattgcagtggtgacatggaagtcatattggggggcatggcttctctggaggatgagatttcatggttcaagacagaagccaacaagtggggtatttcactttctgacgttgttc

SEQ ID NO: 5383 - DNA, 382 bp, Glycine max
  Clone ID: LIB3029-011-Q1-B1-G6
tcaggttctcgtcttttgggcaccattcctcagtccatttcacagcaaactgtttggaatcaaatggcaacagtgagaacaccattgaattttgattctagcaagcagagcttttgtcaattttctatcgaccttctcggtggaggaattttagtggacaaaactggagattggatcacacttatacaaaattctccaattagtaacttgttgagagttgctgcttggaagaaaggctgtttaatggtcaagattgtgatgtctgggaatgcagcagtcaaaaggagtgattgggcctcattggtacaagtgtttttaacaaacagcaacagtacagagcattttgatgcatgtaagtggacaaaatcagaaccacattcct

SEQ ID NO: 5384 - DNA, 376 bp, Glycine max
  Clone ID: LIB3029-011-Q1-B1-G7
aaacaaagggaaaaaaaaagtatccactttcccttcttcttcttccatttgggttttctcaaaagtgaaaagcaaattccgtgacttccacaatcaccactcggatcagtatgcacaccagtctcagaaaacccacaagaacaaaaatcagatttttccaaaactcttgagtgatagactttgaatgaaatcttgtttttcattaacgagattcaattgaagtgaagtgattattcactggaaaacttatttttcatagtattggaggtacaactgaagctgttagatttgttttaactacacgagttcgttggatatttgagcatggctgggaatcaagatcagtttgagatcaagtttcggttgactgaaggtt

SEQ ID NO: 5385 - DNA, 385 bp, Glycine max
  Clone ID: LIB3029-011-Q1-B1-H1
cacagtctgtgacattcccccaactggcttgaagatggcttcaacattcattggtaactctacctccattcaggaaatgttccgtagagtgagtgagcaattcactgctatgtttaggaggaaggctttcttgcattggtataccggggaaggcatggacgagatggagttcacagaggctgagagcaacatgaacgatctcgtgtcggagtatcagcagtaccaggatgccactgctgatgaggatgagtatgaagaggaagaggaggaggaggagtttgcccaacatgatatgtgaatttgaacttgggtgtggtgtattgcggtggctttagacaagaagatggataacaagctgcaacttcctgttgccggttgatgattg

SEQ ID NO: 5386 - DNA, 432 bp, Glycine max
  Clone ID: LIB3029-011-Q1-B1-H10
gattagaatggtggccacagttggtattcctgagaatacaggtatagcattggcctgtgctatgaatagttcttttagggggcgcgccagttctgatatttacagcatctgctctcacgactgtgaattgtggaatcctgcttgcacaggagcaatgactatgtcatttaatccaaacccgtgttctgatgcatggagtttggaatttttgaagcgtaccggatttcattgtgatatcaattgtgtcactgggtggactgccaccgcaatgtatgatgttcatgttacagttgactggtttaattcctctcaggaatgtgttcccaggacctattgtgttttagatccacacaatccttttgtgtgaaatacgtggatgggaaatctgacctttccccaaggcacttccggaagtgttaacaaaatgcccct

SEQ ID NO: 5387 - DNA, 367 bp, Glycine max
  unsure (1)..(367): unsure at all n locations
  Clone ID: LIB3029-011-Q1-B1-H11
ctggtaattaatgaaggagatgcaaacattgaacttgttggcctaaaagaacaacaacaggagcagcaacaggaagagcaacctttggaagtgcggaaatatagagccgaattgtctgaacaagatatatttgtaatcccagcaggttatccagttgtggtcaacgctacctcaaatctgaatttctttgctattggtattaatgccgagaacaaccagaggaacttcctcgcaggttcgcaagacaatgtgataagccagatacctagtcaagtgcaggagcttgcattccctgggtctgcacaagctgttgagaagctattanagaaccaaagagaatcctactttgtggatgctcagcctaaga

SEQ ID NO: 5388 - DNA, 399 bp, Glycine max
  Clone ID: LIB3029-011-Q1-B1-H12
caaatatttcactagctactactcttcttagtttctctgttgtatcatttttattgctatatcctaatcaaacttcactctcaaaatgagtgatcccacactagcacaacagcatctagtcaaagtccacacaacaacacacgaaacagttgttaccacacacaatcataaccaaacaccctcaataaatgcctcaggtgaaaagaagaagattgtgggggtgttctacaaagggaatgaatatgctaaattgaatccaaattttgttggatgtgttgaaggtgcattgggaatacgtgagtggctggaatcacagggtcatcagtacattgtcactgatgacaaagaaggacctgattctgaacttgagaaacacatttcagatgcacatgtcatcat

SEQ ID NO: 5389 - DNA, 373 bp, Glycine max
  Clone ID: LIB3029-011-Q1-B1-H3
ccacgtgaaagaggatgcgagacaagaaacggggttgaggaaaatatctgcaccttgaagcttcacgagaacattgctcgcccttcacgcgctgacttctacaaccctaaagctggtcgcattagtaccctcaacagcctcaccctcccagccctccgccaattccaactcagtgcccaatatgttgtcctctacaagaatggaatttactctccacattgggatctgaatgcaaacagtgtgatctatgtgactcgaggacaaggaaaggttagagttgtgaactgccaagggaatgcagtgttcgacggtgagcttaggacgggacaattgctggtggtaccacagaacttcgtggtgggggagcaagccg

SEQ ID NO: 5390 - DNA, 394 bp, Glycine max
  Clone ID: LIB3029-011-Q1-B1-H4
caaaaatgaagagcaccatcttctttgctctctttctcttttgtgccttcaccacctcatacctaccttcagccatcgctgatttcgtgctcgataatgaaggtaaccctcttgaaaatggtggcacatattatatcttgtcagacataacagcatttggtggaataagagcagccccaacgggaaatgaaagatgccctctcactgtggtgcaatctcgcaatgagctcgacaaagggattggaacaatcatctcgtccccatatcgaatccgttttatcgccgaaggccatcctttgagccttaagttcgattcatttgcagttataatgctgtgtgttggaattcctaccgagtggtctgttgtggaggatctaccagaaggacctgctgt

SEQ ID NO: 5391 - DNA, 380 bp, Glycine max
  Clone ID: LIB3029-011-Q1-B1-H5
ggagcatctctgttatttcaacggctttgcctgcaagattttgcacgaattgatggatggtttttgccaaattcaagttccaaattatcaccattttcccaaagtgagtttggaagaacagaatctggtgccataatattcactgacattaacatgataagtggtatggaacagaccagttttctatttcagcaagcttctaaggttggtttttctcatacaaacatccttagaagcattattcaccatgcttgcttgcgatttccaaatcttgcatcagttagtggtatatcaggtcagcttccaagcaggtcaaaatccttacaacgtaacaagtctttttctcgccgtgaacgaactcgaaaagtgtttgtcatttt

SEQ ID NO: 5392 - DNA, 396 bp, Glycine max
  Clone ID: LIB3029-011-Q1-B1-H8
aaaaaacagtaactgaaaagtcatgatttgtcatttgcttgaattctctggggccagatgttgttgtgcagctgttttatttcatcacttgttctaattgcttcttgttaggagcatggtttctttcttctctgagaaaggctaattatgcaaactaaaggagtttataatctggacatagtgttatgggcttctgttttgtgtacggcaattgttttgagaaaggaaactgttcattcaaactctgggttgtgatggggatcaagcgttttctgtgttggagggtcaagtcatgacaatccttttcttacattcaaacattgagaagtggaacttttgctatgaagtattatccttttgatttgaatgtatgtttcagtttatagcacatcatta

SEQ ID NO: 5393 - DNA, 445 bp, Glycine max
  Clone ID: LIB3029-011-Q1-B1-H9
attctctccattggtccttaaacactcatcagtcatcaccatggccaagctagttttttccctttgttttctgcttttcagtggctgctgcttcgctttcagttccagagagcagcctcagcaaaacgagtgccagatccaaaaactcaatgccctcaaaccggataaccgtatagagtcagaaggagggctcattgagacatggaaccctaacaacaagccattccagtgtgccggtgttgccctctctcgctgcaccctcaaccgcaacgcccttcgtagaccttcctacaccaacggtccccaggaaatctacatccaacaaggtaagggtatttttggcatgatatacccgggttgtcctagcacatttgaagagcctcaacaacctcaacatagaggacaaagcagcagaccacaagaccgtcaccagaagatctataac

SEQ ID NO: 5394 - DNA, 356 bp, Glycine max
  Clone ID: LIB3029-012-Q1-B1-A1
caactatggcaagttatcaaaagcactacgatgatcaaggtcgcaaggttgacgactatggcaacgttgagaagcaaaccgacgaatacggcaaccctgttcaagctgctaatgtcacctatgtagccaccagaactgctgctggtggttacagtgatgacattaatacgcaacatgataccaccaatgcctacggcgtagacactggtagacagcattctagtggtggctacgatggtgacactaataaacatcatggaactactggtggctataatgatgacaccaatagacatcatggaactaccggtgtctatggtatagacaccgataggcaacaacatgggactactggg

SEQ ID NO: 5395 - DNA, 383 bp, Glycine max
  unsure (1)..(383): unsure at all n locations
  Clone ID: LIB3029-012-Q1-B1-A11
cattggtccttaaacactcatcagtcatcaccatggccaagctagttttttccctttgttttctgcttttcagtggctgctgcttcgctttcagttccagagagcagcctcagcaaaacgagtgccagatccaaaaactcaatgccctcaaaccggataaccgtatagagtcagaaggagggctcattgagacatggaaccctaacaacaagccattccagtgtgccggtgttgccctctctcgctgcaccctcaaccgcaacgcccttcgtagaccttcctacaccaacggtccccatgaaatctacatccaacaaggtaagggtanttttggcatgatataccgggttgtcctagcacatttgaagagcctcaacaacctc

SEQ ID NO: 5396 - DNA, 379 bp, Glycine max
  Clone ID: LIB3029-012-Q1-B1-A12
tggacgtgtctaccataaccacgaagaagaggcaaagagacttgagattttcaagaataacttgaactatatcagggacatgaatgcaaacagaaaatcaccccattctcatcgtttaggattgaacaagtttgctgacatcactcctcaagagttcagcaaaaagtacttgcaagctcccaaggatgtgtcacagcaaatcaaaatggccaacaagaaaatgaagaaggaacaatattcttgtgaccatccacctgcatcatgggattggaggaaaaaaggtgtcatcacccaagtaaagtaccaagggggctgtggaagcggttgggcgttttctgccacgggagccatagaagcaacacatgcaatagcaacagga

SEQ ID NO: 5397 - DNA, 401 bp, Glycine max
  Clone ID: LIB3029-012-Q1-B1-A2
gcaagagaaaaaataccaaccatggcaaccatttctactgatcaaccaagaggatcctactcctatggaacctcctatggagcaccctatggaaccacctatgagaccaacagcagcattaacaaccctccttcacgccaaaccgtgaagttcataactgctgcaactattggcatcacactcttactcctgtctgggttgaccctcacaggcactgtcataggtttgatcattgcaacccctcttcttgttatcttcagccccatccttgtccctgctgcgtttgtgctgttcctgattgcttctggctttttgttctctgggggctgtggtgtggctgccattgctgctttatcttggatttacaactacgtttctgggaaccagcctgcgggttctga

SEQ ID NO: 5398 - DNA, 399 bp, Glycine max
  Clone ID: LIB3029-012-Q1-B1-A4
cataaaattcttccaccaagttatgggtttccttgtgttgcttcttttctccctcttaggtctctcttctagttccagcatatcaactcatcgttccatattggaccttgacctaaccaagtttaccacacagaaacaggtgtcttcactgttccaactatggaagagtgagcatggacgtgtctaccataaccacgaagaagaggcaaagagacttgagattttcaagaataacttgaactatatcagggacatgaatgcaaacagaagatcaccccattctcatcgtttaggattgaacaagtttgctgacatcactcctcaagagttcagcataaagtacttgcaagctcccaaggatgtgtcgcagcagatcaaaatggccaacaggaaaatgat

SEQ ID NO: 5399 - DNA, 395 bp, Glycine max
  Clone ID: LIB3029-012-Q1-B1-A5
gtggaataagagcagccccaacgggaaatgaaagatgccctctcactgtggtgccttcaccacctcatacctaccttcagccatcgctgatttcgtgctcgataatgaaggtaaccctcttgaaaatggtggcacatattatatcttgtcagacataacagcatttggtggaataagagcagccccaacgggaaatgaaagatgccctctcactgtggtgcaatctcgcaatgagctcgacaaagggattggaacaatcatctcgtccccatatcgaatccgttttatcgccgaaggccatcctttgagccttaagttcgattcatttgcagttataatgctgtgtgttggaattcctaccgagtggtctgttgtggaggatctaccagaaggac

SEQ ID NO: 5400 - DNA, 396 bp, Glycine max
  Clone ID: LIB3029-012-Q1-B1-A6
gtgttcaagctcgaaaaatcgtagaagactacaccaaggtgagtgacgaaaactgatggctgccactgaggaaaaaattctctctaggattgaccgtttggataatgtgttgcggcatttggaggaaattagagggtgcaatccatctccgaagagctcgtgtgcatctactccaacaagtggaagtgacggacacgtgtcgtccactgatttctccccaaagagtttagagaagcactgccgtccgattgaaaacattatgatggagaccgaagccaaaggaacgatgatagagaggctcaatcaggtggaggatcgaatgctaaaggtatctccacgtggaaatctattgaccgtttgatcttggcttgtatggatgtggtgataatatgactt

SEQ ID NO: 5401 - DNA, 393 bp, Glycine max
  Clone ID: LIB3029-012-Q1-B1-A7
gtgcatgacagttcagtgtctacaataccaggtgattttgttattggtgttaagttgacaaccatagacagtatgtgtgcatatgggctcaatcctggtatttcaggttctcgtcttttgggcaccattcctcagtctatttcacagcaaactgtttggaatcaaatggcaacagtgagaacaccattgagttttgattctagcaagcagagtttttgtcaattttctattgaccttctcggtggaggaattttagtggacaaaactggagattggatcacacttatacaaaattctccaattagtaacttgttgagagttgctgcgtggaagaaaggctgtttaatggttaagattgtgatgtctgggaatgcagcagtcaaaaggagtgat

SEQ ID NO: 5402 - DNA, 401 bp, Glycine max
  Clone ID: LIB3029-012-Q1-B1-A8
aggagacgtactagtgattcctcctggtgttccttactggacctataacactggcgatgaaccagttgttgccatcagtcttcttgacacctccaacttcaacaatcagcttgatcaaaaccccagagtattttaccttgctgggaacccagatatagagcacccagagaccatgcaacaacagcagcagcagaagagtcatggtggacgcaagcaggggcaacaccagcagcaggaggaagaaggtggcagtgtgctcagtggcttcagcaaacatttcttagcacaatccttcaacaccaacgaggacacagctgagaaacttcggtctccagatgacgaaaggaagcagatcgtgacagtggagggaggcctcagcgttatcagccccaagtggcaag

SEQ ID NO: 5403 - DNA, 387 bp, Glycine max
  Clone ID: LIB3029-012-Q1-B1-A9
ctcggggaattccaattccacattttcaagaaataaggaggcaaaaatgttcatatatgaattggaattatttgttttcttattaggcctatcctgaagccaaaggaaatgagatcggaattcctcggggaattccaattccacattttcaagaaataaggaggcaaaaatgttcatatatgaattggaattatttgttttcttattaggcctatcctgaagccaaaggaaatgagatcggaattcctcggggaattccaattccacattttcaagaaataaggaagcacatatgttcatatatgaattggaattatttgttttcttattagggctatcctgaagccaaaggaaatgagatttggaatcctcggggggtaacgagct

SEQ ID NO: 5404 - DNA, 395 bp, Glycine max
  Clone ID: LIB3029-012-Q1-B1-B1
gtagatccattggcttcaagcacatgggaggaggtttccccagaagatgtgcttatcactcaagtgcagtgcaaggctttgtcgagacaatttcacggagaaactgagtatacagttactcaagctatttcagctcaggaggcctacaagcggagtaacaattggttacctcctccatgggcaataatggcaatggtcatacttggttttaatgaatttatgttgctactaaaaaatcctctctacctgatgtttatatttgttgcctatctactcggaaaggccatctgggtacaaatggacatagctggagagtttcgacatggcactctgcctggactactatccatttcatcaaagtttcttcccacatttatgaaccttatcaaacgtct

SEQ ID NO: 5405 - DNA, 347 bp, Glycine max
  Clone ID: LIB3029-012-Q1-B1-B11
ggcaaagctattgtctgttctgatgctgcagcagaggctgcaagatatggttttactgctgtggacaggccagaaggattcttggttttggccattgcttctctaggaaatgagattaccgagttgaaaaccccacctgaggatgcatcatctttggaggaaaagaacgttggagtgaagggaccggggaagaagaaaacagatgaatcggagcattttgtttggaaagatgatataaaagttccttgcggtaaactagttgcctcagaccatcaagatagccccctggaatacaacgagtatgctgtctacgataaaaagcgggcacgcataagctacttggtggg

SEQ ID NO: 5406 - DNA, 395 bp, Glycine max
  Clone ID: LIB3029-012-Q1-B1-B12
tctaaagctagtaagtagtaagtagtaagccactatcgtttctctctaacagcaaaaaagttctaacctcaccaaacccacactaccatgggtaatgagaatcgcgagcttcacgtattattcttccccttcccagctaatgggcacataataccaagcattgacttagccagagtctttgcttcaagaggaatcaaaaccaccgtagtcaccactcccctcaacgttccactcatttcaagaaccataggaaaagccaacatcaaaatcaaaacaatcaagtttccttctcatgaggaaactgggttgcccgaaggttgtgaaaattccgattctgccctctcctctgacttgatcatgacgttcctgaaggccaccgtgctcctgcgggaccc

SEQ ID NO: 5407 - DNA, 282 bp, Glycine max
  Clone ID: LIB3029-012-Q1-B1-B2
catttttattgctatatcctaatcaaacttcactctcaaaatgagtgatcccacactagcacaacagcatctagtcaaagtccacacaacaacacacgaaacagttgttaccacacacaatcagaaccaaacaccctcaatagatgcctcaggtgaaaagaagaagattgtgggggtgttctacaaagggaatgaatatgctacattgaatccacattttgttggacgtgtggaaggtgcactgggaatacgtgagtggctggaagcacagggtcatgagtc

SEQ ID NO: 5408 - DNA, 404 bp, Glycine max
  Clone ID: LIB3029-012-Q1-B1-B4
ctctgccactgccatcagcattctcaacacctcctccctcactcactcatcaatggcatcaacaatatcagcaatggccatgatcaacgccaaatgcgtcaacccaaagttccccaaccccaccaagctcgtaccatcaaaaccttcccttcaggtcaaccttccaaagggcctaatagcctcacccgaaaacaccaaactttccactgcgacagcaatcgcaggagcaatattcacaaccctcggaacctgcgacgccgctttcgccgttcaacagatagccgacataccagaaagcgacaaccgcggtctggcactgttgctgcccataattcctgcaatacggtgggttctgttcaacattctgcagccggcgctgaaccaactgaaccgcatgcgcagca

SEQ ID NO: 5409 - DNA, 403 bp, Glycine max
  unsure (1)..(403): unsure at all n locations
  Clone ID: LIB3029-012-Q1-B1-B8
cagaaagctggagaatacaaggattataccgctgagaaggcaattgaagggaaggacagtgcagtggggaagcttggggagctaaaggaatctgctgctgatgctgctaaaagggctatgggtttcttcaccggtggcaacaaagaccaaactagagaggaggaggaggaaacgaggcggagtatgcaggaggtgagggtgcaagataaggagtatggaacgggacgtggtactggagagaagttggtgataaaaatggaagagtcgcggccaggagcggtggcggatgcgctcaaagcagcgaatagggccatggacggcgatatggaggaggaaggcgtgcttcatgtggagcgtcgtanggagaaaatgtgattctccttctcatccatcatcataataa

SEQ ID NO: 5410 - DNA, 385 bp, Glycine max
  Clone ID: LIB3029-012-Q1-B1-B9
aaaattcttccaccaagttatgggtttccttgtgttgcttcttttctccctcttaggtctctcttctagttccagcatatcaactcatcgttccatattggaccttgacctaaccaagtttaccacacagaaacaggtgtcttcactgttccaactatggaagagtgagcatggacgtgtctaccataaccacgaagaagaggcaaagagacttgagattttcaagaataacttgaactatatcagggacatgaatgcaaacagaaaatcaacccattctcatcgtttaggattgaacaagtttgctgacatcactcctcaagagttcagcagaaagtacttgcaagctcccaaggatgtgtcacagcaaatcaaaatgggcaac

SEQ ID NO: 5411 - DNA, 397 bp, Glycine max
  Clone ID: LIB3029-012-Q1-B1-C1
gagagatggggctaagaagtaaattaagaatgtcagcgtcagtggtgcagcaggggatgaaggaaataagaaggagcgtgacgtacatgcctcgaccgggggacggtgcgccgcggggggtgacgctgataccgggggacggaattgggcctctggtgactcatgcggtggagcaggtgatggaggcgatgcacgcccccatatacttcgagaagtacgatgtgcacggggacatgaggcgtgtgccggaggaggtgctggattcgatacggaagaacaaggtgtgcttgaagggtggtttgaggactccggtgggtgggggtgtgagctccctcaacgttcagctcagaaaggacctcgatctctacgcttccctcgtcaattgcttcaacttgcc

SEQ ID NO: 5412 - DNA, 396 bp, Glycine max
  Clone ID: LIB3029-012-Q1-B1-C10
catgaacaagaattatgttaggaggattgagctcttctaagaacgcacttgttcatggagaagctaatgagatgggcaggctcaagcagaagctcataagtcaatttgctgatcgcaacactaaaattcttactccaaaaaactgtcaatctgttgaaatgtatttcaattcgcagaaaatggcaaaaaccatagggaagctggctgaaaaaaacaccagaagttggtgaaactgtcagtggtttgcttgtaaaaaaaggcttcacatatcagattatggcagctgatgatctccatgtcgtttcacaactatcaacagcaaacattactcagaggattaccatcccttattcaagtgcctttaatgtgatacagcatagactcaaacagatatat

SEQ ID NO: 5413 - DNA, 372 bp, Glycine max
  Clone ID: LIB3029-012-Q1-B1-C11
tgcagtgttcgacggtgagcttaggaggggacaattgctggtggtaccacagaacttcgtggtggcggagcaagccggagaacaaggattcgaatacatagtattcaagacacaccacaacgcagtcactagctacttgaaggatgtgtttagggcaattccctcagaggttcttgcccattcttacaaccttcgacagagtcaagtgtctgagcttaagtatgaaggaaattggggtcctttggtcaaccctgagtctcaacaaggctcaccccgtgttaaagtcgcataaatgacaagcatgatggtgtgaggatgaggccatcttatgaaataataacaaataaataaattttgtatgataataaaaag

SEQ ID NO: 5414 - DNA, 371 bp, Glycine max
  unsure (1)..(371): unsure at all n locations
  Clone ID: LIB3029-012-Q1-B1-C12
ctagttcaatatcctagtataccttaataaataatttaagatactatgatgagagcacggttcccattactgttgctgggacttgttttcctggcttcagtttctgtctcatttggcattgcttactgggaaaaagagaaccccaaacacaacaagtgtctccagagttgcaatagcgagagagactcgtacaggaaccaagcatgccacgctcgttgcaacctccttaaggtggagaaagaagaatgtgaagaaggtgaaattccacgaccacgaccacgaccacaacacccggagagggaacctcagcaacccggtgagaaggangaagacgaagatgagcaaccacgtccaatcccattcccacgccc

SEQ ID NO: 5415 - DNA, 395 bp, Glycine max
  unsure (1)..(395): unsure at all n locations
  Clone ID: LIB3029-012-Q1-B1-C3
tttaatccaaacccgtgttctgatgcatggagtttggaatttttgaaccgtaccggatttcactgtgatatcatttgtgtcactggatggactgccaccccaatgcaggatgttcaggttacaattgattggtttatttcctctcangaatgtgttcccaggacttattgtgttttaaatccacaaaatccttttgtgttaaatacgtggatggggaaactgactttcccccagggcacttcccgaaatgttaagagaatgcctctttctatagggggaggagctggtgcaaagaatgctattctcatgaatatgccaaatgctgttctttcaatgtggagatattttgttggagatctcgtctttgaagtttctaagatgacttctccctacat

SEQ ID NO: 5416 - DNA, 404 bp, Glycine max
  Clone ID: LIB3029-012-Q1-B1-C4
tataactcggtcccacttgccttcttctgtaacgtgtaaaaaacaaacactataaatctcccgcacccccgagcccggaaagagatctagtgtgtctgtgactgtcagaaacaaacattatttggttttctgaattgtttggattgcgagaaaaaaaaagggggggaaatggcaaaggatattcgattcttcgacctcaacacgggcgccaagatcccttcagtcggcttgggaacttggcagtctgatcctggccttgttgctgaagccgtcgcggcggccatcaaggttggttaccgccacattgattgtgctcaaatctatggcaatgagaaggagattggctctttgttgaagaatctgtttgaggacggtgtagtgaagcgcgaggatttgtggattac

SEQ ID NO: 5417 - DNA, 392 bp, Glycine max
  Clone ID: LIB3029-012-Q1-B1-C5
ggggaaatgatactacaagccactaggcatgggtctagcaaaggaaacaataatgggaggtggaggccgtgtggccaaagttgaaattcagcagaagaagcctctctcaagggttccaaacacaaagccaccattcactgttggccaactcaagaaagccattccaccgcactgctttcagcgttccctcctcacttcattgtcctatgttgtttatgacctttcattggctttcattttctacattgccaccacctacttccacctcctccctcaccccttttccctcattgcatggccaatctattgggttctccaaggttgcattcttactggcgtgtgggtgattgctcacgagtgtggtcaccatgccttcagcaagtacccatggg

SEQ ID NO: 5418 - DNA, 400 bp, Glycine max
  Clone ID: LIB3029-012-Q1-B1-C6
cccattttcaattccttctcagtttccttttctctgaaaaaagatgttgagggttgcagctaggaggctctcttctctctcctcttcttctccgttgcggcccaatcacgccgcttccgcttttctctctcgaaacgacgtcgtcgtcgatgaccacagatctgttccttcctcccatccccttcttcccttccgaggttttgctactgaatccctgatccacccaatagaaaacagcattattccccagattctgccaactgttactgctgttaagaaccctacttctaagattgtctatgatgatcacaaccatgaaagatttcccccaggtgacccaagcaagagggcatttgcctacttcgtacttacaggtggtacgtttgcttatgcctctctg

SEQ ID NO: 5419 - DNA, 392 bp, Glycine max
  Clone ID: LIB3029-012-Q1-B1-C7
gacagtaggaaccgttggcgcgggacgaattgggaagcttttactccagaggttgaaaccttttaactgtaatcttctgtattttgatcgacttaggatcgatcctgaattggagaaagagattggagcaaaatttgaggaggaccttgatgcaatgcttccaaagtgtgatgtaattgttatcaacacccctctcactgagcagacaaggggattgtttgacacaaatagaattgcgaagtgcaagaaaggtgtcttgactgttaacaatgctcgaggggcaattgcggacacccaagcaattgcagatgcttgctccagtggccacgttgcaggttatagtggtgatgtttggttcccacagccagctccaaaggattatccatggcgtt

SEQ ID NO: 5420 - DNA, 401 bp, Glycine max
  unsure (1)..(401): unsure at all n locations
  Clone ID: LIB3029-012-Q1-B1-C8
attggtccttaaacactcatcagtcatcaccatggccaagctagttttttccctttgttttctgcttttcagtggctgctgcttcgctttcagttccagagagcagcctcagcaaaacgagtgccagatccaaaaactcaatgccctcaaaccggataaccgtatagagtcagaaggagggctcattgagacatggaaccctaacaacaagccattccagtgtgccggtgttgccctctctcgctgcaccctcaaccgcaacgcccttcgtagaccttcctacaccaacggtccccaggaaatctacatccaacaaggtaagggtatttttggcatgatatacccgggttgtcctagcacatttgaagagcctcaacaacctcaacanagaggacaaagca

SEQ ID NO: 5421 - DNA, 157 bp, Glycine max
  Clone ID: LIB3029-012-Q1-B1-C9
attggtccttaatcactcatcactcatcaccatggctatactacttttttccctttgttttctgcttttcactggctgctgcttcgcttgcagttccatagagcatcctcagcacaacgagtcccacatccagctcctcaatgcccttataccggtt

SEQ ID NO: 5422 - DNA, 364 bp, Glycine max
  Clone ID: LIB3029-012-Q1-B1-D1
gattttcagaggaacaatggcgggtaaggttgcggcttgctgcgtgcacgagtttgctcgttgtcgcgctcctccgtttgagatcgccagctgaggaagcatcgtgataacgagttcgtactcacattggatcaggctaacttacaggagactgctagcaatcacgatttcatcctcgtcgatttctaggcacgatggtgtggctactgatagaagcctgctctggattatgagaatgctgcttctacctagactagacaggattctccggttgtcatggctacaggtgatcctgatgaagagacgagtatagaccatgcatctcattctgatgttaggggatgaccaacaattgggattctga

SEQ ID NO: 5423 - DNA, 397 bp, Glycine max
  Clone ID: LIB3029-012-Q1-B1-D11
ctggggagaagatggctacatcaggttagaaagaaatcttgctaacagcagatcaggcaagtgtggaattgcaattgagccatcttatccccttaagaatggtccaaatccacctaatcctggaccatcacccccttcacctgtgaagccaccaaatgtctgtgacaactactacagctgtgctgatagtgctacttgttgctgtattttcgagttcggaaatgcttgctttgagtggggttgctgtcctcttgagggtgctacctgctgtgatgaccactacagttgctgccctaacgactatcccatctgcaacacttatgctggaacttgtctcaagagcaagaacaacccattcggagtgaaggcattgaagcgtactccggctaaaccccaa

SEQ ID NO: 5424 - DNA, 386 bp, Glycine max
  Clone ID: LIB3029-012-Q1-B1-D12
atcggagcgtaccgcggaggccagagaagcagggactggtgcgacccttcatcaccattcactgatttgtgggaccctcgtcgtgtcggtgacgctgatgatatcacctcctctctcgcccatgctcacgttgactggcgtgagactgataaagctcatatcttccgtgctgatcttccaggggtgaagaaagaggatctgaatgtgcacgtggaggagaataagatcctgcagataagcggggagagggtgaaggagaaggaggaccagaacgacaagtggcaccgcgtcgagaggcagtgcggaagcttcctccgccgcttccggctgccgggaggatgcgcaacccaaccagattagctgcacgctcgaaaaccggggtgctg

SEQ ID NO: 5425 - DNA, 345 bp, Glycine max
  Clone ID: LIB3029-012-Q1-B1-D2
cataatcagtagcacatccgtagttcaggatgcggaagccgttcactccctctctgccctccctctgcttgctcgtcttgacatgtgcacgcatgacgtatatcataaggagttctcaacgaatgctggatcaggcatacctacacgattagtctccgcacacagcattgagtccgcctgtagttctgagcacgacggtgtggctactgtgagaagcctgctctggattaggagacaagtgcttagacctagactaatcaggattggccggtagttatggctgcagctgatgctgctgaggagaagatcattgaccatgcgaaccagatctgatgtgaggggata

SEQ ID NO: 5426 - DNA, 397 bp, Glycine max
  Clone ID: LIB3029-012-Q1-B1-D3
aggaagagagaacagaggagcaagaactgaagtacctggaattcgtgcaattcgcgaccatacaggctctgatgcgctgcgccatcctctactcatacgccaaggagcgcgcgggtcctctgaagcccggtgtcgacaccgtggaggaggccgtgaagaccgtcgtggctccggtctacgataggttccaccttgtccccggcgaggtcctcaaatacgcggatcggaaggttgccgagttagacagccacgttccctccaacgtgaagaaggtctcctcccaggcctgctccgtcgtctctgaagtccgccgcgatggcgtctccgcctacgccaagaccgtttactccaagtacgagcctacggcggagcagtgcgcagtgtctgcatggcggaa

SEQ ID NO: 5427 - DNA, 391 bp, Glycine max
  Clone ID: LIB3029-012-Q1-B1-D4
ctcgagccgccgaagttcacatctgtttggaataagcttcttttccatacaattgaatttttagaattatggctcacttattgtcaccagtatgcatggaagcgctgaaaatccacaatcgatcattgaatctttgttcatgaagctcatggtggatgctggtgaagggtgcaagtccttgcagctttctgatacacagtggtaggacgcgaagagggtttggcaaagtgagacttactgctgaagactcagtttctccctctgagagcatggcacatgactattatgaacttcttggactgcttccagatgcgataacatcagcagatcacgaaggcatattacaattgcatgaaatcttgccacccggatttgagtggaaatgatcctg

SEQ ID NO: 5428 - DNA, 394 bp, Glycine max
  Clone ID: LIB3029-012-Q1-B1-D5
actcaaactcccctgctattcttcttctccctcaattctctctcaccaaaaccctttgcacccaataccctcaaactcaacttcaattgctaatttttataaagctagccggagatgatggttcaaaaggaagatttgggtttgagtttaagtctcaatttccctcatcacagtaccccaaatcctcaacatctgagtctcatgtcatcctctactcattcctcttccccttctggtttcaaccctcaaaaaccctcttggaacgaggctttcgcttcttcggatccagatcgaaactccgacacatgcagaggcgaaacacggtcgttcctgcggggaatcgacgtgaaccggttaccttccgccgtggacgccgaggaggaagcgggagttt

SEQ ID NO: 5429 - DNA, 405 bp, Glycine max
  Clone ID: LIB3029-012-Q1-B1-D6
tgccgtttctattattgacaccaacagcttggagaaccagctcgaccagatgcctaggagattctatcttgctgggaaccaagagcaagagtttctaaaatatcagcaagagcaaggaggtcatcaaagccagaaaggaaagcatcagcaagaagaagaaaacgaaggaggcagcatattgagtggcttcaccctggaattcttggaacatgcattcagcgtggacaagcagatagcgaaaaacctacaaggagagaacgaaggggaagacaagggagccattgtgacagtgaaaggaggtctgagcgtgataaaaccacccacggacgagcagcaacaaagaccccaggaagaggaagaagaagaagaggatgagaagccacagtgcaagggtaaagacaaaca

SEQ ID NO: 5430 - DNA, 75 bp, Glycine max
  Clone ID: LIB3029-012-Q1-B1-D7
tggtgtcaccctcggtttcatggcacatacatgcagtgtggccgttctcctcacgatcaagcgataacgcgagaa

SEQ ID NO: 5431 - DNA, 401 bp, Glycine max
  Clone ID: LIB3029-012-Q1-B1-D8
gggtcaggagggttaaatcttgatggaatagaaccagaatacaagctggtcctacgcaaagtgctaaagtttcataagcatccagttactgcacttcacctcacgaccgacctgaaacagttattgagtggggattcaggcgggcatttgctttcctggacactgcctgaagagagtctgcgaggttcattaaatcaggggtgagattggtaaatgatggttcgttatgctgacttaagcatttggccagcctttaattgttgaatcctaacattggcttgagtggatctcaattgttgaaagatggattcatgttcataattcgagagaattgaaaaagaatgctggccagattgaaacagagcaagcaagattgtaaaagaaaagatgatataacggcg

SEQ ID NO: 5432 - DNA, 385 bp, Glycine max
  Clone ID: LIB3029-012-Q1-B1-D9
gaacaccattgaattttgcttctagcaagcagagtttttgtcaattttctattgaccttctcggtggaggaattttagtggacataactggagattggctcacacttatacagaattctccaattagtaacttgttgagagttgctgcttggaagaaaggctgtttaatggttaagattgtgatgtcagggaatgcagcagtcaaaaggagtgattgggcctcattggtacaagtgtttttaacagacagcaacagtacagagcattttgatgcatgtaagtggacataatcggtaccacattcctgggaattgatcatcccaatagaggtatgtggtcctaagaatggttttgaaatgtggagttctgagtgggcaaatcaaac

SEQ ID NO: 5433 - DNA, 395 bp, Glycine max
  Clone ID: LIB3029-012-Q1-B1-E1
ctcgagccgattcggctcgaggctggtgcagtttggagagattcaggaaaaagttgtattgaaattttcacaagaggaatttcttacagcttggtcaactcaggtgcgtcctgcaacaactctgttggctgatgggtgtccatatttgtatgctatggtgcatgatagttcagtgtctacaataccaggtgattttgtcattggtgttaagttgacaaccataaacaatatgtgtgcatatgggctcaatcctggtatttcaggttctcgtcttttgggcaccattcctcagtctatttcacagcaaactgtttggaatcaaatggcaacagtgagaacaccattgaattttgattctagtaaacagagcttttgtcaattttctattgaccttc

SEQ ID NO: 5434 - DNA, 72 bp, Glycine max
  Clone ID: LIB3029-012-Q1-B1-E10
cggctcgagatgaagttcttatacatccaaaacttacatattttaaattatatattttgtttgttggtgttt

SEQ ID NO: 5435 - DNA, 396 bp, Glycine max
  Clone ID: LIB3029-012-Q1-B1-E11
tggctttggtgtttgaggtgcttgagattgtgcctcatgaacttctttttgtggcggttaaggtggtggagggtgcgttggagtttgaggaacatcattggggggattggaaagatgcgttgcaagatctcgtgctctcttggcacaaccaagaatcgtgatcatcagttaatgataggtatagttagttcttctcaagtgaaggatctacatgaggtttgatgttgaaggactaattgcagaacatgacatgcacactcacatcgtgctcgtcctgatgagaagaaacaaacaaggttgatgatgcttgttttgtgatttgattttgattttgtgttgaagcttagttatacgtgtattaatttatatatgatggtttgaaaaataaaaattgtt

SEQ ID NO: 5436 - DNA, 370 bp, Glycine max
  Clone ID: LIB3029-012-Q1-B1-E12
ccgactctcattagcctttcagtgatagagatcttgtcgacacatgcttctgatgaggtctaccttggccagagggacaacccacattggacctctgattcaaaagcattacaagcctttcaaaagtttggaaacaagctcaaggaaattgaggaaaaacttgtgaggaggaacaatgatccgagtctgcagggcaatcgacttggcccggttcaactgccatacactttgctttaattgttctcaaataagccttttcatggttattaatcatttcttcatattctggggtgcctttctcaggaagcaaccttctagaagcagttgggcggttcattatcaaacctcccggctcgagcggctcgagaac

SEQ ID NO: 5437 - DNA, 332 bp, Glycine max
  Clone ID: LIB3029-012-Q1-B1-E2
tgcacaatcttcattgcctcggaactcttcattgctcccattcatcaccaaccattataccctgatggaaccattcccaccacccagctccacaactttgaacactccttcatggccatggctttcttggtctatgccatctttgccatagttcttgatagaacatgcatcacagctcagcatgacctatctaatttgctaggagcccttagcttttacacaacaatttcttctcatccagcttcactctacggatcacatgggacgagaatggcatttctacttcctgttgcaacttttgatcactatttccttgagtacaaccctcatgg

SEQ ID NO: 5438 - DNA, 411 bp, Glycine max
  Clone ID: LIB3029-012-Q1-B1-E3
cgactctaaagaatcccctcggggaattccaattccacattttcaagaaataaggaggcaaaaatgttcatatatgaattggaattatttgttttcttattacgcctatcctgaagccaaaggaaatgagatctgaattcctcggggaattccaattccacattttcaagaaataaggaggcaaaaatgttcatatatgaattggaattatttgttttcttattacgcctatcctgaagccaaaggaaatgagatcggaattcctcggggaattccaactccacattttcaagaaataaggaggcaaaaatgttcacatatgaattggaattacttgttttcttattacgcctatcctgaagccaaaggaaatgagatctgaattcctcgggggtaccgagctcgaattcc

SEQ ID NO: 5439 - DNA, 396 bp, Glycine max
  Clone ID: LIB3029-012-Q1-B1-E5
tgcaccttcaccttcccttcgagatggcaaagtctaagaatcacacagcgcacaatcagtcctacaaggcccacaaaaacggcatcaagaaacccaagaggcatcgccacacttccaccaaagggatggatcccaagtttctgaggaatcagaggtacgcgaggaagcacaacaagaagagcggcgaaattgccactgaggaagagtgaagtggcactttctaacggaaccattagggtttttttttaagctcggtttttttttgttttattttgtttttaatggttgactttgtttgaaatcaacgttcagtagtataattaaatttgttttcagagaatgcagtgctcttatagcaattattttcctggtttctgctgaagacccttgaattat

SEQ ID NO: 5440 - DNA, 401 bp, Glycine max
  Clone ID: LIB3029-012-Q1-B1-E6
gaagaaaaaagagaagaagatgggtttgaagaacaacatggtggtgctaaaggtgtgtttggtgctacttttccttgtggggggtactactagtgccaacttgaggctgagtaagcttggcctgctcatgaaaagtgatcatcatcaacactcaaatgatgatgagtcttcaaaaccatgctgtgatcaatgcgcatgcacaaagtcaaaccctcctcaatgccgctgttcagatatgaggctgaattcgtgccattcagcttgcaaatcttgtatttgcgcattatcgtatcctgcacagtgtttttgtgttgacataaccgatttctgctatgaaccttgcaaacccagtgaggatgacaaggaaaactactaatgaacaagtgttatgcatgtaagct

SEQ ID NO: 5441 - DNA, 401 bp, Glycine max
  Clone ID: LIB3029-012-Q1-B1-E8
cggctcgagaaggaacgaacgacgtattctctctcctccactcacctcaaatccaaatccaaatcccaattctccagtctttgctatggcatcaatttcgtccttatctctcacttctgtttccctccccaaatctcaatctctggaccccaagaaaatctctgattcttcttcctcctctggcagcaggagtcaaagttgttgttgcgcgccatcgttccaacgaagaaagatgcttctatcttccgccgccatcgttgccggaaccttgtgcagcaattcagtcagcggagtcagtttggcagctgaattcgccgatatgccagcgcttagagggaaggattatggcaagacaaaaatgcgatacccagactacactgaaactgaatcaggactccaat

SEQ ID NO: 5442 - DNA, 398 bp, Glycine max
  Clone ID: LIB3029-012-Q1-B1-F1
tgcagaccgagctagctagctagcaagcaagcacagagatggaggcaaagcgaggccatgccctcatgtgcttggcacgtgtttcactcttcctctgcgctctaaccctatccgctgctcacggaagcaccacggttcaagacatcgcgagaaagttgaaactcggggacaacgagcttctgcgcacggagaagaagttcaaggttttcatggagaattacgggaggagctactccacagaggaggagtatttgcgccgtttggggattttcgcccagaacatggtcagagcggcggagcatcaggcgctggaccccaccgccgtccacggcgtcacgcagttctccgatctcaccgaggacgagtttgagaagctctacactggcgtcaatggcggc

SEQ ID NO: 5443 - DNA, 234 bp, Glycine max
  Clone ID: LIB3029-012-Q1-B1-F10
cacaaagtaggactcactttgtggatgctcagcctcagcagaaagaggaggggaacaagggaagaaagggtcctttgtcttcaattttgagggctttttactgaataagtatgtagtactaaaatgtatgctgtaatagctcatagtgagcgaggaaagtatcgggctatttaactatgacttgagctccatctatgaataaataaatcagcatatgatgcttttgttttgtgt

SEQ ID NO: 5444 - DNA, 382 bp, Glycine max
  Clone ID: LIB3029-012-Q1-B1-F12
ccacggcacagttacccgccattttagggttcatcagaagggaggcgaaaccagcacaaatagcatagcatccatctttgcctggacaagagggctagcccacagggcaaaactggatgacaatgctaaactcttggatttcactgaaaagctagaggcagcttgcattggagtagtagaggctgggaagatgaccaaggatttggcacttattcttcatggatccaagctgtcaagggagcattatttgaacacagaggaattcatcgatgccgtggcagccgagcttagtgcgaggctttctgcatagacttgattcaagacaagcggaaaaaagacgttagcaacaaggagcgtgcgtgcgtctgctactctcttctat

SEQ ID NO: 5445 - DNA, 392 bp, Glycine max
  Clone ID: LIB3029-012-Q1-B1-F2
atttcactagctactactcttcttagtttctctgttgtatcatttttattgctatatcctaatcaaacttcactctcaaaatgagtgatcccacactagcacaacagcatctagtcaaagtcgacacaacaacacacgaaacagttgttaccacacacaatcataagcaaacaccctcaataaatgcctcaggtgaaaagaagaagattgtgggggtgttctacaaagggaatgaatatgctaaattgaatccaaattttgttggatgtgttgaaggtgcattgggaatacgtgagtggctggaatcacagggtcatcagtacattgtcacggatgacaaagacagacctgattctgaacttgagaaacacattccagatgcacatgtcatc

SEQ ID NO: 5446 - DNA, 402 bp, Glycine max
  Clone ID: LIB3029-012-Q1-B1-F6
aggcaaagtacagacaaagttagttagaaattgaaagggaaagggaaacgaaaatgagtagtagggtttggtgtgtggtgatggtatcagcgttggcgttgatgttacaatggcacgaagcattcagctcctacgctggctccgcaagtgcgatcatcgacccttccaaggtcaaacaagtttcgtggaaaccgagagctttcgtttacgagggttttctgacggaattggaatgcgatcacttgatttccatcgccaaatcggagctcaagagatccgcggtggccgataatttgtccggcgagagcaagttgagcgaagtcagaacgagctccggcatgttcattcccaagaacaaggatctgattgttgctggtattgaagacaagatttcatcatgga

SEQ ID NO: 5447 - DNA, 394 bp, Glycine max
  Clone ID: LIB3029-012-Q1-B1-F7
gccatggataattttccttgcacatcgcgtacttggatattcttcttgtatctgttatgcagaagagggatcatttgctgaaccaatggggagagagagttttcaaaagctctggcagaaatacaaggtggacattgccatctatggccatgtgcacaattatgagaggacatgccccatatatcagaatatctgcactaatgaagagaaacaccactataagggaagaaccttaaatgggaccatacatgttgtagctggtggtggtggagcaagcctttcagcatttacttccctcaaaaccaaatggagcatctttaatgactatgactatgggtttgtaaaactaactgcttttgattattcaaatttgttgtttgagtacaagaagagc

SEQ ID NO: 5448 - DNA, 352 bp, Glycine max
  Clone ID: LIB3029-012-Q1-B1-F8
agatgatgcaggctggacccggcggcatggcccaacaagcgaaccaacaatacgcacagcaacagcaacaaccctacatgatgatgccgccgcagcctcagccccctcagatgtgggccacatcggcccagcctccgtcccagtcggtggctcctccgcaacccaccagcgccgatgaggtccgtaccctctggatcggtgatttgcagtactggatggacgaaaattatctctacacctgtttggcacacaccggcgaggtggcttcagttaaagtcattcggaacagacaaactagtcaatcggagggatatgggtttattgagtttactagtcgtgctggtgctgagag

SEQ ID NO: 5449 - DNA, 352 bp, Glycine max
  Clone ID: LIB3029-012-Q1-B1-F9
taaagttagatatatgattttattatttctccattttatgcccattggtgttccaagagtaccctttcgaagccctggggaagaagatgcatcttgggttgatatatacaatcgactttatcgagaaagattactttttttaggtcaagaggttgatagtgaaatatcgaatcaactaattagtcttatggtatatcttagtatagaagaagagaataaagatttgtatctgtttataaattctccgggggggtgggtaatacccggaatagctatttatgatactatgcaatttgtacaaccagatgtacagacagtatgtatgggattagccgcttcaatgggatccttt

SEQ ID NO: 5450 - DNA, 329 bp, Glycine max
  Clone ID: LIB3029-012-Q1-B1-G10
tggggttgcagatgtaccagggtgctgctggacctggtggagatgttcctatgggtgctgacatgcctgctgctggtgctggacctaaaattgaagaagttgactaagcttgtggaatatcactaacttcaactttgggttgcttctttcttattaggtgctctgccagagatgtaagctttaataatgtaagttttagtgatgtaaggtttcatgaatcgtgaataaggtctttttagtttcatgtgaatttcagagatgatggagcttgagattaatgtaatttttatactgtttggctttttaaaaaagacaccggcacatcctct

SEQ ID NO: 5451 - DNA, 385 bp, Glycine max
  Clone ID: LIB3029-012-Q1-B1-G11
cctccaccagcctcttggttgcttctttggtctacccttcacagagaaccagcaatatcctctccgatgtggtcgatttgaagacttctcttcccgagtgggtgaggatagggttctctgctgccacgggactcgacatacctggggaatcgcatgacgtgctttcttggtcttttgcttccaatttgccacacgctagcagtaacattgatcctttggatcttacaagctttgtgttgcatgaggccatctaaatgtgacagatcgaaggaagaaagtgtaataagacgactctcactactcgatcgctagtgattgtcattgttatatataataatgttatctttcacaacttatcgtaatgcatgtgaaactataacacatt

SEQ ID NO: 5452 - DNA, 392 bp, Glycine max
  Clone ID: LIB3029-012-Q1-B1-G12
gcttgttggagattacgccagagaaaaaccctcagcttcgggacttggatgtcttcctcagtgttgtggatatgaacgagggagctctttttctgccacacttcaattcaaaggccatagtggtactagtgattaatgaaggagaagcaaacattgaacttgttggcattaaagaacaacaacagaggcagcaacaggaagagcaacctttggaagtgcggtaatatagagctgaattgtctgaacaagatatatttgtaatcccagcaggttatccagttgtggtcaacgctacctcagatctgaatttcattgcttttggtatcaatgccgagaacaaccagaggaacttccttgcacgttcgaaagacaatgtgataagccagatacct

SEQ ID NO: 5453 - DNA, 394 bp, Glycine max
  Clone ID: LIB3029-012-Q1-B1-G2
ctcgagccgctcgagccgtttctgtagagaaaaaatgtatctattagcttatcgaaccatgaaggacatgcatagtaaaggccatcaacctgtggaggaactctgctcctctttaatatcccaccttggtcaggtaaatgcttattcagaggcattctctgtttacaatatgttgaaatatagcaagagaacaatgtgcaagtcacttcatgagaagattctgcacattctcttagcaggacagcttttgaaggatgcgtatgtagtagtcaaggataatgcacaatttatttctcgtccagccaccaaaaaatttgctagtgcatttatgaagtcaggtaacctcaactatataaatgatgttctaaagaccctccatgattgtggctacaag

SEQ ID NO: 5454 - DNA, 347 bp, Glycine max
  Clone ID: LIB3029-012-Q1-B1-G3
gcgatagctgataagagagataccaacaagaaaagagtaacagaagagttgagattccctttgaagaaaagatggcatcccataagcaaagctatgaagctggtcaaactaagggccgaactgaggaaaagacgaaccagacgatgggcaatattggagagaaggctcaagctgcaaaggagaagacccaggaaatggtccaagctgcataagagaagactcaagaaacagcccaagctgccaaggacaagacttgcgacacttcctaagcggcaaaggagaagacccatcagaatacaggagctgctcaacaaaagacctcagagatgggccagtccacgagtgaa

SEQ ID NO: 5455 - DNA, 352 bp, Glycine max
  Clone ID: LIB3029-012-Q1-B1-G4
aagtcttactggtctgcctggtcagcaagaaagtctgccattgagcaggataagcaattaaaggatgcttcagatgaatacgtaaatgcagagaatgctggttctagtgcatatgtggaaatcagtactgcagcagcaatatcatttgttgtgattgcttcatgtttcttggttatgctttacaaattaatggcatattggtttgttgaagttctggtggttctattttgcattggtggggttgagggactacatacttgcttggtagctctgttgtcatgtttcacatggttctagcatgctgcacaaacatttgttacagtacccttcctcggtgctgtagcatatctga

SEQ ID NO: 5456 - DNA, 392 bp, Glycine max
  Clone ID: LIB3029-012-Q1-B1-G7
gtcaaaaggagtgattgggcctcattggtacaagtgtttttaacaaacagcaacagtacagagcattttgatgcatgtaagtggacaaaatcggaaccacattcctgggaattgatcttcccaatagaggtatgcggtcctaataatggttttgaaatgtggagttctgagtgggcaaatcaaacttcatggcatttgagtttccttattgacaatcccaaacagtctacagtttttgacattctcttgggaatttctcaagattttgaaattgctggtaatactcttatgccagctttttctgttccacaggctactgccagatcttctgaaaatgcggaatcctctgcatgatctggaatttgtgttttctttcatttgtccgtttgttt

SEQ ID NO: 5457 - DNA, 155 bp, Glycine max
  Clone ID: LIB3029-012-Q1-B1-G8
tcttgttggtgaacctattatgtatccagggataaatgcacttgtggatgagctgcacaaacggaggatttccacttttctattatatctccgtgtcgatgctgcaacaaatgactctttgaatgcaagtcagagatcacacttcggagatttct

SEQ ID NO: 5458 - DNA, 345 bp, Glycine max
  Clone ID: LIB3029-012-Q1-B1-G9
gtcaaaaggagtgattgggcctcattggtacaagtgtttttaacagacagcaacagtacagagcattttgatgcatgtaagtggacaaaatcggaaccacattcctgggaattgatcttcccaatagaggtatgcggtcctaataatggttttgaaatgtggagttctgagtgggcaaatcaaacttcatggcatttgagtttccttattgacaatcccaagcagtctacagtttttgacattctcctgggaatttctcaagattttgaaattgctggtaatagccctatgccagctttttctggtccacaggctacagccagatctgtccgaaaacgcggcatc

SEQ ID NO: 5459 - DNA, 366 bp, Glycine max
  Clone ID: LIB3029-012-Q1-B1-H10
gaattgggttttcactgatcaagcactacctgcagatcttatcaagagaggagtggcaattaaggatccatcaaccccacatggagttcgtcttctgatagaggactatccttatgccgctgatggactggagatatgggctgcaattaagacatgggttcaagaatatgtgcccttgtactatgcaagagatgatgatgtcaaaaatgattctgaactccaacattggtggaaagaagctgtagagaaaggccatggtgatttgaaagacaagccatggtggcctaagttgcagacacttgaagaccttgttgaagtttgcctcattatcatatggattgcttcagctctccatgcagccgttaa

SEQ ID NO: 5460 - DNA, 401 bp, Glycine max
  Clone ID: LIB3029-012-Q1-B1-H3
ggcaaatccaatggctacagtgattaaggctgtcgcagaagctgccgaagatgtgataaaatccaagccctctggaagtgtatttgatagacttggtcgcagtatggatacattagatgataacacgcaacttgaagatagtttccaacatcaggagcaatatcatttattccgttctcaaaaaactgagtacaatgggcagtatgctgcaaatatgactatgatgggacatgaaactggctatccttctgattctaattcagacaatgaagggtttgatgatattaatgtcatggatcgtacggtgtctggagcttctcagatctgcccctctgctggaaacaggggcaatgattcactgatggtgcagtatagtgtagcaaaaaatgtcgatgatagtt

SEQ ID NO: 5461 - DNA, 252 bp, Glycine max
  Clone ID: LIB3029-012-Q1-B1-H4
tcggctccaagaaaaagatacagggtgactaattagcagctccttcaagttccggtgtcggtgtgggtgtttgaatctggtgaaggatgtcaattgttccaatcatccagggtgatgccaaaggctccaaccccttcacttcgtggggtcaattcgtggattttccactccctccttccatcaccggcgtcttccccggcttggaattcggattcggattcagatcatccatgaacacacgtatggactgga

SEQ ID NO: 5462 - DNA, 398 bp, Glycine max
  Clone ID: LIB3029-012-Q1-B1-H5
catcatcaccccctttccttctctcaagaaaaaaaaaagttaatttcttgaacccaatggcttcagagacagaggtgccggatattatttcctctgttttcgaaaggtttcaacaaaacagagacatgtctctgtttctgcccttcctcttcggcttctctgacgccaccccaggacgaaatagcgacgacccagatcacgaaactgctcccacagaagccccacaacgtcaaagaataatcttggtgaaccccttgactcagggcatggtggtgatcgacggtggttcgagcctcgaggctctgtttcgcgaattcaccaacggaaaaggtggtcgaccaccggcttctaaggagtccattgaggccttgccgagtgtggaaattggagaaggtaac

SEQ ID NO: 5463 - DNA, 399 bp, Glycine max
  Clone ID: LIB3029-012-Q1-B1-H7
ctctcttctagttccagcatatcaactcatcgttccatattggaccttgacctaaccaagtttaccacacagaaacaggtgtcttcactgttccaactatggaagagtgagcatggacgtgtctaccataaccacgaagaagaggcaaagagacttgagattttcaagaataacttgaactatatcagggacatgaatgcaaacagaaaatcaccccattctcatcgtttaggattgaacaagtttgctgacatcactcctcaagagttcagcaaaaagtacttgcaagctcccaaggatgtgtcgcagcaaatcaaaatggccaacaagaaaatgaagaaggaacaatattcttgtgaccatccacctgcatcatgggattggaggaaaaaaggtgtc

SEQ ID NO: 5464 - DNA, 114 bp, Glycine max
  Clone ID: LIB3029-012-Q1-B1-H8
aaaattcttccaccaagttatgggtttccttgtgttgcatcgtttctccctcttacgtctctcttctagttccagcatggctacccggcgcttccatattggaccttgacccaa

SEQ ID NO: 5465 - DNA, 399 bp, Glycine max
  Clone ID: LIB3029-012-Q1-B1-H9
aggtcgacatctagaggatcccctcggggaattccaattccacattttcaagaaataaggaggcaaaaatgttcatatatgaattggaattatttgttttcttattaggcctatcctgaagccaaaggaaatgagatcggaattcctcggggaattccaattccacattttcaagaaataaggaggcaaaaatgttcatatatgaattggaattatttgttttcttattaggcctatcctgaagccaaaggaaatgagatcggaattcctcggggaattccaattccacattttcaagaaataaggaggcaaaaatgttcatatatgaattggaattatttgttttcttattaggcctatcctgaagccaaaggaaatgagattggaattcctcggggg

SEQ ID NO: 5466 - DNA, 444 bp, Glycine max
  Clone ID: LIB3029-011-Q1-B1-E9
aaggttggttacaacccagacaagattccctttgttcccatctctggttttgagggtgacaacatgattgagaggtccaccaaccttgactggtacaagggaccaactctccttgaggctcttgaccaaatcaatgagcccaagaggccctccgacaagcctctaaggcttccattgcaggatgtctacaagattggtggtattggtactgtgccagtgggacgtgtagagactggggttgtgaagcctggtatggtggtgacttttggtcccactgggctgacaactgaggttaagtctgttgagatgcaccatgaggctctcacagaggctcttccaggtgacaatgttggatttaatgtgaagaatgttgcagtcaaggatctcaagcgtggttttgttgcatccaactccaaggacgaccctgccaaggaagctgccaac

SEQ ID NO: 5467 - DNA, 384 bp, Glycine max
  unsure (1)..(384): unsure at all n locations
  Clone ID: LIB3029-009-Q1-B1-C11
cattgatgagaccatttgcacaatgagacttcgccaaaacattggtcagaattcatcacctgacatctacaaccctcaagctggtagcatcacaaccgccaccagccttgacttcccagccctctggcttctcaaactcagtgcccagtatggatcactccgcaagaatgctatgttcgtgccacactacaccctgaacgcgaacagcataatatacgcattgaatgggcgggcattggtacaagtggtgaattgcaatggtgagagagtgtttgatggagagctgcaagagggaggggtgctgatcgttcaacanaactttgcggtggctgcaaaatcccagagcgataactttgagtatgtgtcattcaagaccaatgatag

SEQ ID NO: 5468 - DNA, 381 bp, Glycine max
  Clone ID: LIB3029-009-Q1-B1-C12
ttgtctttgaacactcatcaccatggccaagcttgttctttccctttgtttccttcttttcagtggctgcttcgctctgagagagcaggcacagcaaaatgagtgccagatccaaaagctgaatgccctcaaaccggataaccgtatagagtcggaaggtgggttcattgagacctggaaccctaacaacaagccattccagtgtgccggtgttgccctctctcgctgcacccttaaccgcaatgcccttcgtagaccttcctacaccaacggtccccaggaaatctacatacaacaaagtaatggtatttttggcatgatattcccgggttgtcctagcacttatcaagagccgcaagaatctcagcaacgaggacgaag

SEQ ID NO: 5469 - DNA, 120 bp, Glycine max
  Clone ID: LIB3029-009-Q1-B1-C2
gaatccggtccagccgagctagctagctagcaagcaagcacagagattgaagcaaagccaagccatgccctcatgtgcttggcacgtgtttcaatcctcctctgcgctctaaacctaacc

SEQ ID NO: 5470 - DNA, 281 bp, Glycine max
  Clone ID: LIB3029-009-Q1-B1-C4
caaccacgggcattatgtcagtcttgtgaaaagccataaccactggttattttttgatgacgaaaatgtagagatgattgacgagtctgctgtgcagacgttctttggatcatcacaggagtattcaagtaatacagaccatgggtacattttattctatgagagcattggctctggtaacaggaattaagcggaggatttctacaaccccctaaatcaattggacttccttttcacaaggtttccaaaattaatttcccttccaacgttttccccttaat

SEQ ID NO: 5471 - DNA, 128 bp, Glycine max
  Clone ID: LIB3029-009-Q1-B1-C5
cataaactattcaattcagtctctttcgttatcaaattatttcttcgatcaaggtcgttttcgaaacttcaccaacatgagctactacgatcatcagcaacagcctccaattggtgttcctccccctc

SEQ ID NO: 5472 - DNA, 279 bp, Glycine max
  Clone ID: LIB3029-009-Q1-B1-C6
ctcgagccgctccattggtccttaaacactcatcagtcatcaccatggccaagctagttttttccctttgttttctgcttttcagtggctgctgcttcgctttcagttccagagagcagcctcagcaaaacgagtgccagatccaaaaactcaatgccctcaaaccggataaccgtatagagtcagaaggagggctcattgagacatggaaccctaacaacaagcgattccagtgtgccggtgttgccctctctcgctggaccctcaaacggaaagccc

SEQ ID NO: 5473 - DNA, 279 bp, Glycine max
  Clone ID: LIB3029-009-Q1-B1-C7
gcaaagcaatggctacttcaaagttgaaaacccagaatgtggttgtatctctctccctaaccttaaccttggtactggtgctactgaccagcaaggcaaactcagcggaaactgtttctttcagctggaacaagttcgttgcgaagcaaccaaacatgatcctccaaagagacgctattgtgacctcctcgggacatttacaactcaataaagttgaacaaaacggcaccccaaaaccctcgtctcctggtcacgccctctactccacccccatccaca

SEQ ID NO: 5474 - DNA, 102 bp, Glycine max
  Clone ID: LIB3029-009-Q1-B1-C8
ctctttctctctctagaattctcagatttgcggggcgagatgatgcagcagccaggacccggcatggcacctcccaccatgggccagcagccgccgcaacag

SEQ ID NO: 5475 - DNA, 384 bp, Glycine max
  Clone ID: LIB3029-009-Q1-B1-D10
gttaaagaaagcagcactgaagggcttccaatggaggatagtccctatgtgaaatacaaggatttggaggattataagcgtcagggttatggtacacaaggtcatcaagaaccaaagacaggtcgtggagctggagccactgaagcacccactctctctggtgctgcagtttcatctgatgcacaagtcgctgccactgatgccattaacagtaaaggagtcccttaattattcacacttcctagaatagatcgttcctttgctaataagaaatcgttttcttaatttggggtggcgttttttaaatgtgtgaacatctcagtaatttgtattattattacttacacgtttgaagtttgcatttagcatattgtactactttta

SEQ ID NO: 5476 - DNA, 296 bp, Glycine max
  Clone ID: LIB3029-009-Q1-B1-D11
tggtaatactcttatgccagctttttctgttccacaggctactgccagatcttctgaaaatgcggaatcctctgcatgatctggaatttgtgttttctttcgtttgttcgtttgtttaattcaataaaggaaattagacatgaccctcttgttgagtatgctctgtctatttgaaaatttccacatctcttttaattgtcgtaatgatgtgtgaagtgtgtgttattttaaaaaaattcataaaaaaaatcattcatttgcaaaaaaaaaaatcattttcataaattggggtaaaa

SEQ ID NO: 5477 - DNA, 197 bp, Glycine max
  Clone ID: LIB3029-009-Q1-B1-D12
tggtaatacacttatgccaactttttctgttccacaggctatcgctatatcttctaaaaaggcttaatcctctacatgatctggaatttgtgttttctttcgtttgttcattgggttaactcactaaaggaacttccacatcaccctcttgttgattacgctatgtctattcttacattttccacctctcttttaat

SEQ ID NO: 5478 - DNA, 100 bp, Glycine max
  Clone ID: LIB3029-009-Q1-B1-D2
ggaatccggttcaggcaaaagggaaggaaactaaaattgttttgggaaaacccttccaattggaaccggaatcagatttaaaaccttcttaaagagcccc

SEQ ID NO: 5479 - DNA, 321 bp, Glycine max
  Clone ID: LIB3029-009-Q1-B1-D3
aagtcggcatggatgaccgatgaagaatttgcaaaaaaaatggttgcggttgtaaatccatgcgtaattcgtggccttcaaaagtttcctccaaaaagcaatctggatcctaaaatctatggtgagcaaaccagtaagataacagcagatgcccttgatctagatggatacacaatggacgaggcactaacaaatccgaggttatttaagttagattaacatgatgtattcatgccatatataaggcggataaatcagacatatgccaaggcttatgcgacaaggactaacctttttctgagagaaaatggaaccttaaag

SEQ ID NO: 5480 - DNA, 122 bp, Glycine max
  Clone ID: LIB3029-009-Q1-B1-D5
ggaagagtgaacatgacaatgacaatggggtccgggggaatactgaacacaacgcccactgcacagcttcaaaactaaatcgccatcgccatcaagactttccgtgcccaaatgatgagaaa

SEQ ID NO: 5481 - DNA, 204 bp, Glycine max
  Clone ID: LIB3029-009-Q1-B1-D6
gaaagatctagaaacttaggagttttaaactttctctatcacagaatacaaaaccctaaaactaccaacgtcacccaaccaccacaacctcccttaatagccgccgcaccaccataagcaccaactcgccacccgcgaccaaactccgaccactatcgccgcgccgcatcgtctccgacgccaaacagaaacatctcatccaac

SEQ ID NO: 5482 - DNA, 88 bp, Glycine max
  Clone ID: LIB3029-009-Q1-B1-D7
cacaaccgaggcagtcttttattttatatagtataattcattctgtcatatatatctgtgtgtgtaacaatggtggtctttatttgca

SEQ ID NO: 5483 - DNA, 272 bp, Glycine max
  Clone ID: LIB3029-009-Q1-B1-D8
ttttaattgaaaagggttttgagagagagagagagagaaaatggcggaagagaaggggatgagtccgtgggagcagcactcggctgttatcaagctgcctcggtttgattacaacgctccctcttctcttctccgtaactcccattccggttttctcatcacttgtactatcaagcgagagaaaagcgctacaaaagaagcaatctctatccttcacaagttccttgggtcgggtcattatcacactttaaacaaccctaaggaagaagata

SEQ ID NO: 5484 - DNA, 377 bp, Glycine max
  Clone ID: LIB3029-009-Q1-B1-D9
tcttttcttaagaattttttcagaatatctcctggattttgtttcgctgatggtcttgcttcactagctcttttacggcaaggaatgaaagataaaacaagtgatggggtgtttgattggaatgttactggggcttccatctgttatcttgctgttgagagctttagttactttctgttgacgcttgcacttgaaatgtttccttctctcaatttgacttcattcatgatcaagaagtggtggggaaaaattaatatcttccagcataataatccctatttggaacctctgttagaatcatcttccgaaactgttgctatggacttcgatgaagatgtagatgtgaaaacagagagaaatagagtactttcaggttc

SEQ ID NO: 5485 - DNA, 210 bp, Glycine max
  Clone ID: LIB3029-009-Q1-B1-E1
gaaagtcttccatagccccccaaaaatgaagagcaccatcttctttgctctctttctcttttgtgccttcaccacctcatacctaccttcagccatcgctgatttcgtgctcgataatgaaggtaaccctcttgaaaatggtggcacatattatatcttgtcagacataacagcatttggtggaataagagcagccccaacgggaaatga

SEQ ID NO: 5486 - DNA, 385 bp, Glycine max
  Clone ID: LIB3029-009-Q1-B1-E10
ctgcgacgcacacaccttcaattacctcgtcgacaatggctacacatattgtgttgttgcagatgaatcaattggaagacagttacccatggcttttctagagcgtgtcaaagatgaatttgtggcaaaatatggtggtggaaaggctgccactgctcctgtgaacagccttaacaaggaatttgggccaaagttgagggaacatatgcagtactgtgttgatcatcctgaagagataagcaagcttgcaaaggtgaaagctcaagtttctgaagttaaaggtgtcatgatggagaatattgaaaaggttctagacaggggtgacaagatagagcttctggtggacaagactgagaaccttcataaccaggcacaagatttcaga

SEQ ID NO: 5487 - DNA, 382 bp, Glycine max
  Clone ID: LIB3029-009-Q1-B1-E11
ccaaaactgaaaaaaaaaacaaacaataccataacatggcttcttccaccatcacctcctccttcctaacatcacccccttcatctctcttcaacaaatcatcatccccttccttccatgccacccctactctccgccccctcgcgccacgcgcctccatgtccgcctcagcgccgccctacgacttcggatcgttccggttcgatccgattagagagtcgattgtgtcgcgcgagatgacccgcaggtacatgatcgacatggtcatccacgccgacaccgacgtcgtcatcgttggcgcgggctccgcgggtctctcgtgcgcctacaagctctccagaaacccctccatcaacatcgccattgttgagcagtccgtcag

SEQ ID NO: 5488 - DNA, 111 bp, Glycine max
  Clone ID: LIB3029-009-Q1-B1-E12
ccaccactgaaataacttccattcactactataacatggcttcttctaccagcatctcttccttcctaacatcatccccttcagggcccttcaacataccatcatctcctt

SEQ ID NO: 5489 - DNA, 186 bp, Glycine max
  Clone ID: LIB3029-009-Q1-B1-E2
caaaaaaagaaggatgaaccttgaacccttgggaaaaaggcacctacaacattaagggctccaacttctcctcctcctggtccccttcctcccaatttcccccctcctcctaaaaacctttcggtaaccccttttaattcaacaacttgcacccattgtccatcccgggcggtgtgaacccaagac

SEQ ID NO: 5490 - DNA, 300 bp, Glycine max
  unsure (1)..(300): unsure at all n locations
  Clone ID: LIB3029-009-Q1-B1-E5
agcagattgtgattttctcaagagaaactttaagcagatgtctaatgttttgtgggtggctcctgaggacaaggcgagtttatggtcacaacttcattatgtttcgtgtaataatctggaaatgcaagaagcttatcttgtcaatctcggtanatgtgtttacgagaaattgtatttgcacattcaagaggaacctcgcaatttgaaaaggaaagcccccccccgtattgattggtggcaaaaactgaagttgctaacaatacaaaaattggaaaatttcaatccaatccaaaggataat

SEQ ID NO: 5491 - DNA, 181 bp, Glycine max
  Clone ID: LIB3029-009-Q1-B1-E6
tatgaaccctgatactacgagagctacaccgtttcgttcagtatatacgatcgacaggtgcatggggatcagacgttccttcagagcatcgttgtggagcctgtaccgttgaccacctgctgagtaaccgaagatccatttcgactcgatgtttacacctctcatcagggtgttaaccttc

SEQ ID NO: 5492 - DNA, 245 bp, Glycine max
  Clone ID: LIB3029-009-Q1-B1-E8
ctcgagccgaaaatgaccaagttcacaatcctcctcatctctcttctcttctgcatcgcccacacttgcagcgcctccaaatggcagcaccagcaagatagctgccgcaagcagctccagggggtgaacctcacgccctgcgagaagcacatcatggagaaggatcacggccgcggcgatgacgatgatgatgatgacgacgacaatcacattctcagggacatggcggggaagaatcaactaca

SEQ ID NO: 5493 - DNA, 269 bp, Glycine max
  Clone ID: LIB3029-009-Q1-B1-E9
cttcaatcatatcagcttcactgtcactgtaatctccccaacacttgcttggctttttcttactaaaatgattaacacaaaggataggaactggctccttgcaagatgcctgtcgagatacctaaaactgatgccaaggattgactggactgaggaggtctttgaggcacaactgattacttatgaggatttctgaaaggtttcacacagcttggtacatacttttctatcgcggttccaatttatagcgtgtttcgtgaaagacgctc

SEQ ID NO: 5494 - DNA, 172 bp, Glycine max
  Clone ID: LIB3029-009-Q1-B1-F10
caagctgcgctccaaaccccaaaaggaaagttagaaaagctttttgatcaacagaacgagggaagtattttcgcaataagcagagaacaggtgcgtgcgttggcccctaccaagaacagctcttggtggccatacggcgccactgcgccgacccccatcaagagactcctcg

SEQ ID NO: 5495 - DNA, 384 bp, Glycine max
  Clone ID: LIB3029-009-Q1-B1-F12
gcttccattgtgctcactcatctcttacaacgaaaccctcttcatcttgttctatctgtgacgagcatcatggcctcaagagcagtgttattgttggctatgtgtgtgcttccggcgatggttgtggccattcgcccagcaaagaaccctttttgcgtgaagggtcgtgtctactgtgacccttgccgtgctggttttgagacctcagctaccacctacattgctggtgctgagattatgttgcaatgcaagagcagggttagcaacgaggttgtgtacacgaagaacgggtacaccgactcacccggagcatacacaatgtacgtggatgaggatcacgcagatcagatctgcagtgccaagcttgtaagcagccctcaccct

SEQ ID NO: 5496 - DNA, 207 bp, Glycine max
  Clone ID: LIB3029-009-Q1-B1-F3
aagcagcagagggaggagcggcattaaaaatgcagatcttcgtgaaaaacccaaacgggaaaaacaataaccctcaaggtccaaagcagcaacaccattgacaatgtcaaggctaagattcaggacaaggaaggcatccctccggataagcaccgtttgattttcgccggaaagcaacttgaatatggaaggaccttggccgattac

SEQ ID NO: 5497 - DNA, 341 bp, Glycine max
  Clone ID: LIB3029-009-Q1-B1-F4
attaattttggtttggttggtggttgttccggcacaggaaggaaggaaggaagagcggtgggtgagtgaccgacgacgcatggctactacggctacggcttcggcgtcgtgggaggaactgacgctgaaagtgaaatggatcggcaacgagtacaccgtcagagtctgcgccgacgacaccgtgggcgaactcaagcgccgaatctgcgagctaaccaacgtcttaccccttcggcaaaagctcttgtaccccaaactcggttccaaactcaacgacgactctctcttcctctcccagctccccctcaactcctctctcaagatgaccatgatcggtacta

SEQ ID NO: 5498 - DNA, 197 bp, Glycine max
  Clone ID: LIB3029-009-Q1-B1-F5
caaaaattttactttacaaatcgcataaaaaccgtccaaagttaatgagagaattttgcaagtgtgagaaacatggcatctcgtcaaaacaacaagcaagagcttgatgaaagagcaaggcaaggagagactgttgtcccgggtggaactggtggcaagagcctggaggctcagcaacaccttgctgaaggaaggag

SEQ ID NO: 5499 - DNA, 99 bp, Glycine max
  Clone ID: LIB3029-009-Q1-B1-F7
caaaactgaaaaggtttttaatcaagaccttaattttaagaaaaccgtcaaagatgttggaaaacccatgacccacttggaatcgattgcaacctctgc

SEQ ID NO: 5500 - DNA, 385 bp, Glycine max
  Clone ID: LIB3029-009-Q1-B1-F9
ctttttagccctctctctttctttctctttccttttcttcttatccgactccgtccccattccccaacaccacactaaccctacaaaacctataaaccttctggttctacccgttcaaaatgatgcttccacagggctccattgggccaacctccaaaaaaggacccctctaatgcaagtaccagtcctggtggacctcaatggaaaccacttgtgggttaactgtgagcaacactactcatccaaaacataccaagcacccttctgccactccacccaatgctccagagccaacactcaccaatgcctcagtttgcccagcggaatcatagccaaggtgccacaaaaacacgtgtggcctcatgtccaccaaccccatcaccca

SEQ ID NO: 5501 - DNA, 271 bp, Glycine max
  unsure (1)..(271): unsure at all n locations
  Clone ID: LIB3029-009-Q1-B1-G1
cgcattagcaccctcaacagtctcaccctcccagccctccgccaattcggactcagtgcccaatatgttgtcctctacaggaatggaatttactctccacattggaacttgaacgcgaacagtgtgatctatgtgactccagggaaacgaagagttagagtggtgaactgccaagggaatgcaatgttcgacggtgagctaacgaggggacaattgctattggtgccgcanaactttgtggtggctgaccaagggggaaaacaaggattgg

SEQ ID NO: 5502 - DNA, 336 bp, Glycine max
  Clone ID: LIB3029-009-Q1-B1-G10
aaggtcctgcgaaccttcttgctttggttcggttggtacggatttaaccccggttcatttaacatgatcccacatacttactgtggctcaggaaattactacggtctatggagcgcggttggcagacccgcggtcaccactaccctagcggggtcaacagctgccttgaccacgctattcggtaaacgggtgacatccggtcactggaacgtgaccgatgtctgcaacatgctgttacgccgtttcgcggcgataacagacggttgctccgtggtttagccatgggcacccatcgtagccggttttgttgcctctacagtattagcagattgcaac

SEQ ID NO: 5503 - DNA, 383 bp, Glycine max
  unsure (1)..(383): unsure at all n locations
  Clone ID: LIB3029-009-Q1-B1-G11
ctctcatcagatatcaaccttctctctctccaaactctcgcacctttctgctctgcccttcaatttattcacctctgacaccctcttaattctgcttccagttcctctgagtggtgagtatgatctcttctcactcccacaattcccacattatagtaatcctcatcacctgcttatttcgtcataaattctagatcaaactccacaccctgatcctcccttttacttcttatggagcatgtatcaactcaaatgaataacatgaccctttagtctaagaataagaaaaacacacacacacacacacgcacaacacacttcaaagtccaaagtcnacaccaacccaccaaaaagtcttgttnccatggcgagtggcaagcttt

SEQ ID NO: 5504 - DNA, 416 bp, Glycine max
  unsure (1)..(416): unsure at all n locations
  Clone ID: LIB3029-009-Q1-B1-G2
acttaaccccgaaatccggcccaagggccaaaaaacttcaaacaaaaaggatccaaaggaaagaaaccaacttgcagtcatttgaaaagctccgccaggtcaggcgcaaccttgaccaagctaaaagcttgttggaagcgttgatcaacatggaagagaaaaaaagagaagtaatggagagtgaagttatgctgcagaagatgcaaatgaagtacaagcatgaaaccgagtttttggaagacaacatagcactctccggatttactcccttcacttccaagtttgtttccagtgaagaggaatatttcgattcagatgatgtcatgataaaccgtcttncccgcacacggtctactgcagtacagtatttgccttctcatgaaaccaacgttcccatggttcctgccgttagtaca

SEQ ID NO: 5505 - DNA, 377 bp, Glycine max
  Clone ID: LIB3029-009-Q1-B1-G3
taagattcttccaccaagttatgggtttccttgtgttgcatcatttctcactcttaggtctctcttctagttccagcatatcaactcatcgttccatattggaccttgacctaaccaagtttaccacacagaaacaggtgtcttcactgttccaactatggaagagtgagcatggacgtgtctaccataatcacgaggaagaggcacagagacttgaaatttccagacataatttgaccaaaacaagggaaatgatgcaaacaagacatccacccaattccaacctttaagaattgaccagtttggtggcattaagcctcaagaattcaacaaaaagttactggcagctcccaaggatgtgtcccaagaaattaaaa

SEQ ID NO: 5506 - DNA, 397 bp, Glycine max
  unsure (1)..(397): unsure at all n locations
  Clone ID: LIB3029-009-Q1-B1-G6
taaaattcttccaccaagttatgggtttccttgtgttgcttcttttctccctcttaggtctctcttctagttccagcatatcaactcatcgttccatattggaccttgacctaaccaagtttaccacacagaaacaggtgtcttcactgttccaactatggaagagtgagcatggacgtgtctaccataaccacgaagaagaggcaaagagacttgagattttcaagaataacttgaactatatcagggacatgaatgcaaacagaaaatcaccccattctcatcgtttaggattgaacaagtttgctgacatcactcctcaagagttcagcagaaagtacttgcaagctcccaaggatgtgtcgcagcanatcacaatggccaacaggaaaatgaa

SEQ ID NO: 5507 - DNA, 98 bp, Glycine max
  Clone ID: LIB3029-009-Q1-B1-G8
gtgtgggtgaattctcacgaagtgtgggcaccatgccttcagcaagtaccaatgggttgatgacgttgtgggtttgacccttcagtcaacacttttag

SEQ ID NO: 5508 - DNA, 414 bp, Glycine max
  Clone ID: LIB3029-009-Q1-B1-G9
aggtcgaatctagatgatcccctcggggaattccaattccacattttcaagaaataaggaggcaaaaatgttcatatatgaattggaattatttgttttcttattacgcctatcctgaagccaaaggaaatgagatcggaattcctcggggaattccaattccacattttcaagaaataaggaggcaaaaatgttcatatatgaattggaattatttgttttcttattaagcctatcctgaagccaaaggaaatgagatccgaattcctcggggaattccaattccacattttcaagaagtaacgaggcaaaaatgttcatatatgaattggaattactttgtttttctaataggcctatccggatgccaaaggaaatgacatcggaattcctcgggggtaccgagctcgaatt

SEQ ID NO: 5509 - DNA, 388 bp, Glycine max
  Clone ID: LIB3029-009-Q1-B1-H10
gtttaattcatcaatgggtgttttcctttgagattcaatctcaccatggtggacgttttcaaactttgcatcttccttcttgcactcttctgtgctttcctagtcttttctaatccagtgctgtgtagtgataaggaggacagtgtattcaagggaatcaacagctacaggcagacacggaacctggcacccctgaaccaagtttcaaaggcaacatgtttggctgatgaggttgcagaagaaatagataacatgccctgtgaaaacgtgaatcaatactacccttcatctgttcctggaagtgggaacctcagaatcccaaacttgcagaagcatatagataaatgtgacattaacttcaacagcactacagatggagtcattcttc

SEQ ID NO: 5510 - DNA, 383 bp, Glycine max
  Clone ID: LIB3029-009-Q1-B1-H11
ctgaaagactgaccgttcaggtttctgatgtaaagaatgtcattatctggggcaatcactcatcaacccagtatcctgatgttaatcatgcaactgttgcaacctcagctggggagaagcccgtccgtgagcttatagctgatgatgcctggttgaatggggaattcattactactgttcaacaacgtggcgctgcaattatcaaagctagaaagctttcaagtgcactatcagctgctagtgctgcttgtgaccatattagagactgggttcttggaactcctcatggcacttgggtatcaatgggagtatattctgatggttcctacaatgttccagctggacttatatattcattcaccgtcacttgtgccaatggggaa

SEQ ID NO: 5511 - DNA, 387 bp, Glycine max
  Clone ID: LIB3029-009-Q1-B1-H12
gggaacctgcagaggttaagatagtttctgagttttcaaaggagtttaacattgatgaagtctacaagagtgaatcttcatatattgggagccttaaatctgttgatgacttagatgctgttgaagttccttcaagtcgccctctcaatcttgatgagacagtgttagaggatgagacacaaatcagaccagctgaacaaggtgaaggtcctggaaacctggctgtggtggatgaatcaatggaagatgatgctggcaagaacaacgggaacagtgaagctggcaggcacaatgaagaattatatgccacagatggtatgcttaatacaaaaatgaggcgcgctgagaagaagaacaggaaaaatgccatgaaagctgtagcctcat

SEQ ID NO: 5512 - DNA, 381 bp, Glycine max
  Clone ID: LIB3029-009-Q1-B1-H2
attgcacaatgtttaacatgggaacgttttgggagcttttttttgttagaattttgggaattgtcttgtctgtgatggaatgctccttaaacccaggcttgggttcttttgattctgatacacttaatggttttagaatttagagtaggggatcatgatccagattagcttcctcatctgaaaatgagtatatgacagatggaaacctaataagaatctccggatactagattgattttgcacgatattgacaagggaagagaggtttaattggtggattttagacataatttgataaagatccaatgctaaatatttatgtttcaaagattgtatttcagtgaagcacaattgttgcaaagttgttgggcaccatacatg

SEQ ID NO: 5513 - DNA, 378 bp, Glycine max
  Clone ID: LIB3029-009-Q1-B1-H4
ctttctctctctagaattctcagatttgcggggcgagatgatgcagcagccaggacccggcatggcacctcccaccatgggccagcagccgccgcaacagtaccagcagcctccggcgcagcagcagcaaccctacgtcatgatgccgcgcatgcccaggccccgcaagccatgtgggccccctccggccaacctccgcctcagcagcaacccggcagcgccgaccaggtccgaacctctggatcggggatcggcagtactggatggacgagaactatccctatacctgctttgctcaaaccggcgaggttacatcggttaaagtaattcgaaacaagcaaactagtcaatctgaaggttatgggtttattgagttta

SEQ ID NO: 5514 - DNA, 66 bp, Glycine max
  Clone ID: LIB3029-009-Q1-B1-H7
taacaatcccaaccattgtatgctaaaaacaaaaaaaaccatagtatactaaaacatttacgctac

SEQ ID NO: 5515 - DNA, 349 bp, Glycine max
  unsure (1)..(349): unsure at all n locations
  Clone ID: LIB3029-009-Q1-B1-H8
atgctatggtgcatgatagttaatgtcacaatacaggtgattgcattggggtaattaaacataaaatagttttaaagggctaatccggtattcaggttccgtcctttgggcaccattcctcagtccatttcacagcanactgtttggaatcaaatggcaacagtgagaacacattgaattttgattctagcaagcagagcttttgtcaattctctattgatcttcttggtggaggaattttagtggacaaaactggagattggatcacacttatacaaaattctccaattagtaacttgttgagagttgctgcttggaagaaaggctgtttaatggttaagattgtgat

SEQ ID NO: 5516 - DNA, 217 bp, Glycine max
  Clone ID: LIB3029-009-Q1-B1-H9
gtcaaagtcagcactctgcatcaggtgacaaaattcggatatcccgctgtacttcgccattgggtggcagccgctacactgtgaactacaccaagtatcggcatgttgacaaatggccaatacaaatactcaatggggcctcatcggaggaacgtgtagaggccaaatgatggcacgttgctacatacaagccgaatgaagtgcatggcaatatgac

SEQ ID NO: 5517 - DNA, 339 bp, Glycine max
  Clone ID: LIB3029-010-Q1-B1-A1
ctcgaatctggaaagccgctaacacgaaccgttgccgagaaccggcccggttcgtgtcccggttcggtttcgctttccggttcggatgttgttgacgtctcgggcgtcgtgccgttaccgtgtgggctcacattggggtcccacataacggtcgttgggaagccgttggcggcgaagcccgatttcgagccgaagataacggtggtgacggagaacgagcccgtgatggtgtcgcaattcgtggtggagttgcaggggctgaagaccgttgacggtgaagagcctcctagggtttttcatttcaacccgaggttgaagggggattggattggtaaacct

SEQ ID NO: 5518 - DNA, 295 bp, Glycine max
  Clone ID: LIB3029-010-Q1-B1-A12
gttcttcttccgcttccggtaaatcaaaaggtaatctttcacattctgctagggacgagattagaaaaacaatgaaacccataggttgacgccacaaattccatccccaaaaaccatattttgattgtgcatcaactatatcaactgtacttaaactgttagataatcccaatcggtgaagacatttgttgtataactaaaaaaaaaaaaaaaaaaaaaaaacaaaaaacaaaacaaaaaaaaaaaaaaacacaaaaaaaaaaggggggtcccaaaaaaaaaaaaggggggcccc

SEQ ID NO: 5519 - DNA, 401 bp, Glycine max
  Clone ID: LIB3029-010-Q1-B1-A2
acaaaattgaactgtaattgtagtagtagacagtagcaccatgagccaggaacagctcaagaaacctcaaggggagcaggaccccatcaaatacggcgacgttttcaaagtctccgacgaactcgctttcaaacccatcgcgccaagagacgcagctctcatgcaagccacggagaaccaagcattgggccaaactcaaaaaggaggtcccgcctcggtgatgcaatccgccgcaaccgaaaacctccgcgccggcgtcgtgggccgccaagacatctccgacgtggcgaggaacgaaggcgtgagcgtgaccgaaaccaaagtgggctgccaccgcgtcatcacggagttcgtgggaagacacgtggtggggcagttcttggagcccgacgtccccatga

SEQ ID NO: 5520 - DNA, 347 bp, Glycine max
  unsure (1)..(347): unsure at all n locations
  Clone ID: LIB3029-010-Q1-B1-A3
ggctataatgatgacaccaatagacatcatggaactaccggtgtctatggtatagacaccgataggcaacaacatgggactactggtggctatgccggtgacactggtaggcaacatgggaacatcggtggcccttactatggaaccaacaccgcagacaccggtactggtcccagaagtggaaccacgggcggcaccggttatggaggcactggtggcactgattatggaacaactggtggcactggttatggaagtggaactgggtatggagtcaacactgggggtgcgcacactgaagcaggatatangaaggaacatcgtcagcatgaccaatctcatggtga

SEQ ID NO: 5521 - DNA, 317 bp, Glycine max
  unsure (1)..(317): unsure at all n locations
  Clone ID: LIB3029-010-Q1-B1-A5
gtgattgattatcaatccatgaaatctggcgaagatccaactttgggaattccagtgcatgaagagttgacaaatgctgcagatagtcccacattggttgattttttgcatgcagatgttacaagggaaaaagaagattccaataagagaaaaaaggatggctcaacatcatgttctctaaggaagaacagaagatgtattgctggtgaagaggataaaggtgctaaaacctcaaggcagctgagaaaacaagcagctcgtaaacctgtaaacagttcactcaatgaggatgttgnaagatataatgaccttgaccc

SEQ ID NO: 5522 - DNA, 316 bp, Glycine max
  Clone ID: LIB3029-010-Q1-B1-A6
taaaatgtcagtcttcacattttattaaggcgattgaaaggtacaacgccactcagatataaacatacgctcgctgggatggtacatgggccatactttttattatcatacaaaatttacttatttgttattacttcatacgatggcctcatcctcacaccatcatgcttgtcatttatgcgacacaccaaatcggggttgaggaaaatatctgcatcttgatccttcactagaacattgctcgctcttcacgcgctgacttctataatcctaacgctggtcgcatctatatccgccaacaccctcatcctcccag

SEQ ID NO: 5523 - DNA, 367 bp, Glycine max
  unsure (1)..(367): unsure at all n locations
  Clone ID: LIB3029-010-Q1-B1-A7
gaaaagttagggttcacaacttttccttttccttttgcttgcgaatctgaatcaaataatcaatcatccattcattattcatcatgtcgtcggcgaagaaaatcacgctgaagagttcggacggcgaggctttcgaggtggaggaggcggtggcgctggagtcgcagacgataaagcacatgatcgaggacgactgcgccgacagcggcatccctctgccgaacgtgacgagcaagatcctggcgaaggttatcgagtactgcaagaagcacgtcgaggccgcgaatcccgaagacaaaccctccgaggacgatctcaaggcctgggacgctgaattcgtcaaggtcgnacaggccacgctcttcga

SEQ ID NO: 5524 - DNA, 364 bp, Glycine max
  Clone ID: LIB3029-010-Q1-B1-A8
ctcaaattcaatcctcgtggctcttctggactcgcattacacggaactcgcggagctcgttgaaaaagccatgctgttacagaaactagaagacactgtcgccactcacaacataacaatcttcgctccgaccaacgaagccttataccgcaacctcgaccccgatttcaagcgcttcctcctccaacccgccaatcttcactccctccagacgctcctcctctctcacatcacccccgccctaatcggatcccaaaccctaacacgccacgtcaccactctctccgaccacaacctcaaactctccgaaaacctcaccaccgtcgaccaagccagagtcacccacccgaatgttgtgacccga

SEQ ID NO: 5525 - DNA, 378 bp, Glycine max
  unsure (1)..(378): unsure at all n locations
  Clone ID: LIB3029-010-Q1-B1-A9
caaagtttcttcctttctctgctctttgccttctctgacacatttggtgccttgtagagcgtgttttggcaggaaggtggtatggcgaaggacgttgaggttgctgagcgtggctccttctctgggaaggactaccaggaccctccaccagcaccactcattgatgctgaggagctcacaaagtggtccttttacagggctctcattgctgaattcattgccactttgctcttcctctacattactgtgctcacagtcatanggtacaagcaccagactgacctcaaggaaaatggtgaaatctgtggtggggttggcattcttggcattgcatgggcctttggtggcatgatcttcatccttgtccactgcactgct

SEQ ID NO: 5526 - DNA, 356 bp, Glycine max
  Clone ID: LIB3029-010-Q1-B1-B1
gcaaagcaatggctacttcaaagttgaaaacccacaatgtggttgtatctctctccctaaccttaaccttggtactggtgctactgaccaacaagggaaactcaacggaaactgtttctttcaactggaacaagttcgtgccgaagcaaccaaacatgatcctccaaggagacgctattgtgacctcctcgggaaagttacaactcaataaggttgacgaaaacggcaccccaaaaccctcgtctcttggtcgcgccctctactccacccccatccacatttgggacaaagaaacccgtaacgttgccagctttgccgcttccttcaacttcaccttctaagcccctgaaacaaaa

SEQ ID NO: 5527 - DNA, 304 bp, Glycine max
  Clone ID: LIB3029-010-Q1-B1-B10
cttctatctataaagcaaagagagaagaaattacggattttccatcattccagaaccgtaatctccaaaccccacttcgtcagatactaaaaagaaaccaacagtttccatacttagtatttcttctctgactgactgatcaggttgacatcttgacattgcaatcctgccttttggttccccatttccatgtttgtggattcttcctgattcaaaggcaatatattgtgtcttcatagctcagtttttgagccccatcagttgcaacttgcaacacaaacttcatctataacttggtatctct

SEQ ID NO: 5528 - DNA, 397 bp, Glycine max
  Clone ID: LIB3029-010-Q1-B1-B11
cacaactactacaagtacttccttacaatcaaaaccaacaacaactatggcaagttatcaaaagcactacgatgatcagggtcgcaaggttgacgagtatggcaacgttgagaagcaaaccgacgaatacggcaaccctgttcatgctgctagtgtcacctatgtagccaccagaactgctgctggtggttacagtgatgacattaataagcaacatgataccaccaatgcctacggcgtatacactggtagacagcattctagtggtggctacgatggtgacactaataaacatcatggaactactggtggctataatgatgacaccaatagacatcatggaactaccggtgtctatggtatagacacccataggcaacaacatgggactactggt

SEQ ID NO: 5529 - DNA, 452 bp, Glycine max
  unsure (1)..(452): unsure at all n locations
  Clone ID: LIB3029-010-Q1-B1-B12
gaaccattcttcgagcttttggagctgagttagtcctcactgatcccgccaaaggtatgaaaggagctgttcagaaggcagaagagattcgggataagactccaaattcttatattcttcagcaatttgaaaatcctgccaacccaaaaatccattatgaaaccactgggacggagatctggaanggctccagttggaaaggttgatccctgtcccgggaattgggactggaggtacaataacaggtgctggaaaatatctgaaagatcagaaccctgatataaagctatatggcattgaaccagtagaaagtccaatactgtctggaggaaaacctggccctcataagatccaaggaattggtgctggcttcatccctggtgttctggatgtcaatttacttgatgaagttgttcaaatttcaagtgaagaagccattgaaactgctaaac

SEQ ID NO: 5530 - DNA, 366 bp, Glycine max
  Clone ID: LIB3029-010-Q1-B1-B2
caattccagaacatgcaacttggtattgggggaaaggacaacaataataatcacaagggtcagaaagagaaaggtactgctgcggctgctggtcaactagcacacttccctattcttaaaggggttcaggatctcaaggtacctgccaaggaacaaaagtctgtcaagttcaacttgccagaggaggatgaatttgatgccagtgatgatggttatgatgaggatggattatgccatggacatccaatgcagaacaagatcatgcccatgatgattaatcacaaccattaagacaattctggtgggagtaggaatattaatggaagtgttaagaaagctgacgtcattgatcaggcaatgctgttc

SEQ ID NO: 5531 - DNA, 349 bp, Glycine max
  Clone ID: LIB3029-010-Q1-B1-B3
cttgttggaggagcattagctcttttttggacttttgatgttttcaaggaggaatcagagggcaagttgaagggaattcttggttacactgaagatgatgtggtctccactgactttatcggcgatagcagatcaagtatttttgatgcaaaggctggaattgcattgaataagaactttgtgaagcttgtttcttggtacgacaacgagtggggatacagctcacgtgtcattgatcttcttgtattcgttgccaagaagtctctttaaggtgttacttcaaagtagcttgtcttcacattattaccgtatgtttatgtttagctgcgatttagtgtcttgctcgagc

SEQ ID NO: 5532 - DNA, 313 bp, Glycine max
  Clone ID: LIB3029-010-Q1-B1-B5
caactgtggttgagaaaactgggaagagtgaagacaaagtgaagaagatcatcactattatcatttcaatggctacccaaacccaaacacagtcacatccaaacaccatcactatccgaccaaacagcggcttctgttctcattccagaaccttccattccctccgtccaaacgttcctctccctccgccctcccaccacctctccctcaccgactacgtcctctccctcttacactccgccgccaccgccaccgcctcctcatccatcacctccgccatcatccatgccgccaccgaccgccatctgtccta

SEQ ID NO: 5533 - DNA, 338 bp, Glycine max
  Clone ID: LIB3029-010-Q1-B1-B7
cgcgcctttgccgccgaaccaaccaccgaacctcagaaaccctctccaaagaaaaccgtcgacaccttcggccaacgcacctccatctaccgcggcgtcacccgacatagatggacgggaagatacgaagctcatctatgggacaatagttgtagaagagaaggccaaagcaggaaaggaagacaagtttacctgggtggttatgacaaggaagataaggcagccagggcttacgatctcgcagctctcaagtactggggtccaactaccaccaccaactttcccatttccaactatgagaaagaactggaggagatgaagaacatgaccaggcaaga

SEQ ID NO: 5534 - DNA, 357 bp, Glycine max
  Clone ID: LIB3029-010-Q1-B1-C1
ctcgagccgtgatcaacagcgaccagttcaacggctctgaggtcgttaaggccatcaagagaaagatcaatcacaagagccccgtcgttcagaccctcagccttgacctcctcgaagcctgcgccatgaattgcgacaaggtcttctccgaaatcgcttccgagaaggttctcgatgagatcattcgcctcatcgataacccgcaggcccatcaccagacccgcagccgggcttttcagttgattcgggcctggggcgagtccgaggatctcgcttatcttctcgtctttcgtcaaacttatatgagtttgaaaggaacggatgaacccgttgacattggcggagggaattcaccac

SEQ ID NO: 5535 - DNA, 436 bp, Glycine max
  unsure (1)..(436): unsure at all n locations
  Clone ID: LIB3029-010-Q1-B1-C10
attctcttaacacttcgggaagtgccctgggggaggagctggtgcaaagaatgctattctcatgaatatgccaaatgctgttctttcaatgtggagatattttgttggagatctcgtctttgaagtttctaagatgacttctccctacattaaatgtacagtctctttcttcatagcatttggaaatttggctgatgataccatcaattttgaggcttttccccacaagctggtgcagtttggagagattcaggaaaaagttgtantgaaattttcacaagaggaatttcttacagcttggtcaactcacgtgcgtcctgcaacaactctgttggcggatgggtgtccatattggtatgcaatggtgcatgatagttcagtgtcaacaataccaggtgattttgtcatgggtgtcaagttgacaaccataaccaat

SEQ ID NO: 5536 - DNA, 348 bp, Glycine max
  Clone ID: LIB3029-010-Q1-B1-C11
tctgtgcttactttttcttcttcatctaaatgtttccgagcttgccaaggttatctgcatttggtgagcctgttccttttttttttggtgaagttggtgagcttgtttcctagtgtttagctaaccaaactttagctgttattaattgatgccacacaaaactttggtgtctaagaaattaatgttaatattattttaagttgttgattttacaatcatctgatgcagcgcagactgaaatttagagctttgtgcataaataatcatggaaaatgtgtaatactataaatacttgtggatattcatttaaaagtgtattgacttaaaagtcttctgaatgccaggaga

SEQ ID NO: 5537 - DNA, 290 bp, Glycine max
  Clone ID: LIB3029-010-Q1-B1-C12
taaggctcgtattttgtttctctaaactttctgttggactcatttgaaatacaacatgaagttttatccaggacaaaatgtctctgaaattgtttaccattttcagagtaatgagacagctaataggcttgatgcttattttgcctgtggctgtgaagaggatactgaagtcctcgctcgtttgaagcaatgtaaccctcggttactgcatttatcttatgctgctttctgtttggaaatgggcagtcattctgttgaagaaatagaatatgatgatggagagttggttt

SEQ ID NO: 5538 - DNA, 308 bp, Glycine max
  Clone ID: LIB3029-010-Q1-B1-C2
tttggtttggtaaggtaaccttgtgttgttgttccaaaaaataaaaagttttgttaaagttaaactacttcctaagtaccccaaaatccacttttaagggtaagggtcctaataataatggaataaaatttggttaaaagaccaaaaaaaaaaaaaaccacaaaaatcctactctcgaacaccaaagttcacatccaacctctcacaacaaaaaaacaaaaaaaaaaaaggggggccccccccaatagtgcccccctaccccgggaaaaaattcccgcccggttcttcacgggtgtaaaattttcccc

SEQ ID NO: 5539 - DNA, 387 bp, Glycine max
  Clone ID: LIB3029-010-Q1-B1-C3
gcgcaacgctattcttcactcaaacgaactgaaacgacatatcgcagaatcaagggtttcgtttcttccttcgcacctattcattcttctatctgcttgcaattattagcgccaaaataatcccaatgaatcggtcatcttccgtttcaaatttccgaaacctcacatgcaattacaggcttagcatgatggattcaaacttaccatttctgcctcctagcaattccgatacaaaaaactcatttcgcaagccttctggtgatgcagctaataggaattatcagcatcggtcacctgttgacagatcaccctctcctgatgcttctaagcatggacatagctcaagtccaaatccagtgagagaaaaatctgcaagagtctcctcac

SEQ ID NO: 5540 - DNA, 401 bp, Glycine max
  Clone ID: LIB3029-010-Q1-B1-C4
cgaaccgcggcgcgtggcgttccatcattgacaaggtctcacgcgcccgcgccctctctctcctccacaagccccacgaccacctcacctaccttgccttcaacgccctctccttcaccaaactgcgtcgtttcaacgaagcctctgcggaactcgattccctcgaagacctcgacagctcccactaccgctacgaaacctaccccaaaatctaccccaatcggatcggatccatggtccccttctccctccggtggctccacgccctaatccccatcaaattagggcaacgtcagcaaggcatggaccgattctacattcttctcgatttcgtgcgcgggaagattaacgaaaaggagaaactgagcaacctcggggtctcccttaatctgtggagaaaa

SEQ ID NO: 5541 - DNA, 242 bp, Glycine max
  Clone ID: LIB3029-010-Q1-B1-C5
gaaggaaattggggtcctttggtcaaccctgagtctcaacaaggctcaccccgtgttaaagtcgcataaatgacaagcatgatggtgtgaggatgaggccatcttatgaaataataacaaataaataaattttgtatgataataaaaagtatggcccatgtaccatcccagcgagcctatgtttatatctgagtggcgttgtacctttcaatcgccttaataaaatgtcagtcttcacgttt

SEQ ID NO: 5542 - DNA, 370 bp, Glycine max
  Clone ID: LIB3029-010-Q1-B1-C7
gttcaatatcctaatataccttaataaataattttagataacatgaatagaacaacggttccaataatgtttccgggaactgttttcctggcctcaatttccgtcccaatttggcatgcttaatgggaaaaaaaaaaacccaaaaaacacaaagtgtctccagaatttgcaataaccagaaagacccttacaagaaacaaccatgccacgctccttgcaacctccttaaagtggagaaagaagaatgtgaagaacgtgaaattccacgaccacgaccacgaccacaacacccggagagggaacctcagcaaccccgtgagaacgacgaagacgaagatgagcaaccacgttcaatcccattcccacgccc

SEQ ID NO: 5543 - DNA, 395 bp, Glycine max
  unsure (1)..(395): unsure at all n locations
  Clone ID: LIB3029-010-Q1-B1-C8
gtacaaactcacctccaagtccatgctttttgttcttgcaagagtaacagagaagaagtggacaaacaaagctataatttttaaaagggttaccaccctcaccttctgccaaaccaaacccaaccttttctctctttaagctactattgtgctgagagctgaagaggagatggggggtggaaatcaagaagcagtgaagcagctgcagaccctgatggaaaatgtggatgatgagcagctgaagaacacattccagattatgcaccagggttatcaaactgaaacgttaatacggtttctcaaagctagggactggaatattgccaaagcccataaaatgttaattgattgtttgaactgganggtggaaaatgagattgacaatgttttaagga

SEQ ID NO: 5544 - DNA, 340 bp, Glycine max
  Clone ID: LIB3029-010-Q1-B1-C9
cgacgacttctcctccgacgacgaagacgagatcgagagccccaagaagcttggctacgtcaagattccggccattgagaccactaccgccgtcgcccccgcagctccggctccagccaagggttcggtatgagaatgtctccgactccgtaacggtgtggcttatgtggattgttaataattattattataggtgaaattgaatagtgaaaatgtcaaatggtgcaaacttttgccctgtatttgtgtttatgtttactttcctaatttgatgtatttgcgtttatcttaattctaattgccaaaccctggcgcttattattaaaaaacaagccacccc

SEQ ID NO: 5545 - DNA, 319 bp, Glycine max
  Clone ID: LIB3029-010-Q1-B1-D10
aaaagaaagaaagaaaaaaaaaaacagcgccctagatttgctcttctttgcttcggaagaaagagaaaaacaaataacaatggcgttcgcttctttcctcggcagagttctcttcgcttccgtcttcatactctctgcttaccaagaatttaacgaatttggagttgatgggggacctgcagcaaaagcactcagacctaagtttgatgcctttacaaatcgagtgcattctcaagttggctttcaacttcctgagattgatctgaaatttttaattgccggggctattgctctgaaaggccttggaagggttcctttc

SEQ ID NO: 5546 - DNA, 434 bp, Glycine max
  Clone ID: LIB3029-010-Q1-B1-D11
ctcttatcattcttttttccacttgacattgccgacgccaccaaatacacaaccttaactttcccacaacactacccatccatcattcgttttctctctagattttttcagttagttattgctgtcttctttttgtgtgtgccaacaacacagaaagagagagaaagacatggctctgaaccaatcaaaggccgtgttgttgagggtgagtttggtggtggtggcgctgtgtatagcaggatacatagtgggtccccctctctactggcatttcgttgcagtgaacaaccactcttcatcttctacttgtgcaccctgcatctgcgattgctcttcacaaccaattctttctattccacaaggacttagcaacacttcctttggagattgtgcaaagcctgaccaagaagtgagtggagacactgaaaagaatt

SEQ ID NO: 5547 - DNA, 347 bp, Glycine max
  Clone ID: LIB3029-010-Q1-B1-D2
ctcctttttcctatctacatacacaacatacacaaagcaaagcatgggagtgactctggagtttatgacacagaaggacgttatgtgccagcaaatattgagaacatattcagtaagtatgctcgtacagtacctgacaagctcacacttggggagctctgggacttgacagagggaaaccgaaatgcttttgacatatttggctggcttgcagcaaaatttgaatggggggttctgtacattctggcaagggatgaggaaggtttcctgtctaaagaagctgttagaagatgctttgatgggagcttatttgaatactgtgctaaaatgcatactactagtgatgc

SEQ ID NO: 5548 - DNA, 361 bp, Glycine max
  Clone ID: LIB3029-010-Q1-B1-D3
attggtccttaaacactcatcagtcatcaccatggccaagctagttttttccctttgttttctgcttttcagtggctgctgcttcgctttcagttccagagagcagcctcagcaaaacgagtgccagatccaaaaactcaatgccctcaaaccggataaccgtatagagtcagaaggagggctcattgagacatggaaccctaacaacaagccattccagtgtgccggtgttgccctctctcgctgcaccctcaaccgcaacgcccttcgtagaccttcctacaccaacggtccccaggaaatctacatccaacaaggtaacggtaattttggcatgatataaccgggttgtcctagcaca

SEQ ID NO: 5549 - DNA, 400 bp, Glycine max
  Clone ID: LIB3029-010-Q1-B1-D4
gctgaaaagctttatttataccaaggttttgatcctgccgctgtgaacttccctccacagaacggaaggctagaaactaaaatggaagttgttaaccaaagagatgcagaacttttcttcatgtggcaaatgtatcagagatcaaaccatcagccagaaaagaagacagacatcctcaaacagatagcggagacagtgaagcatacgaaacacatagatggtagcgtggaattgattggagttttattgtatggaccaggaaaaggttcttctgttctacaatccatgagggctcctggtcctgcccttgttgatgactggacatgcctaaaatcaatggttcgggtgtttgagacacactgtgggacactgactcactatggcatgaaacacatgcgag

SEQ ID NO: 5550 - DNA, 328 bp, Glycine max
  Clone ID: LIB3029-010-Q1-B1-D5
attatgctagttttgatggttattaccaagcaagttatgagcaagatggcagaaatgatcaacagtctttgtggtggtgatgaaaaactgatgcgtgaaaggacacacctgctgttggcttgttgttcaaggatggcaatttgtaagaaagatgtttggagagttgaatgtggaatcccttctggatttccgctcacagttatttgcaatagcatttttaatgagatgctcattagatatagctatgaaaaattactgcgccaggctaaagctccaagtatgtttttacaatccttcataaattttgtttccttgtgtgtgtatggtg

SEQ ID NO: 5551 - DNA, 392 bp, Glycine max
  Clone ID: LIB3029-010-Q1-B1-D7
attaacactttccttagttcaatatggggaagcccttcttcactctctctctttcttccctttgcttgctactcttgtcgagtgcatgccttgctattacctccagcaagttcaacgagtgccaactcaacaacctcaacgcgttgggaacccgacaccgcgttgagtcgaaagtgggcttattgaaacatggaactctcaacaccctgagctgcaatgcgccggtgtcactgttttcaaacgcaacctcaaccgcaaacgccctccacttgccatcttactcaacttatccccaaatggatcattgtcgttcaagggaagggagcaattggatttgcatttccgggatgtcctgagacgtttgagaagccacaacagcaatcaagcagaag

SEQ ID NO: 5552 - DNA, 71 bp, Glycine max
  Clone ID: LIB3029-010-Q1-B1-D8
tggagaaccagctcgaccagatgcctaggagattctatcttgctgggaaccaagagcaagagtttccaaaa

SEQ ID NO: 5553 - DNA, 441 bp, Glycine max
  Clone ID: LIB3029-010-Q1-B1-D9
gcaatggctacttcaaagttgaaaacccagaatgtggttgtatctctctccctaaccttaaccttggtactggtgctactgaccagcaaggcaaactcagcggaaactgtttctttcagctggaacaagttcgtgccgaagcaaccaaacatgatcctccaaggagacgctattgtgacctcctcgggaaagttacaactcaataaggttgacgaaaacggcaccccaaaaccctcgtctcttggtcgcgccctctactccacccccatccacatttgggacaaagaaaccggtagcgttgccagcttcgccgcttccttcaacttcaccttctatgcccctgacacaaaaaagctttcagatgggcttgccttctttctccaccaattgacacctaaccacaaacacatccacgtaatcttggccttttcaacgaaaaca

SEQ ID NO: 5554 - DNA, 351 bp, Glycine max
  Clone ID: LIB3029-010-Q1-B1-E1
caaccttgaagattgaaaagaattctgaaaagaaatattaaactaagaggttccctttttgcagttagtggcactgcatgtgataaggaatcactcagtttaactttatatatgcatatcacccctcggtcatctatcatataccccttctccttccctccttataacatcactgatttctcagcacttgctaaatccctctccatcttttgcatgtcctagaacttttttccaaattcagaataacaatttggcatttcatcagtctccattcataggacaaatgggtgaggaagcaaaacaggaacaagtacaaccggtggctgaagccaagcctgaagagaagaaaga

SEQ ID NO: 5555 - DNA, 353 bp, Glycine max
  Clone ID: LIB3029-010-Q1-B1-E11
ctcgagccgcgcaagaatgctatgttcgtgccacactacaccctgaacgcgaacagcataatatacgcattgaatgggcgggcattggtacaagtggtgaattgcaatggtgagagagtgtttgatggagagctgcaagagggaggggtgctgatcgttccacaaaactttgcggtggctgcaaaatcccagagcgataactttgagtatgtgtcattcaagaccaatgatagaccctcgatcggaaaccttgcaggggcaaactcattgttgaacgcattgccagacgaagtgattcagcacacttttaacctacagagccagcacgccaggcacgtgaagaaacacaaccc

SEQ ID NO: 5556 - DNA, 434 bp, Glycine max
  unsure (1)..(434): unsure at all n locations
  Clone ID: LIB3029-010-Q1-B1-E12
gttatgggtttccttgtgttgcttcttttctccctcttaggtctctcttctagttccagcatatcaactcatcgttccatattggaccttgacctaaccaagtttaccacacagaaacaggtgtcttcactgttccaactatggaagagtgagcatggacgtgtctaccataaccacgaagaagaggcaaagagacttgagattttcaagaataacttgaactatatcagggacatgaatgcanacagaaaatcaccccattctcatcgtttaggattgaacaagtttgctgacatcactcctcaagagttcagcanaaagtacttgcaagctcccaaggatgtgtcgcagcaaatcaaaatggccaacaagaaaatgaagaaggaacaatattcttgtgaccatccacctgcatcatgggattggaggaaaaa

SEQ ID NO: 5557 - DNA, 394 bp, Glycine max
  Clone ID: LIB3029-010-Q1-B1-E2
aatccttaaagttagatatttaagattaccagttgcagtcaaacaagggccccacacatgcgcaagaatgtaaaatgattaacaattgtcatacaaactgtaggaatccttaaccataatcaatggtacatgtgcatcaaatgcctcctcatagagttatagaaaaagcctattgcaagctaatcaatctcccttctatccatgaggatttctggcaattctcagtgataagtctataaatccttgccttcatacacattggggccaaaacaatggagtaagataatggttattgaatccctgtttttgtgcaagtcttttgtttttgtttttgcttttctttactaacaactgtgacctatagatgtgattgtatttggtgaactttacccct

SEQ ID NO: 5558 - DNA, 404 bp, Glycine max
  Clone ID: LIB3029-010-Q1-B1-E4
ctattgtgttttaaatccacaaaatccttttgtgttaaataggtggatggggaaactgactttcccccagggcacttcccgaagtgtcaaaagaatgcctctttctatagggggaggagctggtgcaaagaatgctattctcatgaatatgccaaatgctgttctttcaatgtggagatattttgttggagatctcgtctttgaagtttctaagatgacttctccctacattaaatgtacagtctctttcttcatagcatttggaaatttggctgatgacaccatcaattttgaggcttttccccacaagctggtgcagtttggagagattcaggaaaaagttgtattgaaattttcacaagaggaatttcttacagcttggtcaactcaggtgcgtcctgcaa

SEQ ID NO: 5559 - DNA, 372 bp, Glycine max
  Clone ID: LIB3029-010-Q1-B1-E5
cttggcttcaaacatgatcaagaatccaccactaagaaagtctctgactatgccggtgatgctgctcagaaatcaaaggactatgccggtgacactgctcaaaaaaccaaggactatgccggtgacactgctcaaaaaaccaaggactatgccggtgacactgcacagacatcaaaggactatgccggtgatgctgctcagaaatcaaagggctatgtcggtgatgctgcacaaaagaccaaagaatatgttggtgatgctgcccagaagaccatggattatgccactgatgcagcacagaagaccaaagattatgctactcagaagactaaggactatgcaagtgatgcaactgatgctgcaaaaaagact

SEQ ID NO: 5560 - DNA, 396 bp, Glycine max
  unsure (1)..(396): unsure at all n locations
  Clone ID: LIB3029-010-Q1-B1-E6
gttcttaaccagaagcgcgctctttcgcttttcaaagtctctcccttatgccccttcactctcccttaaaccctccatggtcaccttctcctctactcccaattcaggctggagaaatgcagcagaaggaggaagaagagacggaagaaccaattggacgtatgattctgccgaggcaagacgcgaggcagatgaaatgtctgagagtgccaaagaaacgatgaatgaaggctatgacagggccaaggattaagcgcgggaagccaaagacagaacaaaggatttcgcacacgacgcanaggagaagacgaaggacgctgcggggtcgatgagggacagggcggagagtgcggcggagaagacgaaagagtatgcttacgacacagaagagagtgc

SEQ ID NO: 5561 - DNA, 375 bp, Glycine max
  Clone ID: LIB3029-010-Q1-B1-E7
aaaacacattgctaccagtggaacacatactgcagcaatcacagaatcaggggagctttatatctggggtcgagatgaaggggatggccgattgggccttggtcctggtcggggcccagatcatgcaggtggacctagtatcccttccaaagtaaaagagttaccttaccctattgctgctgtatcctgtgggggatttttcacaatggcattgacagtggatggacaattatggaactggggagccaattccaactatgaacttgggagaggtgataagattggtggttggaaaccaagaccagtacccagccttgagaatgttaaaataattcaattagcaagtggtggatatcactcccttgcattaacaga

SEQ ID NO: 5562 - DNA, 382 bp, Glycine max
  unsure (1)..(382): unsure at all n locations
  Clone ID: LIB3029-010-Q1-B1-E8
gtcgactctgggaagtcaactaccactggtcactttatccacaagctttgaagtattgaacagcctgtgattgagaggttccagaaagaggctgccgagatgaacaagaggtcattcaagtatgcctgggtgctcgacaagctcaaagctgagcgtgaaagaggaattaccattgatattgctttgtggaagtttganaccaccaagtactactgcacggtcattgatgctcctggacatcgtgactttatcaagaacatgattactggtacctcccaggccgactgtgctgtccttattattgactccaccactggtggttttgaagctggtatttctaaggatggacagacccgtgagcatgctcttcttgctttcaccc

SEQ ID NO: 5563 - DNA, 305 bp, Glycine max
  Clone ID: LIB3029-010-Q1-B1-E9
tcttggtggaggaattttagtggacaaaactggagattggatcacacttatacaaaattctccaattagtaacttgttgagagttgctgcttggaagaaaggctgtttaatggttaagattgtgatgtctgggaatgcagcagtcaaaaggagtgattgggcctcattggtacaagtgtttttaacaaacagcaacagtacagagcattttgatgcatgtaagtggacaaaatcggaaccacattcctgggaattgatcttcccaatagaggtatgcggtcctaataatggttttgaaatgtgga

SEQ ID NO: 5564 - DNA, 334 bp, Glycine max
  unsure (1)..(334): unsure at all n locations
  Clone ID: LIB3029-010-Q1-B1-F12
cagcattttaatgtacttatttcctcatttcaacaggtttctccatgacaaggttaagccacaagttgtgcatcgagatatacgcactagcaacgtactgctggatgaggaatttggagcacgccttatgggggttggtctgtccaagttcgtgccatatgaggtaatgcatgagaggactgtgatggcaggtggaacttatggatatcttgctccggagtttgtgtacagaaaacgagctcacaacaaagagtgacgtatatagtttcggtgtgctactacttgaaatagtaagtggacgtagacctgcacaggcantggattccgtgggttg

SEQ ID NO: 5565 - DNA, 398 bp, Glycine max
  Clone ID: LIB3029-010-Q1-B1-F2
gagagagagaagcctggggagtataattggggagggtacgtggaactcatggaaatggcgaagaagcatggcctcaaggtgcaggctgttatgtcatttcaccaatgtggcggtaacgtcggagactcttgcactattcctttgcccaaatgggttgtggaggagattgataatgaccacgatcttgcatatactgatcaatggggaagaagaaactatgaatatatatcacttggatgtgatactttgccggtgctcaagggacgatccccagttcaatgttatgctgatttcatgcgtgctttcagagacactttcaagcacctccttggtgataccattgtggaaatccaagttgggatgggaccagcacgtgagttgcgttacccttcgtaccc

SEQ ID NO: 5566 - DNA, 368 bp, Glycine max
  Clone ID: LIB3029-010-Q1-B1-F3
tgagtgcagttagagtgaaacaataggcgatccgcaacttacgttgttgttgaacggagcacgctccctctctgtcctaactcctaatctctctcgcacacacacagtaactatttatttcctccaaatgcttttcttctttagttttaatcacaccctctttcacgttgtagctgctgactcattggatgaagaattcttgatcaaataacttgtcataattgatttcaaattaagacaggctccatgaattttttcataattcaatgtacctagatgtagaatacaaagcttagctaattgctggggtgaaaccttccacggtttcagtacaacttgtggaaacaattcctacatcaggttgcttg

SEQ ID NO: 5567 - DNA, 404 bp, Glycine max
  Clone ID: LIB3029-010-Q1-B1-F4
gatgcggccaactttatctcggaagttcaattcatatgtgctgcctacaccagttgatgcgaagagttcaatatctatgaggtcaagtaatcaagtacctttgaaaataaagacaaatttaaatgagcctatgaagaatttatggcattcatccccactagaacaaaagaaatatgaaaacatttttggagatgggggattatctggtcctaatgcacagtctgtactgaaggagagtaacagcaatactgcctactcaagattgccacctcctttaatcgatggtaatttatcctctagtcatgattatattaccgcttactctaaaaagatcaaaagacatgccttttctggtccattggtaagtaatgcatggccaaccaagcctgtctcgttagaaagtg

SEQ ID NO: 5568 - DNA, 395 bp, Glycine max
  unsure (1)..(395): unsure at all n locations
  Clone ID: LIB3029-010-Q1-B1-F6
acccatatatatattactataagcctataagttgcatttaatttacagccttgcacgtgtgaagtgaagaataatcttgtgcattgcctaagctctctcaactcaactgaatcagggtcacaattaatcgtcttgaaattaagaccagctgggtcattgatcacaatctcatcaagggaaagtagtgaaaaaataaaggtttattgatcatcanggatggcaactcgaagatatgagtttggaaggatgaatgaggctagccacccagactccatcagagctgccttggttgaattcctctccacttgcatctttgtctttgctggagaaggctctgcccttgctttgcgacaaatttacaagggaacaaggtcatcagcgggtgagttagtggt

SEQ ID NO: 5569 - DNA, 334 bp, Glycine max
  Clone ID: LIB3029-010-Q1-B1-F7
atctcctttaccaccattctagatatcagagaactttgcagctctcttaggtttttaaaaaacaccacgcaaacagcaagatggccacttccgacagtaacatgctactaaattatgttccagtttatgtgaatgctccactcggagttgtcaatgtttacaatgttttttaagacccagattggccttaaaaaacaactcttgcagcttccaacctgccgggtgtttaacgggttaatcgttgaagttctggtgggggattcaaaaaactgaacgggcctaagcagtatgattggagagcctacaggagtttgtttcagccggttcaagaatg

SEQ ID NO: 5570 - DNA, 390 bp, Glycine max
  Clone ID: LIB3029-010-Q1-B1-F8
gtatccttctcacaatcaaccatatgctcctccaccatatggaaactatcctcaacatatggctccaagaagcaactttggttctggttgggaacaaaagcctcaacacagctttcaaggggcatcgccacataattgtggttatgagtattatggacgacaacggggtcatttatcccaacctcaccatcacacagcttcccagttcagcccccccacatggtgcggggtccttcccctgtaccttctatggtatcaaccccagctcatgtgaattacaactatggacagccacaatgccaggattatggtcatcagacagcttattctcaggcacgacttccccaacaaagttatggacacggatatgatcagtcaaagtatgaaaat

SEQ ID NO: 5571 - DNA, 349 bp, Glycine max
  Clone ID: LIB3029-010-Q1-B1-F9
acaagccattccagtgtgccggtgttgccctctctcgctgcaccctcaaccgcaacgcccttcgtagaccttcctacaccaacggtccccaggaaatctacatccaacaaggtaagggtatttttggcatgatatacccgggttgtcctagcacatttgaagagcctcaacaacctcaacaaagaggacaaagcagcagaccacaagaccgtcaccagaagatctataacttcagagagggtgatttgatcgcagtgcctactggtgttgcatggtggatgtacaacaatgaagacactcctgttgttgccgtttctattattgacaccaacagcttggagaaccagct

SEQ ID NO: 5572 - DNA, 385 bp, Glycine max
  Clone ID: LIB3029-010-Q1-B1-G10
actgaccaagccatggcgatgagaaccaaactttctttagctatctttttcttttttcttttagccttattttcaaacctagcctttggcaaatgtaaagaaaccgaggtagaagaagaagaccctgagctcgtaacatgcaaacaccaatgccaacagccacagcaatacactgagggtgacaagcgggtatgcttgcaaagatgtgacaggtatcatcgtatgaagcaagagcgagagaaacaaatccaagaggaaactcgtgagaagaaagaggaggaaagccgtgaaagggaagaagaacaacaagagcagcatgaggaacaagatgaaaatccctacatttttgaggaagataaggattttgagaccagagtcgaaactg

SEQ ID NO: 5573 - DNA, 402 bp, Glycine max
  Clone ID: LIB3029-010-Q1-B1-G2
ctcaaagaaattaagagagttttttttgttcctcactgaccaagccatggcgatgagaaccaaactttctttagctatctttttcttttttcttttagccttattttcaaacctagcctttggcaaatgtaaagaaaccgaggtagaagaagaagaccctgagctcgtaacatgcaaacaccaatgccaacagccacagcaatacactgagggtgacaagcgggtatgcttgcaaagatgtgacaggtatcatcgtatgaagcaagagcgagagaaacaaatccaagaggaaactcgtgagaagaaagaggaggaaagccgtgaaagggaagaagaacaacaagagcagcatgaggaacaagatgaaaatccctacatttttgaggaagataaggattttga

SEQ ID NO: 5574 - DNA, 354 bp, Glycine max
  Clone ID: LIB3029-010-Q1-B1-G3
gaatatggaggtggtcagtctgttcctgttggtggcattgcatactatatcactgcaccatccagcttagctgatatggcagccaatcctttccatgctctgttctatcttgtgtttatgctttcagcctgtgccttgttctctaaaacatggattgaagtctctggttcatctgctaaagatgttgccaagcagcttaaggaacaacaaatggtaatgcctggacaccgtgagtcaaacttgcagaaagagctgaaccgatacattcccacggccgcagcatttggaggcatctgtatcggtgctctgacagtgttggcagacttcatgggggccatcggttcacgaaccgga

SEQ ID NO: 5575 - DNA, 399 bp, Glycine max
  Clone ID: LIB3029-010-Q1-B1-G5
gtgaggcttcaatttccaattagggtttcgcttagagtaaccaattaccatgggagtcttcacctttgtcgttcgcaaatccggcgccgaatggagcgccaagcaacattccggcgacatcgaggcctccgccgactccacctacgatctccaaaggaagctcgtgcaagccgctctcgccgttgattcctccggtggagtccagtcctccttctctcccgtgtctcctacctccgctgtgttccaggtgatagtgggtggtgctgtattcgttggaggtggcggtggtgctgttgcagctgcacctgcaggtggtgctgctgcagctgatgctgccccggctgctgagaaaaaggaagaaaaggtggaagaagagtccgatgatgatatgggattggg

SEQ ID NO: 5576 - DNA, 389 bp, Glycine max
  unsure (1)..(389): unsure at all n locations
  Clone ID: LIB3029-010-Q1-B1-G6
gatgttttccctcctctaaggtcccaattttttcttaaaccctagaacacacactctctctcacagaagaagaagctgctgcagaagagaatttccaaaatgtcgatgtcgaagagttccaagatgcttcagtacatcaactaccgtttgcgtgtcaccattcaggacggtcgccagctcgtcggaaaattcatggccttcgaccgccacatgaacctcgtcctcggcgactgtgaggagttccgcaagcttcctccggccaagggcaagaagccagccgaaggcgccgaccgcgaggaccgccgcacgctcggcctcgtcctcctccgcggcgaggaggtcatcntcatgaccgtcgagggccctcctccgccggaagagtcccgctc

SEQ ID NO: 5577 - DNA, 391 bp, Glycine max
  Clone ID: LIB3029-010-Q1-B1-G7
cacactgtcaccgttccgttccgttttcctctgttttttttttctttctttcaaatccccgcttcgtggaaatcccgaaccagaaaccatgcttctccgaaccgctgctgcttctgcttcgtccctctccctcttcagcccgaacgccgaacctccccgttcggttcccgctcgtggattggtggttcgcgcagcgaaaggatccacgaaccaccgcgccctgaccggagtgatttttgaaccgttcgaagaggtgaagaaggagctcgatctcgttcccaccgttccgcaagcttctctcgcgcgccaaaaatacgttgacgaatctgagtccgccgttaacgaacaaatcaatgtggagtataacgtttcgtacgtttaccatgccatg

SEQ ID NO: 5578 - DNA, 382 bp, Glycine max
  unsure (1)..(382): unsure at all n locations
  Clone ID: LIB3029-010-Q1-B1-G8
atggctgtagcaggattagcagctgatggcagacaaattgttgccagggctaagtctgaagctactaactatgacagcgtatatggcgaaccaattcctgttaaggaacttgctgaccgtgtggctagttatgtgcacctctgtacgctatattggtggctcagaccttttggatgtggtgtcatactaggaggttatgacagggatggaccacagttgtacatggttgaaccttccggtgtttcctatagatatttcggtgctgcaattgggaagggcangcaggctgctaaaacagagattgaaaagttaaagcttgctgatatgacatgtcgacaaggggttattgaagtggctaaaattatatatggagttcatgatg

SEQ ID NO: 5579 - DNA, 427 bp, Glycine max
  Clone ID: LIB3029-010-Q1-B1-G9
gagtgcaggcatcatattgtatattcttctgagtggtgtaccacctttttgggctgaaactgaaaagggaatatttaatgccatattggaaggtgaaattgattttgtaagtgaaccatggccatccatatcagacagtgctaaagacctagtcaggaagatgctgacacaggatccaaacaagcggattacttcttctcaagtccttgaacacccatggatgagagaacgtggagatgcatctgataaaccaatcgatagtgcagttctatccagaatgaaacaattcagggcaatgaataagctcaagaagctagcattgaaggttatccctgaaaatctatcacaagaggagattaaaggtctcaaagcaatgtttgccaacatggacactgacaatagtggcactatcacctatgaagaatta

SEQ ID NO: 5580 - DNA, 359 bp, Glycine max
  Clone ID: LIB3029-010-Q1-B1-H1
tcctcaccgattgctagaatggaatttcgatgctcagtcatctcttttaccattctcttctctcttgctcttgcaggagagagccatgtccatgcatcgctacctgaggaagattattgggaagctgtttggccaaacactcccattcccactgcactgcgagagcttctaaagcctctccctgcaggtgttgaaatcgatgaactccctaagcaaattgatgatacacagtacccaaaaacattcttctataaagaagaccttcatccaggcaaaacaatgaaagtacaattcaccaagcgtccctatgcacaaccttatggtgtatatacatggtttacggatatttaagacacctc

SEQ ID NO: 5581 - DNA, 377 bp, Glycine max
  Clone ID: LIB3029-010-Q1-B1-H11
aaatattttaatactaatttgtgtaagttttttgttttctatttaacaggaggcttgccaagcgatcgctgaaaggttggagtgtcatctcaacctaaggatagtcacgctaggcacaaagacacatgaggccatcgaacaatgcctcaggattgtcaagagtgtcacagaagaccgcattgtgtatgtgagatcttgatgtaggcgacgcacagatcagccatagtttatttacacatttgatattatcatatttggaagatgtatatacatttcttgtacttgaaaacatgtttgtttttgactgaacattttgtatattttaagttactttggtttatgataatagtttataaattaatgttaacgtttaaatg

SEQ ID NO: 5582 - DNA, 349 bp, Glycine max
  Clone ID: LIB3029-010-Q1-B1-H12
gagaaaaatggctgatacaagtggaggagatgcagtgagaccggtggtaatatgtgataacaagtgtggctgcacagttccatgcactggtggttccacttgcaggtgcacaagtgtcggcatgacaactggaggcggtgatcacgtgacatgctcgtgcggagagtactgtgggtgcaatccatgctcatgtcccaagactgcggcttctggaactggttgcagatgtggcacagattgctcatgtgcctcttgccgcacttaacatcataccttaattaagtctcaaacttcacaaatcttgaatgtgctttaaatctagctatgtactagatagtctcgttcaatg

SEQ ID NO: 5583 - DNA, 405 bp, Glycine max
  Clone ID: LIB3029-010-Q1-B1-H2
ataaccggccaaagcttctctctcttccatttatcccccataaataaaactaggtgaaaaaaatatactctgtgcttctcatgatgatagtgtagctgaagctgcttctgctgcagcattggtgatttggacacaaaaaaagtttcaaacttttcagttctctgagcttctggtttatcaattttgaaggagttcaatactttaccctattagttggttccctgaaatttgtattggtattgctgtatcagaaattcttctgaacaatctctttaatcaaccatgtcattattggctaaactacgctgtgtcaccatagatgttactggtaccctaatggcttacaaaggggagctccgtgactattattgcatggcagccaaagctgcaggcaaaccttgccca

SEQ ID NO: 5584 - DNA, 120 bp, Glycine max
  Clone ID: LIB3029-010-Q1-B1-H5
gaaaacttcgatacaagttagtgcttttccttccgttgttctgccggaatttctttacctaggatgctacgacaccgcatcacgctcggagcttctgaagtaccaggggatttctcgtgg

SEQ ID NO: 5585 - DNA, 400 bp, Glycine max
  Clone ID: LIB3029-010-Q1-B1-H6
ccaccctcaccattactatcctcaccaccccaaaaaaaaacaaacccctcgtttccactctcctctcctcccacccttcgattcaaaccctaatcctccccttcccctctcacccttctctccctcccggcatcgaaaacgccaaagacatgcccctctccattcgccccatcatgctctctctctccaacctccaccaacctctcacgaactggttccgctcccacccttcccctccacgcttcatcatctccgacatgttctgcggatggacccaacccctcgcttccgagctcggaattcaaagactcgtcttctccccctccggcgcctttgcgtactccaccatgtgctttctctggaaggaaactccaaaacgcgaaaacgaacaagaccaaaa

SEQ ID NO: 5586 - DNA, 90 bp, Glycine max
  Clone ID: LIB3029-010-Q1-B1-H7
gggaccgatccacggagtcatcagttgcatagtttgttgcaaagcgggcattgcactcgagtcactttctcgttccgctatccgtcgaat

SEQ ID NO: 5587 - DNA, 284 bp, Glycine max
  Clone ID: LIB3029-011-Q1-B1-A1
caacagctttcatgggatgatgattagcagggttttcgatgattacacaggcatgttgcggctggtccacttttggcttggggatgctgcaacatacgcggcaggaggtcatggtatgggtttgggcaactccacctgcgagccagttccatggtcgttcggtcatatcatgggtgacctttttacccacggatattgccaatgaaagcatcgctctcgcgaatttaatccatgcatccgtgtccttggcaccatgacagtgtccataatcataattatggtgt

SEQ ID NO: 5588 - DNA, 422 bp, Glycine max
  Clone ID: LIB3029-011-Q1-B1-A10
acaaaaaagacaacacctttttatctctacacaagtgattatggcggttgctgagaatgttggggccaaaatcggttcttccagtcaaaatttggaaaacaatgtagtgtcatcgaactcaggcgaggttgagcaatcaaaacccagaagtgggtccatcaacgacgatcagaagctgaacaacggtgtcttcaaccaccaagatagagttcctggcactatgccagtgcccaatagcaattataactacgaggcccaaatgggtcagatgcacacaaatggggtgaacaatgatgggtatggaatgaatggggtcatttgtggggagaatgggggtgagagtttcaagcgtgatatgagggatttggaagagcttttgtcaaagttgaatcccatggctgaggaatttgtgccccaatcac

SEQ ID NO: 5589 - DNA, 378 bp, Glycine max
  Clone ID: LIB3029-011-Q1-B1-A11
tctttgaacactcatcaccatggccaagcttgttctttccctttgtttccttcttttcagtggctgcttcgctctgagagagcaggcacagcaaaatgagtgccagatccaaaagctgaatgccctcaaaccggataaccgtatagagtcggaaggtgggttcattgagacctggaaccctaacaacaagccattccagtgtgccggtgttgccctctctcgctgcacccttaaccgcaatgcccttcgtagaccttcctacaccaacggtccccaggaaatctacatacaacaaggtaatggtatttttggcatgatattcccgggttgtcctagcacttatcaagagccgcaagaatctcagcaacgaggacgaaa

SEQ ID NO: 5590 - DNA, 388 bp, Glycine max
  Clone ID: LIB3029-011-Q1-B1-A12
ggctgagtttttcttatttggttccttgggtcatggattggatgtggttgctccaaatttaagtgagggaggaccccctcccattggtgccagattggccagacttgagaacctcatcagggatatcatcttgcagtttggtttgcaggaagttggacacttgagggccataaagagcacagtgagagggttcccaaggccgttacttgatctaagcacagcatcttttgcaaaagtaatgaatagtgcatttgggagacctcttgttcctccctttgacccctatgctaattcgatcaactatctgttagcatcttatgtgattccctatgttggtctcactggttatgttggtgccaatccactgctgcaaaatgctacttccaag

SEQ ID NO: 5591 - DNA, 380 bp, Glycine max
  Clone ID: LIB3029-011-Q1-B1-A2
gcaaagcaatggctacttcaaagttgaaaacccagaatgtggttgtatctctctccctaaccttaaccttggtactggtgctactgaccagcaaggcaaactcagcggaaactgtttctttcagctggaacaagttcgtgccgaagcaaccaaacatgatcctccaaggagacgctattgtgacctcctcgggaaagttacaactcaataaggttgacgaaaacggcaccccaaaaccctcgtctcttggtcgcgccctctactccacccccatccacatttgggacaaagaaaccggtagcgttgccagcttcgccgcttccttcaacttcaccttctatgcccctgacacaaaaaggcttgcagatgggcttgccttc

SEQ ID NO: 5592 - DNA, 376 bp, Glycine max
  Clone ID: LIB3029-011-Q1-B1-A5
gcgaaacctccctcgacgccacgctccagatcgccctccgcacgctcgacacgcgccgcaccgctgccctctccgccctcctcaccgacgccgacgacatcatcaacagctcccccgacggtgaggtcgacgacaccaccggcctcatcctcaaactcaagtccttctgcctccgcatggacgcattcgggttcttcgccttcgtcagcgccaagaagaaggagctcgacggcctacgcgccgagatgcctgtggctctggcggagtgcgttgatccggcgaaattcgtgctggaggcgatctccgaggtgtttccggtcgacaagagaggggcacaagtcggccacgacttgggctgggcctgcgtccttgtcct

SEQ ID NO: 5593 - DNA, 376 bp, Glycine max
  Clone ID: LIB3029-011-Q1-B1-A7
aaagcggattctgtctccatcctcagttcccttcctgaagatgttgccctcaaaattgcttcgctgcttcaggtgcgggatttgtgtgccttaggttgttgttcgaggttctggagggaactctgcttctcagattgcatttgggagtctcttgtcagaaacagatggcccttactctcttccttccatttcccttcttcttccactcattctcccaatttcaagaagtggaggaaattgtacttggagaggcaagtggaattgggacttagagcaaggtctgtcgtgaagtttctggaagcttgttctcgttctgagtcacttgaggttggtgactatctgaaagctgttgacaccttgattggttacatgtttg

SEQ ID NO: 5594 - DNA, 380 bp, Glycine max
  Clone ID: LIB3029-011-Q1-B1-A8
gttgagtttgacactttccggaactcttgggatccaccaaatccacacatcggaattaacgtcaattctatcagatccatcaaaacgacgtcttgggatttggccaacaataaagtagccaaggttctcattacctatgatgcctccaccagcctcttggttgcttctttggtctacccttcacagagaaccagcaatatcctctccgatgtggtcgatttgaagacttctcttcccgagtgggtgaggatagggttctctgctgccacgggactcgacatacctggggaatcgcatgacgtgctttcttggtcttttgcttccaatttgccacacgctagcagtaacattgatcctttggatcttacaagctttgtgtt

SEQ ID NO: 5595 - DNA, 428 bp, Glycine max
  unsure (1)..(428): unsure at all n locations
  Clone ID: LIB3029-011-Q1-B1-B10
attgatcttaaaaacctgagggttattgctgaatatcttcaaaaaattgatccaaaatcagatggtgcaaagagggattgggttgctatttatgatgaatgtgcctctgtcttatatcaggagattgattacaccaaggaggctgctaatgctgaattgtttgcaagtaactttaagaacatggattatgtgaaagttcctacaatctactgggattataccactccacagattctgacaatggagtatgttcctgggattaaaataaacaaaatacaagctttagaccaactgggtgttgaccgcaaaaggttanggagatatgcggttgagtcatacttggaacaaattttatcacatggtttcttccaatgctgacctcatcctggaaatattgcagttgatgatgtcaatggtggaagattgat

SEQ ID NO: 5596 - DNA, 431 bp, Glycine max
  unsure (1)..(431): unsure at all n locations
  Clone ID: LIB3029-011-Q1-B1-B11
gttgggtttacaaggagcaggtaaagcttttccaaacaagattgtttttgatgataaacttgtgctggctaacacacaagaattctttgctggaaattttccagtggattcttggttaccaatttttgtgaattgtctttatcctgtaagtcaattaccttcagaagctgtcgttgtaaatgttacatgtggtagtggacgtggtggtttacctaccactgcttggattagttctgcagttaacaatcgctcctcagatatcaacanaaagattcgcacagcacttgggaaaggtaagaaaattgtttttcttactagagttgatccttttccagtagctctactggctgttctttttggcgttaagaatgaaattctgagttccaacgccactaaccctatgctgacgcgacttcttgagaactgtaaga

SEQ ID NO: 5597 - DNA, 385 bp, Glycine max
  Clone ID: LIB3029-011-Q1-B1-B2
ggagaaagaggttttcattgttcttgttgttgtagaagaagaagaagctcaagaatggagtcgacggaatcttcatacgtctcttctcccgagggaccaaggaagcacgctgcatcgcctcctccgaaaccgccttcgctagattctgaggagaagccaacatatattaggtttctagtatcaaactctgctgctggttcggttattggaaagggcggttcaactatcactgattttcagtcacaatccggagcacgaatccagttgtcacgtaatcatgaattctttcctggaactagtgataggattatcatggtatctggtgcaataaatgagataccaagggctgtataacttcacctttctaagttgctcagttagcttc

SEQ ID NO: 5598 - DNA, 380 bp, Glycine max
  Clone ID: LIB3029-011-Q1-B1-B4
cattggtacaagtgtttttaacaaacagcaacagtacagagcattttgatgcatgtaagtggacaaaatcggaaccacattcctgggaattgatcttcccaatagaggtatgcggtcctaataatggttttgaaatgtggagttctgagtgggcaaatcaaacttcatggcatttgagtttccttattgacaatcccaaacagtctacagtttttgacattctcttgggaatttctcaagattttgaaattgctggtaatactcttatgccagctttttctgttccacaggctactgccagatcttctgaaaatgcggaatcctctgcatgatctggaatttgtgttttctttcatttgtccgtttgtttaattcaataa

SEQ ID NO: 5599 - DNA, 368 bp, Glycine max
  Clone ID: LIB3029-011-Q1-B1-B5
accgcacagagcagaaaatcatcacaggaaacaactggttatgtattcttaagatgcgttatcacgggtaatggaggaaattcatatgcatatcttggacgaccgtggggcccttttggaagggtggtctttgcatacacttacatggatcaatgtataaggcatgttggctgggataactgggggaaaatggagaatgaaagaagtgtttgcttttatgaatacaggtgttttggacctggttgctgtccatcaaaaagagtaacctggtgtagagaattgttggatgaagaaactgagcagttcctcacgcatcctttcattgatccagaaacagagaaaccttgggttgctcaaaggatggccct

SEQ ID NO: 5600 - DNA, 382 bp, Glycine max
  Clone ID: LIB3029-011-Q1-B1-B6
aacaaagtatagagtgaaagaatgggtgagaaaagcaagattttgatcataggaggcaccggctacatcggcaaacatatagtggaagcaagcgcaaaggctggaaatcccacttttgctttggtgagggaatccacactctctgacccctccaaggcacaactcatccacaattttgaggctttgggcgttaatttggtccgcggggatctgtacgatcatgagaagttggtgaaagctatcaagcaagtagatgtcgtcatatccacgctgggtcacctgcagcttgccgatcagctcaagatcatcgctgccattaaggaagccggtaatgttaagaggtttttcccttcggaattcggtaacgacgtggatcgtgtcc

SEQ ID NO: 5601 - DNA, 227 bp, Glycine max
  Clone ID: LIB3029-011-Q1-B1-B7
aactaacaataattccttcacttgcagaacttagttctctgttgcatcatcatcatcttcattagtgttagccctaaacttcaccttcaaccatgaccacagtgccaccacacagtgtccaagtgcacacaacaccacaccgctacgaagccggcgtcttcccgccggttcgttttgaggccccgcgttacgaatccggcatcaaggcgccttcttccattaacaat

SEQ ID NO: 5602 - DNA, 380 bp, Glycine max
  Clone ID: LIB3029-011-Q1-B1-B8
aaaaaaaagactcattattttcaatttgacccacactaacaagagggactacaaaacaaccttaaaaacctagagactaaaaaaataaatttaaatttgaaagacaaaaaaaatgacctaaatttgagaaattaaaaacatgtttaagcttacaaaacactttatttctatctatttatttttaattcctcaatggaaagtttaataataacatgaaaagtttacctaatgtgaaacacatgaccattattaattcatcacaacttttcgaggtctcacattgcaagtcaagtcgagtgaatgtcactattctaattcattttttattcatattatatttgattgtactctcagagagtccgtttatattaaaaaataat

SEQ ID NO: 5603 - DNA, 426 bp, Glycine max
  unsure (1)..(426): unsure at all n locations
  Clone ID: LIB3029-011-Q1-B1-B9
ctttgggaagagaagaaggaaagtctagtttttttggttcgtggggttggttttgcaaatggcctccttctcggtcccatgccccaagtgtcctacaacttcttcttcgtcttctctccctttggggttgaattctcaaaaggtctcatttcaaagtgggttgatcttgaagccttctctttcattcggatctttgtctgctgaatctgctgcatcaaggattcagtgccttaacaggaagcaattttctgttctgaaggctactaaagttgaaaattccaactctgcccctgtaacggtcaatggacctactgttgcttcatcaaaagaaaaccaagtgcataatggaaaactctctgatactactatcncagatgaagcttcaattattgcattcatgtctcaagtttcagaccttgtaaaact

SEQ ID NO: 5604 - DNA, 376 bp, Glycine max
  Clone ID: LIB3029-011-Q1-B1-C1
caaaaacccattcacttttccacaagccttagttcttctcatttattctctttttcaaaatactttcactctctctaaccttccagttctcactaaacctcgtgaagctcgtgatggacaccaagataggttcactagacgcgcccaagcccaacagcaacgacgtcgtatcatgcaacctcactagcagcgccgccatccagccctgcttgccggcgacggtgatcaacggcgccggctgtagtgactccaccttgggcggccacctggcccgccggctggtggaaatcggcgtcaccgacgtgttctccgttcccggggacttcaacctgacgctgctggaccacctcatcgcggagccggcgctgcacctggt

SEQ ID NO: 5605 - DNA, 415 bp, Glycine max
  Clone ID: LIB3029-011-Q1-B1-C10
ctggacgtcgacactagaggatcccctcggggaattccaattccacattttcaagaaataaggaggcaaaaatgttcatatatgaattggaattatttgttttcttattaggcctatcctgaagccaaaggaaatgagatcggaattcctcggggaattccaattccacattttcaagaaataaggaggcaaaaatgttcatatatgaattggaattatttgttttcttattaggcctatcctgaagccaaaggaaatgagatcggaattcctcggggaattccaattccacattttcaagaaataaggaggcaaaaatgttcatatatgaattggaattatttgttttcttattacgcctatcctgaagccaaaggaaatgagatcggaattcctccggggtaacgaagcttcg

SEQ ID NO: 5606 - DNA, 442 bp, Glycine max
  unsure (1)..(442): unsure at all n locations
  Clone ID: LIB3029-011-Q1-B1-C12
agaattttcatcaattatcagcataaattacaaggagaaattctaatttcattggatacctgcatctaaaaccccaaacctccctcatttcttcttttccccaaccaacaactccactcttttgtgttcttgtaattcttttggctaaaatttcagcttccagaattgaaaaaaaatgatcaaacaagttcttcttcttgttctgctcttcttggcctctggattggccctctcagtctcagagtctgagtctgtttctcttctgcctcacgccgctgattccttcaatgttagctatatccagatgaagaacgctgggacttgctcttactcggtggttataactactagctgttcgtctcctaagtatacaagggattagatcagtanttcctttggggatgcttatggcaaacagatatatgcgccaagactggatgat

SEQ ID NO: 5607 - DNA, 386 bp, Glycine max
  Clone ID: LIB3029-011-Q1-B1-C2
acaagtacttccttacaatcaaaaccaacaacaactatggcaagttatcaaaagcactacgatgatcagggtcgcaaggttgacgagtatggcaacgttgagaagcaaaccgacgaatacggcaaccctgttcatgctgctagtgtcacctatgtagccaccagaactgctgctggtggttacagtgatgacattaataagcaacatgataccaccaatgcctacggcgtagacactggtagacagcattctagtggtggctacgatggtgacactaataaacatcatggaactactggtggctataatgatgacaccaatagacatcatggaactaccggtgtctatggtatagacaccgataggcaacaacatgggactactgg

SEQ ID NO: 5608 - DNA, 382 bp, Glycine max
  Clone ID: LIB3029-011-Q1-B1-C3
ggaaagcgtgaacaagaccaggaccaggacgaggacgaagatgaagatgaagatcaacctcgcaagagccgcgaatggagatcgaaaaagacacaacccagaagacctagacaagaagaaccacgtgaaagaggatgcgagacaagaaacggggttgaggaaaatatctgcaccttgaagcttcacgagaacattgctcgcccttcacgcgctgacttctacaaccctaaagctggtcgcattagtaccctcaacagcctcaccctcccagccctccgccaattccaactcagtgcccaatatgttgtcctctacaagaatggaatttactctccacattggaatctgaatgcaaacagtgtgatctatgtgactcgaggac

SEQ ID NO: 5609 - DNA, 385 bp, Glycine max
  Clone ID: LIB3029-011-Q1-B1-C4
gcctcaccctcccagccctccgccaattccaactcagtgcccaatatgttgtcctctacaagaatggaatttactctccacattggaatctgaatgcaaacagtgtgatctatgtgactcgaggacaaggaaaggttagagttgtgaactgccaagggaatgcagtgttcgacggtgagcttaggaggggacaattgctggtggtaccacagaacttcgtggtggcggagcaagccggagaacaaggattcgaatacatagtattcaagacacaccacaacgcagtcactagctacttgaaggatgtgtttagggcaattccctcagaggttcttgcccattcttacaaccttcgacagagtcaagtgtctgagcttaagtatga

SEQ ID NO: 5610 - DNA, 400 bp, Glycine max
  Clone ID: LIB3029-011-Q1-B1-C5
gactctacaggatcccctcggggaattccaattccacattttcaagaaataaggaggcaaaaatgttcatatatgaattggaattatttgttttcttattaggcctatcctgaagccaaaggaaatgagatcggaattcctcggggaattccaattccacattttcaagaaataaggaggcacaaatgttcatatatgaattggcattatttgttttcttattaggcctatcctgaagccaaaggaaatgagatcggaattcctcggggaattccaattccacattttcaagaaataaggaggcaaaaatgttcatatatgaattggaattatttgttttcttattaggcctatcctgaagccaaaggaaatgagatcggaattcctcgggggtaccgag

SEQ ID NO: 5611 - DNA, 380 bp, Glycine max
  Clone ID: LIB3029-011-Q1-B1-C6
tgaccaagttcacaatcctcctcatctctcttctcttctgcatcgcccacacttgcagcgcctccaaatggcagcaccagcaagatagctgccgcaagcagctccagggggtgaacctcacgccctgcgagaagcacatcatggagaagatccaaggccgcggcgatgacgatgatgatgatgacgacgacaatcacattctcaggaccatgcggggaagaatcaactacataaggaggaacgaaggaaaagacgaagacgaagaagaagaaggacacatgcagaagtgctgcacagaaatgagcgagctgagaagccccaaatgccagtgcaaagcgctgcagaagataatggagaaccagagcgaggaactggaggag

SEQ ID NO: 5612 - DNA, 373 bp, Glycine max
  Clone ID: LIB3029-011-Q1-B1-C7
cttgtgggcactatcatatacgagatagatgaacatccattccaaagcaccttttttaatggcactgttgaagttgttgaatctggtgcttttctaagcatggaatctgtttttcttgttactcttggggttgcactccttgtcctcctggggctatggattcatggtcaaatacaacacctatctaagaaaacaaagagggcgccaaaagttgaagttgggactaggactactgatgcttcaacagatgaatggctgcagggaactgcatatactcagtctatgtcaagcaagtcaaagaagaagaagtagataagcaatttctcacgttcagccacacacaagactctatcatggatatggaatacagaat

SEQ ID NO: 5613 - DNA, 427 bp, Glycine max
  unsure (1)..(427): unsure at all n locations
  Clone ID: LIB3029-011-Q1-B1-C9
gtggaagatatgatgcttctaatgatggtcaaggcaacagtctggaaagtgagcctttaccaggttcggactcaattgaggcatccaggagacgagaaagaggtgctcgagcactggaagaacgattggctgcagagaggttggctgttgcacgacgtgagttgcaaagagaggctgaggaaaatgtataattccccagcgtttgtaaattttggatcagttcaggcaatatgcacctattaggagtgatattttcagaggtcgtacagtaattagaaattttttgtttaggtcaaggaaaattttaatgtggttttgccatggactatgatctttacaaaaccgaacgtttctctttcttttgtcagataaatatatttgactttcttgtgtactttacacanatacatagaatctaaagagtttt

SEQ ID NO: 5614 - DNA, 381 bp, Glycine max
  Clone ID: LIB3029-011-Q1-B1-D1
ggccaggcaagccccactcaaccaccacacctctcctcgttcacgctacccctttctgctcttcttctacctttcaagttttaaaagtataaagatggcagagacattcctatttacctcagagtcggtgaacgagggacaccctgacaagctctgcgaccaaatctccgatgctgtcctcgacgcttgcctcgagcaggacccagacagcaaagttgcctgcgaaacatgcaccaaaaccaacttggtcatggtcttcggagaaatcacgaccaaggccaacgttgactacgagaagatagtgcgtgacacctgcaggaacatcggcttcgtctcaaatgatgtgggactggatgccgacaactgcaacgtcctcgtcaa

SEQ ID NO: 5615 - DNA, 444 bp, Glycine max
  unsure (1)..(444): unsure at all n locations
  Clone ID: LIB3029-011-Q1-B1-D10
aaagaaaactggttcttcttttcgcgttgcgttttcttggtgtctctgtcgattcttcttctgaattttaatacttaggaagtttagttttctctcttggcttctccggttggagtttccggcgaccttgtcggagattttgttgtttatttttcacaccacttgtgaaacttctcaagaaaaagaaaaaggatgtttcttgttgattggttctatggaattttggcgacccttggcctgtggcaaaaggaggcgaagattttgttcctagggttagataattctgggaagaccactttgcttcacatgctcaaagacgagagacttgttcagcatcnaactactcaatatnccacttcggaggagttgagtattgggaagataaagtttaaggctttcgacttgggtggtcaccagattgctcgtagggtctggaaggactat

SEQ ID NO: 5616 - DNA, 386 bp, Glycine max
  Clone ID: LIB3029-011-Q1-B1-D12
caaaatgaccaagttcacaatcctcctcatctctcttctcttctgcatcgcccacacttgcagcgcctccaaatggcagcaccagcaagatagctgccgcaagcagctccagggggtgaacctcacgccctgcgagaagcacatcatggagaagatccaaggccgcggcgatgacgatgatgatgatgacgacgacaatcacattctcaggaccatgcggggaagaatcaactacataaggaggaacgaaggaaaagacgaagacgaagaagaagaaggacacatgcagaagtgctgcacagaaatgagcgagctgagaagccccaaatgccagtgcaaagcgctgcagaagataatggagaaccagagcgaggaactggaggaga

SEQ ID NO: 5617 - DNA, 383 bp, Glycine max
  Clone ID: LIB3029-011-Q1-B1-D2
ctcgagccgcttggaacatgcattcagcgtggacaagcagatagcgaaaaacctacaaggagagaacgaaggggaagacaagggagccattgtgacagtgaaaggaggtctgagcgtgataaaaccacccacggacgagcagcaacaaagaccccaggaagaggaagaagaagaagaggatgagaagccacagtgcaagggtaaagacaaacactgccaacgcccccgaggaagccaaagcaaaagcagaagaaatggcattgacgagaccatatgcaccatgagacttcgccacaacattggccagacttcatcacctgacatctacaaccctcaagccggtagcgtcacaaccgccaccagccttgacttcccagccctct

SEQ ID NO: 5618 - DNA, 337 bp, Glycine max
  Clone ID: LIB3029-011-Q1-B1-D3
acgcattgccagaggaagtgattcagcacacttttaacctaaagagccagcaggccaggcaggtgaagaacaacaaccctttcagcttcctggttccacctcaggagtctcagaggagagctgtggcttagagagccctttttgcatgtgctaccacacttttgtccttttgggctctagctagtgctggtagcagtaaataagaatgaatacaagaaacaaaggcttagatgccctttgttaagtgtagaataacgggtatagtaactatgtacccttgtgtaatgagtcactcaagtacctatgcgggaaaagcatacataacagaagaaattcc

SEQ ID NO: 5619 - DNA, 341 bp, Glycine max
  Clone ID: LIB3029-011-Q1-B1-D4
ctagaatcttcacttcagaaccgaagccatggcggatcggttcttccccaacccgatgcccgagttcgtacccgaaacgacgccgtccactcctcaggaagaagaagaagccctcacagtgggcgactcgctcccgaagctcctcgccatgccccacgcgccactcttggagcgtctcaaacgcgccgctctcgacctcaaagaaaccatagtgatagaaacgtgggggctgtccgggcagcaggtgcgcgacttcactctctattgcggcgttctgggcatcgcgtttctgcccttcaagtcttaccgagtgaccggcaacggggaacgacctgtctctc

SEQ ID NO: 5620 - DNA, 377 bp, Glycine max
  Clone ID: LIB3029-011-Q1-B1-D5
gaagagagcgtcctagtcgcaaccctaataagaagaaccacagcttcaagcgagtgacatccaccagccatgggtcgtatgcacagccgcggtaagggtatatcctcttctgctttgccctacaaaaggacaccccctagctggctcaagatctcttcgcaagatgtggaagaaaatatctgcaagtttgcgaagaagggtttgaccccgtctcagattggtgtcattcttcgagattctcacggtattgctcaggtcaacagcgtcactggcagcaaaatccttcgcatcctcaaagctcacgggcttgcgcctgaaattccagaggatctttaccatttgattaagaaggcagtttcaattaggaagcatcttga

SEQ ID NO: 5621 - DNA, 244 bp, Glycine max
  Clone ID: LIB3029-011-Q1-B1-D7
caagggttcagtactacaagatgcgttgaacctggtttttattggctcttgttttcctattgttctccaatttgtaagattgacatttgctgcttctattttaagatagaggttgccttttgatggatgtaacttgtttgctattttatttgaattctttctcatcattgctcaattatgttatcgatgtaatgataaaatttgaaatctatttattgtttacaattttttttgtttccctctt

SEQ ID NO: 5622 - DNA, 383 bp, Glycine max
  unsure (1)..(383): unsure at all n locations
  Clone ID: LIB3029-011-Q1-B1-D8
gttcgcaacacgatcactattctgcgacgatggtggcacattcgagttcttggggaagggcactcgtcgcgatctcgccctacaccttctccgccatcggcatcgccgtcgctatcggcgtctccgtcctcggcgccgcctgggggatctacatcaccggaagcagcttgatcggcgctgcaatcagggctcctcgaatcacttccaaaaatctcattagtgtaatcttctgtgaagctgttgctatatatggtgttattgtggctattattcttcaaaccaaattagaaagtgttccagcatcaaatatttatgcaccagagtctcttanggctggatatgcaatctttgcatcgggattaattgtgggcttcgcaaatctt

SEQ ID NO: 5623 - DNA, 378 bp, Glycine max
  Clone ID: LIB3029-011-Q1-B1-E1
gctgatcgttccacaaaactttgcggtggctgcaaaatcccagagcgataactttgagtatgtgtcattcaagaccaatgatagaccctcgatcggaaaccttgcaggggcaaactcattgttgaacgcattgccagaggaagtgattcagcacacttttaacctaaagagccagcaggccaggcaggtgaagaacaacaaccctttcagcttcctggttccacctcaggagtctcagaggagagctgtggcttagagagccctttttgcatgtgctaccacacttttgtccttttgggctctaactagtgctggtagcagtaaataagaatgaataaaagaaacaaaagcttagatgccctttgttaagtgtagaat

SEQ ID NO: 5624 - DNA, 450 bp, Glycine max
  unsure (1)..(450): unsure at all n locations
  Clone ID: LIB3029-011-Q1-B1-E10
ctccattggtccttaaacactcatcagtcatcaccatggccaagctagttttttccctttgttttctgcttttcagtggctgctgcttcgctttcagttccagagagcagcctcagcaaaacgagtgccagatccaaaaactcaatgccctcaaaccggataaccgtatagagtcagaaggagggctcattgagacatggaaccctaacaacaagccattccagtgtgccggtgttgccctctctcgctgcaccctcaaccgcaacgcccttcgtagaccttcctacaccaacggtccccaggaaatctacatccaacaaggtaagggtatttttggcatgatatacccgggttgtcctagcacatttgaagagcctcaacaacctcaacanagaggacaaagcagcagaccacaagaccgttcacagaagatctataacttcagagagg

SEQ ID NO: 5625 - DNA, 449 bp, Glycine max
  Clone ID: LIB3029-011-Q1-B1-E11
cagaggaacaatggcgggtagggtttcgacgtgcttcttcttcgtgtttgctctttctctccttcttccttttcagatctccgctgaggaatcatcggagaaagagttcgtactcacattggatcactctaactttcacgacactgtcagcaagcacgatttcatcgtcgtcgagttctacgctccatggtgtggccactgtaagaagcttgctcccgagtatgagaaagctgcttctatcttgagtagtcatgatcctccggttgttttggctaaaattgatgccaatgaggagaagaacaaagaccttgcatctcaatatgatgttaggggatacccaacaattaagattctgagaaatgggggaaagaatgttcaggaatacaaaggtccccgtgaagcagatggcatcgttgactatttgaagaaacaaagtggtcctgcttcaa

SEQ ID NO: 5626 - DNA, 424 bp, Glycine max
  Clone ID: LIB3029-011-Q1-B1-E12
atcgttgaaaatgcagggaggaaagaaagcgggagagtccattaaggaaacagctacaaacattggtgcttctgccaaggctggcatggagaagaccaaggccactgtccaagagaaggcagaaagaatgacagcacgtgatccggtgcaaaaggagttggcaacccaaaagaaagaggcaaagatgaaccaggcggagctggacaagcaggcggcgcgtcagcataacacggcggccaaacagtccgccaccacggctgggcacatgggacatggccaccacaccaccggaaccgggactggaaccgccacgtattccaccaccggggaatatggtcagcccatgggggcccaccagacgtcggcaatgcctggccatggaaccgggcagcccacgggccatgtcaccgaaggactggtgggc

SEQ ID NO: 5627 - DNA, 406 bp, Glycine max
  Clone ID: LIB3029-011-Q1-B1-E3
tctaaaggatcactcggggaattccaattccacattttcaagaaataaggaggcacaaatgttcatatatgaattggaattatttgttttcttattaggcctatcctgaagccaaaggaaatgagatcggaattcctcggggaattccaattccacattttcacgaaataaggaggcaaaaatgttcatatatgaattggaattatttgttttcttattaggcctatcctgaagccaaaggaaatgagatcggaattcctcggggaattccaattccacattttcaagaaataaggaggcaaaaatgttcatatatgaattggaattatttgttttccttattacgcctatcctgaagccaaacgaaatgacatttgaattcctcggcgacattcaattccacatt

SEQ ID NO: 5628 - DNA, 392 bp, Glycine max
  Clone ID: LIB3029-011-Q1-B1-E4
cggctcgagcaactaacaataattccttcacttgcagaacttagttctctgttgcatcatcatcatcttcattagtgttagccctaaacttcaccttcaaccatgaccacagtgccaccacacagtgtccaagtgcacacaacaacacaccgctacgaagccggcgtcgtcccgccggctcgttttgaggcgccgcgttacgaagccggcatcaaggcgccctcttccatttaccattccgagagaggtccgacgacctctcaggttctcgcagttgtcgccggccttccggtcggcggcatcctcctgctcctggcaggactgaccctggctggaactctcaccgggctggtggtggcaacaccgctcttcatcatcttcagcccggtgct

SEQ ID NO: 5629 - DNA, 374 bp, Glycine max
  Clone ID: LIB3029-011-Q1-B1-E5
agattcaggaaaaagttgtattgaaattttcacaagaggaatttcttacagcttggtcaactcaggtgcgtcctgcaacaactctgttggctgatgggtgtccatatttgtatgctatggtgcatgatagttcagtgtctacaataccaggtgattttgtcattggtgttaagttgacaaccataaataatatgtgtgcatatgggctcaatcctggtatttcaggttctcgtcttttgggcaccattcctcagtccatttcacagcaaactgtttggaatcaaatggcaacagtgagaacaccattgaattttgattctagcaagcagagcttttgtcaattttctattgaccttctcggtggaggaatttta

SEQ ID NO: 5630 - DNA, 381 bp, Glycine max
  Clone ID: LIB3029-011-Q1-B1-E6
cggctcgagattaacactttccttagttcaatatggggaagcccttcttcactctctctctttcttccctttgcttgctactcttgtcgagtgcatgctttgctattacctccagcaagttcaacgagtgccaactcaacaacctcaacgcgttggaacccgaccaccgcgttgagtccgaaggtggtcttattgaaacatggaactctcaacaccctgagctgcaatgcgccggtgtcactgtttccaaacgcaccctcaaccgcaacggcctccacttgccatcttactcaccttatccccaaatgatcattgtcgttcaagggaagggagcaattggatttgcatttccgggatgtcctgagacgtttgagaagccac

SEQ ID NO: 5631 - DNA, 343 bp, Glycine max
  Clone ID: LIB3029-011-Q1-B1-E7
ggaagcatcattggagagagctttcaaggagttcaagaaaaagggagtgaagtgatggcaagcattggtgaaaaactgggaagtgctgcacatacattagtgaagaagccattggataaggccactgagggagggagagaggtgttgggagctgtacgtgaaactgtggttgagattggtgaaaacatggtgaaaaaaccagcacagaaagtgcagcagcatcaaggtgaaggtggaggaggggtgctgaatgccattggtgaaaccatagcagagatagcagagacaactaaggtgattgttgctggagagggagaaaaggagataatagtaaaaccacatg

SEQ ID NO: 5632 - DNA, 378 bp, Glycine max
  Clone ID: LIB3029-011-Q1-B1-E8
tgacacagagacactttgggaacttgatcgattggtgactaattacaagaagatggttagcaagattaagaggcaggcattgatgggcaacattgacaacaacaacaacgatgtgcagtctaacaaaggcaacggggaattgccttctagcgagaaggttgatggggggccagttgaagtgaagaagccaaagaaagtagaagcaggggacgaggatattgacattggggatgagatgccaacgagtatgttcccccctgtggagattgagaaagataaagatgttgttggaggccatgcaagtagtagttctagtagctctggcagttcaagcagtgattcgtcttcgtcaagcgattcggattcggggagttcctc

SEQ ID NO: 5633 - DNA, 251 bp, Glycine max
  Clone ID: LIB3029-009-Q1-B1-C1
cggctcgagggcacccaaacattggtttgttgtaggaagaggaatcttgaaaaatggcaggggacagcaagagcaagattctgttcatcggatggactggttacatcggaaaattcatcgtggaagccagcgccaaagctggccacccaactttccttttggtgagggagtccactctctccaaccccgcaaaatcacccctcatcgacaatttcaaaagcctcggtgtcaatcctgttttacgagatcta

SEQ ID NO: 5634 - DNA, 148 bp, Glycine max
  Clone ID: LIB3029-006-Q1-B1-H4
gcttgcaacgattaacaatggcttcaaccgacaagtcaccggacccaacgccggcaaagggtccggatccaactccggggaagccgatgattgttggtcagcacgtgatcgacaaaattgcaatgatggtgcattccctggaccccat

SEQ ID NO: 5635 - DNA, 357 bp, Glycine max
  unsure (1)..(357): unsure at all n locations
  Clone ID: LIB3029-006-Q1-B1-H5
gttgcaggacgcacctgagttgaccaagctgtggtgcatgatagttcagtgtctacaataccaggtgattttgtcattggtgttaagttgacaaccataaacaatatgtgtgcatatgggctcaatcctggtatttcaggttctcgtcttttgggcaccattcctcagtccatttcacagcaaactgtttggaatcaaatggcaacagtgagaacaccattgaattttgattctagcaagcagagcttttgtcaattctctattgatcttcttggtggaggaattttagtggacaaaactggagattggatcacacnttatacaaattctccaattagtaacttgttgagagttgct

SEQ ID NO: 5636 - DNA, 246 bp, Glycine max
  Clone ID: LIB3029-006-Q1-B1-H6
gttattatcaaataattaattaaattcctcgtggaatcttgttgaagccatgtctacagctggtcaggtcatcaagtgcagagctgcggtggcatgggaagcagggaagccactatcgatagaaaccatagaagtggcaccaccccagaaaggtgaagtgcgtttgaagatcctcttcaactccctttgccgtacagatgtttactggtgggatgctaagggccagactccgctgtttcctcgtat

SEQ ID NO: 5637 - DNA, 387 bp, Glycine max
  Clone ID: LIB3029-006-Q1-B1-H7
tatcattcaggtaactctctgcagctgttgcgttgaaaatgccaggcattaccattggagacactattcctgaccttcaagttgaaactaaccaaggaaaaatcaaccttcatcagttctgtgctgatggctggaccatccttttctctcacccaggtgatttcaccccggtttgtaccactgagcttggcaagatggctcagtatgctaaggagttttatcaacgaggagtgaagttattgggtttatcttgtgatgacgtacaatcccacaatgagtggatcaaagacattgaagcctacactccaagtgcgaaggtgaactatccaataattgctgatcccaagagagaaatcatcaagcaactcaacatggttgaccctgatg

SEQ ID NO: 5638 - DNA, 401 bp, Glycine max
  Clone ID: LIB3029-006-Q1-B1-H8
atctaaacaaaaaatcaagaacaatggcttatgctaggcttgctcctatggctgtcttcttgcttgccacttccaccataatgttcccaacgaagatagaagcagcagattgtaatggtgcatgttcacctttcgagatgccaccgtgccgctcacgtgattgtcgttgtgtccctataggactagttgctggtttctgcatacatccaactggactttcatctgttgcgaagatgatcgacgaacatcccaacttatgtcaatctgatgatgaatgcatgaagaaaggaagtggcaatttttgcgctcgttaccctaataattatatcgattatggatggtgttttgattctgattctgaaccactgaaaggcttcttggccatgcctagggcaaccacc

SEQ ID NO: 5639 - DNA, 386 bp, Glycine max
  unsure (1)..(386): unsure at all n locations
  Clone ID: LIB3029-006-Q1-B1-H9
aaaagacacaacccagaagacctagacaagaagaaccacgtgaaagaggatgcgagacaagaaacggggttgaggaaaatatctgcaccttgaagcttcacgagaacattgctcgcccttcacgcgctgacttctacaaccctaaagctggtcgcattagtaccctcaacagcctcaccctcccagccctccgccaattccaactcagtgcccaatatgttgtcctctacaagaatggaatttactctccacattggaatctgaatgcaaacagtgtgatctatgtgactcgaggacaaggaaaggttagagttgtgaactgccaagggaatgcagtgttcgacggtgagcttangangggacaattgctggtggtaccacagaac

SEQ ID NO: 5640 - DNA, 347 bp, Glycine max
  Clone ID: LIB3029-007-Q1-B1-A1
ctcaaataccacagccatgagcatatgcaagcattaactccctctggtgaaaccaccaagatggcgtaaatgttaacagcaggtgagtacagcaaccacagctggccgctgcagccagaaacaagcctgaccgagctgaacttgcccagagtgctctgcattctctcttccatgttagagaagctggtggctcgcaatgaaaagctcgttgatatcctgagccagcagctagatggactgaactgtggctcagtaagacttgggaacagcttgaatacatttcatggcgtaagagcaccaagcataagcatacctaagtacttggagaggatatacaagtacactaa

SEQ ID NO: 5641 - DNA, 167 bp, Glycine max
  Clone ID: LIB3029-007-Q1-B1-A10
caattttggttaagagtcttgaaaaagcaagagaaaaaaaaataccaaccatggcaaccatttctgattaacctaaaaggtcctactcctaaggaacctcaaatggagcaccctaaggaaccacgtttgagaacaacaacagcatttacaaaccaactttaagccaa

SEQ ID NO: 5642 - DNA, 89 bp, Glycine max
  Clone ID: LIB3029-007-Q1-B1-A12
atttgatcgcagtgcctactggtgttgcatggtggatgtacaacaatgaagaaactcccgttgttgccgtttccaataatgacaccaac

SEQ ID NO: 5643 - DNA, 363 bp, Glycine max
  Clone ID: LIB3029-007-Q1-B1-A2
cgagaagaaatgaagagtactatcttctttgctctctttctagtttgtgccttcaccatctcatacctgccttcagccaccgctcagttcgtgctcgacactgatgatgatcctcttcaaaacggtggcacatactatatgttgccagttatgagaggaaagggcggtggaatagaagtagattcaactggaaaagaaatatgccctctcactgttgtgcaatcacccaatgagctcgataaggggattggaccagtctttacatctccattacatgccctttttatcgccgaaggctatcctttgagcattaagtctggttcatttgcagttataacgctgtgtgccggcatgcctactgag

SEQ ID NO: 5644 - DNA, 346 bp, Glycine max
  Clone ID: LIB3029-007-Q1-B1-A5
agctgaggaagaatccccagaaggcttacttgaagactattacaccaaagtttcagacccttattgacctttctgttatagaaatcttgtcaaggcatgcatctgatgaggtgtaccttggggagagggacaatccaaattggacatctgatacaagagcattagaggcttttaaaaggtttggaaataaactggcacaaattgagaataaactctcagagagaaacaacgatgagaaactgagaaaccgttgtggaccagttcaaatgccttatactctgcttttgccttctagtaaggaaggattaactttcagaggaattcccaacagtatctctatctgaag

SEQ ID NO: 5645 - DNA, 366 bp, Glycine max
  Clone ID: LIB3029-007-Q1-B1-A7
acaaggcagaaagcaagctcatcctagagttttaaaaatggcagcagcctcctccatggctctctcttccccatccttggctggcaaggccgtgaagctgggcccatcagcccccgaagtcgggagggtcagcatgaggaagaccgtcaccaagcaggcctcctccggaagcccatggtacggcccagaccgcgtcaagtacttgggcccattctctggcgagcccccgtcctacctcactggcgagttcccaggtgactacggctgggacactgctgggctttcggccgacccagaaaccttcgccagaaaccgtgagctcgaagtgatccactccaggtgggccatgctcggggccttgggctg

SEQ ID NO: 5646 - DNA, 380 bp, Glycine max
  unsure (1)..(380): unsure at all n locations
  Clone ID: LIB3029-007-Q1-B1-A8
aatatgtcaagccttactttagtggttctaaattgaaaagctttctagctagtcataacatcaccattactgatggtattgacaaaactagtgcaactttgcaatttagaaagttagcagattgtgattttctcaagagaaactttaagcagatgtctaatgttttgtgggtggctcctgaggacaaggcgagtttatggtcacaacttcattatgtttcgtgtaataatctggaaatgcaagaagcttatcttgtcaatctcgtaaatgtgttacgagaattgtatttgcacagtccagaggaagctcgccaattgagaaggaaagctctctctcgtattgaatggctgcnaaaagctgatgtgcctancatagcacag

SEQ ID NO: 5647 - DNA, 352 bp, Glycine max
  Clone ID: LIB3029-007-Q1-B1-A9
ccaaccccaacaacaagagcaacctcaaggaagaaaaaggttttccacaggaagttccagcacccaaagcacggttcactgggatttcttcccaggaagcgtgctgctcgtcacaggggaaaagtgaaggcattccccaaggatgacccatccaaggcacccaagctcactgcattcttgggttacaaggccggtatgactcacattgttagagaggtcgagaagccaggatcaaagcttcacaagaaggaaacttgtgagcctgttacaattattgagacccctccaatggttattgttggtgttgtgggttatgtgaaaactccacgtggtctccgaacattgaacactg

SEQ ID NO: 5648 - DNA, 349 bp, Glycine max
  Clone ID: LIB3029-007-Q1-B1-B1
gtcgcgttgtgttgcgtcgtgtcgtgcgctgttcctctgtctgtcgtttttgttttcagaccaaaccctagctccgcatcgcaaccatgtcgaccaagcaaggtggaaaagctaagcctttgaagaaacccaagtctgataagaaggattacgacgaggttgacatggctaacattcagaagaaaaaggaagaggagaaggcgctaaaggagttgaaagccaaggcgcaacagaagggaagctttggaggttctgggctcaagaaaagtggaaagaaataagggctctttatcatgattgtatacatccaatattgagccctgtagtttattaccatgataacttctgt

SEQ ID NO: 5649 - DNA, 398 bp, Glycine max
  Clone ID: LIB3029-007-Q1-B1-B11
gtcccatttgtggctagtgtgctgataaaagcgtggaaggaatcagattgcagtggtgacatggaagtcatattggggggcatggcttctctggaggatgagatttcatggttcaagacagaagccaacaagtggggtatttcactttctgacgttgttcctcagcaggctaacaaaaactattgtgggttgctggaaagtttaatgagtccagacgcggaatatactgtggctattacagcattttgggctattgaaacggtgtatcaagagagctttgcccactgcattgaagaaggctccaaaaccccaccagaactgaaggagacttgtgtaagatggggcaatgaggcctttggtaagtattgccaatctctgcagaacattgccaatagatg

SEQ ID NO: 5650 - DNA, 373 bp, Glycine max
  Clone ID: LIB3029-007-Q1-B1-B12
gtttcccaatttccattgcctccgcttccacctcgcaaccatgatcatcccggagaagaaccgcaaggagatctgcaaatacctcttccaagaaggagtttgcttcgccaagaaagacttcaatttgggcaaaccacctgaaatcgaccttgcgaatctgcaaggtaataaagctgatgcaaaattttcaggtccccccaatacgtgaaaaaaaactttggcttggatgcactattactggttcctcaccaacgatggcatcgagtttctcagaacttaccttaaccttccttccgaaattgtccctgctactttgaagaagcaagccaagccacctggcaagccctttggaggcccatccggtgatcgccct

SEQ ID NO: 5651 - DNA, 376 bp, Glycine max
  Clone ID: LIB3029-007-Q1-B1-B2
caggcgcagagtagagcagcacagaagagggaaaacggcaccgccgccgtagaagaaaacaaccatggtgcacgtctccttttacaggaactatgggaagacattcaagaagccgcgtcgtccgtacgagaaggagcgtctcgacgcggagttgaagctggttggtgagtacgggcttcggtgcaagagagagctgtggagggtgcagtacgcgctcagccgcatccgcaacaacgcgcggaacctcctcaccctcgacgagaagaacccgcgccggatcttcgagggagaggcgctgctccgaaggatgttccgttacggtctcctcgatgagacacagaacaagcttgattacgtcctcgccctcaacgtccaa

SEQ ID NO: 5652 - DNA, 370 bp, Glycine max
  Clone ID: LIB3029-007-Q1-B1-B3
ctttccttagttcaatatggggaagcccttcttcactctctctctttcttccctttgcttgctactcttgtcgagtgcatgctttgctattacctccagcaagttcaacgagtgccaactcaacaacctcaacgcgttggaacccgaccaccgcgttgagtccgaaggtggtcttattgaaacatggaactctcaacaccctgagctgcaatgcgccggtgtcactgtttccaaacgcaccctcaaccgcaacggcctccacttgccatcttactcaccttatccccaaatgatcattgtcgttcaagggaagggagcaattggatttgcatttccgggatgtcctgagacgtttgagaagccacaacag

SEQ ID NO: 5653 - DNA, 339 bp, Glycine max
  Clone ID: LIB3029-007-Q1-B1-B5
ggcgttgtctctccaagcctgcagaggaaagactcctcggacttcgcgttcgcaaatgaaaacttgaaaccgccggtttccgccagattcagccaccggaaatccgttagagccagtcccgaaggagggaaggtggtggcgttgggagtggcgaaggcgaagaagcaggagacgttggagagcacgtggaggacgataacggaggggagagcgatgccgttaacgcggcatctgaagaaggcggagacgtgggagagggagacgccgttacgggacttgaacggagggggcaaattgatgaagaagtcggagacgttcgcggggagggagaagaacgcg

SEQ ID NO: 5654 - DNA, 362 bp, Glycine max
  Clone ID: LIB3029-007-Q1-B1-B6
gcttgacaagctcaaggctgagcgcgaaagaggaattaccattgatattgctttgtggaagtttgaaaccaccaagtactactgcacagtcatcgatgcccccggacatcgtgactttatcaagaacatgattactggtacctcccaggctgattgtgctgtccttatcattgactccaccactggtggttttgaagctggtatttctaaggatggacagactcgtgagcatgctcttcttgctttcacccttggtgtgaagcagatgatctgctgctgtaacaagatggatgccactaccccgaagtactctaaggctaggtatgatgaaattgtgaaggaagtctcttcctacttgaaga

SEQ ID NO: 5655 - DNA, 351 bp, Glycine max
  Clone ID: LIB3029-007-Q1-B1-B7
gtcttccatagccccccaaaaatgaagagcaccatcttctttgctctctttctcttttgtgccttcaccacctcatacctaccttcagccatcgctgatttcgtgctcgataatgaaggtaaccctcttgaaaatggtggcacatattatatcttgtcagacataacagcatttggtggaataagagcagccccaacgggaaatgaaagatgccctctcactgtggtgcaatctcgcaatgagctcgacaaagggattggaacaatcatctcgtccccatatcgaatccgttttatcgccgaaggccatcctttgagccttaagttcgattcatttgcagttaaaatgctg

SEQ ID NO: 5656 - DNA, 355 bp, Glycine max
  Clone ID: LIB3029-007-Q1-B1-B8
gctcaccacaacaatcatcatgaaggtttcatgaatttcattcacagggatgacgaggttaattacttcccttcaaggtatgatcctgttcgtcatgcagaaacgttccccatacctcgtgctatctgcagtggaaggcgtgaaaagtgtggaattgagaacgagaacaactttaagcagcccggagagagataccgatcttgggcacctgacacgcaagatagatttaatcgccgatgggttgatgctttatctgacccacgggtctaccaagaaatccgcactttccggaaatcctaacggtcccaagctgaacgttctccaagccaaaacattgcaactccttcgaacctta

SEQ ID NO: 5657 - DNA, 399 bp, Glycine max
  Clone ID: LIB3029-007-Q1-B1-B9
gttcgtttgtttaattcaataaaggaaattaggcatgaccctcttgttgagtatgctctgcctatttgaaaatttccacacctcttttaattgtcgtaatgatgtgtgaagtgtgtaaattttcaaataggcagaggtgatttcagtgagtgatcggtgttcacttgatctcatcataatcgtcagcgtcaattgaagaagatgccgatcagaaacatcgccgtcggaaggcctgaagaggcgactcaccccgacacgttgaaggcggctttggctgagttcatctcaaccttcatcttcgtgttcgccggctcaggctccggcatcgcctacaacaagctcaccgacaacggcgctgccacccctgccggcctcatctccgcctccatcgcccatgca

SEQ ID NO: 5658 - DNA, 351 bp, Glycine max
  Clone ID: LIB3029-007-Q1-B1-C1
gtggacgccttcaaactttgcatcttccttcttgcgtcgatctgtgctttcctagtcttttccaatccagtgctgtgtagtgataaggaggacagtgtattcaagggaatcaacagctacaggcaaacacggagcctggtacccctgagccaagtttcgaaggcaacatgtttggctgatgaagttgcagaagaaatagagaagatgccctgtgaaaacgtgaaccaatactacccttcatctgttcctggtagtgggaacctcaaaatcccaaacttgcagaagcacataaataaatgtgacattaacttcaacaccaccactgatggggtcattctccccgtttgtgtc

SEQ ID NO: 5659 - DNA, 266 bp, Glycine max
  Clone ID: LIB3029-007-Q1-B1-C10
gatcaagttgcacttggaccactttacacgaatgactccatccagtcccttcccatggcgaatacgtttaagcctgtagagacagccgtcgagtctcgactaccattggctagcatgtacgatggtgtgccgggttacgccgattccatttgcgcttaagctggaatgtccctaaagattcgtcatattgcatcagagactgcgatttacacttcagggatggacttggctgaagagagtgtctgagactcactgcaatccccatg

SEQ ID NO: 5660 - DNA, 416 bp, Glycine max
  Clone ID: LIB3029-007-Q1-B1-C11
ggctgtctaatggttaacattgtgatgtctgggaatgcaacagtctaagggagtgattgggcctcattggtacaagtgttttgtaacatacaggaccagtacagagcattttgatgcatgtaagtggacagaatcggaagcacattcctgtgaattgatcttcgcaatataggtatgcggtcctaacaatggttttgaaatgtggacttctgagtgggcaaatcaaacttcatggcaattgagtttcattattgacaatcccaaacagtctacagtttttgacattctcttgggaatttcgcaagattttgaaattgctggtaatactcctatgccagcttcttctgtgccacaggctactgcgagatgctctgaaaatgcggaatcctctgcatgatctggaacttgtgttttcc

SEQ ID NO: 5661 - DNA, 381 bp, Glycine max
  Clone ID: LIB3029-007-Q1-B1-C2
attgctggggggtttcaaggagaacttatttgcaaggtacttcaattattatgggggttgtactttttatttttattccctataatgattagtattttttactttgttattgtttattggatgtgctattgctgcccaccatgatacttagtcactgtcatttattgtgctcaatattttatttctgctttggatgctcaaattagattgtgtattattttgtattcattatatatgttagatgttttacattgtttttaaatggtatagagattattttgcctttatatggatataaataatggaataattattgatcagccaaactgaataatatgaattcattctcaattatgtcaacttggtttatccaatccatat

SEQ ID NO: 5662 - DNA, 378 bp, Glycine max
  Clone ID: LIB3029-007-Q1-B1-C3
tgaagatgccaaacgcgggtcctgcaaagtggagacagattgttggagatgccatgattgaggtatccaaattgactacgaccgacacaagcgtgtaattctctctcagcacagcacattgagatggttgagctgcagacatcatcgattttcgaggcctttcaccataagctggtacattctggcgagattcaagagacagttgtacggaagatttcacaagaggaatggcttacagcttggtcgacacaggtgcgtcctgcaacaaccctgtgggcggatcggtgtccagagctgtacgacacggtgcatgacagtggagtgtcaacagtagcaggtgatcttgtcacaggtgtgaacttgacaacccttggccat

SEQ ID NO: 5663 - DNA, 284 bp, Glycine max
  Clone ID: LIB3029-007-Q1-B1-C6
atcagaactagtatcataatacggtttcctctgcttgggtcgccgggatacagtgatcctgacatcactttgctgtcggataatgagtaatagaggataagaataccccgatctctttaacaggatcagagttctactacgttctcgttatgaggcatcattgactcaatagtctcatccagaggctgcacagcttcacttcagaggatgagaaactatcgaaagctgcagagcatgaagtattattcaagggaatgcacaatgcttctcaggcactatttgtc

SEQ ID NO: 5664 - DNA, 350 bp, Glycine max
  Clone ID: LIB3029-007-Q1-B1-C7
ctgatgcaatactgctttctggggaaactgctcacggaaagttcccgctaaaagccgtgaaaggaatgcataccgtagcattactgacagaagccaccatacccggtggtcacatgccaccaaatattggtcaagtattcaacgagccacatgagtgagatatgtgcttaccatgcaaccatgatgtctaataccctcggaacctcaactgttgtcttcaccatattacgcttcatagctatccttttgagccactatcgagcttcaggcatcatatttgcttttacagattaccagaggatacaccagaagttggctttgtatcaaggagtctgtcctatttacatgga

SEQ ID NO: 5665 - DNA, 386 bp, Glycine max
  Clone ID: LIB3029-007-Q1-B1-C8
agcgaaaccccaaataccaatccaatcctctcccaactcacaaagccatgtctccaggtcccgttgtcgacgcttcccctgaggttgatgcagagcaacaacttccctccgtcgatgacgccactcagaagaagataccccaaccacaggaggacgatgctccccttgtcgaggacttgaaggatgatgacaaagacgacgacgatgaagacgacgacgacgacgacgaagatgacaaggaagacgatgctcaaggtggtgctgagggttcaaagcagagcagaagtgagaagaagagccgaaaagcaatgttgaagctgggactgaaacctgttactggtgttagtagggtcacaatcaagagaacaaaaaatattcctttcctc

SEQ ID NO: 5666 - DNA, 410 bp, Glycine max
  Clone ID: LIB3029-007-Q1-B1-C9
cggtagcagataagcctaaacacgaaactcgcaaattccctcaacactggagtcgctggaaaattcattctgggactcagctgagctgaccaagcatgattcaaaatggttgcattgtatcccaagggtgtgcccctctgaattctaggtcacgcaaccatggcatacctagtacctctgcctttcgttgcgcttctctaatgcctcccaaggttgccgtctctaacatccggagcttttggggacataatctggaatgtaaacccttgttgccaagaggaatgacattgacaaacacgtttgctgtatcaagcctgcgtgtaagggagggtcaaaatcatctctttcgtgctctccctcttttaccccggttgcgcaagtctaatatggcccctcgagcatcaaaggat

SEQ ID NO: 5667 - DNA, 339 bp, Glycine max
  Clone ID: LIB3029-007-Q1-B1-D1
ggaagcttcaaagagggtttatgaagaaaggttgtttcccgaacactagagtctagagaagtttgcagagtgagcaactgagcatacgcaatggagttcccttcttcctcctccatcttctccccgcgcccatcagacgacaccgttttctacgccatataccccgactcccccaccacaacctccaccgccacgctccgctccctccacctcaaaattctcgaaaccctatctcccttcaccgaagactacatatggcagcaccaacccttcaccctctccgtttcaactcctccgaacccttcctgcccctgcccctcctcctccttccaacctcct

SEQ ID NO: 5668 - DNA, 371 bp, Glycine max
  unsure (1)..(371): unsure at all n locations
  Clone ID: LIB3029-007-Q1-B1-D10
tgaggctcccctcacctctctctccgaaatccccaaattgcctgtgaatgctagaaaccctaggcacgttcgatttgatgctctcccatttgcaatcaagggcgagcgcattcggttcttgcacgcaaggctggtactaccgctgcatcggcctcgatccctgaattcatcattctttctcgcaccatctttttctattccgattcgatttgttgttgttgttgttgttgttgtgtttttgtttccttccttgacgaatcatcacgatgttgatgagcaagcagaagaagagccagattcagaacgcgaagaggttgttgatangcatcaatgtgctggggagcgcggggcccattagatttgtggtaaac

SEQ ID NO: 5669 - DNA, 365 bp, Glycine max
  Clone ID: LIB3029-007-Q1-B1-D2
caccaagttatgggtttccttgtgttgcttcttttctccctcttaggtctctcttctagttccagcatatcaactcatcgttccatattggaccttgacctaaccaagtttaccacacagaaacaggtgtcttcactgttccaactatggaagagtgagcatggacgtgtctaccataaccacgaagaagaggcaaagagacttgagattttcaagaataacttgaactatatcagggacatgaatgcaaacagaaaatcaccccattctcatcgtttaggattgaacaagtttgctgacatcactcctcaagagttcagcaaaaagtacttgcaagctcccaaggatgtgtcgcagcaaatcaa

SEQ ID NO: 5670 - DNA, 356 bp, Glycine max
  Clone ID: LIB3029-007-Q1-B1-D3
cgcgtattaccagatggttcgctgatggagattaccaaagtttatccattggatgcagtttttgacaatcttgatgatgtgccagaagatataaaagcaaacaagcgctatgccggttcatctaaatggacagttcaggaagttgctgaatctgttaaagaagactttggcagcatagatatccttgtgcactcacttgccaatggaccagaggtgaccaaaccattgttggagacatctcggaaaggatatcttgctgcaatatctgcatctagttactcctatgtttctttactcaagcattttcttccaatcttgaacccaggtggatcttcaatctctctgacatacattgc

SEQ ID NO: 5671 - DNA, 381 bp, Glycine max
  Clone ID: LIB3029-007-Q1-B1-D4
ccgatgtgaatctatttgtttagttttctatcggtatgtatataggtgaataatccaacatgcctttttgtgaagtaaaaaaactaccctcgatccatgcctcaaaagggttgataataagtaaaaaaaatcaatgaattcatgataaaacccttctgcgtttttttattataaatttttttgtcaataaagggatcaaggggttgggggatcaaatggtaaagttcttttgttggtaaattggaggattagaaacatgactattgctttccaattagctgtttttgcattaattgctatttcatttattttattgattagtgtacctgttgtatttgcttctcctgaaggttggtcgaataacaaaaatgttgtaatttc

SEQ ID NO: 5672 - DNA, 385 bp, Glycine max
  Clone ID: LIB3029-007-Q1-B1-D6
aacttattaacactttccttagttcaatatggggaagcccttcttcactctctctctttcttccctttgcttgctactcttgtcgagtgcatgctttgctattacctccagcaagttcaacgagtgccaactcaacaacctcaacgcgttggaactcgaccaccgcgttgagtccgaaggtggtcttattgaaacatggaactctcaacaccctgagctgcaatgcgccggtgtcactgtttccaaacgcatcctcaatcgcaacggcctccacttgccatcttactcaccttaatcccagatgatcattgtcgttcaagggaagggagcaattggatttgtatttccgggatgtcctgagacgtttgagaagccacaacagcaa

SEQ ID NO: 5673 - DNA, 340 bp, Glycine max
  Clone ID: LIB3029-007-Q1-B1-D7
ctgcctctcacccgcagggtttagagaaaatttaacaattatggttgcttctcctttgccgacccatggctcccaaagctgatagttcaaagaaggctgatccaaaggcacaggccttgaaaactgccaaggcagttaagtccggtgctaactttaacaagaagagcaagaagatccgaacatctgttaccttccatcgaccaacgactttgagaaaggataggaaccccaaatatccacgcattagtgctccacccaggaacaagcttgatcactatcagatattgacgtttcctctcacgactgagtctgcaatgaagaagattgaagacaactacac

SEQ ID NO: 5674 - DNA, 365 bp, Glycine max
  Clone ID: LIB3029-007-Q1-B1-D8
atgctcttgcagagattagtcaagggaattgggaaggctgccttcgatcagaaatatatactcccgaaattcagggcttaattgacaggttccagccagattttactgcaccttctggtgaatcacttagacaagtagaattccggatgattcacttcttaaatggaactgtccttgcattacatgaaaaactattagatttatcatcacatcaaaatgacaaccaggcatttgcacagaacaactcccatgctcttctcactaactcacttcacgaccaagatggaccttctctccctccaaaccaatgggatttgctcaacaggcaccggcctccattctcaaggaaaaagtctggtaagagc

SEQ ID NO: 5675 - DNA, 383 bp, Glycine max
  unsure (1)..(383): unsure at all n locations
  Clone ID: LIB3029-007-Q1-B1-D9
aagaacgccaagctttcccctcctccgttcccctcgtccttggcctcctcctcctcctcctcctggcttaaaaggttgttccggtccgttggaattccaagttttgcaatttaaacagttcccaatggatgtgatcccctttgactctgactccattcagttcaagctcgacgacaactttcacgcgggaaacaacaatggcagcgctgttaattccttcgccgccgtccagagcgtggcgtcgatgatggatgcaggtaacanaactacttgccactcgacggtaatggttgacctggtggcgccgacaaatattgacgccaccgtaaacatgaccaatccttgtcagtttcacgatgacaagggttggccatgtaagaatg

SEQ ID NO: 5676 - DNA, 324 bp, Glycine max
  Clone ID: LIB3029-007-Q1-B1-E1
caaggtcaattatcccaagtataacctaataaattaattaagataccatgatgagagcacggttcccaatactggtgccgggacttggtttcctggcttcaatttccggtccaattgggattgcctaacgggaaaaaggaaaacccaaaacacaacaggtgtctccagagttgcaataccgagagagactcgtacaggaaccaagcatgccacgctcgttgcaacctccttaaggtggagaaagaagaatgtgaagaaggtgaaattccacgaccacgaccacgaccacaacacccggagagggaacctcagcaacccggtgag

SEQ ID NO: 5677 - DNA, 383 bp, Glycine max
  Clone ID: LIB3029-007-Q1-B1-E10
atatatactatgatgagagtgcggtttcctttgttggtgttgctgggaactgttttcctggcatcagtttgtgtctcattaaaggtgagagaggatgagaataaccctttctacttgagaagctctaacagcttccaaactctctttgagaaccaaaacggtcgcattcgtctcctccagagattcaacaaacgctccccacaacttgagaaccttcgagactaccggattgtccaatttcagtcaaaacccaacacaatcctttctccccaacatgctgaagccgaattcctcctctttgtccttagcgggagaagcatacttaccttggtgaacaacgacgacagagactcctacaaccttcaacctggcgatgcccagag

SEQ ID NO: 5678 - DNA, 364 bp, Glycine max
  Clone ID: LIB3029-007-Q1-B1-E11
atggaagaagctgctgccatggctctctcatccccatccttggctggcaaggccgtgaagctgggcccatcagccccagaagtgggaagggtgagcatgaggaagaccgtcaccaagcaggtctcctcaggaagcccatggtacggcccagaccgagtcaagtacttgggcccattctctggcgagcccccgtcctacctaaccggtgagttcccaggcgactacggctgggacactgctgggctttccgcagacccagaaaccttcgccaagaaccgtgaactcgaagtgatccactccaggtgggccatgctcggagccttgggctgcgtcttcccggagttgctgtcacgcaacggggtga

SEQ ID NO: 5679 - DNA, 273 bp, Glycine max
  Clone ID: LIB3029-007-Q1-B1-E12
atgcaacatactgctgccatggctctctcatccccatccttggctggcaacgccttcacgctgggcccatcatctccacatctgcgaacggtcagcattacgaaaacctttccaattcagggctcctcaggaatcccatcctccagcccataccgaatcaagtacttggactcattctctggcgagccaccgtcctacccaacccgtcagtacctacgctattaacgtcgtgacacagctggactgtccgcatatccacacatcttcgccaac

SEQ ID NO: 5680 - DNA, 382 bp, Glycine max
  Clone ID: LIB3029-007-Q1-B1-E3
taaacactcatcagtcatcaccatggccaagctagtttttttccctttgttttctgcttttcagtggctgctgcttcgctttcagttccagagagcagcctcagcaaaacgagtgccagatccaaaaactcaatgccctcaaaccggataaccgtatagagtcagaaggagggctcattgagacatggaaccctaacaacaagccattccagtgtgccggtgttgccctctctcgctgcaccctcaaccgcaacgcccttcgtagaccttcctacaccaacggtccccaggaaatctacatccaacaaggtaagggtatttttggcatgatatacccgggttgtcctagcacatttgaagagcctcaacaacctcaacaaag

SEQ ID NO: 5681 - DNA, 255 bp, Glycine max
  Clone ID: LIB3029-007-Q1-B1-E4
gcgatctgtcacatttagatggcatgacgtgctttcttggtcttttgcttccaatttgccacacgctagcagtaacattgatcctttggatcttacaagctttgtgttgcatgaggccatctaaatgtgacagatcgaaggaagaaagtgtaataagacgactctcactactcgatcgctagtgattgtcattgttatatataataatgttatctttcacaacttatcgtaatgcatgtgaaactataacacatt

SEQ ID NO: 5682 - DNA, 357 bp, Glycine max
  Clone ID: LIB3029-007-Q1-B1-E5
gagaccggtgtcttgaagcctggaatggtggtgacttttgcaccaactggactgacaactgaagtcaagtctgtggagatgcaccatgaatctcttacagaggcacatcctggtgacaatgtgggattcaatgttaagaatgttgctgttaaggatttgaagcgtggttatgttgcctcaaactcaaaggatgaccctgcaaaggaggctgctaacttcacagcccaagtcatcatcatgaaccaccctggtcagattggaaatggctatgcccctgtcctcgactgccacacttctcacattgctgtcaagtttgctgaactcatgaccaagattgacaggcgatccggcaaagag

SEQ ID NO: 5683 - DNA, 391 bp, Glycine max
  Clone ID: LIB3029-007-Q1-B1-E6
cacaattgtagaaatgaatccatagacaatgctgaagctttagaaaacggtggcagtgtggccagtaaagacaagataatccaaaagaaggaaaacctcctcctgaactggcccttaatgtcatcggtcattgtttattgtgttttcgcacttcatgatattgcatatcaagaggttttctcattatgggctgtgagtcctcaaaggttggggggtttgaactttacaactgatgatgttggtaatgttctttcaatatcaggtctagcacttatcatttaccaacttaccatatacccatccgtggaaaaagctagtggacctattgttattggtcgcatttctgggatgatatccataccacttttgcaaagttaccccttcaaaacct

SEQ ID NO: 5684 - DNA, 348 bp, Glycine max
  Clone ID: LIB3029-007-Q1-B1-E7
acttaatcgatcatcacttcacttcactaagacatcatggcagacgagacccagaacaagtatgagagctctgaggttgaggtccaggatcgtggtgtttttgactttctcggtaagagtaaggatgaagaagacaagcctcatcctcaggaggaggtcatcgccaccgagtttcaaaaagtcactgtcgcagaccatggagagaagaagcacagcctcttagaaaagcttcaccgatctgacagcagctctagctcttcaagtgaggacgaaggagaagatggagagaaaaggaagaagaagaataaggaaaagaaagggctgaaagagaagatcgaggagaaaata

SEQ ID NO: 5685 - DNA, 366 bp, Glycine max
  Clone ID: LIB3029-007-Q1-B1-E8
ggagggctcattgagacatggaaccctaacaacaagccattccagtgtgccggtgttgccctctctcgctgcaccctcaaccgcaacgcccttcgtagaccttcctacaccaacggtccccaggaaatctacatccaacaaggtaagggtatttttggcatgatatacccgggttgtcctagcacatttgaagagcctcaacaacctcaacaaagaggacaaagcagcagaccacaagaccgtcaccagaagatctataacttcagagagggtgatttgatcgcagtgcctactggtgttgcatggtggatgtacaacaatgaagacactcctgttgttgccgtttctattattgacaccaacagc

SEQ ID NO: 5686 - DNA, 413 bp, Glycine max
  unsure (1)..(413): unsure at all n locations
  Clone ID: LIB3029-007-Q1-B1-E9
aagctgactagtaaaaaacttgagggtctaatcagtaaatttggtggttttgaccttgtcatttatcagaatccatgctcttactcaagttccaggcttcaagccggtgtaggtctctccgctcttgatttttcagtgttttgtgaatgtgttcgagtcttgcaacgagtaagaggtatgtatcaaaggaagtgagtgaagtgactcgtatcttttgttgtacaaaataatgtcattcgatgcctttatggtgacatttcccgttcttacttgaacatttcgttttcctgctgtatatgtgacttctatatataaatttttctgtgcagggaatttgtatgtaaagttgtcnttctttcttaatcgtcaataagaattgttcatatatgcaagtttatgcattggtagacatt

SEQ ID NO: 5687 - DNA, 373 bp, Glycine max
  Clone ID: LIB3029-007-Q1-B1-F1
tccaaccaaaaaaaaacgctatttcttacaagtccaattcacaggtcaactttacctaacaatctcaacgactcgtgttatgactattgactcgtcaatttcacaaaaatgtatgttacaacgtgttttgggtttcgatgggagaatttggatgaaagaattttaaattctttaattgaattttttttatttttaaaattttgtatttgaataaaaaaaattaaaattggaagggtgaaaaaaatgaattcaaagaaaagagaaaatatgattaatgtatttttaaagagaaaaatattgatgcgacataaggagttgcaggaagaaaatcgggaaacagcgacactacatacagcaacacacccgacctaat

SEQ ID NO: 5688 - DNA, 384 bp, Glycine max
  unsure (1)..(384): unsure at all n locations
  Clone ID: LIB3029-007-Q1-B1-F11
attcatcgtccatcgagaaaggaagaaaagaaacaaggtgacatcatcatggcttgctcgttttctcgcgggtctctgcttcctctcgccatcatcgtttccttaagatgtctatttgcgatttccattgcaaaggaagaagccaccaagttggggacggtcattgggattgatcttggaacgacctaatcatgtgttggtgtttaaaagaacggccatgttgaaatcatagccaatgaccaaggtaaccgtatcaacccttcttgggttgctttcaccgacagtgagagactcattgggggagctgccaagaatctggcagctgtcaacccaganagggtcatctttgatgtcaagagacttattggaagaaagtttgaagat

SEQ ID NO: 5689 - DNA, 336 bp, Glycine max
  Clone ID: LIB3029-007-Q1-B1-F2
gaccgctgtcgccctcatggcagaaaagccaacagctgacagacgctgaaatagtgacttgtctccatcagtgttgatcaataaaggctttgagtttgaatgccatatccacctgaaatcgatgtcctccccatacccaatgcctcaaagtcccgacctttcagcccttcttcacattcaatccattcccaaattcaagccatgggcaaacgacagctcacactcttcgactcaccatcagctgcaaactgaaacactcacactaaataaagcttagggggaagagtgtgacacaaaatattgtgttatcagaggcttcatctcacacactcacag

SEQ ID NO: 5690 - DNA, 383 bp, Glycine max
  unsure (1)..(383): unsure at all n locations
  Clone ID: LIB3029-007-Q1-B1-F3
cctttgttcactcttcttctcttgcggctagggttttagcgcagcttcttctagatttaaggaagatgggtaaggaaaaggttcacatcagtattgtggtcattggccatgtcgactctgggaaatccactaccactggtcacctgatttacaagcttggaggcattgacaagcgtgttattgagaggtttgagaaggaagctgctgagatgaacaagaggtctttcaagtatgcctgggtgctggacaaacttaaggctgagcgtgaaagaggaatcaccattgatattgctttgtggaagtttgaaacaacaaagtattattgcacagttattgatgcgcctggacatanggatttcattaagaatatgattactgggaaa

SEQ ID NO: 5691 - DNA, 360 bp, Glycine max
  Clone ID: LIB3029-007-Q1-B1-F5
actgagttgactgagtcttcgtaactcgctctctactctctctgctactcatcgcattctctgcatttctcctccgatcacattttctctctcttcatttgactatagctgacaaggatgtcggagaaagctcttagggatctcaatacaattcttggtactgaaaggaagaatgaggactccagtaaggcatgtttatccaagccttctgttgataatgctgatgaaaatattgaagaatggcaaaagaaaaagaacagttcctccttggtttctccagctgttaatggaaatcaggctgtgactgctaattccagtgcagaggttgtaaatgcagaagtagaatatattgaatctgag

SEQ ID NO: 5692 - DNA, 363 bp, Glycine max
  Clone ID: LIB3029-007-Q1-B1-F6
ctcgagccgcaatcggccagcaccaacagcatcggcggcgacagtcactctccgacaacaacacttccgcggcgaaaaatgtctctggtggcgaacgaggatttccagcacattctgcgtgtgctgaacaccaacgtggatgggaagcagaagataatgttcgctatgacctccatcaagggtattggaaggagattcgccaacatcgcttgcaagaaggccgatgttgacatgaacaaaagggctggtgagttgagtgctgcagagttggatagtgtgatgactgtggtggcgaaccctaggcaattcaagatcccggattggtttttgaacaggaagaaggattacaaggatggaaagtac

SEQ ID NO: 5693 - DNA, 380 bp, Glycine max
  unsure (1)..(380): unsure at all n locations
  Clone ID: LIB3029-007-Q1-B1-F7
gcaattcactctgtacaattcttcgttcgttctctgcagttatatcctttttgagcttcaatggcggacgctgaaaccttcgctttccaggctgagatcaaccagcttctaagtctcatcatcaacacattctacagcaacaaggagattttcttgcgtgaactcatcagcaatgcttctgatgtaagcctcttttgttatcactcactcactcttcgtagtccctgtttttttctttttttatgactcgaataaaagttcatcagttatatggcacatgaaatcaatcgcgtgtntttaatgaatgtggctttggttatactatgttgttcgaacattattgtttggttagtttgattctagaacactgaattgaattg

SEQ ID NO: 5694 - DNA, 72 bp, Glycine max
  Clone ID: LIB3029-007-Q1-B1-F9
tgtaactgtagaagggtgagagaagatgtttcctcaggagaatcctagtaacggctatcagcatcagcacgg

SEQ ID NO: 5695 - DNA, 411 bp, Glycine max
  Clone ID: LIB3029-007-Q1-B1-G1
tctgaagataaacctttcaacttgagaagccgcgaccccatctattccaacaagcttggcaagttgtttgagattaccccagagaaaaaccctcagcttcgggacttggatgtcttcctcagtgttgtggatatgaacgagggagctctttttctgccacacttcaattcaaaggccatagtggtactagtgattaatgaaggagaagcaaacattgaacttgttggcattaaagaacaacaacagaggcagcaacaggaagagcaacctttggaagtgcggaaatatagagctgaattgtctgaacaagatatatttgtaatcccagcaggttatccagttgtggtcaacgctacctcagatctgaatttccttggctttgggaaccaatgccgagaacaaccagaggaa

SEQ ID NO: 5696 - DNA, 314 bp, Glycine max
  unsure (1)..(314): unsure at all n locations
  Clone ID: LIB3029-007-Q1-B1-G11
cccgacttctggaagggatgcatttattagataaaaggtcaaaacaggctctgcctgttgctttgatgattcatgataactcgtcggatcgcacggcctttgtgccggcgacgcatcaatcaaatttctgccctaacaactttccatggtaagataatggcctaacaatgtggtgaccggttaccgagaattaaggttccaatccgggaaaggaacctgaaaaaccgctaacaaattcaaaggaaggaacaagcgcccaaaattaccaatcctgacacggggaagtanntgacataaataacaataccgggctc

SEQ ID NO: 5697 - DNA, 371 bp, Glycine max
  unsure (1)..(371): unsure at all n locations
  Clone ID: LIB3029-007-Q1-B1-G12
gttttagcgcagcttcttctagatttaaggaagatgggtaaggaaaaggttcacatcagtattgtggttattggccatgttgactctgggaagtccactaccactggccacctgatctacaagcttggaggcattgacaagcgtgttaatgagagatttgagaaggaagctgctgaaattgacaagaggtctttcaagtatgcctgggtgcttgataagcttaaggctgancgtgaaagaggaatcacaattgatattgccttgtggaagtttgaaacccacaagtactattgcacagtcattgatgcncctggacacanggatttcatcaagaacatgatcactgngacatcccaagctgactgtgctgt

SEQ ID NO: 5698 - DNA, 375 bp, Glycine max
  Clone ID: LIB3029-007-Q1-B1-G2
aattcttccaccaagttatgggtttccttgtgttgcttcttttctccctcttaggtctctcttctagttccagcatatcaactcatcgttccatattggaccttgacctaaccaagtttaccacacagaaacaggtgtcttcactgttccaactatggaagagtgagcatggacgtgtctaccataaccacgaagaagaggcaaagagacttgagattttcaagaataacttgaactatatcagggacatgaatgcaaacagaaaatcaccccattctcatcgtttaggattgaacaagtttgctgacatcactcctcaagagttcagcaaaaagtacttgcaagctcccaaggatgtgtcgcagcaaatcaaaa

SEQ ID NO: 5699 - DNA, 351 bp, Glycine max
  Clone ID: LIB3029-007-Q1-B1-G3
ctcggagagaaagagagagagagagagaaaaatggctgatacaagtggaggagatgcagtgagaccggtggtaatatgtgataacaagtgtggctgcacagttccatgcactggtggttccacttgcaggtgcacaagtgtcggcatgacaactggaggcggtgatcacgtgacatgctcgtgcggagagtactgtgggtgcaatccatgctcatgtcccaagactgcggcttctggaactggttgcagatgtggcacagattgctcatgtgcctcttgccgcacttaacatcataccttaattaagtctcaaacttcacaaatcttgaatgtgctttaaatctagctatg

SEQ ID NO: 5700 - DNA, 369 bp, Glycine max
  Clone ID: LIB3029-007-Q1-B1-G4
caacatttagctgctgctgcagcaatgaggagagctaaccaacttggttggagggaagggcagcgagctcgttcatcagctcatggtcatccacaattcttagtgttctctaatcagcctattgcaccttcatcagttgctggaggagaaaatgacccaactgcaattcctaatagaagtccatctaccccaataacatccgttggaaatgaagcatcgcagcagatcctgcaccttcaaactcaaagttcttcttcagcttctggatctcctgtcatggctacaaatcctcgaggaatttactctaatgaaagaggctctactgcttgttcttcaccagcaaaccaagatagagcagagccatcagag

SEQ ID NO: 5701 - DNA, 361 bp, Glycine max
  Clone ID: LIB3029-007-Q1-B1-G5
gcaagagcaaggaggttcccaaagccagaaaggaaagcaacaagaagaagaaaacgaaggaagcaacatattgagtggcttcgcccctgaattcttgaaagaagcgttcggcgtgaacatgcagatagtgagaaacctacaaggtgagaacgaagaggaggatagtggagccattgtgacagtgaaaggaggtctaagagtcacagctccagccatgaggaagccacagcaagaagaagatgatgatgatgaggaagagcagccacagtgcgtggagacagacaaaggttgccaacgccaaagcaaaaggagcagaaatggcattgatgagaccatttgcacaatgagactttgccaaaac

SEQ ID NO: 5702 - DNA, 381 bp, Glycine max
  Clone ID: LIB3029-007-Q1-B1-G8
aagggtctcaggttcctttggttcccattcctaggttgaagcctcagcaacctgcttcagcccccaagagtaaaaagagtgagagtaagaagagtgaggggaaaactaagaaggttgctagtattagtttgttgggtttgtttttctttatcatgctttttggtgggcttgttcctgttgttgattttaggtttgggggtttagtggacaatgttcccggtactggtagttctaattatgttagtgatagggtgtatggtcatggtggagggaaggtttggtctttgaatggtcctaggaatgggtctggaagagatggggatgtaggattttctaatgggaggtttagtgtttctgacagagtgaagaattatgagaaga

SEQ ID NO: 5703 - DNA, 359 bp, Glycine max
  Clone ID: LIB3029-007-Q1-B1-H1
ggatccttgacttcttctctcactttccagaaagccttcacatgttcacctttttatttgatgatttgggtgttccacaagattacaggcatatggatggttttggagttaacacatatacgctgatcaacaaggctgggaaagcagtgtatgtgaaatttcactggaagaccactagtggtataaagtgtctattggaggaagaggccattaaggtgggaggagccaaccacagccatgccactcaagacctccatgattcaattgctgctggtaactatcctgagtggaaactgtttgttcagacaatagatcctgagcacgaagacaaatttgactttgaccctcttgatgttact

SEQ ID NO: 5704 - DNA, 393 bp, Glycine max
  unsure (1)..(393): unsure at all n locations
  Clone ID: LIB3029-007-Q1-B1-H10
gagcttgccctcacttttctcttccatcttcactctcagtctcactcactcaccattcaccattgccctttgcgtcgctctaagcaacacgtccttttcgatccacatattccagtgtgtatataagtcatcatgctgttgtgacagttaaagatagtgtggtgtggagaaggagccttgtgattagttgtttgagaccaccaaggacgtaaacaagaggatgtcaaacagtaggaacactcattggtgttatagttgcaggaggccagttcggctggggcggcgagatgtggtttgtcctagctgtaatttgggatttgttcatgaacttaatgatattgtccatgttaatccttttgacctctttggaatggacaacantgaagaacgaga

SEQ ID NO: 5705 - DNA, 378 bp, Glycine max
  Clone ID: LIB3029-007-Q1-B1-H11
ggcactttcttgttttctctctcaccctcatatccatcatcttccacacccatggagcgttctctgagcaatcaataatcaagttacccacagaccaaccaagggtagagaaactgacccacttgcattttttctaccacgacatcttagagggcaagaacatcacggtggtgaaaatcatcgagccatcagcgagcgaggttcgtgaagcaactgggtttggaaccactttcatgatggacaatgttttgaccgagggtccagagctgagctcgaagcacgttgggagggctcaagggctgtttggcttggcctctttggaggaccgtggaatggtgatgctcattaacttggctttcagtgagggtgagtatgctg

SEQ ID NO: 5706 - DNA, 377 bp, Glycine max
  Clone ID: LIB3029-007-Q1-B1-H3
tggtccttaaacactcatcagtcatcaccatggccaagctagttttttccctttgttttctgcttttcagtggctgctgcttcgctttcagttccagagagcagcctcagcaaaacgagtgccagatccaaaaactcaatgccctcaaaccggataaccgtatagagtcagaaggagggctcattgagacatggaaccctaacaacaagccattccagtgtgccggtgttgccctctctcgctgcaccctcaaccgcaacgcccttcgtagaccttcctacaccaacggtccccaggaaatctacatccaacaaggtaagggtatttttggcatgatatacccgggttgtcctagcacatttgaagagcctcaacaa

SEQ ID NO: 5707 - DNA, 367 bp, Glycine max
  Clone ID: LIB3029-007-Q1-B1-H4
atggttcagcggatggtgtagattactggatagcgaaaaattcatggggagagtacagaatcagagacagagcaagcgttcttaagcgccatccttgagcaaccaattagtgtctccattgatgcaaaagattttcatttatacaccgggggaatttatgatggagaaaactgtacaagtccgtatgggattaatcactttgttttacttgtgggttatggttcagcggatggtgtagattactggatagcgaaaaattcatggggagaagattggggagaagatggttacatttggatccaaagaaacacgggtaatttattaggagtgtgtgggatgaattatttcgcttcatacccaaccaaag

SEQ ID NO: 5708 - DNA, 355 bp, Glycine max
  Clone ID: LIB3029-007-Q1-B1-H5
tcgaaatctcccaaaaccctcgaccttcctctcccatgaccgacgaccgcccctctcccgcggcggaagacgctctccattataacgacgcttccaccgccgacgtcgtcctccgcctcttcatcgacgctccctctccgctcgattccgtttccaactccgaccaccacgtctacctccactccgacgtcctccgccgctccaaatacttctccgcgctcctctccgaccggtggatcggccacgtcgcgccggagctctcgtcctcctcctcctgcaaccgcgaccgcgacctcgacctcttccgcctcaacctcggtgtggctcccaccggcggctcgatccaatcgcatct

SEQ ID NO: 5709 - DNA, 391 bp, Glycine max
  Clone ID: LIB3029-007-Q1-B1-H6
gctttgcaagagcattaaccccgatgaggccgttgcttatggagcagctgtacaggctgctattttgagtggtgagggcaacgagaaggtgcaggatttgctgttgttggatgttacacccctttctcttggtttggaaactgccggcggcgtcatgactgttctcattcccaggaacacgactattcccaccaagaaggagcaagtgttctctacttactcagacaaccaacctggtgtcttgattcaggtgtatgagggagagagagctagaaccagggacaacaacttgttgggtaaatttgagctttctggcattcccccagcacccaggggtgttcctcagattactgtctgctttgatatcgatgccaatggtatcttgaatgtc

SEQ ID NO: 5710 - DNA, 358 bp, Glycine max
  Clone ID: LIB3029-007-Q1-B1-H7
catccacattagatgcttcaccagtggatgaatacctttggcttgtagagagctctccccatcagccaaaggtattcatccacattagatgcttcaccagtggagccaaagcaacggatagaagaccaatcatagccagatgtggaatttgtggtggtacagaaattgggggtggatttgtttgcggatcactactacaggctcagtcattagctgcttttagcacaccagctatgtgctgcagtttgtttattcttgatgatgaaggccttcctattccacaaaatgttccaggaataggtgagttggctcttggtccgctcatgcttggggcttcaaatacactgcttaacgctga

SEQ ID NO: 5711 - DNA, 323 bp, Glycine max
  Clone ID: LIB3029-008-Q1-B1-A1
gggcgccccttttttttttttttacggcaggaagttcccctgaggaaaatccctctcgatgcaccatatttcgtgattatccccctgcattcatcacgtcaactctcggcccagtcacccaagttttgcatgaccgtcatcgtttttttggcttggtgtgttggccctccaggttaccattttatgtagtggtatctgcattcgtcatatccgcaggcctcaaatcgaacgggatacgagcaccaactattttggtcacatttacagctggccagcagtgttgaattcctccacggccgcctgggcacgcttgctcatgggct

SEQ ID NO: 5712 - DNA, 140 bp, Glycine max
  Clone ID: LIB3029-008-Q1-B1-A10
ctgtgaaggaggagagagaggagtttagctcttcaattagttccgtgaccattctgtttgaattttgatattcataataaagtttccctccgaatatagttgatgtacttgtgaagtaattaaattattttttccccaag

SEQ ID NO: 5713 - DNA, 398 bp, Glycine max
  Clone ID: LIB3029-008-Q1-B1-A11
aattggttgaagtttttcctgattgtgaaatgattatggggcctggcatgcaccgaataagttctcgccttcaagagattatagtagattgcagtggagaagatggacaagaaaaaactcctgatacagcatttttgaacaagaaaactgcacttctgcagcttgtggaggaaagtcctgtcccaagaactattgtgttctgcaacaaaattgaaacctgcagaaaagttgaaaatttattaaagcgttttgatagaaaaggaaattgcgtgcaagttctaccattccatgctgccatgacacaagaatcacggcttgctagtatggaagagtttacacgttctccatcaaaaggagtctcccagtttatggtttgcaccgacagagcatcacgggga

SEQ ID NO: 5714 - DNA, 162 bp, Glycine max
  Clone ID: LIB3029-008-Q1-B1-A2
tacgtacactcgaatctccgatcgcggccgcactgttgttcctttttgaggaccagtagtccatcgcggtgaattcggctgcgaacgacatagttcgtcgcgaccgtcattcaatcatgaggtcaacgtcgggcgcagtaacgaaggttttggttgaccgtc

SEQ ID NO: 5715 - DNA, 389 bp, Glycine max
  unsure (1)..(389): unsure at all n locations
  Clone ID: LIB3029-008-Q1-B1-A5
ctagttcaatatcctagtataccttaataaataatttaagatactatgatgagagcacggttcccattactgttgctgggacttgttttcctggcttcagtttctgtctcatttggcattgcttactgggaaaaagagaaccccaaacacaacaagtgtctccagagttgcaatagcgagagagactcgtacaggaaccaagcatgccacgctcgttgcaacctccttaaggtggagaaagaagaatgtgaagaaggtgaaattccacgaccacgaccacgaccacaacacccggagagggaacctcagcaacccggtgagaaggaggaagacgaagatgagcaaccacgtccaatcccattcncacgcncacaacctcgtcaagaaga

SEQ ID NO: 5716 - DNA, 385 bp, Glycine max
  Clone ID: LIB3029-008-Q1-B1-A7
ggcaattgaggatccatcgtgccctcatggcattcgccttgtgatagaggactacccttatgctgttgatggacttgagatatgggatgctatcaagacatgggtccatgaatacgttttcttgtactacaaatcagatgacacacttagagaagatcctgaactccaagcctgctggaaagaactcgtacaggtgggtcatggagacaagaaaaatgagccatggtggcctaagatgcaaactcgtgaagagctagttgaagcttgcgctatcatcatatggactgcttcagcacttcatgcagctgttaattttggacagtatccctatggaggtttaatcttaaaccgtccaactcttagtaggcgattcatgcctgagaaa

SEQ ID NO: 5717 - DNA, 123 bp, Glycine max
  Clone ID: LIB3029-008-Q1-B1-A8
aaattttgctgacaagtgtccacaaaatttgttagctgaatactgcccccataattgaggatcatgtattgaaacatatttaatttgctcacgaatttaatttgttcctgctgtttctttctc

SEQ ID NO: 5718 - DNA, 397 bp, Glycine max
  Clone ID: LIB3029-008-Q1-B1-B1
tcggcccaagtctgagcttcccttccctcctcccaaaattccccaaattgcttgtgaatgctagaaacccaaaacagattcgattggatgcgctcccatttcacatcaagggcgagcgcattcggttcttgcaagcaagcctggtactagcgctgcctcggactcgacccctgaatttgaaccattcatcaccagctttcttcattcattcacggttttccttttcgactcgatttgttgttttttttgttttgtttccttgacgatgttgacgatgagcaagcagaagaagatccagaacgcgaagaggctgttgataagcatcaatgtgctggggagcgcggggcccattatgttcgtggtgaacgacgacgatcttgtggcggcggtcatcgac

SEQ ID NO: 5719 - DNA, 399 bp, Glycine max
  Clone ID: LIB3029-008-Q1-B1-B10
cgtttcattgctctctctcttgtgcggacacaatttttgatggggatatacctcagcactcccaaaacagagaaggcctctgaagatggtgagaacgacaagcttcgcttcggtttgtcttccatgcagggctggcgtgctaccatggaagatgctcatgcagctcatccatgtttggacgagtccacgtcatactttggtgtttatgatggccatggaggcaaagcagtttcaaaattctgtgccaagtatctacacctgcaggtgcttaagagtgaagcttacttagctggagatttaggcacatctttacagaaatcttttctcagaatggatgagatgatgcgtggacaaagagggtggagagaattagcaatcttgggggataaaatagaaaag

SEQ ID NO: 5720 - DNA, 399 bp, Glycine max
  Clone ID: LIB3029-008-Q1-B1-B11
gaacgggccaaagatcaaaagtacaattcttcaccatctctatgagaagcagagacagagcccttactatgacaatctctgtcgccctgtttcagatttgcttccatttattgccaatgggatcagaggtgtcactaccaacccagcgatttttgaaagagctatttcatcctcaaatgcctacgatgatcagttgagggaattggtaggggcagggaaggacatagaaagtgcttattgggaattggttgtgaaggacatacaggatacttgcaaacttctggagccaatttacaatgaaacagatggggaagatggacatgtatctcttgcagtttccccaaagctagcaaatgacaccaaggggacaattgaggcagcaaaatggcttcataatat

SEQ ID NO: 5721 - DNA, 397 bp, Glycine max
  Clone ID: LIB3029-008-Q1-B1-B12
cagaatgataacactcgccatacccgttaacaaacccggtagatttgagagtttcttcctatctagcactcaagctcaacagtcctacttgcaagggttcagcaagaatattctagaggcctcatacgacaccaaattcgaggagataaacaaggttctgtttggtagagaggaggggcagcaacaaggggaggagaggctgcaagagagtgtgattgtggaaatctcaaagaaacaaattcgggaactgagcaaacatgccaaatctagttcaaggaaaaccatttcttctgaagataaacctttcaacttgagaagccgcgaccccatctattccaacaagcttggcaagttgtttgagattaccccagagaaaaaccctcagcttcgggacttg

SEQ ID NO: 5722 - DNA, 379 bp, Glycine max
  Clone ID: LIB3029-008-Q1-B1-B2
tacgtaaactcaaatctccgatcgaggtttcttcccaagtccaaatccattccattcattttgctgtctctctgttttcaacaaacgtccacaacaccacatttcgccgtttcaaattactacttgacaccgtctgaactcctaattcactaggacgttacaccagagatagaacaacggagagtggaaaatttcggaggcaagagggacggcgcggacgctttctagcgatagttttaagtgtcgcttcgcagatcgccacataatcacacgcgtgacgggagaggtgctcatatttactgtccatcgtgtcttgacaaggattgcctccaaaggaagagagtcttgcggtgtaacggcgctattgactacatacctt

SEQ ID NO: 5723 - DNA, 340 bp, Glycine max
  Clone ID: LIB3029-008-Q1-B1-B3
attcggcccaagataaatcaacgcagtcctatatacaggcggctattactaaccatccggataagggaggagatcctgaaaagtttaaggatttaggtcaagcataggaagttttaagtgatcctgaaaagatggaactgtattaccagtatggtgaagatgcccttaaagaagggattgggggaggaggctcgtttcataatccatttgatatatttgaatcattttttggaggagcaagctttggtggtggtggtacttcccgaggtacaagacacaagcatggtgaagatgttgtgcattctttaaaggtttcccttgacgacgtttataatcgcac

SEQ ID NO: 5724 - DNA, 396 bp, Glycine max
  Clone ID: LIB3029-008-Q1-B1-B4
agaagctcaaagcgttaaactgcttcttcttcttcaatggcggcagaatcatctcgcagtagcgctaaacgcccctttatggaagaagacgacgacgaattctccaaaaagccaccagcaaaaagggttaggtttccaaagggaaagaaagtgaagccaggagatgaagtggtggtggacaaagcaaatgttgaggagggtgaagaagttgacttggtgaatgctaaaactgctaccaatgctgccaaagagcgggaaaaactcagaaggtttctaaagggaaagaaagtgaagccaggagatgaagtagtggtggacaaagcaaatgttgaggagggtgaagttgacttgatgaatcctaaaattgcggctgccaaagagcgggcaaaactcaga

SEQ ID NO: 5725 - DNA, 357 bp, Glycine max
  Clone ID: LIB3029-008-Q1-B1-B7
agcaaagcaatggctacttcaaagttgaaaacccagaatgtggttgtatctctctccctaaccttaaccttggtactggtgctactgaccagcaaggcaaactcagcggaaactgtttctttcagctggaacaagttcgtgccgaagcaaccaaacatgatcctccaaggagacgctattgtgacctcctcgggaaagttacaactcaataaggttgacgaaaacggcaccccaaaaccctcgtctcttggtcgcgccctctactccacccccatccacatttgggacaaagaaaccggtagcgttgccagcttcgccgcttccttcaacttcaccttctatgcccctgacacaaaa

SEQ ID NO: 5726 - DNA, 405 bp, Glycine max
  Clone ID: LIB3029-008-Q1-B1-B8
atcccctcggggaattccaattccacattttcaagaaataaggaggcaaaaatgttcatatatgaattggaattatttgttttcttattaggcctatcctgaagccaaaggaaatgagatcggaattcctcggggaattccaattccacattttcaagaaataaggaggcaaaaatgttcatatatgaattggaattatttgttttcttattaggcctatcctgaagccaaaggaaatgagatcggaattcctcggggaattccaattccacattttcaagaaataaggaggcaaaaatgttcatatatgaattggtattagttgttttcttattatgcctatcgtgaagccatacgaaatgagatcggaattcctcgggggtaccgagctcgaattccctatag

SEQ ID NO: 5727 - DNA, 396 bp, Glycine max
  Clone ID: LIB3029-008-Q1-B1-B9
ctttaaacgccgaaggttcatccaatctccgaaggccttcaccggattgcaaccatgtcgaggagaaaggttagagagccaaaggaggaaaacgtgactctgggcccagctgttagagatggtgaacatgtttttggagtcgctcgcatctttgcctccttcaatgacaccttcattcatgtcactgatctgtctgggagggaaacacttgtccgcatcactggcgggatgaaggttaaagctgacagagatgaatcatctccatatgctgctatgcttgctgcgcaggatgttgctgctagatgcaaggaactgggcataactgctcttcatatcaagctccgtgccacaggtggaaacaagacaaaaacaccaggtcctggtgctcaatcagct

SEQ ID NO: 5728 - DNA, 394 bp, Glycine max
  Clone ID: LIB3029-008-Q1-B1-C1
gcaaaaagaaagaatcccaggcgaggagaaagatggaggggaaggagcaggatgtgtcgttgggagcgaacaagttccccgagagacagccgattgggacggcggcgcagagccaagacgacggcaaggactaccaggagccggcgccggcgccgctggttgacccgacggagtttacgtcatggtcgttttacagagcagggatagcagagtttgtggccacttttctgtttctctacatcaccgtcttaaccgttatgggagtcgccggggctaagtctaagtgtagtaccgttgggattcaaggaatcgcttgggccttcggtggcatgatcttcgccctcgtttactgcaccgctggcatctcaaggggacacataaacccggcggtgac

SEQ ID NO: 5729 - DNA, 398 bp, Glycine max
  unsure (1)..(398): unsure at all n locations
  Clone ID: LIB3029-008-Q1-B1-C10
ggaaactaactaaataaagatgtaaaaccagagaacaaataattgttgaacttgaaatgtagtttggcatgttgagtataaagttgtttatagtacacgcccaacattatgaattcatgtccttaaaactgtaattacttttgtgccattcttgtaccagaaaaagatcagaatgaacagatattaacctttggaagaaaatgttgacatttatggatgacaccaaatgactgtttatggtgctgttcactactattttttagatgtattttttattgacgtgcaactgcagttctacaatccgggacaaaattattcctcatgccgtgtcatggttcacggnggaagctgcacagagtgattttgaggatatagatgaagatgattatgaagatgaa

SEQ ID NO: 5730 - DNA, 397 bp, Glycine max
  Clone ID: LIB3029-008-Q1-B1-C11
gtcagaaggagggctcattgagacatggaaccctaacaacaagccattccagtgtgccggtgttgccctctctcgctgcaccctcaaccgcaacgcccttcgtagaccttcctacaccaacggtccccaggaaatctacatccaacaaggtaagggtatttttggcatgatatacccgggttgtcctagcacatttgaagagcctcaacaacctcaacaaagaggacaaagcagcagaccacaagaccgtcaccagaagatctataacttcagagagggtgatttgatcgcagtgcctactggtgttgcatggtggatgtacaacaatgaagacactcctgttgttgccgtttctattattgacaccaacagcttggagaaccagctcgaccagatg

SEQ ID NO: 5731 - DNA, 394 bp, Glycine max
  Clone ID: LIB3029-008-Q1-B1-C12
acttcaaagttgaaaacccagaatgtggttgtatctctctccctaaccttaaccttggtactggtgctactgaccagcaaggcaaactcagcggaaactgtttctttcagctggaacaagttcgtgccgaagcaaccaaacatgatcctccaaggagacgctattgtgacctcctcgggaaagttacaactcaataaggttgacgaaaacggcaccccaaaaccctcgtctcttggtcgcgccctctactccacccccatccacatttgggacaaagaaaccggtagcgttgccagcttcgccgcttccttcaacttcaccttctatgcccctgacacaaaaaggcttgcagatgggcttgccttctttctcgcaccaattgacactaagccac

SEQ ID NO: 5732 - DNA, 338 bp, Glycine max
  Clone ID: LIB3029-008-Q1-B1-C2
ttcggctcgagatcaaggtttcttcctttctctgctctttgtcttctctgacacatttggggccttgttgagtgtgtttttgcaagagggtatcgcaacggacattgaagttgctgaacggggctccttccctggaaaggaccagcagtaccctcaaccaacacaagccatgaatgctcagggcccccaaaatgggccctttaaaaaggcccctaactgcggattcaatggcaacttggtcctcccccaaaatactggggccaaaatttcaaggtccaagcaccaaacgggttatgctgaagcctgtggtgaggttggcaatcctggcaatgcaatgg

SEQ ID NO: 5733 - DNA, 306 bp, Glycine max
  Clone ID: LIB3029-008-Q1-B1-C3
tgagaggcaccatggcgacactggattccgacgtgaccatggttccggccggcgaaccctccaccagcgccggtccttcttcgtccaccaggaagccgaagcgattcgagatcaagaagtggagtgccgtttctctctgggcttgggatattgttgtggataattgcgctatttgccgcaaccatatcatggatctctgtattgagtgccacgccaaccaggctagcgccactaccgaggaatgcactgtaccttggggagtttgtaaccactcttttcaattctattgcgtaagccgatggctca

SEQ ID NO: 5734 - DNA, 389 bp, Glycine max
  Clone ID: LIB3029-008-Q1-B1-C4
ggaaaatagaagagaattattgaatagtgaataataataataataataataataataataatagtagtgtggaattggatcagatctgtttgttagagagagatgtcacgggggagatctgattccggaaggtggttgaagggctgtccggtggttttcccaatggtctcaacgttgggcctgtgtggccctgctccttactggcgaatcaagaacgccatcaatctccgcaacaacaacaacaaactctcttgcccttcctgcctctgtgactggcctccccctctctcgctcttccaacttgctcctgggctggccaatctctctgtctcagaatgtggaagtaatgacccggattcaaaggacgagatggagaagcagtttgtgga

SEQ ID NO: 5735 - DNA, 388 bp, Glycine max
  Clone ID: LIB3029-008-Q1-B1-C5
gatacctttggccgctaatcctcttgatagtacagtagtagcatctaaatgtgcaaatgtcgtagcaggcgcaggatcggttaaatcgtcttcgggtacataaactgcttgaatagaagttatggacccctctttggtagaagtgattctttcttgtaaagaacccatttcattactaagagtgggttgataacccacagcagaaggcattcgacccaataaggcagatacttcagatcctgcttggacgaagcgaaagatattgtcgataaatagaagtacatcttgttcattgacatctcgaaaatattccgccatagtcagggcagttaaaccaactctcatacgagctccgggcggttcattcatttgaccatatactagagct

SEQ ID NO: 5736 - DNA, 312 bp, Glycine max
  Clone ID: LIB3029-008-Q1-B1-C7
tgagatgcaccatgacgacactggattccgacgttaccagggttccggccggcgaaccctccatcatcgccggtccttcgtcatccaccaagatgcctaagcgattccagatcaacaattggggtggcgtttctctcagggcttgggatattgttgtggataactgctctatttgccgctgccagatcatggatctctgtcatgagtgccgggccaagtattctacctccattagccacgaattctctgtaacctgtcgattgtgtcatcaagcgttgcagctttattgcataagcttatgggccaataccc

SEQ ID NO: 5737 - DNA, 376 bp, Glycine max
  Clone ID: LIB3029-008-Q1-B1-C8
gctgggtttggtggtgacaagcccttggctgctcttaagttgcttcaaagagttcaagaactaaattatctggttcttgaatgcttggccgagcgaactcttgctgatcgttatcaaatcatgatgtctggtggtgatggttatgattctcagatttctaactggatgcatatgctgctgcctctggctttggaaagaggaacttgcataattaccaatatgggtgcaatggatcctctgggtgctcaacagaaggtcttagaaatagctaacagcctgggtctcaatgtttctgttgctgtggctcacgaagtgtctgtcactaatataatatgttcatgattttccacatcaaaatcatataacatggaaggtg

SEQ ID NO: 5738 - DNA, 409 bp, Glycine max
  Clone ID: LIB3029-008-Q1-B1-C9
ttcggctgcaagctctagtgctgggacctgtctcacacagggaaactacgatctgcgtaggattgcaaccaacatgatctactcacacaagagcactccaacacccatgcatgtgatattcggcgtcattcgcgccatcccttggcacatctccctcatctacggctgccttcctctccaaacccaagctgctctcacatgttctgccacgccgccgctccgtcaccgccatgccatcgcatgcgaactctttcgcgcagctggcggcgacatctccatatggcacggcagcatgcctctactgattgacgatgacagaatccgacaccgcattgtggcgtttcatgacctgaagggagagggatcgtggaatgtcgcttgtgacgcgctacaggtaccgtggctccat

SEQ ID NO: 5739 - DNA, 392 bp, Glycine max
  unsure (1)..(392): unsure at all n locations
  Clone ID: LIB3029-008-Q1-B1-D1
aaaaatgcagcctcagcaaccagggtataacagttcaagggtttacctagagcttatctctgatcttccctggcagaaggccagtgaagaaattgaactggacttgagagctgcacagaaacggctggatagtgatcactatggtttagtgaaggttaagcaacggataattgaatacctggcggttcgcaagcttaaaccagatgcaaggggtcctgtgttgtgctttgttggaccaccaggtgttgggaaaacatcattggcatcttctattgctgctgctttgggaagaaaatttgtacgcatatcccttggtggagtcaaggatgaggctgatattagaggacataggagaacatatgttggaagcatgcctgngaggcttatagatg

SEQ ID NO: 5740 - DNA, 395 bp, Glycine max
  unsure (1)..(395): unsure at all n locations
  Clone ID: LIB3029-008-Q1-B1-D10
ctgcaactgcaacagcaagcacaaacatcaaacagagtcattgttattgtaacgtaaaatcacatggagaaggaagctttgaaggaccaaattgaaactccaaagcactgaacgaactcaattgaaaccctagcacagagtcatacatagatagtagcgtggatagcagtgtgtgatgcggtgatcgcgatcacgatgaaaaatgcaaacggcttgatttcgacgacgtcgtctaatacggcacagtcacaatccactggcctcaagacgtatttcaagactcacgaaggccggtacaagctttattacgataagacttacccttccactcttcttcactacgctcatggcanaaccgtttctcaggttactctggcacatctcaaagacaagcc

SEQ ID NO: 5741 - DNA, 346 bp, Glycine max
  Clone ID: LIB3029-008-Q1-B1-D11
tgctgaggctttgctgtatggactcctccagctgcagaaaaagatcaataggcgcaaagacttcctccattggtggacaaagtgaggtcgattcaatctattttcttggcatcgaagctattttataataagcaactacatggtagtttaccttgctaagaagcacccatgtttgatggagattgtgtccatacaataccttgtcacagtttctgaatgcttttacggggtttcaggcccctttgaggttgaatgtttattatctgtacctgagagtaaacaatttctgaatgactaatgtttggtttgtaagttacggttcttacattggaccaatttcagtctc

SEQ ID NO: 5742 - DNA, 390 bp, Glycine max
  Clone ID: LIB3029-008-Q1-B1-D12
aaagcgccctccatttaccattccgagagaggtccaacgacttcccaggtcctcgccgtcctcgccggcctcccggtcggtggcatcctgctcctcctggcgggattgaccctggcaggaaccctcaccggactggcagttgccacgccgctcttcgtcctcttcagcccggtgctggttccagccacggtcgccatcggcctggccgtggccgggttcctgacgtcgggggccttcgggctcacggcgctgtcttccttctcctggatcctgaactacatccgggagacccagccagcctcggagaacctcgccgccgccgcgaagcatcacctcgccgaggcggcggagtacgtggggcagaagacgaaggaagtggggcagaagacc

SEQ ID NO: 5743 - DNA, 387 bp, Glycine max
  Clone ID: LIB3029-008-Q1-B1-D3
acattttcccctctttggagaaatcaaaagaggggaacccatgattcctcctccatcttcctttctcttccagttcctcctcctctttcctctcatactctcccattccgattccgattccggtcaccccgtgctcccgcgcccgctgatcgtggagtacccggagttcgacgcggtgctgcggtgcggcgcgtggcgcgtggcgggggaggcgaacaacctacgcgcgtgggcgataattcccgaggaatgcgcggagtacgtgaaggactatatgagcgggaaaggctacgcgcttgacctggaaatggtctccaaagaggccgaggagtacgcgaggactgtgccactcggctacgacgggaatgacgcgtgggttttcgacat

SEQ ID NO: 5744 - DNA, 385 bp, Glycine max
  Clone ID: LIB3029-008-Q1-B1-D5
cacatactcaccatggaggctaagttggccaccaccataatacttattttctccgtaatttggcttatgagggtgaatggcatagacccttgtgcctctcaagcggataattccgacctgaacgtgattcccatctacagcaaatgctcaccgttcaaaccaccaaagtcagactcatcgtgggacaacagaattataaacatggcctcaaaagacccactccgattcaaatacttgtccaccttagtgggccaaaagaccgtgtccacggccccaatcgcttcgggccagaccttcaacatcggcaactacgtcgtcagggtcaaattgggaacccctggtcaacttttgttcatggtcctcgacaccagcaccgacgaggcct

SEQ ID NO: 5745 - DNA, 392 bp, Glycine max
  Clone ID: LIB3029-008-Q1-B1-D8
tgtctctcaactgatcaatgttggtagcaatcctgttactcctcaagttgggagaaaccctgttccaccatccttccccgatggatcttctcctccagttgttaaaacccgattgtgcaacaagtttaatacagctgaaggttgcaaatttggtgacaaatgtcactttgcccatggtgagtgggagcttggcaggcctacagccccatcatatgaagatccccgtgttttgggacaaatgccaagcagcagggtaggtgggcgagttgagcccccacatccagctcatggagctgctgccagctttggagcctcggctactgcaaaaatcagtatcaatgcttccttagctggagctgtcattggaaaaaatggtgtcaactcgaagcaaa

SEQ ID NO: 5746 - DNA, 391 bp, Glycine max
  Clone ID: LIB3029-008-Q1-B1-D9
ctgcaaccgaatcatcatcagccacttcttcccgtttcatctctcccatttcttcttttcttccgctctggttcagtaaggcgaagagggttaacgttattcataatggttgcaacagccgctacggcgtcgtttcttcccgtgcctttgccagacgctggaaaagggaaacccaagaaactgggtggtggtggcggtggcggtggcggttctgtgaacctcggaggactcaaacagaaacaaggtttgtgcggtggcttgcaggtcaaggcaaacgcacaagcccctccgaagaccgtggagaaggttgagaatgatttgtcgtcgtcgtcctcgtcgatttcgcacgccccgaggactttcatcaaccagttacctgactggagcatgc

SEQ ID NO: 5747 - DNA, 375 bp, Glycine max
  Clone ID: LIB3029-008-Q1-B1-E10
tggaggtacaatcagtgtttaccacttgtgttgcgtcaccccttttgattccggggagtgctacagtatggatgagatctagtgacattcatgctgatggagtataaggtctgtccaactggatgatcttggtttcacctcagtaagatcccaaatcatcggaaatttacagggtcatgatcaagtcacaggttgttggtgcattgagatcgattgtgagttgttcatgtggagttccaactctgcgacgtgctaaatgcgatagcgcatcacaattctcatgtgtgggtagttctccagactacgtgtgcattgcggaatttgctcgctcatatgtatactgccacggtgcatgagatcttcaagtgagctgca

SEQ ID NO: 5748 - DNA, 393 bp, Glycine max
  Clone ID: LIB3029-008-Q1-B1-E11
tgcgaaaattgttatggattaaattataaaaaattttttaaatcaaaaatgaatatttgtgaatactgtggatatcatttgaaaatgggcagttcagatagaatcgaacttttgattgattcgggtacttggaatcctatggatgaagacatggtttctctggatcctattgaatttcattccgaagaggaaccttataaagatcgtattgattcttatcaaagaaaaacgggattaactgaggctgttcaaacaggtactggtcaactaaatggtattcctgtagctattggaattatggattttcagtttatggggggcagtatgggatccgcagtaggtgagaaaatcacccgtttggtagaatatgctactaatcaacttttacctctt

SEQ ID NO: 5749 - DNA, 368 bp, Glycine max
  Clone ID: LIB3029-008-Q1-B1-E12
tggtgctgctgttcaggctgcaattttaagtggtgagggcaatgagaaggttcaggatcttctcctccttgatgtcacccctctatctcttggtttggagactgctggcggtgtgatgactgtcttgatccctaggaacactacaattccaaccaagaaggaacaggttttctcaacatactctgacaaccagcctggtgtgttgatccaggtctttgaaggtgaaagagcaaggactaaagataacaatttgttgggcaaatttgaactttctggcattcctcctgcccccaggggtgttcctcagattactgtgtgctttgacattgatgccaatggtattttgaacgtctctgccgaagataaga

SEQ ID NO: 5750 - DNA, 394 bp, Glycine max
  Clone ID: LIB3029-008-Q1-B1-E3
ggaacatctatcaccacagcattggatacagcataattatcctgggaatcatcaacatcttcagggggtttagcatcttgcatcctgatcagaaatggaaatcaacttacactgcagtgctcattgcacttggtgcagttgccttgttcttggaagtgatcacatggattgttgtgttgaagagaaagtctggcaagtccaccaaaacctatgatggacacaacaatggacaatctacggaagaccccctaaccatataaaaataaagtgaacaaatttggcttgaatgtgttctactttccctttcccttctttccccccctttttttttccttctatttatatgacacatatgatatctttgtataatgcttgcgtataaaatataaaattt

SEQ ID NO: 5751 - DNA, 391 bp, Glycine max
  Clone ID: LIB3029-008-Q1-B1-E5
ctaaacaattcaattcaatctgcctctgatcatgtgagaggaaaacatttgggtttttgttcttgctcctccttgtcttagcttctgatgtgacggtgaagagagcagaggcgaaagattgcttgacaaggaggcacgggttccagggtagatgcttattcgacaggcaatgtgcacatgtgtgcaggagcgatggtttcatcggtggtcagtgccgaggccctcttcgcaaatgcttttgcagcaggccatgttgatcgaaattactactgccaaagaggccatgaaataaacatacatacaaataaataaatagctctaaccgacacatatgtacgtagtgtcggggttctagctagctaggtaggtacgtgtgtcttttgttatcgat

SEQ ID NO: 5752 - DNA, 386 bp, Glycine max
  Clone ID: LIB3029-008-Q1-B1-E7
acgatctccatgtgttcaggcttatgttgattcagttcttgatctagcttcacactttatcacccggttgcggcgttatgcaagtttctgccgtacagtggcaagtcatgctgtaactgcagggacgggaaataaccgaaatgtggtagctagtcctgcccaatgttctgcaactcctgcaacaagtcagggaggtcaaaatgggacaaccagttctagtggaagcacacagatgcaagcttgggtacaacgggccattgccaagattagtagcactactgacggagtgtccaacccggttcctaacccccccatcagtggtccttcgtcctttatgcccataagcattaatacaggaactttccctggaacacctgcagttcgac

SEQ ID NO: 5753 - DNA, 124 bp, Glycine max
  Clone ID: LIB3029-008-Q1-B1-E8
ggaatacgttgtggagaacttgaagcggtagtgttgattcctgggtgcttggaattttgtttggttgtgaagacatacattacatgtattcaaaggctgctattatcattacgattatgacgat

SEQ ID NO: 5754 - DNA, 385 bp, Glycine max
  Clone ID: LIB3029-008-Q1-B1-E9
caacatctcacaattcattcaccttttaattcatctcactcacaaatcacaatgctcttcctttcttccttaataataataccataataatctgttacgttacggggcccaaatgtctgttacggagctcaaggagcgtcactctgctgccaccgacaccgtcaacaatctcagacaccgtttaaagcagaagcgcctttcgttgctcgacacagatatttctgggtatgcaaggtctcaaggtagaacgcctgtgacctttggacctacggatctggtttgctgtagaaccttgcagggtcacacgggaaaggtgtaatcaatggattggacttctgaaaaaagtcagattgttagtgcatctcaagatgggcgattaataatg

SEQ ID NO: 5755 - DNA, 396 bp, Glycine max
  Clone ID: LIB3029-008-Q1-B1-F1
caagtttgctgacatcactcctcaagagttcagcaaaaagtacttgcaagctcccaaggatgtgtcgcagcaaatcaaaatggccaacaagaaaatgaagaaggaacaatattcttgtgaccatccacctgcatcatgggattggaggaaaaaaggtgtcatcacccaagtaaagtaccaagggggctgtggaagcggttgggcgttttctgccacgggagccatagaagcagcacatgcaatagcaacaggagaccttgttagcctttctgaacaagaactcgtagactgtgtggaagaaagcgaaggttgttacaatggatggcactatcaatcgttcgaatgggttttagaacatggtgggattgccactgatgatgattatccttacagagc

SEQ ID NO: 5756 - DNA, 382 bp, Glycine max
  Clone ID: LIB3029-008-Q1-B1-F11
ggtgccgttcacaagggaatgccccacaaattctaccatggccgcaccggacgcgtctggaatgtcaccaaacgtgctgttggcgtcgaagtcaacaagcaggttggcaacagaattataaggaagaggattcatgtgcgggtagagcatgttatgccttcaaggtgcactgaggagttccgcctcaggaagattaagaatgatcagctaaaggccgaagccaaggtcaagggtgagaagatcagcaccaagagacagcctcagggtcccaaacccggtttcatggtggagggtgcgacccttgagacagttacccccatcccatatgatgttgtcaatgacctcaagggaagttattagtttgtctacctgtttgattgtt

SEQ ID NO: 5757 - DNA, 403 bp, Glycine max
  Clone ID: LIB3029-008-Q1-B1-F12
cgggagagtccattaaggaaacagctacaaacattggtgcttctgccaaggctggcatggagaagaccaaggccactgtccaagagaaggcagaaagaatgacagcacgtgatccggtgcaaaaggagttggcaacccaaaagaaagaggcaaagatgaaccaggcggagctggacaagcaggcggcgcgtcagcataacacggcggccaaacagtccgccaccacggctgggcacatgggacatggccaccacaccaccggaaccgggactggaaccgccacgtattccaccaccggggaatatggtcagcccatgggggcccaccagacgtcggcaatgcctggccatggaaccgggcagcccacgggccatgtcaccgaaggagtggtgggctcacatcc

SEQ ID NO: 5758 - DNA, 370 bp, Glycine max
  unsure (1)..(370): unsure at all n locations
  Clone ID: LIB3029-008-Q1-B1-F3
aaaaatataaattcccttgtttcatgtctttcctttatttgggttcttttggggtgatcttttgagttgaacggagattaatgttgaaatcttttttataaacctagatgatttccttgctgtcttggtaaatttaatctgtatattcgtttgtgtttgtaagtttaaaccccacacttgttaggataagggtgtgttgttggatcntttgtgttggttggcatcttattgtagcgttcgactattggttgatggaaaatgttggattcttgtggctatttatggtttttttaagttgttcttgtttgttttcctggccttaatgttactagactttaatttgaccaaacatcagctttgcccagttttt

SEQ ID NO: 5759 - DNA, 284 bp, Glycine max
  Clone ID: LIB3029-008-Q1-B1-F4
ccaactaacaataattccttcacttgcagaacttagttctctgttgcatcatcatcatcttcattagtgttagccctaaacttcaccttcgaggatgaccacagtgccatcacacagtgtcgaggtgcacacaacaacacagcgctaccaagccggcgtcgtcccgccggctcgttttgaggcgccgcgttacgaatccggccataaggtgccctcttcgatttaccattcctacagacgtccgacaaacgtctcacgttctcgcagttgtcgccgggctttct

SEQ ID NO: 5760 - DNA, 83 bp, Glycine max
  Clone ID: LIB3029-008-Q1-B1-F6
ttggatctccgatcgcgtccgctccttctaattttttttttgttccaatgttttgcatcttttcactctctcaagtatctctt

SEQ ID NO: 5761 - DNA, 389 bp, Glycine max
  Clone ID: LIB3029-008-Q1-B1-F7
attgaattttgattctagcaagcagagcttttgtcagttttctattgaccttctcggtggaggaatcttagtggacaaaactggagattggatcacacttatacaaaattctccaattagtaacttgttgagagttgctgcttggaagaaaggctgtttaatggtcaagattgtgatgtctgggaatgcagcagtcaaaaggagtgattgggcctcattggtacaagtgtttttaacaaacagcaacagtacagagcattttgatgcatgtaagtggacaaaatcagaaccacattcctgggaattgatcttcccaatagaggtatgtggtcctaataatggttttgaaatgtggagttctgagtgggcaaatcaaacttcatggcatt

SEQ ID NO: 5762 - DNA, 396 bp, Glycine max
  unsure (1)..(396): unsure at all n locations
  Clone ID: LIB3029-008-Q1-B1-F8
ctctctctctctctctctctcatcactctctctctctctctctaagacacacaaacactacacatcacaatctcacattgttctcaagtttcaacactttctagttctaccatggcggtaggactctccgccgccataaccatgaagtccctcctccgtttccaccaacctcacctgaacctccccaaatcaatcccaacaacactccctttctcccccatgagaattttccaccacacagcatcaccaagaacccaaaaagtttcaactttcaccgtttgtgtcctcatgcaggacccaaaacaaggcacccacatggaaattgagccacaagaacaacctcctcctcctcctcctcctcncgctcaacaagttctgtcaccaaagttggctgag

SEQ ID NO: 5763 - DNA, 397 bp, Glycine max
  unsure (1)..(397): unsure at all n locations
  Clone ID: LIB3029-008-Q1-B1-F9
cattgtctttgaacactcatcaccatggccaagcttgttctttccctttgtttccttcttttcagtggctgcttcgctctgagagagcaggcacagcaaaatgagtgccagatccaaaagctgaatgccctcaaaccggataaccgtatagagtcggaaggtgggttcattgagacctggaaccctaacaacaagccattccagtgtgccggtgttgccctctctcgctgcacccttaaccgcaatgcccttcgtagaccttcctacaccaacggtccccaggaaatctacatacaacaaggtaatggtatttttggcatgatattcccgggttgtcctagcacttatcaagagccgcaagaatctcagcaacgaggacgaagccagaggcnccaag

SEQ ID NO: 5764 - DNA, 397 bp, Glycine max
  Clone ID: LIB3029-008-Q1-B1-G11
gttcaatatcctagtataccttaataaataatttaagatactatgatgagagcacggttcccattactgttgctgggacttgttttcctggcttcagtttctgtctcatttggcattgcttactgggaaaaagagaaccccaaacacaacaagtgtctccagagttgcaatagcgagagagactcgtacaggaaccaagcatgccacgctcgttgcaacctccttaaggtggagaaagaagaatgtgaagaaggtgaaattccacgaccacgaccacgaccacaacacccggagagggaacctcagcaacccggtgagaatgacgaagacgaagatgagcaaccacgtccaatcccattcccacgcccacaacctcgtcaagaagatgagcacgagc

SEQ ID NO: 5765 - DNA, 400 bp, Glycine max
  Clone ID: LIB3029-008-Q1-B1-G2
ttccggtttctctctcgctctttccgttttgacttaccatggcggaagaattatcaatagcgattccgcaatcgcaagcaagcaccacgaagaaacgcgcttcaaagaacgaaaagctgtgcctcgaggactaccttcacctcgttcactctcgccaaacgcttcacctcaccataaatcaactcaatcaggtcatccgcattcacggcttcaagaaaatccaccacgctcctaagaaagtgctggtgcaagcggtggagtcgctggaactggtggatctgccgcggtcaacggtgagcgagagcgtatcggcgttcgcggcggtggtgctggaggatgtggttgcggatctcggtgagctcagctggcaggagtgctgcgtgatctccgtcgagaagat

SEQ ID NO: 5766 - DNA, 293 bp, Glycine max
  Clone ID: LIB3029-008-Q1-B1-G4
cgctcctcacatatcaataacaagattcgcacagcacttgggaaaggtaagaaagttgtttttcttaccagagttgatccttttccactagcggtactggctgttctttttggcgttaagaggtggattctgagttctaacgccagcaaccctatgctgacgcgacttcttgagaactgtaagagtctcaatcatctggttgaagagtgtccttttgcaattgggacgcactatgttatattttattcactggagtagagcgcattactatgtgcaccgcttgtgttttaagt

SEQ ID NO: 5767 - DNA, 398 bp, Glycine max
  Clone ID: LIB3029-008-Q1-B1-G8
cggttgcagagatgagtggatgaattaattgatgaatgaaattcaaatactaattgttgctatcacaattcacaagagattggattttggaatggaaagggtgttgtcagtagatgagatatcggagcaatactgggtggctgcatcatcttcttcatcatcatcatcatcatcgttcaagtcaaagatgaaccggagcgaatccgaatgggcctttcagcagttcctacagcaggaagctgcttcttcttcatctaattctgatcatgatgatgatcatcatcatgctaaactcaaaaaggaatccaacaccaacatccctgttactctacatgttgattcccaagactaccatgctattcttaagaccaagcttaatctcgcatgcgctgctgttg

SEQ ID NO: 5768 - DNA, 391 bp, Glycine max
  Clone ID: LIB3029-008-Q1-B1-G9
acaaaacaaaaagtttacgttacaaatcgcataataaccgtcctaagtttattgagagaattttgcaagtgtgagaaacatggcatctcgtcaaaacaacaagcaagagcttgatgaaagagcaaggcaaggagagactgttgtcccgggtggaactggtggcaagagcctggaggctcagcaacaccttgctgaaggaaggagcaagggagggcaaacaaggaaggaacagctgggtacagaagggtaccaggaaatgggacgcaaaggacggttgagcactgtggacaaatcatgagaagaacgtgctcaagaggaaggcattggcatcgatgagtccaagttcaggactggtaataacaagaaccagaatcagaacgaagaccaggat

SEQ ID NO: 5769 - DNA, 418 bp, Glycine max
  Clone ID: LIB3029-008-Q1-B1-H1
gactctaaaggatccctcggggaattccaattccacattttcaagaaataaggaggcaaaaatgttcatatatgaattggaattatttgttttcttattacgcctatcctgaagccaaaggaaatgagatcggaattcctcggggaattccaattccacattttcaagaaataaggaggcaaaaatgttcatatatgaattggaattatttgttttcttattaggcctatcctgaagccaaaggaaatgagatcggaattcctcggggaattccaattccacattttcaagaaataaggaggcaaaaatgttcatatatgaattggaattatttgttttcttattaggcctatcctgaagccaaaggaaatgagatctgaattcctcgggggtatcgagctcgaattctctatagtga

SEQ ID NO: 5770 - DNA, 395 bp, Glycine max
  unsure (1)..(395): unsure at all n locations
  Clone ID: LIB3029-008-Q1-B1-H10
aaacaaaatccccatctaatgagattgattcgagaccatcaagctgacttccttcgcctgataaatgaacctgcagaaggtgctgaagggaacatattggggcagatggcttctgcgatgccacaagcagtaaccgtcactcctgaggagcggcaggcaattgaacgtcttgaagcaatgggttttgatcgtgcaatcgtattggaggtgtacttcgcttgtaacaaaaatgaggaattggctgccaactaccttttggatcacatgcatgagttcgaggaacaatagatctcctttcgaatttgccaaattanttcgtgtcatcttttttctcgatgggtctttgttacatactatgtttaatgaggtaatgcttttgataatgtcaaatctca

SEQ ID NO: 5771 - DNA, 365 bp, Glycine max
  Clone ID: LIB3029-008-Q1-B1-H12
agggagagaatttcctgcagaagaagaatcgttggtaaccaacgcgctggggaagcacgtggaatacagtttcggttcgtcacctctgtggcacagcactataaataatcctcaagtttctacactttacctctcccaggaggaacagcgcagaacctaaccctcacgaaagcccttttcgattccgataactctcgttgttccgaaaccctaaccctaaccgggttttttcgtttgtttggattgaattggcatcggagggaggcgatcgattggaaattggtagtagtagtttagcgttgaagaacgatgtctgctgctgtgtgccgaagcaagagatctttcttccaagagcttcctccctt

SEQ ID NO: 5772 - DNA, 329 bp, Glycine max
  Clone ID: LIB3029-008-Q1-B1-H4
gtgagaacaccattgaattttgattctagtaaacagagcttttgtcaattttctattgaccttctcggtggaggaattttagtggacaaaactggagattggatcacacttatacaaaattctccaattagtaacttgttgagagttgctgcttggaagaaaggctgtttaatggttaagattgtgatgtctgggaatgcagcagtcaaaaggagtgattgggcctcattggtacaagtgtttttaacaaacagcaacagtacagagcattttgatgcatgtaagtggacaaaatcggaaccacattcctgggaattgatcttcccaat

SEQ ID NO: 5773 - DNA, 395 bp, Glycine max
  Clone ID: LIB3029-008-Q1-B1-H5
ttggcatgatattcccgggttgtcctagcacttatcaagagccgcaagaatctcagcaacgaggacgaagccagaggccccaagaccgtcaccaaaaggtacatcgcttcagagagggtgatttgatcgcagtgcctactggtgttgcatggtggatgtacaacaatgaagacactcctgttgttgccgtttctattattgacaccaacagcttggagaaccagctcgaccagatgcctaggagattctatcttgctgggaaccaagagcaagagtttctaaaatatcagcagcagcagcaaggaggttcccaaagccagaaaggaaagcaacaagaagaagaaaacgaaggaagcaacatattgagtggcttcgcccctgaattcttgaaagaa

SEQ ID NO: 5774 - DNA, 391 bp, Glycine max
  Clone ID: LIB3029-008-Q1-B1-H6
cataagtttcttatcgatggcttccctagaagccaggagaaccgtatagcttttgaacaaattattggagctgaaccgcatatggtacttttctttgattgtcctgaagaagaaatggtgaaacgtgtgctgagtcgtaatcagggtcgaattgatgacaacataaatacaatcaagaaccgtcttcaagtatttgagtcattaaatcttcccgtgattgactattatgctaagaaagggaaactttacagggtaactctatttagtttcattaagtcttttttaggtttgacttgaatgaagattggtctccggattcacttgtatgcttgttatactttatatatagatgtgatggtatatgcaatggaaaatatttgaaaaaaaaaca

SEQ ID NO: 5775 - DNA, 377 bp, Glycine max
  Clone ID: LIB3029-008-Q1-B1-H7
aaaagtcatcattttgggcgctctttttctatggagtgctttcacaaagtgtggtaacctcgattggaccatcacgcttttttctctttccactctaccaaacacactcatcgtgggcgtccctcttctgacggccatgtatggagactcatcaggtagcctgatgagtcaaatctttgtcatgcagggcgtcgtgtggttcactctaatgttgttcttgtacgaatacagaggcgccaagagcctaatttcgaaccaattccccgagaatggaggctccatcgcctcgtttactgttgattctgatgttaactctctcaacggtaacgagccgctgcaggccgacctggaaatgaaggaaaatggagaacttcatg

SEQ ID NO: 5776 - DNA, 399 bp, Glycine max
  Clone ID: LIB3029-008-Q1-B1-H8
gtcgtagcaggcgcaggatcggttaaatcgtctgcgggtacataaactgcttgaatagaagttatggacccctctttggtagaagtgattctttcttgtaaagaacccatttcagtactaagagtgggttgataacccacagcagaaggcattcgacccaataaggcagatacttcagatcctgcttggacgaagcgaaagatattgtcgataaatagaagtacatcttgttcattgacatctcgaaaatattccgccatagtcagggcagttaaaccaactctcatacgagctccgggcggttcattcatttgaccatatactagagctacttttgattctgcaatattttgttcattaattactccagattctttcatttccatataaagatcattt

SEQ ID NO: 5777 - DNA, 399 bp, Glycine max
  unsure (1)..(399): unsure at all n locations
  Clone ID: LIB3029-008-Q1-B1-H9
agaagaaccacgtgaaagaggatgcgagacaagaaacggggttgaggaaaatatctgcaccttgaagcttcacgagaacattgctcgcccttcacgcgctgacttctacaaccctaaagctggtcgcattagtaccctcaacagcctcaccctcccagccctccgccaattccaactcagtgcccaatatgttgtcctctacaagaatggaatttactctccacattggaatctgaatgcaaacagtgtgatctatgtgactcgaggacaaggaaaggttagagttgtgaactgccaagggaatgcagtgttcgacggtgagcttangaggggacaattgctggtggtaccacagaacttcgtggtggcggagcaagccggagaacaaggattcgaata

SEQ ID NO: 5778 - DNA, 385 bp, Glycine max
  Clone ID: LIB3029-009-Q1-B1-A10
cacaactacaagaaagaacttccttataaccaaaaccaacaacaactatggcaagttatcagaagcactacgatgatcagggtcgcaaggtcgacgagtatggcaatgttgagaggcaaactgacgaatatggcaacccggttcatgccactagtgtcacttatgtagccaccaaaagtgttggtggctacagtgatgacgctaataagcaacatgatattactggtgtctatcccgagaaagacaccggtagacatcattttggtcgtggttacgacggtgacactaacaagcaacatgatgctactggtgtttatcccggactagacattggtacagatcatgggactaccggtgtttatggcctaaacaccgacagacatca

SEQ ID NO: 5779 - DNA, 384 bp, Glycine max
  Clone ID: LIB3029-009-Q1-B1-A12
ttgtgaagtagaaatcggtgcaagaaattctccactttatctaaaaaaattcggtgagtttgtgaagacaaaaaatcactagctactcaaaaatggccacagtaggaaggaacgttgcagctcctttgctgtttcttaacttgatcatgtattttattgttcttggctttgctagttggtgcctcaacaggttcatcaatggccaaacttaccaccctagttttggtggaaatggtgcaaccatgtttttcttaaccttctccatactagcagctgttctgggcatcgtgtccaaacttttgggtgggaatcacatgaggacatggaggagtgacagtttagcatctgcaggagccacatcaatggttgcttgggcagtcacag

SEQ ID NO: 5780 - DNA, 266 bp, Glycine max
  Clone ID: LIB3029-009-Q1-B1-A2
aacccgaaattcggtccaaggaccgacctacctacctaccagccaagcccaaaaatggaggcaaaccaaggccatgcccccaggtgcttggaacgtgtttcatccttcctcggggctctaaccctatccgcggctcacggaagcaccacggttcaagacatcgcgagaaagttgaaactcggggacaacgagcttctgcgcacggagaagaagttcaacgttttcatggagaaatacgggaggagctactccacagaggaggagta

SEQ ID NO: 5781 - DNA, 140 bp, Glycine max
  Clone ID: LIB3029-009-Q1-B1-A4
gccagattgagacaaagaatagattctcaatacaatgaggttcaggctcagatggaaacaaatttgtttaaattgtctcttgatgatgttgaaactcctaaaggttccatgttggatctgaaaatttctcaatctaaaat

SEQ ID NO: 5782 - DNA, 366 bp, Glycine max
  Clone ID: LIB3029-009-Q1-B1-A6
agaagatgggtttgaagaacaacatggtggtgctaaaagtgtgtttggtgctacttttccttgtggggggtactactagtgccaacttgaggctgagtaagcttggcctgctcatgaaaagtgatcatcatcaacactcaaatgatgatgagtcttcaaaaccatgctgtgatcaatgcgcatgcacaaagtcaaaccctcctcaatgccgctgttcaaatatgaggctgaattcgtgcaatcaagcttgcaaaccttgaatttcccaataaccttacccggaaaatggttttgggttgacaaaaaccgattccgccaagaaacttgcaaacccaattaagagtaccagggaaactactaatggac

SEQ ID NO: 5783 - DNA, 391 bp, Glycine max
  unsure (1)..(391): unsure at all n locations
  Clone ID: LIB3029-009-Q1-B1-A7
taccttaataaataatttaagatactatgatgagagcacggttcccattactgttgctgggacttgttttcccggcttcagtttctgtcccatttggcattgcttactgggaaaaagagaacccaagcacaacaagtgtcctcagagtttcanttacgagagagactcgttcaggaaccaagcatgccacgctcgttgcaacctccttaaggtggagaaggaagaatgtgaagaacgtgaaattccacgacgacgaccacgaccacaacacccggagagggaacctcagcaacccggtgagaaggaggaagacgaagatgaacaaccacgtccaatcccattcccacgcccacaacctcgtcaagaagaagagcacgagcatagagaggaa

SEQ ID NO: 5784 - DNA, 313 bp, Glycine max
  Clone ID: LIB3029-009-Q1-B1-A8
gttgataatgttaacatgggtttgggactaatggagacttatggaaaaacacacactgatactaaaatctctctctcaaattggcacaacccggcaccttgggtggcttcaagttcaacacttgggggtcctctagctgaagttctaaggtcaagcacagtcactgccacggacaatgaagcaacctccaacgcaacctcatcacaagcaacaactaacatctgaattcaaaaaccctccgggaacaattgggtcaaccccaatccgggttgtgcaaaaaacccctaattcaatggccgaaaacaattacaat

SEQ ID NO: 5785 - DNA, 381 bp, Glycine max
  Clone ID: LIB3029-009-Q1-B1-A9
aactaacaataattccttcacttgcagaacttagttctctgttgcatcatcagcatcttcattagtgttagccctaaacttcaccttcaaccatgaccacagtgccaccacacagtgtccaagtgcacacaacaacacaccgctacgaagccggcgtcgtcccgccggctcgttttgaggcgccgcgttacgaagccggcatcaaggcgccctcttccatttaccattccgagagaggtccgacgacctctcaggttctcgcagttgtcgccggccttccggtcggcggcatcctcctgctcatggcaggactgaccctgcctggaactctcaccgggctggtggtggcaacaccgctcttcatcatcttcagcccggtgg

SEQ ID NO: 5786 - DNA, 268 bp, Glycine max
  Clone ID: LIB3029-009-Q1-B1-B1
aaagaggggaaatcggccaaattaaaattaccttccggggaagtccgtttgatatccaaaaactgctcggcaacaatcggacaagtgggaaatgttggagtaaaccagaaaaatttaggtaaagcccgaattaaatgttggctaagtaagcgtcctgtagtaagaggagtagttatgaaacccgtagaccatccccatgggggtggtgaagggaggggcccaattggtagaaaaaaacccgcaaccccttggggtttcctgcactttg

SEQ ID NO: 5787 - DNA, 362 bp, Glycine max
  Clone ID: LIB3029-009-Q1-B1-B10
attatttccaccatctcaacagtgggtggcttcggtttctcatccttggccagagtggatccaactcatgaagtgcttgttcagcaaggggatactttgtcatgaggaggaaaaaatgttccgcaatgctggagatttcttagataaaggaggctatttcaacaaataatgcatgctgggaaattggagaatcacccatcaagatatgaataaactgggaacctaaaatttcttcggtgcttggtagaacacagagccaaaagctaagtcggttacaagagtctcactattaatattatgagcacagtgagcaaccgtctgtcaaaagttgataactggcaaagaatcagtttcagcccctg

SEQ ID NO: 5788 - DNA, 385 bp, Glycine max
  Clone ID: LIB3029-009-Q1-B1-B11
aaaacagtaaagctaacttcaacacctttaattttctaaaagtaattcagcggctgaataccaagcggagaagatgagtcaggagcagccacggcgtcccaaaggccaaaaccccatcaaatacggcgacgtttttgtcgtctccggcgaccttgcacagaagcccgtcgcaccggaagatgctgccatgatgcaaagcgcggaaactcgagtgctcggacaaacccaacccggcggagcagcttccgtcatgcaatctgccgccaccaggaatgaacaggctggccttgtcggtcaccgggacgttcacgacgttacgggcgaccgtggcgtcacagtcacagaaactaaagtccctggaagacgcattataaccgaggctgtt

SEQ ID NO: 5789 - DNA, 383 bp, Glycine max
  Clone ID: LIB3029-009-Q1-B1-B12
aaaacagtaaagctaacttcaacacctttaattttctaaaagtaattcagcggctgaataccaagcggagaagatgagtcaggagcagccacggcgtcccaaaggccaaaaccccatcaaatacggcgacgtttttgtcgtctccggcgaccttgcacagaagcccgtcgcaccggaagatgctgccatgatgcaaagcgcggaaactcgagtgctcggacaaacccaacccggcggagcagcttccgtcatgcaatctgccgccaccaggaatgatcatgctggccctgtcggtcaacgggacgtcaccgacgttaccggcgaccgtggcgtcacagtcacagaaactaaagtctctggaagacgcattataaccgaggctg

SEQ ID NO: 5790 - DNA, 132 bp, Glycine max
  Clone ID: LIB3029-009-Q1-B1-B2
cggggaattccaattccacattttcaagagataaggaggcacaacttgttcacatatgaattggaattatttgttttcttattaggcctatcctgaagccaaaggaaatgagatcggtattcctcggggaat

SEQ ID NO: 5791 - DNA, 53 bp, Glycine max
  Clone ID: LIB3029-009-Q1-B1-B3
cggaggggacgaagactcttgccctcgtggtggaggatattgatgcgaccgat

SEQ ID NO: 5792 - DNA, 97 bp, Glycine max
  Clone ID: LIB3029-009-Q1-B1-B4
ccaaccccggttcaaaaaccctaaccctccgccttcaaaaaaatggctgatcttccccttgcaaggaattcaaggtccccttccccgtggaaagctc

SEQ ID NO: 5793 - DNA, 201 bp, Glycine max
  Clone ID: LIB3029-009-Q1-B1-B6
cagataactacaataggagcaagtttcctgggcaaagtggctaagggacaattgttcaaaggaatgttaccacatggaacaatagttgcagttaaaaagtcaaaagagattgaaaggaaccagataaagacttttgtcaatgaagtagtcattttatctcagatcaaccacaggaacattgtaaaactattaagttgttgt

SEQ ID NO: 5794 - DNA, 168 bp, Glycine max
  Clone ID: LIB3029-009-Q1-B1-B7
tctctctctccctctcatcttctggggacctcaaaatatagtaggtaccacaacacaacaccatattatgggttccaaagtcaggaccctggttttgctctcattgttttgcttagctctatttgtgtccttgcaccaagcaagggcagcaaagtcacataataatga

SEQ ID NO: 5795 - DNA, 297 bp, Glycine max
  Clone ID: LIB3029-009-Q1-B1-B8
ctcgagccgttcgtttgttgttcaatctaacaaacttctctatatcgtttactttttcaacacaccttacacacttctttatttgagcctttcatataaatatcatggcttcgagggtggtttcggttttggtgatagcgatgatgttgtttgccatgaactgtaactgcactagtgttggccacatgccttcaaccaaagaggaaggtcacaattttcaggaggctaaagccagaacaccacaaactgcaaccaaggccatggaacctggtaaaaatgggaaaaaacccccaaatt

SEQ ID NO: 5796 - DNA, 364 bp, Glycine max
  Clone ID: LIB3029-006-Q1-B1-H3
tccctttctcacagcaatggccgccgcagcacgccctctcgtcaccgtgcaggccctcgacggtgacatggcaaccgatgcctccgccaccgttcccatccctgacgtcatgaaggcctctatccgccccgacatcgtcaatttcgtacactcgaacatctccaagaacagccgccagccatacgccgtcagtcgtcgcgctggtcaccagacctccgccgaatcctggggtaccggccgagccgtctcccgtatcccccgtgttcccggcggcggaacccaccgcgccggccaaggagcctttggaaacatgtgccgcggcggacgcatgttcgccccgaccaagatctggcgccgctggcat

SEQ ID NO: 5797 - DNA, 166 bp, Glycine max
  Clone ID: LIB3029-004-Q1-B1-G3
aaacaaccttctttctttttccgtgaacctttctttcaaggtcctaacttgattagtgtgcaatgtccaaatcaaaagggtaatttcaaaattgcaagggcaaagcatgatgtttaagggtggttccttccctgcaaaggactaccatgatcctcctccagcaccg

SEQ ID NO: 5798 - DNA, 279 bp, Glycine max
  Clone ID: LIB3029-004-Q1-B1-G6
caatatcctagtataccttaataaataatttaagatactatgatgagagcacggttcccattactgttgctgggacttgttttcctggcttcagtttctgtctcatttggcattgcttactgggaaaaagagaaccccaaacacaacaagtgtctccagagttgcaatagcgagagagactcgtacaggaaccaagcatgccacgctcgttgcaacctccttaagggtggagaaagaagaatgtgaagaaagtgaaatttcacgaccacgaccaacgac

SEQ ID NO: 5799 - DNA, 405 bp, Glycine max
  Clone ID: LIB3029-004-Q1-B1-G7
cacttagatgccaacaacgacagcaagatcttcgccgatgagctcaacagcgcagtccaaacgacgcttggatctgtcgtcttgccggaggagcttcgctgtgtcatggaccacctcgaaattgaccgcgacggcctcatcaacctcttgccaccgtgagtgtttgtgaagttctagatctcatgggttgcttggcgttgttgtttgggtggaggtgcgcacaacaatgcggtgttctcatccaaggcatttttctgttactggagaagcaacaatgtttgaaagggataacttttaatataccataatgaaataaaattaaaatttaatggccaaaaaatgatattaactaaaagaaagaaagagccataaaatactttgattaaataaaaccgtgaagagcta

SEQ ID NO: 5800 - DNA, 350 bp, Glycine max
  unsure (1)..(350): unsure at all n locations
  Clone ID: LIB3029-004-Q1-B1-G9
atccatgctcttcacaaagaattggatgaagtttcatgtcctatctgcatggaccatccacataatgctgttctcctcctttgcagctctcatgagaagggctgcagatcttacatttgtgatacaagttatagacattcaaattgcctggaccgttttaaaaaaatgagggacaattttaaggagaaccaaaatttacccagttctttagtaaacacaaacaattctggatcaagacagggtgatgcccaagatccaaataggcttttagaccaacatgatgaaggaattttagaaactgctgattctgagaacttgcaggacanggctgtgattgaggatttaaatgc

SEQ ID NO: 5801 - DNA, 411 bp, Glycine max
  Clone ID: LIB3029-004-Q1-B1-H1
caatggtccctaaacactcatcagtcaacaacatggccaagctagttttttccctttgttttctgcttttcagtggctgctgcttcgctttcagttccagagagcagcctcagcaaaacgagtgccagatccaaaaactcaatgccctcaaaccggataaccgtatagagtcagaaggagggctcattgagacatggaaccctaacaacaagccattccagtgtgccggtgttgccctctctcgctgcaccctcaaccgcaacgcccttcgtagaccttcctacaccaacggtccccaggaaatctacatccaacaaggtaagggtatttttggcatgatatacccgggttgtcctagcacatttgaagagcctcaacaacctcaacaaagaggacaaagcagcagaccac

SEQ ID NO: 5802 - DNA, 336 bp, Glycine max
  Clone ID: LIB3029-004-Q1-B1-H11
gcgggaaaagcataaataaaagaagaaattccacaagggtacatagttactatacccgttattctacacttaacaaagggcatctaagcctttgtttcttttattcattcttatttactgctaccagcactagctagagcccaaaaggacaaaagtgtggtagcacatgcaaaaagggctctctaagccacagctctcctctgagactcctgaggtggaaccaggaagctgaaagggttgttgttcttcacctgcctggcctgctggctctttaggttaaaagtgtgctgaatcacttcctctggcaatgcgttcaacaatgagtttgcccctgca

SEQ ID NO: 5803 - DNA, 348 bp, Glycine max
  Clone ID: LIB3029-004-Q1-B1-H12
gttttatgggggccatgatatcgaatttggcatttgtattccgtaatatcttttcgaaaaagggcatgaagggaaagtctgttagtggaatgaattactacgcatgtttatctattttatctcttgctattctcacacccttcgcaattgctgtggaaggaccgcaaatgtgggctgctggatggcaaacagccatgtctcaaattggaccccaattcatatggtggctagctgctcaaagtgtattctatcatctatacaatcaagtgtcatacatgtctctggatcagatctctcctttgacgtttagcattggaaacaccatgaaacgtatatctgtcattgtgt

SEQ ID NO: 5804 - DNA, 423 bp, Glycine max
  Clone ID: LIB3029-004-Q1-B1-H2
caagaaagaacttccttataaccaaaaccaacaacaactatggcaagttatcagaagcactaacatgattaaggtcccaagggccaccaattaggcaatgtttaaaaggcaactgaacaataatggaaccccggtcaagccaacaatgtcacttatgtaaccaccaaaaatgttggtggctacaatgatgacgctaataagcaacatgatattactggtgtctatcccgagaaagacaccggtagacatcattttggtcgtggttacgacggtgacactaacaagcaacatgatgctactggtgtttatcccggaatagacattggtagagatcatgggactaccggtgtttatggcctaaacaccgacagacatcatggaacttctggggtgaatcccgggatagacacccataaccaacaa

SEQ ID NO: 5805 - DNA, 414 bp, Glycine max
  Clone ID: LIB3029-004-Q1-B1-H3
ggattttgtggaggatgtaagaaaacacaaacaacacaaaattcattgcacagtgttattttcagtatcagcatcatggctccaattgcagtgggagatgtcattccagacggcattttggcttacttggatgaagaaaacaaaccccaaactgtctctattcactctctcgccgccggcaagaaagtcatcatctttggggttcccggtgccttcactcctacatgcagcttgaagcacgtgcctggcttcattgagagagcagaagagctgaaaggaaagggtgtggacgaaataatctgtatcagcgtgaatgatccctttgtgatgaactcatgggccaaaacgttcccagagaacaagcatgttaagttccttgctgatggtgcagccaaatacaccaatgccctcggt

SEQ ID NO: 5806 - DNA, 405 bp, Glycine max
  Clone ID: LIB3029-004-Q1-B1-H5
tgattttccctcttctctttttctctctcgtgagtctcgtccctgaagcgaaattctagaatggcggaagaagctcctgcatctgaaacctccgtcacaatgcctcaaccggcggaagtcatcaccgtcgacggaaccctaacctcttccgagaatgacaagagcggaatctccgtcgatgccgccgcgcacggcggtgaaaagacggtgtccaacgctgaaccttccggtagcgatcctcagaagtctctggagttggcgaacgagctgatggaaaaaggaaacaaggcaattaaggagaacgattttggagaagcagctgataacttcagccgtgctctcgaaatcagagtggcacattatggtgaacttgctcctgagtgtgtgcacacattatacaaatat

SEQ ID NO: 5807 - DNA, 416 bp, Glycine max
  Clone ID: LIB3029-004-Q1-B1-H6
tcaaaatcggaaccacattcctgggaattgatcttcccaatagaggtatgtggtcctaataatggttttgaaatgtggagttctgagtgggcaaatcaaacttcatggcatttgagtttccttattgacaatcccaaacagtctacagtttttgatattctcttgggaatttctcaagattttgagattgctggtaatactcttatgccagctttttctgttccacaggctactgccagatcttctgaaaatgcggaatcctctgcatgatctggaatttgtgttttcttttgcttgttcgtttgtttaattcaataaaggaaattaggcatgaccctcttgttgagtatgctctgcctatttgaaaatttccacacctcttttaattatcgtaatgatgtgtgaagtgtgtgtta

SEQ ID NO: 5808 - DNA, 411 bp, Glycine max
  Clone ID: LIB3029-004-Q1-B1-H7
atacacacacacacacacactaagaataatggcttctatcctccactactttttagccctctctctttctttctctttccttttcttcttatccgactccgtccccattccccaacaccacactaaccctacaaaacctataaaccttctggttctacccgttcaaaatgatgcttccacagggctccattgggccaacctccaaaaaaggacccctctaatgcaagtaccagtcctggtggacctcaatggaaaccacttgtgggttaactgtgagcaacactactcatccaaaacataccaagcacccttctgccactccacccaatgctccagagccaacactcaccaatgcctcagttgcccagcggcatcaaggccagggtgccacaaaaacacgtgtggcctcat

SEQ ID NO: 5809 - DNA, 280 bp, Glycine max
  Clone ID: LIB3029-004-Q1-B1-H8
atacacacacacagacatacttcgaaaagtggcgtctccccgaaggactttttagaactcacgcgttcgttctctttccttttcgatcttagccgactccgtccccattcgccaacatgacactaagcctacataacctatacaccttctggttctagccgttcaagatgatgcttcgacagggctccattgggccaacctccaaaagaggactcctctaatgcaagtagcagtcctgggggagctcaatggaaacgacttgtgggttaactgtgagcag

SEQ ID NO: 5810 - DNA, 331 bp, Glycine max
  Clone ID: LIB3029-004-Q1-B1-H9
aatctgcaaagtttgggtgaacaactccaacggcatttaattattcattcgcagattttcgtcgttcgaaccctagaatgccgaagcgtgatagaaccaagaaaaccgcgaaagcaaccgaatcagtacccgaacctcaacctcaactgcagccaccacaattcatcgacctcgaaatccaagcgatggagcgacaaattggcgcgatcagggcggttcgcgacgtggagatcgagcacctgctcacggagctgcggttcctgcgctcgcggttcagcagcgaagagctccggaagcccgtgctgcagggtttcgaagaaacctaacgaat

SEQ ID NO: 5811 - DNA, 191 bp, Glycine max
  Clone ID: LIB3029-005-Q1-B1-A10
aacgaactatacgtagcggatgcttattctgggcttatcaagattggacccaatggaggggctccaacccaatgctttaaagatatacaaccacaacaagagaatgtgaacactactcttcagtttctcgatggcttggatgtagacgtcaacactggaatcgtttatttcacccaagctagtgctaacta

SEQ ID NO: 5812 - DNA, 370 bp, Glycine max
  Clone ID: LIB3029-005-Q1-B1-A11
tgagctccaaggcggcttcagcggcagcgacgccacggcctccgacgaggacgacctctacagccgcctcaagaccctgcagcgccagcttgagttcatcgacatccaggaagagtacgtcaaggacgagcagaagaatctcaagcgcgagctcctccgcgcgcaggaggaggtcaagcggatccagtcggtgccgctcgtcatcggccagttcatggaaatggtcgaccagaacaatggcatcgttggatccaccaccggatccaactactacgtcagaatcctcagcaccatcaaccgcgagcttctcaagccctccgcatccgtcgcgctccaccggcactccaacgcccctcgtcgacgttcttcc

SEQ ID NO: 5813 - DNA, 332 bp, Glycine max
  Clone ID: LIB3029-005-Q1-B1-A12
ggcaattttagagcaagtgttgatttgcagcgcactcatcgtattaaaggaatgattaaaatggtggccacagttggtattcctgagaatacaggtatagcattggcctgtgctatgaatagttcttttagggggcgtgccagttctgatatttacaccatttgctctcaagactgtgaattatggaatcctgcttgcacaaaagcaatgactatgtcatttaatccaaatccgtgttctgatgcatggagtttggaatttctgaagcgtaccggatttcattgtgatatcatttgtgtcactggatggactgccactccaatgcaggatgt

SEQ ID NO: 5814 - DNA, 371 bp, Glycine max
  unsure (1)..(371): unsure at all n locations
  Clone ID: LIB3029-005-Q1-B1-A2
cccaaaaaaaacagagtgggtagggtgacggaagcagaaaccaaacacaactcaatcgcgaaatgtcgaatttgccccaatcgctgtcgatgggcgcggccttcggcggaggcggcgctccgccgcagccatcgagtgtcggcggcggagcacagggttccggtgctggcaaggatcggaagatggcgtcggcggagcagctcgtgctcgaactcagcaaccctgagctccgtgaaaacgcgcttctcgaactctccaagaagagggagctatttcaagatcttgctccattgctatggaattcttttggtacaattgctgcacttttgcangaaatagtttcaatataccctgttcttttcacaacaaat

SEQ ID NO: 5815 - DNA, 387 bp, Glycine max
  Clone ID: LIB3029-005-Q1-B1-A3
catttttgtggggaaggattctgtggaaatgtctgctgtagtttacaaggattgggtttttacagatcaagcattgcctgctgatcttataaaaagaggaatggcaattgaggatccatcgtgccctcatggcattcgccttgtgatagaggactacccttatgctgttgatggacttgagatatgggatgctatcaagacatgggtccatgaatacgttttcttgtactacaaatcagatgacacacttagagaagatcctgaactccaagcctgctggaaagaactcgtagaggtgggtcatggagacaagaaaaatgagccatggtggcctaagatgcaaactcgtgaagagctagttgaagcttgcgctatcatcatatggac

SEQ ID NO: 5816 - DNA, 343 bp, Glycine max
  Clone ID: LIB3029-005-Q1-B1-A4
attcaattattctgatacagcacctccaccgttactaccatgggccgtcactccagtaaccattctccctcctcacgccgccaccgcagtagtatctctccgccgccgcgagacaagcacgagtattccggccgcagtacagccaaaccggttcggcccggttcgccggattctcccccttgttcgcgctctccgtctccgcgaaccaagcggttgaagaaagctcaatccgaacgcgagcgtgagcctcgcgagagcgagaggaaccatggcggtagcagagggagaggttcggagaggggcgccggtgagcggagggagaagaagagaacggagaatgatg

SEQ ID NO: 5817 - DNA, 217 bp, Glycine max
  Clone ID: LIB3029-005-Q1-B1-A5
aatccccaatacccatttcggtaaataatataatcgcaatccttcttcactcgcttcgatggcgacagggttactgaagagggcggcgcagaggctcccctcctcgccggggttcaagctggccctcctccgggcccaagccttcgaaggccaaggccaacaagttgaacccaagggccgccggaacccgaaccttaaaaactttcaaatctaacgc

SEQ ID NO: 5818 - DNA, 336 bp, Glycine max
  Clone ID: LIB3029-005-Q1-B1-A6
aaaattcttccaccaagttatgggtttccttgtgttgcttcttttctccctcttaggtctctcttctagttccagcatatcaactcatcgttccatattggaccttgacctaaccaagtttaccacacagaaacaggtgtcttcactgttccaactatggaagagtgagcatggacgtgtctaccataaccacgaagaagaggcaaagagacttgagattttcaagaataacttgaactatatcagggacatgaatgcaaacagaaaatcaccccattctcatcgtttaggattgaacaagtttgctgacatcactcctcaagagttcagcaaaaa

SEQ ID NO: 5819 - DNA, 354 bp, Glycine max
  Clone ID: LIB3029-005-Q1-B1-A9
gtttgtgttctctcctttcattaacgttgtgttgggtttgctagtgtacttggttttcattatggcgtcttcttcagcctctcgtgagggacactacagaggagttaggaagcgaccatggggacgctacgctgcagaaataagagatccgtggaagaagacacgtgtctggctgggcacattcgatactcccgaggaagccgccctcgcctacgacggcgccgcccgctccctccgcggcgccaaggccaagaccaacttccctccggcgccgcctctctgcctcgacctcaacgtcccttcctccgattaccgctgggcccacgttccccctcgcagcctcgtcctcagcga

SEQ ID NO: 5820 - DNA, 348 bp, Glycine max
  Clone ID: LIB3029-005-Q1-B1-B1
aattaagctttcaagagacaaactgttttgaaaaatgggatccaaggttgttgcatacgttgcccttctcctctccatcaacattcttttcatttccatggttagctccagcagccactacgatccacagccccaaccttctcacgtcactgctcttattacacgacctagttgtccggatctgagtgtttgcctcaatattttaggcgggtatctaggaaccgtggatgattgttgtgccctcatcggtggccttggtgacattgaagccactgtgtgcctttgcatccaactcagggccctcggaatattaaaccttaaccgtaatttgcagttaatattaaacgc

SEQ ID NO: 5821 - DNA, 360 bp, Glycine max
  Clone ID: LIB3029-005-Q1-B1-B10
gagaaacaaagaaaggaaataattgatctttgaaaatgcagggaggaaagaaagctggagagtccatcaaggaaacagctgcaaacattggtgcttctgccaaggctggcatggagaaaaccaaggccactgtccaggagaaggcagaaagaatgacggcacgtgatccgatgcaaaaggagttggcaacccagaagaaagaggcaaagatgagccaggcagagctggacaagcaggcggcgcgtcagcataacacggcggcgaagcaggctgccacggcagggcacatgggacaacccatggggacccatcagacgtcagctatgcccggtcatggaaccggacagcccacgggccatg

SEQ ID NO: 5822 - DNA, 382 bp, Glycine max
  Clone ID: LIB3029-005-Q1-B1-B11
aatttttgaagcgtaccggatttcactgtgatatcatttgtgtcactggatggactgccaccccaatgcaggatgttcaggttacaattgattggtttatttcctctcaggaatgtgttcccaggacttattgtgttttaaatccacaaaatccttttgtgttaaataggtggatggggaaactgactttcccccagggcacttcccgaaatgttaagagaatgcctctttctatagggggaggagctggtgcaaagaatgctattctcatgaatatgccaaatgctgttctttcaatgtggagatattttgttggagatctcgtctttgaagtttctaagatgacttctccctacattaaatgtacagtctctttcttcat

SEQ ID NO: 5823 - DNA, 369 bp, Glycine max
  Clone ID: LIB3029-005-Q1-B1-B12
caaaccttgctctatactacacagtacacacactagaagaataatggcttccatcctccactactttttagccctctctctttcttgctcctttcctttcctcctaaccgactcagttcaccccaaaaaaccaataaaccctggtggtccaaccgttcaaaatgatgggtccaaaagggtccaatgggccaaactccaaaaaagaacccctccaatgcaagttccaatcctggtggacctcaatggaaatcacttgtgggttaactgtgaacagcagtactcatccaaaacgtaccaagcaaccttctggcaatccacccaatgctctagagccaacacccaccaatgcctcagttgccccgcgggatc

SEQ ID NO: 5824 - DNA, 348 bp, Glycine max
  Clone ID: LIB3029-005-Q1-B1-B2
ctcttagagagaaaaaaaaatggctgatacaggtggaggagatgcagtgagaccagtggtaatatgtgataacaagtgtggctgcacacttccatgcactggtggttccacttgcaggtgcacaagtgctggcactgccacaggagggggtgatcacgtgacatgctcgtgcggagagcactgtggttgcaatccatgctcatgtcccaagattgcggctgctggaagtggttgcagatgtggcacagattgtgcatgtgcctcctgccgcacttagtatcacaccttaaggcttaaacttcacgttttattttatgtcttcaaatcttgaatacgttttctatatat

SEQ ID NO: 5825 - DNA, 385 bp, Glycine max
  Clone ID: LIB3029-005-Q1-B1-B3
cggccaacgctgtcgtttcaccgtcgccgttccgacctcagccctttctccggtcatccttctccggcgtctccgtcaagctcactccccaatccataacgctttcacgctccaagcccctcaccgtcttcgccgccaccaagaaggccgtcgccgtcctcaaggggacctccgccgtcgaaggcgtcgccactctcatccaagaagacgatggcccgacgacagtttctgttcgcatcactggccttactccggggcttcatggttttcacctacatgagtatggtgatacgacaaatgggtgtatttctacgggagcacattttaatcctaataaattgacacatggtgctcctgaggatgaagtccgtcatgcgggtgacct

SEQ ID NO: 5826 - DNA, 375 bp, Glycine max
  unsure (1)..(375): unsure at all n locations
  Clone ID: LIB3029-005-Q1-B1-B4
tacttttacaccccttcgcgaatcacaagatcaagaattacctccaactgagccacccataacaagattgtttactagttctgatgggcagtggttggcagctgtgaactgctttggggatatatatgtatttaacttggagatactaagccagcactggttcatttcaagattggatggcgcctctgttacagctggtggctttcctccccagaacgacaatgtactgatagttacaacttcctcaaatcaagtgtatgcatttgacatagaggccaagcagttgggagaatggtccacaagacacacacatgctcttcctangagataccttgaatttcctggtgaagttattgggctctcattccctccatc

SEQ ID NO: 5827 - DNA, 379 bp, Glycine max
  unsure (1)..(379): unsure at all n locations
  Clone ID: LIB3029-005-Q1-B1-B5
caagcttacaattctcctcatcgctcttctcttcatcgcccacacctgctgcgcctccaaatggcaacagcaccagcaagagagctgccgcgagcagctcaaggggatcaacctcaacccctgtgagcacatcatggagaagatccaagctggccgccgcggcgaggacggcagcgacgaagatcacattctcatcaggaccatgccgggaagaatcaactacatcaggaagaaggaaggaaaagaagaagaagaagaaggacacatgcagaagtgctgcagcgaaatgagcgagctgaaaagccccatatgccagtgcaaagcgctacagaagataatggataaccagagcgagcaactggangggaaggagaagaag

SEQ ID NO: 5828 - DNA, 377 bp, Glycine max
  Clone ID: LIB3029-005-Q1-B1-B6
caaaatgaccaagttcacaatcctcctcatctctcttctcttctgcatcgcccacacttgcagcgcctccaaatggcagcgacagcaagatagctgccgcaagcagctccaagggggtgacctctagccctgggaaaacccattcaggggaaaatttcaagggccggggaataccatgatgattatgaccacgacaatcacattctcaggagcatgcggggaaaaatcaactacataaggggggacgaaggggaagacgaagacgaagaagaagaaggagacatgcagaagtgctgcacagaaatgagcgagctgagaagccccaaatgccagtgcaaagcgctgcagaagataatggagaaacagagcgaggaact

SEQ ID NO: 5829 - DNA, 371 bp, Glycine max
  Clone ID: LIB3029-005-Q1-B1-B7
acgaaaacgagtctggtgatcaagtcgtcgctgttgagtttgacactttccggaactcttgggatccaccaaatccacacatcggaattaacgtcaattctatcagatccatcaaaacgacgtcttgggatttggccaacaataaagtagccaaggttctcattacctatgatgcctccaccagcctcttggttgcttctttggtctacccttcacagagaaccagcaatatcctctccgatgtggtcgatttgaagacttctcttcccgagtgggtgaggatagggttctctgctgccacgggactcgacatacctggggaatcgcatgacgtgctttcttggtcttttgcttccaatttgccacacgct

SEQ ID NO: 5830 - DNA, 389 bp, Glycine max
  unsure (1)..(389): unsure at all n locations
  Clone ID: LIB3029-005-Q1-B1-B8
gtatgatgaaattgtgaaggaagtctcttcctacttgaagaaggttggttacaacccagacaagattccatttgtgcccatctctggtttcgagggtgacaacatgattgagaggtccaccaaccttgactggtacaagggaccaactctccttgaggctcttgaccaaatcaatgagcccaagaggccctcagacaagccactcaggcttccattgcaggatgtctacaaaattggtggtattggtaccgtgccagtgggacgtgttgagactggtgtcgtgaagcccggtatggtggtgacttttggtcccactgggctgacaactgaggttaagtctgttgagatgcaccatgaggctctcacagaggctcttccangtgacaatg

SEQ ID NO: 5831 - DNA, 332 bp, Glycine max
  Clone ID: LIB3029-005-Q1-B1-B9
gggcaaatcaaacttcatggcatttgagtttccttattgacaatcccaaacagtctacagtttttgatattctcttgggaatttctcaagattttgaaattgctggtaatactcttatgccagctttttctgtcccacaggctactgccagatcttctgaaaatgcggaatcctctgcatgatctggaatttgtgttttctctcgcttgttcgtttgtttaattcaataaaggaaattaggcatgaccctcttgttgagtatgctctgcctatttgaaaatttccacacctcttttaattatcgtaatgatgtgtgaagtgtgtgttatttt

SEQ ID NO: 5832 - DNA, 339 bp, Glycine max
  Clone ID: LIB3029-005-Q1-B1-C1
ccaaattctcagcacacgcatttccgttctttgtccttgatgggtttagtgtttggaaagattagcgttgagacagcaaaatatgaagtgatcaaatccacaagcgagtacgaaattcgcaagtatgcaccctcagtagtggctgaagtcacatatgacccatcacagttcaaggggaacaaagatggtggctttatgattttggccaattacattggtgctgtggggaagccccagaacaccaagcctgaaaagattgccatgactgcaccggttataacaaaggacagtgttggtggggatggtgagacgattgctatgacggcccccgttgtgacg

SEQ ID NO: 5833 - DNA, 342 bp, Glycine max
  Clone ID: LIB3029-005-Q1-B1-C10
aaataaaatcaccatgtctatcatcccaaacttgttcggtggtagacgaagcaacgtcttcgacccattctctctggacgtatgggaccctttcgaggggtttcctttttccacaggtcacgtgccttcctctggtggggaaagcagtgccatagccaacactcgcgtggactggaaggagactccggcggctcacgtgttcaacgttgatcttcccgggttgaagaaggaggaagtgaaggttgaagttgaagatgggagggtgctgcagattagtggtgagaggaccaaagaacaagaacagaaagatgataggtggcaccgcgttgaaagaagcactgg

SEQ ID NO: 5834 - DNA, 393 bp, Glycine max
  Clone ID: LIB3029-005-Q1-B1-C11
cacaactactacaagtacttccttacaatcaaaaccaacaacaactatggcaagttatcaaaagcactacgatgatcagggtcgcaaggttgacgagtatggcaacgttgagaagcaaaccgacgaatacggcaaccctgttcatgctgctagtgtcacctatgtagccaccagaactgctgctggtggttacagtgatgacattaataagcaacatgataccaccaatgcctacggcgtagacactggtagacagcattctagtggtggctacgatggtgacactaataaacatcatggaactactggtggctataatgatgacaccaatagacatcatggaactaccggtgtctatggtatagacaccgataggcaacaacatgggactac

SEQ ID NO: 5835 - DNA, 363 bp, Glycine max
  unsure (1)..(363): unsure at all n locations
  Clone ID: LIB3029-005-Q1-B1-C12
atgacaattctttgaattctgatggaaatgctgctgatagaggggcaaaattagagaatgctgttttgtcatggtcaaagggcatctctaaggacacacgcaggggtggggctacagaaaaatccgatcagaatccaaatgctggtaaatttcctccattaaggagaagaaaacatctgtttgtcattgctgtggattgtgataccacttcaagccttcttgaaactattaaagccatctttgagtctgctggaaaggatanggcagagagcattgtaggtttcatattgtcaacatcattaacaatatcagagatacagtcatttctaatctcaagtggcttgagtcccattgattttgatg

SEQ ID NO: 5836 - DNA, 345 bp, Glycine max
  Clone ID: LIB3029-005-Q1-B1-C2
ctccatataaccaggtccatcaagctctggaacctcattttcaaggtatctgatatttcatgaaatgcagtaacaaattagtaactacttcgtacatattccagaggcaacatacaacacactaagtgctaacatggcataattaacccgtatcacaggttcaatctctcacattcgtatttctccttacggttttaaaatacaactgatgttaagttttttggtctctgtgaccatgttgcaataataagtagtacgtgatacattttctcattgtcatatagtaatttgtgtcgaataattttaaattttgctgtaattgcgcgtgtgtgcgtcatatcgtag

SEQ ID NO: 5837 - DNA, 346 bp, Glycine max
  unsure (1)..(346): unsure at all n locations
  Clone ID: LIB3029-005-Q1-B1-C3
cataaacccagcgatcaatcaaatagccacacagacacacanacaaacacaacttcacttttcacggtcccgccgccgaatcgcgtccgcgtttagttaaaaagttcttgttagattattgtttgttccactatgatgatgggttcgacggcgagggtgccgaagctgggttctttccgccacagcttcgcggagaggaaggagagactgctctcaatgaagggcggcatcggcggcggctactcccaaattgggatcccgctgccggagtccgacgaggaggatcactctccgacgcggaggcgctgctgctcctaccgcgccgtctcggacgggatcgtcggcg

SEQ ID NO: 5838 - DNA, 371 bp, Glycine max
  Clone ID: LIB3029-005-Q1-B1-C4
gctgtagtttacaaggattgggtttttacagatcaagcattgcctgctgatcttataaaaagaggaatggcaattgaggatccatcgtgccctcatggcattcgccttgtgatagaggactacccttatgctgttgatggacttgagatatgggatgctatcaagacatgggtccatgaatacgttttcttgtactacaaatcagatgacacacttagagaagatcctgaactccaagcctgctggaaagaactcgtagaggtgggtcatggagacaagaaaaatgagccatggtggcctaagatgcaaactcgtgaagagctagttgaagcttgcgctatcatcatatggactgcttcagcacttcatgc

SEQ ID NO: 5839 - DNA, 394 bp, Glycine max
  Clone ID: LIB3029-005-Q1-B1-C5
cacacaactactacaagtacttccttacaatcaaaaccaacaacaactatggcaagttatcaaaagcactacgatgatcagggtcgcaaggttgacgagtatggcaacgttgagaagcaaaccgacgaatacggcaaccctgttcatgctgctagtgtcacctatgtagccaccagaactgctgctggtggttacagtgatgacattaataagcaacatgataccaccaatgcctacggcgtagacactggtagacagcattctagtggtggctacgatggtgacactaataaacatcatggaactactggtggctataatgatgacaccaatagacatcatggaactaccggtgtctatggtatagacaccgataggcaacaacatgggacta

SEQ ID NO: 5840 - DNA, 195 bp, Glycine max
  Clone ID: LIB3029-005-Q1-B1-C6
tgcagaccgagctagctagctagcaagcaagcacagagatggaggcaaagcgaggccatgccctcatgtgcttggcacgtgtttcactcttcctctgcgctctaaccctatccgctgctcacggaagcaccacggttcaagacatcgcgagaaagttgaaactcggggacaacgagcttctgcgcacggggaaaa

SEQ ID NO: 5841 - DNA, 392 bp, Glycine max
  Clone ID: LIB3029-005-Q1-B1-C7
ggataaattcgtaaagtactatgaagatcctggttcaagacctatttttgagactgtggatgagatgctgcagtgggctggtctgtataatcttactaccaggactttgcgggatgaattggtggatgctgggttgtctacctcgttgatcaatgaacttgttactgtcatcacacgcattaattatggccagagtgtctccatgagtgggttgggtggtgtggtttctctagcaggatcaggtggaggattatggtccatcgaaggaggcaactggcaaatggctgctggactgattaatcagtcagatgtggcattacacctgcatgaagaaataaaatctgttgctgaccttggagattactacgaactcaactcaacaaaaggaaaca

SEQ ID NO: 5842 - DNA, 404 bp, Glycine max
  Clone ID: LIB3029-005-Q1-B1-C8
cggctcgagtgcaggtgttgaaatcgatgaactccctaagcaaattgatgatacacagtacccaaaaacattcttctataaagaagaccttcatccaggcaaaacaatgaaagtacaattcaccaagcgtccctatgcacaaccttatggtgtatatacatggttaacggatattaaagacatctcttcaaaactatatccttctttagaggtgtctttctatcttgctgggaaccaagagcaagagtttctaaaatatcagcaagagcaaggaggtcatcaaagccagaaaggaaagcatcagcaagaagaagaaacgaaggaggcagcatattgagtggcttcaccctggaattcttggaacatgcattcagcgtggacaagcagatagcgaaaaacctaca

SEQ ID NO: 5843 - DNA, 394 bp, Glycine max
  Clone ID: LIB3029-005-Q1-B1-D10
gtttggaaagaaagcgataaacccagttgccatgaatccatgatcccctttccttccttcttcctctaattttcttgtatgctaagacttcctcgtcattgattattattcgcatccaacgccgtcagcataatttgtgtattcccctttgaatgttgaaagaaacaaaaacccacagaacctgcgatttcaacacaattaggttttcccttcaatggccgctaattcccacagattgggttcttcctacggcggcgctgccccttaccgatcaagagatgggcttagcacccgtcccgttggtgcctcggaggagatccaattgcgaattgatcccctggacttggacgatgagatcaccggtcttcatcgccaagttagaaggttgaaacat

SEQ ID NO: 5844 - DNA, 385 bp, Glycine max
  Clone ID: LIB3029-005-Q1-B1-D11
ctcgtctttgaagtttctaagatgacttctccctacattaaatgtacagtctctttcttcatagcatttggaaatttggctgatgacaccatcaattttgaggcttttccccacaagctggtgcagtttggagagattcaggaaaaagttgtgttgaaattttcacaagaggaatttcttacagcttggtcaactcaggtgcgtcccgcaacgactctgttggctgatgggtgcccatatttgtatgctatggtgcatgatagttcagtgtctacaataccaggtgattttgtcattggtgttaagttgacaaccataaacaatatgtgtgcatatgggctcaatcctggtatttcaggttctcgtcttttgggcaccattcctc

SEQ ID NO: 5845 - DNA, 269 bp, Glycine max
  Clone ID: LIB3029-005-Q1-B1-D12
gttcactacgcatgctcgaaacgtcagccatttaagggataaggatgcagcacgttgctgtactgcttgatcgaccatagcttccacttggggaacgactttgcccgacagtactctcagtcacagcacacacagtcctcggcctccacctcaggaagtgcacttagtcaaagcaacgatgtcaagcatatcgctcatgatgcgattctgtgcgacccacaggtggattatggtcagatcatccctgtgaacccccatattgtggagat

SEQ ID NO: 5846 - DNA, 368 bp, Glycine max
  unsure (1)..(368): unsure at all n locations
  Clone ID: LIB3029-005-Q1-B1-D2
gatttagaaaaaagagatgatttgtttccacagattctaagagacgaggcagtggcaaggctttatgagcttgggaaggtgagtgatgctagcggttatttggagaggacattcttgagtcctgcatccatgagggcaatcaattttattcgtaaatggatggaggatgctggtttgagaacttgggtggaccaaatgggaaatgtacatggtcgcgttgatggtgctaatgcaaatgctgaagctttattgattggatctcacatggacactgttgttgatgctgggatgtttgatggatcactangaattgtctctgcaatatctgccttgaaggctatgcatgtcaatggaaagctacaaaagct

SEQ ID NO: 5847 - DNA, 393 bp, Glycine max
  Clone ID: LIB3029-005-Q1-B1-D4
ctcgagccgcgctcacagttatttgcaatagcatttttaatgagatgctcattagatatagctatgaaaaattactgcgccaggctagagctccaagcatgtttttacaatccttcaaaaattttgtttctttgtgtgtgtatggtgatgataacttaattagtgttcatgaatatgtcaagccttactttagtggttctaaattgaaaagctttctagctggtcataatatcaccattactgatggtattgacaaaactagtgcaactttgcaatttagaaagttagcagattgtgattttctcaagagaaactttaagcagatgtctaatgttttgtgggtggctcctgaagacaacgcgagtttatggtcacaacttcattatgtttcgt

SEQ ID NO: 5848 - DNA, 386 bp, Glycine max
  Clone ID: LIB3029-005-Q1-B1-D6
acatcgctgacatggcggtgccgccgtcggatggttcacggaaacgtcccaagctggatctcagggaccgcgataacgtagttcaaaattgcgacgaatccactggacacaaggtggtgaaaaaagaagccaaagtggaaatccacgacaatatttccgaaacgaaaaacgtaactgttgcggatgcttcggaagttgaagattctcctaagttcggcgtgacgtcagtttgcggcaggagaagagacatggaagattccgtttcggtgcggccttccttcacccaaggcttccactactttggcgttttcgacggtcacggttgctctcatgtcgcgactatgtgcaaggagcggttacacgagatcgtgaatgaagagattgac

SEQ ID NO: 5849 - DNA, 352 bp, Glycine max
  Clone ID: LIB3029-005-Q1-B1-D7
aaaattcttccaccaagttatgggtttccttgtgttgcttcttttctccctcctaagtctctcctccagttccagcatatcaactcatcgttccatattggaccttgacctaaccaagtttaccacacagaaacaggtgtcctcactggtccaactatgggagagtgagcatggacgtgtctaccataaccacgaagaaaaggcgcagagacttgtgattttcacgaataacttgtactatatcacggacatgaatgcacacagaaaatcaccccattctcatcgtttaagattgaacaagtttgctgacatcactcctcaagagttcagcaaaaagtacttgcaagctccc

SEQ ID NO: 5850 - DNA, 339 bp, Glycine max
  Clone ID: LIB3029-005-Q1-B1-D8
ctctattcctctgacttcccatagaccacaatacactcaccccaggcaaaaaatttcgtttcaaaattgtgatatggacggaagagcgagcagcagcgtgggcggagaagcatcgccagctccagcaccggtgccgataacgaatgcgaacgcgccgccgcctttcttgagcaagacatacgagatggtagaggacccttcgacggactcgatagtgtcgtggagtccaacgaacaacagtttcgtggtttggaaccctcccgagttcgccagagatctcttgcccaaacacttcaagcacaacaacttctccagcttcgttcgccaattaaacaccta

SEQ ID NO: 5851 - DNA, 377 bp, Glycine max
  Clone ID: LIB3029-005-Q1-B1-D9
ttcacctctgcaatttctactccgccacgccctacgacattgttcgtcgtaaccctctcttcgttccacttaggagaaaagggtttgtttggatatggaaggtgacgagcacatgaacgaggttccatcagagaacagcaacttgggaagtgattctttggaaaaggagaacattttggaagatgaaaaggaggatttgcaagatgggttgaagttgaaggtggtcactgaggaagtgagtggaggattgctcgctgagaatggttgcatttctcttgaggatgggagtctcaaaagaagccttgagactgttggaacatctgtatcaggtgctaaaagagctcgaattacagttgatgaatatcaaccttcagttc

SEQ ID NO: 5852 - DNA, 289 bp, Glycine max
  Clone ID: LIB3029-005-Q1-B1-E1
cagaatcccagagcgataaccttgagtctgtgtcaatcaggaccaatgatacaccctcgatgggaaaccttgcaggggcatcctcattgttggacgcattgccacaggaagtgattcagcacacttttaccctagagagccagcaggccaagcaagtgaagagcaacaaccctttcagcttcctggctccacctcaggagtctcagaggagagctgtggcttagggagccctttttgcatgtgctaccacacttttgtccttttgggctctagctagtgctggtagcag

SEQ ID NO: 5853 - DNA, 388 bp, Glycine max
  Clone ID: LIB3029-005-Q1-B1-E10
gaataatcttgtgaatcgcgtaagctctctcaactcaactggatccgggtcacaaccgtcttgaaattaagaccaactgggtcattgatcacaatctcaattggtagcacaacatcaagggaaagtgaaaaagaaaggtatatttgatcagggatatggcaactcgaagatatgagtttggaaggatgaatgaggctagccacccagactccatcagagctgccttggctgaattcctctccacttgcatctttgtctttgctggagaaggctctgcccttgctttgcgacaaatttacaaggaaccagggtcatcagcgggtgagctagtggtaattgcactagctcatgcatttgctctatttgctgctatttctgctagcatgca

SEQ ID NO: 5854 - DNA, 401 bp, Glycine max
  Clone ID: LIB3029-005-Q1-B1-E11
gatgttcctttcttgtgatccgaggagaacgaagagtcgttcctgagaagctcgtcgctatgggttctctccctgtgcccgcatttccatccaaacactgccttgacgagagcagccacattgacgaagccaccctctcggcgctattcaagtcgcagcagagccacctgaacttcttcttcgaccacatcgaccactcccaaaccctagccttcacgcgcgcgctcctcaatgccgccggcaccgtcttcttcaccggcgtcggaaaatccggcttcgtcgcgcacaagatctcgcagacgctcgtctctctgggcgttcgctccgcgttcctctcgccggtggacgctctccacggcgacattggaatcctcaccaatcgcgatgtgctcaacctcctc

SEQ ID NO: 5855 - DNA, 183 bp, Glycine max
  Clone ID: LIB3029-005-Q1-B1-E2
cgacagagactcctacagacttcaatctggtgatgccctgagagtcccctcaggaaccacatactatgtggtcaaccctgacaacaacgaaaatctcagattaataacactcgccatacccgttaacaagcctggtagatttgagagtttcttcctatctagcactgaagctcaaaaatccta

SEQ ID NO: 5856 - DNA, 198 bp, Glycine max
  Clone ID: LIB3029-005-Q1-B1-E3
aaatgatcctgttatatcaattgcaaaaaaaaaaaaaagtggcctgtcgcaaggtgctcccacctaatggtgtctagaagagttagatgtacacagccttatccctgcaaacagaggctttttcctagatttgaacctgtgaccttcaagtcacaaggcagcaaccttagtgcagtgccaaaacttgctctcatttgc

SEQ ID NO: 5857 - DNA, 315 bp, Glycine max
  Clone ID: LIB3029-005-Q1-B1-E4
gaaagatagaggaggaagaggagagaaagagagaggaggaagaggacgagaagaagagaaggagagaggatgaagaggaggagaagaagaaggaagaggatgaagagaagagaaagagagatgacgaagaggctaaaaggcaacaagaagagagggaaaagaagcgagaggaggaagaagctaggagagagaacgaaagggaaagagaagaggaggcagaaagggagcaagaacaagctaaaagagaagcagaagcagcagcacagagggaacaagaacaagctaaaagagagcaagaaaggatagaaaggagac

SEQ ID NO: 5858 - DNA, 363 bp, Glycine max
  Clone ID: LIB3029-005-Q1-B1-E5
ggtttcaaggtttacgggatggattggcttggccacggtggaagtgatgggttgcatggttatgtccattctcttgatgatgttgtttctgatacgaaaatatttttggagaaggttcttaacgaaaatcctgggcttccatgtttctgctttggacactcaacaggagcagccattattcttaaggctctgcttgacccaaaggttgaatctcgcatagctggtgctgttttgacatcaccagcagttggtgtttccccttctcatccaattttgctggcacttgctcctatagcttcaattttgctgccaacgtatcaatgtagttctgcatataagaaggggtcaccagtgtctagagac

SEQ ID NO: 5859 - DNA, 145 bp, Glycine max
  Clone ID: LIB3029-005-Q1-B1-E6
gatgaatctgacaaaggaattttttcacagcttgctcaaggagtatctggagtagcacatgggtccccaacggttaccatccgggggtttaccaccaacaccttggggaaaaccttcggaacaaaggtttcctccaaaacaatgg

SEQ ID NO: 5860 - DNA, 388 bp, Glycine max
  unsure (1)..(388): unsure at all n locations
  Clone ID: LIB3029-005-Q1-B1-E7
cttctgcctgcgctctttcgcttcctgcgaatctttccgagaatcgagtcacagagtagagcgaaatcggcgtagagatacaaaaatgccaaaagtaaagacaaatcgtgttaaatacccagagggctgggaattgattgagcctacactccgtgaacttcaagcaaagatgagggaagctgagaatgatccacatgatggcaaaagaaaatgtgagacattatggccaatatttaagattgcacaccagaagagccgctacatatttgacctctaccatcggaggaaggaaatttctaaagaactgtatgaattctgtttagatcaaggatatgctgaccgcaatctaattgcaaaatggaagaagcctggntatgaacgtctttgc

SEQ ID NO: 5861 - DNA, 368 bp, Glycine max
  Clone ID: LIB3029-005-Q1-B1-E9
ttttgttcctcactgaccaagccatggcgatgagaaccaaactttctttagctatctttttcttttttcttttagccttattttcaaacctagcctttggcaaatgtaaagaaaccgaggtagaagaagaagaccctgagctcgtaacatgcaaacaccaatgccaacagccacagcaatacactgagggtgacaagcgggtatgcttgcaaagatgtgacaggtatcatcgtatgaagcaagagcgagagaaacaaatccaagaggaaactcgtgagaagaaagaggaggaaagccgtgaaagggaagaagaacaacaagagcagcatgaggaacaagatgaaaatccctacatttttgaggaagat

SEQ ID NO: 5862 - DNA, 372 bp, Glycine max
  unsure (1)..(372): unsure at all n locations
  Clone ID: LIB3029-005-Q1-B1-F1
cacaaacacatgcaggttatcttggtcttttcaacgaaaacgagtctggtgatcaagtcgtcgctgttgagtttgacactttccggaactcttgggatccaccaaatccacacatcggaattaacgtcaattctatcagatccatcaaaacgacgtcttgggatttggccaacaataaagtagccaaggttctcattacctatgatgcctccaccagcctcttggttgcttctttggtctacccttcacagagaaccagcaatatcctctccgatgtggtcgatttgaagacttctcttcccgagtgggtgaggatagggttctctgctgccacgggactcgacatacctgnggaatcgcatgacgtgcttt

SEQ ID NO: 5863 - DNA, 381 bp, Glycine max
  Clone ID: LIB3029-005-Q1-B1-F10
gcttaggaggggacaattgctggtggtaccacagaacttcgtggtggcggagcaagccggagaacaaggattcgaatacatagtattcaagacacaccacaacgcagtcactagctacttgaaggatgtgtttagggcaattccctcagaggttcttgcccattcttacaaccttcgacagagtcaagtgtctgagcttaagtatgaaggaaattggggtcctttggtcaaccctgagtctcaacaaggctcaccccgtgttaaagtcgcataaatgacaagcatgatggtgtgaggatgaggccatcttatgaaataataacaaataaataaattttgtatgataataaaaagtatggcccatgtaccatcccagcgagc

SEQ ID NO: 5864 - DNA, 377 bp, Glycine max
  Clone ID: LIB3029-005-Q1-B1-F11
caaggccactgtccaagagaaggcagaaagaatgacagcacgtgatccggtgcaaaaggagttggcaacccaaaagaaagaggcaaagatgaaccaggcggagctggacaagcaggcggcgcgtcagcataacacggcggccaaacagtccgccaccacggctgggcacatgggacatggccaccacaccaccggaaccgggactggaaccgccacgtattccaccaccggggaatatggtcagcccatgggggcccaccagacgtcggcaatgcctggccatggaaccgggcagcccacgggccatgtcaccgaaggagtggtgggctcacatcccattggaaccaacagagggccgggtgggaccgctacagctc

SEQ ID NO: 5865 - DNA, 344 bp, Glycine max
  Clone ID: LIB3029-005-Q1-B1-F12
cagtggctgctgcttcgctttcagttccagagagcagcctcagcaaaacgagtgccagatccaaaaactcaatgccctcaaaccggataaccgtatagagtcagaaggagggctcattgagacatggaaccctaacaacaagccattccagtgtgccggtgttgccctctctcgctgcaccctcaaccgcaacgcccttcgtagaccttcctacaccaacggtccccaggaaatctacatccaacaaggtaagggtatttttggcatgatatacccgggttgtcctagcacatttgaagagcctcaacaacctcaacaaagaggacaaagcagcagaccacaag

SEQ ID NO: 5866 - DNA, 383 bp, Glycine max
  Clone ID: LIB3029-005-Q1-B1-F2
gacagaacacatgcacggtagcttggtcatttcaacgaaaacgagtctggtgatcaagtcgtcgctgttgagtttgacactttccggaactcttgggatccagcaaatccacacatcggaattaacgtcaattctatcagatgcatcaaaacgacgtcttgggatttggccaacaataaagtagccaaggttctcattacctatgatgcctccagcagcctcttggttgcctctttggtctacccttcacagagaaccagcaatatcctctccgatgtggtcgatttgaacacgtctcttcccgaatgggttaggatatggttctctgctgccagcggactcgacatactggggaaacgcatgacgtgctttcctgggctttt

SEQ ID NO: 5867 - DNA, 397 bp, Glycine max
  unsure (1)..(397): unsure at all n locations
  Clone ID: LIB3029-005-Q1-B1-F3
gcacaagttgaacttccgtgacgagcatgggaaacccagttgaactaacagatgcatatgggaatccggtttggttaacggacgagaaaggcaacccggtgcacctcacggctgtggcaaccaatgcacacaaatctatgcttcagaatgacaccccacaagagcttcctcactccaagagttcaagctcgtctgaggatgaagggcatggagagaggatcaggaagggactgaaggataacatagaagaaaagttaccagctggagaaggagtagtgaaggagaataaacacaccacaattgctgcttctacttctacaacagatactagtgatgctaatcaccacccaaccactgagcatgagaagaagagtatcatagacangattaaagaaaa

SEQ ID NO: 5868 - DNA, 390 bp, Glycine max
  Clone ID: LIB3029-005-Q1-B1-F4
aaatgccaggtcttaccatcggagacactattcctgatcttcaagttgaaactaaccaaggcaaaatcaagcttcatcagttctgtgctgatggctggaccatccttttctctcacccaggtgatttcaccccggtttgtaccactgagcttggtaagatggctcagtatgctaaggagttttatcaacgaggagtgaagctcttaggtttatcttgtgatgatgtgcaatcccacaatgagtggatcaaagacattgaagcctacactccaggtgcgaaagtgaattatccaataattgctgatccgaagagagaaatcatcaagcaactcaacatggttgaccctgatgagaaagactcccactggcaactaacctcaagggctcttc

SEQ ID NO: 5869 - DNA, 393 bp, Glycine max
  Clone ID: LIB3029-005-Q1-B1-F6
cgaggagaagcagaaggagcaaaagcaatggcgccgaagaagccgagaaccacgacaaggaaccctgatttggttagggggattggcaagtattcgaggtcgcagatgtaccacaagaggggcatctgggccatcaaggccaaaaacggtggcgttttgccccgccacgatcccaagcccaagcccgaggccccggcccagaagccgcccaagttctaccccgcggacgatgttaagaagcccctcgtcaacaagcacaagcccaaacccgcgaaactcagggctagcattactccagggactgtgttgatcctgcttgctgggaggttcaagggaaagagggttgttttcctgaagcagctcccatctggattgcttcttgtaactggtccc

SEQ ID NO: 5870 - DNA, 378 bp, Glycine max
  Clone ID: LIB3029-005-Q1-B1-F8
taaaattcttccaccaagttatgggtttccttgtgttgcttcttttctccctcttaggtctctcttctagttccagcatatcaactcatcgttccatattggaccttgacctaaccaagtttaccacacagaaacaggtgtcttcactgttccaactatggaagagtgagcatggacgtgtctaccataaccacgaagaagaggcaaagagacttgagattttcaagaataacttgaactatatcagggacatgaatgcaaacagaaaatcaccccattctcatcgtttaggattgaacaagtttgctgacatcactcctcaagagttcagcaaaaagtacttgcaagctcccaaggatgtgtcgcagcaaatcaaaa

SEQ ID NO: 5871 - DNA, 366 bp, Glycine max
  Clone ID: LIB3029-005-Q1-B1-F9
attcctaattgtttaaacctaattctcatttcttcatcgttcgattcttctcctcctaaagatgcagatcttcgtgaaaactttgaccggtaagaccatcacccttgaggtggagtcctccgacaccatcgataacgtgaaagctaagattcaagacaaggaagggatcccacctgaccagcagagacttatctttgcgggtaaacagcttgaggatggtcgaacccttgccgactacaacatccaaaaggaatccactctccacctcgtgcttcgcctcaggggtggcatgcaaatctttgtcaagactttgactggcaagaccatcaccctcgaggtcgaatcctcggacaccattgataatgt

SEQ ID NO: 5872 - DNA, 363 bp, Glycine max
  Clone ID: LIB3029-005-Q1-B1-G1
ccttgacctaaccaagtttaccacacagaaacaggtgtcttcactgttccaactatggaagagtgagcatggacgtgtctaccataaccacgaagaagaggcaaagagacttgagattttcaagaataacttgaactatatcagggacatgaatgcaaacagaaaatcaccccattctcatcgtttaggattgaacaagtttgctgacatcactcctcaagagttcagcaaaaagtacttgcaagctcccaaggatgtgtcgcagcaaatcaaaatggccaacaagaaaatgaagaaggaacaatattcttgtgaccatccacctgcatcatgggattggaggaaaaaaggtgtcatcaccca

SEQ ID NO: 5873 - DNA, 393 bp, Glycine max
  Clone ID: LIB3029-005-Q1-B1-G10
cggctcgaggctcactacaccgccttttccacacttccatcgtccggcacttcatggccgcggcggagcccactataagcccatctaacacgcgcgtgggctggatcggcacgggcgtcatgggccagtccatgtgcgcccacctcatccgtgccggctacaccctcaccgtcttcaaccgcaccccctccaaggcccagcccctcctcgacctcggggcctacttcgccccctccccccacgccgtcgcagcccgctccgacgtcgtcttctccatcgtcggctacccctcggacgtccgctcagtcctcctccacccctcctccggcgccctctccgccctccgccccggcggcgtcctcgtcgacatgaccacctccgaaccctccctcg

SEQ ID NO: 5874 - DNA, 364 bp, Glycine max
  Clone ID: LIB3029-005-Q1-B1-G11
gttgtgcttaatttgtctcagaatcagttagaggtgattcctgattcaatagcaggactacagaggcttgtggagctggatgtttcatctaatgttttagagtccctacctgactctattggattgttggttaatctgaagatctttaatgtgtcagcaaacaagctaactgctcttcctgaatccattgctctttgcaggtcactagtcgaattggatgcaagctttaacaacttaatgtgtctgccaacgaacatgggttttggacttgttaaccttgagaagctcttgatccatttgaacaagatacgatttcttcccgcctccattggagaaatgaaatctctcaggcatcttgatgttc

SEQ ID NO: 5875 - DNA, 403 bp, Glycine max
  Clone ID: LIB3029-005-Q1-B1-G12
gaaagattagctcgggaaagagaggtggaagaacggaggaaacagagggagaaggagtctgagaggagacgaagtgattcaagtgatagggataggcatcgtgataaagatcacaatagggagagggataggtatagagatagagactcagatcgtgaaaggtctcgggagcatgatgttagaggttatcgagatgggggaagggggatggattatagggtgagaaatggaggtagagacaggtaccgtgatcggagcaggtcacgctcccctgttaagcatagccacagaaggtcttcttgaagtccaatttgctcaaattagtggaatttcttgatagatgtcagaattttattaaaaaaaagagctttgttgagactatacaatctccctttcgtcaata

SEQ ID NO: 5876 - DNA, 357 bp, Glycine max
  Clone ID: LIB3029-005-Q1-B1-G2
aaaatataaaaaaaaaacagacatagtaagtagtagtatgattttaatttggaaatttaaaatttgaaaaaaaataataattgggtgtttccgatagtagtagttgtagcgggcaagccgagccgattcgatgacgcgagccactcacacactgggggttcccccaacaacacgcgcccctccccggcgaccgtaccgtattatcccccacccttcccactctttcgccttgccgtttctctttctctttttccctttcactttctctctcttcaaagcctaatttcctttttccgatgccggacttccaggactccctctcgagcacgccgccgccgcagccgtcccggcccgtcc

SEQ ID NO: 5877 - DNA, 390 bp, Glycine max
  Clone ID: LIB3029-005-Q1-B1-G4
tctagactcttctttttctctaagtctaaggggtgccctgagatcactttgagcaatggtgaaggctgtggcagttcttggcagcagcgagggtgtcactggaactattttcttcactcaggagggaaatggtccaaccaccgtaactggatctcttgctggtcttaagcctggtctccatggcttccatgtccatgccttgggggacactaccaatggttgcctgtcaactggagcgcatttcaatcctaataacaacgagcacggtgcccctgaggacgagaatcgtcatgctggtgatcttgggaatgttaatgtcggtgatgatggtaccgttagcttcagtattaccgacagtcagattcctctcactggaccaaactccatcat

SEQ ID NO: 5878 - DNA, 385 bp, Glycine max
  Clone ID: LIB3029-005-Q1-B1-G5
cattttcctttcactttccatcactttctctcgtttccccttcgcaatttcccctctcgaaagagacacgcatcgaagaaaatcacatcacggcaatggaggaaaagcacgcagcagccatcgaatccgcacacgccgaatctaacggcgtctctcacggcgccgaccacggctggcagaaggtgacctacgctaagaaacagaagaagaagactgttaacgccgctaacggcggccccgattcccgcgccaattccagcaagctcgttccgaacggcacgctgtccggcaacgacggcgtgttccggtcgctcgaactgcaatcggaggaccggcgccgaaaaattgtggaggcgaagaagctggctgatgccgcgtacgacga

SEQ ID NO: 5879 - DNA, 368 bp, Glycine max
  unsure (1)..(368): unsure at all n locations
  Clone ID: LIB3029-005-Q1-B1-G6
gggaaagtgaaaaagaaaggtatatttgatcagggatatggcaactcgaagatatgagtttggaaggatgaatgaggctagccacccagactccatcagagctgccttggctgaattcctctccacttgcatctttgtctttgctggagaaggctctgcccttgctttgcgacaaatttacaaggaaccagggtcatcagcgggtgagctagtggtaattgcactagctcatgcatttgctctatttgctgctatttctgctagcatgcatgtgtctggtggacacgtcaaccctgccgtcacttttggcgctcttcttggtggaaggatctccgtccttagagcagtttactantgggttgctcaac

SEQ ID NO: 5880 - DNA, 374 bp, Glycine max
  Clone ID: LIB3029-005-Q1-B1-G7
ctctccattgtctttgaacactcatcaccatggccaagcttgttctttccctttgtttccttcttttcagtggctgcttcgctctgagagagcaggcacagcaaaatgagtgccagatccaaaagctgaatgccctcaaaccggataaccgtatagagtcggaaggtgggttcattgagacctggaaccctaacaacaagccattccagtgtgccggtgttgccctctctcgctgcacccttaaccgcaatgcccttcgtagaccttcctacaccaacggtccccaggaaatctacatacaacaaggtaatggtatttttggcatgatattcccgggttgtcctagcacttatcaagagccgcaagaatctcag

SEQ ID NO: 5881 - DNA, 393 bp, Glycine max
  unsure (1)..(393): unsure at all n locations
  Clone ID: LIB3029-005-Q1-B1-G8
aaaattcttccaccaagttatgggtttccttgtgttgcttcttttctccctcttaggtctctcttctagttccagcatatcaactcatcgttccatattggaccttgacctaaccaagtttaccacacagaaacaggtgtcttcactgttccaactatggaagagtgagcatggacgtgtctaccataaccacgaagaagaggcaaagagacttgagattttcaagaataacttgaactatatcagggacatgaatgcaaacagaaaatcaccccattctcatcgtttaggattgaacaagtttgctgacatcactcctcaagagttcagcanaaagtacttgcaagctcccaaggatgtgtcgcagcanatcaaaatgggcaacaagaaaat

SEQ ID NO: 5882 - DNA, 399 bp, Glycine max
  Clone ID: LIB3029-005-Q1-B1-G9
acgatttgggtacaaaaagttgaagtgggttgtgggagagaaggctgatattcttggatcaggtaagtctcaggttgttttatcagctgtgcttgagaagcctgtaagggtctagagcttcaaacaacatgatggcaagatgtgagtataatgctattgcttctgctggatctgcttcacttcacacacaatttgtgtgaatgaatgaactgcttctaacatcatcagatcacatcagtagtgaagaggaataagtgtatgaatatttctgtttttcaagtaatgttttgtatattattcggctactaatagcgctactatttcgcaggagacaacttgttagagaacctaaaatgaattacatttttttagttataaagttaacatgcctcccttttc

SEQ ID NO: 5883 - DNA, 359 bp, Glycine max
  Clone ID: LIB3029-005-Q1-B1-H10
tgctgctattcgggaggacatcagtattaatcttggaccgctggaggagctttctaacctcttcaaagcagatatacttctttgtgaatctgggggagataacctggctgccaatttcagcagggaattggctgactatattatttacataatagacgtgtctggcggtgataaaattcctcggaaaggtggtcctggaatcacgcaagctgatctccttgtgataaacaagactgaccttgctcctgcaattggggctgatttggcagtcatgcagcgggatgctctgcggatgagagatggagggccatttgtctttgcacaggtgaagcataagattggagtagaagaaattggga

SEQ ID NO: 5884 - DNA, 408 bp, Glycine max
  Clone ID: LIB3029-005-Q1-B1-H12
atcagaaccacattcctgggaattgatcttcccaatagaggtatgtggtcctaataatggttttgaaatgtggagttctgagtgggcaaatcaaacttcatggcatttgagtttccttattgacaatcccaaacagtctacagtttttgatattctcttgggaatctctcaagattttgaaattgctggtaatactcttatgccagctttttctgttccacaggctactgccagatcttctgaaaatgcggaatcctctgcatgatctggaatttgtgttttctttcgcttgttcgtttgtttaattcaataaaggaaattaggcatgaccctcttgttgagtatgctctgcctatttgaaaatttccacacctcttttaattgtcgtaatgatgtgtgaagtgtgtg

SEQ ID NO: 5885 - DNA, 347 bp, Glycine max
  Clone ID: LIB3029-005-Q1-B1-H3
cttgtttgcttcccaagtctctcgaagcatctttctttctcttcctgcagaagctatccgtgttacttgttcccaagtctccaacaagcaaagtacatggttgatttggaaatccaggtccccagcgcattcgacccgtttgccgaggcgagagaatcagatgcccccggggcaaaggagtatgtgcacatacgaattcagcagaggaatggaaagaagagtctgacaacagtgcaagggctgaagaaggagttcagctacgagaagatcctcaaggacctcaagaaggacttctgctgcaacgggactgtggtgcaggacaaggagcttggcaagattatccaact

SEQ ID NO: 5886 - DNA, 360 bp, Glycine max
  Clone ID: LIB3029-005-Q1-B1-H5
caaggagaagaaaggcaacagtgaagaagtcatcaggatccttactacaagaagcaaaactcaacttgtggcaactttcaaccgctacagagatgaacatggaatttccatcagtaagaaattgttggatcaaacatctgatgacttccacaaggtgttgcacactgctattcgctgcatcaatgaccataagaagtactatgagaaggttttgcgcaatgcagtcaagaagtttggaactgacgaggatggactaagccgtgtgattgttacaagggctgagaaggatctgaaggacatcaaagagctctactacaagagaaacagtgttcaccttgaggatgaagtgtccaaggaaac

SEQ ID NO: 5887 - DNA, 223 bp, Glycine max
  unsure (1)..(223): unsure at all n locations
  Clone ID: LIB3029-005-Q1-B1-H8
atcataaaattcttccaccaagttatgggtttccctgtgttgcttcntttctccctcttaggtctctcttcgagttccagcatatcaactcatcgttccatattggaccttgacctaaccaagtttaccacacagaaacaggtgtcttcactgttccaactatggaagagtgagcatggacgtgtctaccataaccacgaagaagagggatagagacttgaga

SEQ ID NO: 5888 - DNA, 314 bp, Glycine max
  Clone ID: LIB3029-005-Q1-B1-H9
gaagcggttgggcgttttctgccacgggagccatagaagcagcacatgcaatagcaacaggagaccttgttagcctttctgaacaagaactcgtagactgtgtggaagaaagcgaaggttgttacaatggatggcactatcaatcgttcgaatgggttttagaacatggtgggattgccactgatgatgattatccttacagagctaaagagggtagatgcaaagccaataagatacaagacaaggttacaattgacggatatgaaactctaataatgtcagatgagagtacagaatcagagacagagcaagcg

SEQ ID NO: 5889 - DNA, 343 bp, Glycine max
  Clone ID: LIB3029-006-Q1-B1-A1
gtgatcagttatattcgcgttgcgatctagtccaattccatgacgagaccaccgtcgtcctcctcagcttcgcactcgcaattcgcctattcaaacccttcgtcctcctcctacgtccccgttccctttcaccttcagcaacccggaaccactcactacgctgcgccctaagtcgccgccccctccgtgcaaatccccgctcctcccgtcgtcggccccattgctcccgcgccggttcccggcgtgtactccgccgtgccgcaatatcaggcacagcagttacttgagagggatgcgcagattataacgccggaggctcttgagaatgttaacgcagcgattg

SEQ ID NO: 5890 - DNA, 392 bp, Glycine max
  Clone ID: LIB3029-006-Q1-B1-A10
caagaaccaacctaccttttgcaatctcaattcaatggcgtcctctctcattgcgaagcgcttcctctcctcttccctcctctccaggtccctccttcgccccgccgcttccgcttcccaccgctctttcaacaccaacgccatgcgccagtatgacaaccgcgccgacgaccacagcaccgacatcgatcgtcactccgaacgctctttccctagcactgcgcgccgcgacgatatcttctcagatgtgttggatccattttttccgactcggagtttgagccaggttctgaacatgatggaccaggtcatggacaatccgttcctctccgcgtcgcgcgggatcggagctggcgctggagtgcgtcgcggatgggacgcgagggagacag

SEQ ID NO: 5891 - DNA, 393 bp, Glycine max
  Clone ID: LIB3029-006-Q1-B1-A11
ctcaagtgagaacgccggtgcaaggaatggggatgttagggtctcaaatgatgccaagtggaatcggttcacatcaacagaggtctgtgcaatcgtcacttagacctccaacctctgccccgaataatcaacccgctggttcacaaagcttccaagggcatggacttatgagaccctcatcagtgggatcaacggctactccatctccgagttcatcacaaagcatgcagtcacttaatcagccatggttgtcatctgggtcacaagggaagcctcctttgccatccgcagcttataggcagcaattgaacccacaatccatgcagcaaacgtcacatattcctctgatgcatcaatccacaccaacatcctcgcagcagcagcaacaacaac

SEQ ID NO: 5892 - DNA, 302 bp, Glycine max
  unsure (1)..(302): unsure at all n locations
  Clone ID: LIB3029-006-Q1-B1-A2
cttacttaacaccggaatccggtccaagtaaaatttgaaatttggaaaaacggcaataaaaggttgccgaaccttaaaaacggganacaaaaagcaatccgttacttgaattcaagaatctctcaatttcttcctacttctttgtgtacgatttcttaagggaaagaaaatcactctctgtgctggccacagacttcgtgaatcattttcttttccactcttagtttatttgctgaacactctcctatttgatataggacttcgtgtcagatttaaacttcttctgtttctttctcagttct

SEQ ID NO: 5893 - DNA, 370 bp, Glycine max
  unsure (1)..(370): unsure at all n locations
  Clone ID: LIB3029-006-Q1-B1-A4
catagggttattgagattgaaaatcccaacttagtaaagccaaagaccttgaaagctagagatgttgatgttggaaaaacaacagaactttcaaggcgtgaaagggaggagatagagaaacagagagcccatgagcgctatatgaggctgcaagagcaaggaaaaacagaacaagcaaagaaggatttagaacgtttagctcttatacgtcagcaaagggaagatgctgctaaaaagcgagaagaagagaaagctgcgaaagagcagaagaaggctgaagcgcgcaagtgaatttcctggaaaatgtcatgttgccaaatttactccatattagtangaggatatgtactcttactacacttcaacatta

SEQ ID NO: 5894 - DNA, 402 bp, Glycine max
  unsure (1)..(402): unsure at all n locations
  Clone ID: LIB3029-006-Q1-B1-A5
cctaaccagagagcagacttggtattagcctgcaggatccgtgaaaggaaagagtcggtgacagtgttactatgtggcactagtggctgcggcaaatctacattgtctgcattgctgggaagtaggttgggaatcacgacagtggtatcgaccgattctattcggcacatgatgagaagttttgctaatgataaagaaaaccccttgttgtgggcttctacgtaccatgcatgggagtgtttggaccctgttgctgttgcagaagcaaaggctagaaggaaagcaaaaaagctggctggtgtgtcacattcagttttcaaaggaacatgtaactgagggtcacaattctagcanatctgatgttaggacgttggagatgagctctggtcctactgaactgct

SEQ ID NO: 5895 - DNA, 271 bp, Glycine max
  Clone ID: LIB3029-006-Q1-B1-A6
aacaaacaacttttcacacatgaccatgctacctcattcattaactatgattgcaacactaataatcatttttcttgcacaaacacttgtgggggtgagttcacttcctgaagctgataaaataaccaatttgccggggcagccacgggtcgaatttcagcaatattctggttatgtcaccgtggatgatcaaaatcaaagagctttgttttactactttgttgaggctgaagaaaacccttcttccaagccattagtcctatggttgaat

SEQ ID NO: 5896 - DNA, 282 bp, Glycine max
  Clone ID: LIB3029-006-Q1-B1-A7
catcctcaaaactcatctccagacacattttctcacaactatcacgccccaccaccaccatgtccacaaatctacgcacccacgccttcgcgggtaacccgctccgatcccccaaccgggtcgacccgttttcgcccgcctccgcgctcgagaccctcacgacccgaaccctcgacgccgcgcacgtgtcctcaccgtccgtggatttgaaggtcttgccttttaaaaatgggagggtgctggcttcttcggagagtggtgacacgtggcacctcgggtgga

SEQ ID NO: 5897 - DNA, 392 bp, Glycine max
  Clone ID: LIB3029-006-Q1-B1-B1
ctggtagcatcacaaccgccaccagccttgacttcccagccctctggcttctcaaactcagtgcccagtatggatcactccgcaagaatgctatgttcgtgccacactacaccctgaacgcgaacagcataatatacgcattgaatgggcgggcattggtacaagtggtgaattgcaatggtgagagagtgtttgatggagagctgcaagagggaggggtgctgatcgttccacaaaactttgcggtggctgcaaaatcccagagcgataactttgagtatgtgtcattcaagaccaatgatagaccctcgatcggaaaccttgcaggggcaaactcattgttgaacgcattgccagaggaagtgattcagcacacttttaacctaaagagc

SEQ ID NO: 5898 - DNA, 404 bp, Glycine max
  unsure (1)..(404): unsure at all n locations
  Clone ID: LIB3029-006-Q1-B1-B10
gatgcagatcttcgtcaagaccctcaccggcaagaccatcacccttgaggtggaaagctctgacaccatcgacaacgtcaaggccaagatccaggacaaggaaggaatccccccggaccagcaacgtctcattttcgccggaaagcaacttgaggacggccgtacccttgctgactacaacattcagaaggagagtactcttcacctcgtcctccgtctccgtggtggcatgcagatcttcgttaagacactcaccggcaagaccataaccctagaggttgaaagctccgacaccatcgataacgtcaaggccaagatccaggacaaggagggtatccccccggaccagcaacgtctcatcttcgccggaaagcagctcgaggacngccgcaccctcgccgact

SEQ ID NO: 5899 - DNA, 384 bp, Glycine max
  Clone ID: LIB3029-006-Q1-B1-B11
atggagtttggaatttctgaagcgtaccggatttcattgtgatatcatttgtgtcactggatggactgccaccccaatgcaggatgttcaggttacaattgattggtttatttcctctcaggaatgtgttcccaggacctattgtgttttaaatccacaaaatccttttgtgttaaataggtggatgggaaaactgactttccctcagggcacttcccgaagtgttaagagaatgcctctttctatagggggaggagctggtgcaaagaatgctattctcatgaatatgccaaatgctgttctttcaatgtggagatattttgttggagatctcgtctttgaagtttctaagatgactttcccctacattaaatgtacagtctc

SEQ ID NO: 5900 - DNA, 375 bp, Glycine max
  Clone ID: LIB3029-006-Q1-B1-B12
atggcgtttggaatttctgaagcgtaccggatttcattgtgatatcatttgtgtcactggatggactgccaccccaatgcaggatgttcaggttacaattgattggtttatttcctctcaggaatgtgttcccacgacctattgtgttttaaatccacaaaatccttttgtgttaaatacgtggatgggaaaactgactttccctcatggcacttctcgaagtgttaagagaatgcctctttctatacggggacgagctggtgcaaagaatgctattctcatgaatatgccagatgctgttctttcaatgtggagatattttgttggagatctcgtctttgaagtttctaagatgacttctccctacattaaatg

SEQ ID NO: 5901 - DNA, 383 bp, Glycine max
  Clone ID: LIB3029-006-Q1-B1-B2
atttgtgtcactggatggactgccactccaatgcaggatgttcaggttacaattgattggtttatttcctctcatgaatgtgttcccaggacctattgtgttttaaatccacaaaatccttttgtgttaaataggtggatggggaaactgactttcccccaaggcacttcccgaagtgtcaaaagaatgcctctttctatagggggaggagctggtgcaaagaatgctattctcatgaatatgccaaatgctgttctttcaatgtggagatattttgttggagatctcgtctttgaagtttctaagatgacttctccctacattaaatgtacagtcactttcttcatagcatttggaaatttggctgatgcacacatcaattt

SEQ ID NO: 5902 - DNA, 426 bp, Glycine max
  Clone ID: LIB3029-006-Q1-B1-B3
taaccccggaatccggtccaaaatcgggaatttgggtttccttccgctggtccgttggttaaattcaataaaggaaattaggcatgacgtttgaaatgtggagttctgagtgggcaaatcaaacttcatggcatttgagtttccttattgacaatcccaaacagtctacagtttttgataatctcttgggaatttctcaagattttgaaattgctggtaatactcttatgccagctttttctgttccacaggctactgccagatcttctgaaaatgcggaatcctctgcatgatctggaatttgtgttttctttcgcttgttcgtttgtttaattcaataaaggaaattatgcatgaccctcttgttgagtatgctctgcctatttgaaaatttccacacctcttttaattgtcgtaatgatgtgt

SEQ ID NO: 5903 - DNA, 308 bp, Glycine max
  unsure (1)..(308): unsure at all n locations
  Clone ID: LIB3029-006-Q1-B1-B4
tctcaagactgtgaattatggaatcctgcttgcacaaaagcaatgactatgtcatttaatccaaacccgtgttctgatgcatggagtttggaatttctgaagcgtaccggatttcattgtgatatcatttgtgtcattgggtccnaaatcccattgacagacacgtgggaaattcacaagatttcgaatgtgctggtaataatcttatgcaagctttgtcagttcgacatgctaatgacagatcttctgaaaatgcggaatcctctgcaagatctggaacttgagttttccttcgcttgttcgattgt

SEQ ID NO: 5904 - DNA, 323 bp, Glycine max
  Clone ID: LIB3029-006-Q1-B1-B5
ggcaacagtgagaacaccattgaattttgattctagcaagcagagcttttgtcaattctctattgatcttcttggtggaggaattttagtggacaaaactggagattggatcacacttatacaaaattctccaattagtaacttgttgagagttgctgcttggaagaaaggctgtttaatggttaagattgtgatgtctgggaatgcagcagtcaaaaggagtgattgggcctcattggtacaagtgtttttaacaaacagcaacagtacagaacattttgaagcaagttaatggacaaaatccggaacaaaatcctgggaaa

SEQ ID NO: 5905 - DNA, 354 bp, Glycine max
  Clone ID: LIB3029-006-Q1-B1-B6
aggaaccctagctagggtttggaagaagctgatccgagaagatggtgcagcgtctcacctaccgcaaacgccacagctatgctaccaaatccaaccagcacagagtcgtcaagactcccggtggcaagcttgtttatcagaccacgaagaagagggccagcggacccaagtgccctgtcactggaaagaggattcaagggattccacatttaaggccagcagagtataatagattaaggttacacagaaaccgaaggactgtgaaccgtgcatatggtggtgtgttgtctggcagtgctgttagagaaagatcattcgagcttccttggttgaagagcaaaagattgtgaaaaa

SEQ ID NO: 5906 - DNA, 381 bp, Glycine max
  unsure (1)..(381): unsure at all n locations
  Clone ID: LIB3029-006-Q1-B1-B7
tagaatttgtagtaattattataagtattagaagcagcaattcttatttatttcagattaatacttgataacctaaacaatatatctatatatagaatatagatagatatatatataatagaacgtacaagaaaaaaagaataataaatagaaaaaggagcatgttgattatatagaaagtaaagggcaacaatcatttttgtttaccatgggtaaggacaccatcgctgacataataacctatataagaaatgctgacatgaataataaaggaatggttcanataccatttactaacataacagaaaacattgtacaaatactttacgcgagggttttgttgaaaacgtcagagtacatanagaaaacgacaaatatttt

SEQ ID NO: 5907 - DNA, 357 bp, Glycine max
  Clone ID: LIB3029-006-Q1-B1-B9
caagcctacaggcactgagacttgatgggaatcctctcagaagcattcgaagaactgtgttggataaaggaactaaagctgttctgcaatatttgaaggacaaattgccagagcaatagtgtttttagttttttccctcctttgaaagtgttgtgcttgacatgaacagcaatatttaaagtgtccaatttttttttcaggtgtcacattctgtgtttgctctttattttgttcaattattttcccgtggtacctctgcttttgtgtgctatttcatgtaacaattttgacggtttgaatatttaacattatcaactaatttgcatggcttaaaaaaaaaaaaaaaaaggccggccc

SEQ ID NO: 5908 - DNA, 346 bp, Glycine max
  Clone ID: LIB3029-006-Q1-B1-C1
caaggcattttgatgcatgtaagtggacaaaatcagaaccacattcctgggaattaatcttcccaatagacgtatgtggtcctaataatggttttgaaatgtggagttctgagtgggcaaatcaaacttcatggcatttgagtttccttagtgacaatcccaaacagtctacagtttttgatattctcttgggaatctctcaagattttgaaattgctggtaatactcttatgccagctttttctgttccacaggctactgccagatcttctgaaaatgcggaatcctctgcatgatctggaattcgtgttttctttcgcttgttcgtttgtttaattcaataaag

SEQ ID NO: 5909 - DNA, 403 bp, Glycine max
  Clone ID: LIB3029-006-Q1-B1-C10
aaaataccaaccatggcaaccatttctactgatcaaccaagaggatcctactcctatggaacctcctatggagcaccctatggaaccacctatgagaccaacagcagcattaacaaccctccttcacgccaaaccgtgaagttcataactgctgcaactattggcatcacactcttactcctgtctgggttgaccctcacaggcactgtcataggtttgatcattgcaacccctcttcttgttatcttcagccccatccttgtccctgctgcgtttgtgctgttcctggttgcttctggctttttgttctctgggggctgtggtgtggctgccattgctgctttatcttggatttacaactacgtttctgggaaacagcctgcgggttctgacacccttgact

SEQ ID NO: 5910 - DNA, 405 bp, Glycine max
  Clone ID: LIB3029-006-Q1-B1-C11
cgccaattcaccacttgcctttctcgctaccctacttcaaagggtgctataatattcggggatgcacctaacaacatgcgacagtttcaaaaccaagatattttccacgatttggccttcaccccattaaccatcaccctgcagggagagtacaacgtgagagtcaactcaataagaatcaaccagcacagtgtgttcccactgaacaagatatcatccaccatcgtagggtcgacctctggaggaaccatgattagcacctcaactcctcacatggttctccagcaatccgtgtaccaggctttcactcaggtgtttgctcagcagctaccaaaacaagcacaggttgaaatctgtggcaccattttgggtaatgcctcaactccaacaagatcaatgcatatc

SEQ ID NO: 5911 - DNA, 404 bp, Glycine max
  Clone ID: LIB3029-006-Q1-B1-C12
gtcaattagtgtgacttgaaaatttggttgagtgtgagcatttcacgttgcaatcagatttctctaaatagaattatctgaataaatttctcattctcccctcccccctctttggatagcttggttatatgcttcaagagaatgagtgctggcaacacactctttaacaaattgtttctaacaaactttccattattgcttaaaacttattgtaaactacaaaatcctgagtgaagtccattaaataaggagtgagacctgcacaattttgtaatttccaacaaatgtcagctaacagtagagtgtgttagacagaatctgttagagagtgtgttgttggcatttccccttctaagaatacaagtggtggttttctacaatatataccttttgtaaatatcgtc

SEQ ID NO: 5912 - DNA, 328 bp, Glycine max
  Clone ID: LIB3029-006-Q1-B1-C2
gtagttggacctaataaagggtttgacatgtggagatctgagtgggtaaatgatttttcatggaatattgagtatccgaagtgacaatcggagccagtctacagtttttggaaatgtcttgggaatctctcaggattttgatattgctggtaatactcttatgccagctttttctgttccacatgctactgccagatcttctgaagatacaggatcctctgcatgatctggaattcgtgttttctttcgcattgtcctttggtttaagtcagtacaggaaatttaggcatgaacctcttgtttagtatgctctgcctatctgaaaatt

SEQ ID NO: 5913 - DNA, 373 bp, Glycine max
  Clone ID: LIB3029-006-Q1-B1-C3
ggaatccggcccaaaaccaaaatgaccaatttaacaatcctcctcatctctcttcccttctgcatcgcccaaacttgcagcgcctccaaatggcagcaccagcaagatagctgccgcaagcagctccagggggtgaacctcacgccctgcgagaagcacatcatggagaagatccaaggccgcggcgatgacgatgatgatgatgacgacgacaatcacattctcaggaccatgcggggaagaatcaactacataacgaggaaccaaggaaaagacgaatacgaagaagaagaaggacacatgcacaagtgctgcacagaaatgagcgagctgagaagcccaaatgccagtgcaaagcgctgcagaagataat

SEQ ID NO: 5914 - DNA, 376 bp, Glycine max
  Clone ID: LIB3029-006-Q1-B1-C5
ctcaatctcacttcttacccatttcatcgtcgcctcattctcctttcttgttctgtttttagtttcactgttctctgataacaacgttgttaattgtcaccatggttgttctgtctcaaccagcattaaaccagtttttccttctgaatacatgcaagcccacgcccttgttcgcggggattcctgtggtcgacctcacagatcccgatgccaagaaccacatagtcaatgcctgcagggacttctgcttcttcaacctcgtgaaccacggtgttccgttacagttcatggacaatttggaaaacgaaaccctcgggttcttcaaaaaacctcaatcccataaatacacggctggtcgccctgactcttttggcta

SEQ ID NO: 5915 - DNA, 399 bp, Glycine max
  Clone ID: LIB3029-006-Q1-B1-C6
atcctgagttatcctcaggtgtggataatgagaaccagattagtgcagagaaatcaacaggtactggtatactagtgcaaaaggcctctccagtttctgaaaactgtgagtctttgtatttaaaaaaggagtcacctacttctggtaatgctgtaatggtatccagggatgaaaatgctgatgacacgaagtcagttgtgattgagcctgatgaaagaagaacagggcaggatttatcagtttcagatgatgttaatgaacgtgctgatactatgggtagaaaagaggctattggtcagtgttctggctcatcagttcattcagatttaccaacagtgcctagggaagagaatgatgcatttaaagcatctgagcgaaagttggatacaaataaatctg

SEQ ID NO: 5916 - DNA, 371 bp, Glycine max
  Clone ID: LIB3029-006-Q1-B1-C7
ttcatggaagccatgaaaggatcaagagttggcgtgggcgaggaccacgacatgcctgacggtatgcaatgcaactaccacccgtatagaaactaccctggcgggatcagctccttctgcctccaagacaatctcggcaagcttgtttcctcttctttccctctcactaaccatcctccttcttccccttctttcatatcccacctcccagactcttcactcacccgcgctgcctcatcagctccagctcattcttcttcctcttcctcctccctccctatcaacaacgccaccgatcattattactactctcgcataactcgccacccttcacccttgcccaagaagaagaataatacgcccccttcagc

SEQ ID NO: 5917 - DNA, 357 bp, Glycine max
  Clone ID: LIB3029-006-Q1-B1-C8
aggacgcacctgctgttggcttgttgttcaaggatggcaatttgtaagaaagatgtttggagagttgaatgtggaatcccttctggatttccgctcacagttatttgcaatagcatttttaatgagatgctcattagatatagctatgaaaaattactgcgccaggctaaagctccaagtatgtttttacaatccttcaaaaattttgtttctttgtgtgtgtatggtgatgataacttaattagtgttcatgaatatgtcaagccttactttagtggttctaaattgaaaagctttctagctagtcataacatcaccattactgatggtattgacaaaactagtgcaactttgcaa

SEQ ID NO: 5918 - DNA, 356 bp, Glycine max
  Clone ID: LIB3029-006-Q1-B1-D1
cagggaagttccgacttccaaaactggaaagcacggtcacgctaagtgtcactttgttggaattgatattttcactgccaagaaacttgaggatattgtgccctcttctcacaactgtgatgttcctcatgtgaatcgtactgattaccagctcattgatattgctgaggatggatttttgagtctgcttactgaaaatggtaacactaaggatgacctcaagcttcccactgatgagagtctgctcactcagataaaggatggatttgctgagggcaaggatcttgttgtgtctgtcatgtctgctatgggtgaggaacagatttgtgccctcaaggatattgggccaaagaact

SEQ ID NO: 5919 - DNA, 361 bp, Glycine max
  Clone ID: LIB3029-006-Q1-B1-D10
gattgtttctcctgagactaagaactctctctctgatccctaccctttcaatttgatgtttcagacttccattggtccctccggcttcagccctggctttatgagacccgagactgcccagggcattttcgtcaattttaaggatttgtattattacaatggcaacaagcttcctttcgctgctgcgcagattggccaagcgtttaggaatgaggtgggttcatgattttcgtggcaatttagactttattttttttatactttctaaattagatatagtctttgcatgaattgggttggatgttgtttgtgtgtttagatatctccacgacaggggcttctgagagtgcgggagttcacg

SEQ ID NO: 5920 - DNA, 373 bp, Glycine max
  Clone ID: LIB3029-006-Q1-B1-D11
gttggctcagaatctccttttgtaaggagtcctaatccgagtagtaggtattatttcttgaagaagcggacaatttcacatgggagttatacagatgatcataccgtaaacatcacccaaggtactaaatttggaaggaaagtagtcaaagctgttacatacagggtcaagtctgtgccctcaacttccaagccttgtgtaaatgagaaattagaaaatggggataagctgctcagttctcttccagaacctgatccaactgatgctaatccagttaagaagtctattgttagtcttggaaagtctccttcatacaaggaagtggccttagctcctccagggacaatctctaagtttcaggtctataatcctc

SEQ ID NO: 5921 - DNA, 391 bp, Glycine max
  Clone ID: LIB3029-006-Q1-B1-D12
aattattaacacttccttagttcaatatggggaagcccttcactctctctctttcttccctttgcttgctactcttgtcgagtgcatgctttgctattagctccagcaagctcaacgagtgccaactcaacaacctcaacgcgttggaacccgaccaccgcgttgagtccgaaggtggtttgattcaaacatggaactctcaacaccctgagctgaaatgcgccggtgtcactgtttccaaactcaccctcaaccgcaatggcctccacttgccatcttactcaccttatccccggatgatcatcatcgcccaagggaaaggagcacttggagttgcaattccaggatgtcctgagacgtttgaggagccacaagaacaatcaaacagaag

SEQ ID NO: 5922 - DNA, 352 bp, Glycine max
  unsure (1)..(352): unsure at all n locations
  Clone ID: LIB3029-006-Q1-B1-D2
ccgctccagaaacaaaggttcccaagaaaaaaaagtgctggaaattcatgttgagaaaggcatgcagcagggtcagaagattgtttttgaaggacaagctgatgaagctcctgacacaatcacaggagacattgtttttgtattgcaagtaaaggatcacccaaagttcagaagggagcaggatgacctctatattgatcacaatctcagcttaaccgaggcactctgtggcttccagtttgctgtcaaacatcttgatggtangcaactattgatcaaatcaaaccctgnggaagtcatcaaaccaggtcaatataaagcaataaatgatgaaggaatgccacaacacaat

SEQ ID NO: 5923 - DNA, 401 bp, Glycine max
  unsure (1)..(401): unsure at all n locations
  Clone ID: LIB3029-006-Q1-B1-D5
ctctctctctcctgtatttgtcttgattccgatgcgaatggtaattgcagaaaccccaaccctcctttcctctccctcctcctagatcgagtcagaatcatggccaaagctgaaggtggcaaggaaccaataaatgaacaagcagtagcaaatatgtatgctgcaatgaggtctgagctcaaccaaatttactccaaaataactgaactggagatggaagttagtgagcacacattggttaccaatgccattcaaccacttgaccaatctagacgatgctatcgtatgattggaggggtgcttgtggagagaaccatcaaagaggtcttgcctgctgtgcagcgaaataaagaaggactcgaanaggttgtggcaaggcttaacgaggcgttggaaaagaa

SEQ ID NO: 5924 - DNA, 374 bp, Glycine max
  Clone ID: LIB3029-006-Q1-B1-D6
cacagaatgagaatgatccaaataatacgactatttttgttggcaatttggatcctaatgtaaccgatgatcatctgaggcaagttttcagccagtatggagaattagttcatgtgaagattccagcaggcaagcgatgtgggtttgtccaatttgcagacaggagctgtgctgaagaggcccttcgggtgttgaatgggacgctgttgggtggacaaaatgtgcgtctttcatggggtcgcagtccttcaaacaaacatgctcaggcagatccaaaccagtggaatggtgctgctggtgctggttctggtggtggatattatgggtatgctgctcaaggatatgaaaattatggttatgctcctgctggacag

SEQ ID NO: 5925 - DNA, 408 bp, Glycine max
  Clone ID: LIB3029-006-Q1-B1-D7
ttttgtttctgggcatttcattgcatgcatgttatgcccggcatcttagccctctgaataagaagctggaagagaaatcctacttctctatcaagagtgatgagaaaaatggacttgattcctctccaaagcagctcaatgaagctggtcacaacaagacggagactcgattggttggtgattctgtgaagccaagaaaccaaagaagcactaaccatcatagggtagtgcacaaagctactgatgcaaatgcttcaggtggtggtgctctacaaaagtctcttgtttcagtttcatggcgtgtgcctcacaataacaagaaacctcgtcagaaacaccctgggtttgacttggactattcgccaacaaagacacaccctcctcatcacaactaagcaacaacaatga

SEQ ID NO: 5926 - DNA, 401 bp, Glycine max
  Clone ID: LIB3029-006-Q1-B1-D8
aacaaatccttcacttgttgctcgtcttagtttctgtgttgtgtcatttttattgctatatcctaattaaacttcaccctcaaaatgagtgatcccacactagcacaaccacacctagtcgaagtccacacaacactcgaaaccgttgttaccacacacaaccataaccatagaccctcaataaatgcctcaggtgaaaagaagaaaattgtgggggtgttctacaaagggaatgagtatgctaaattgaaccccaatttcgtggggtgtgttgaaggagcattgggtatacgtgagtggctggaatcacagggtcatcagtacattgtcactgatgacaaagaaggaccagattctgaacttgagaaacacattccagatgcccatgtcatcatatctac

SEQ ID NO: 5927 - DNA, 333 bp, Glycine max
  Clone ID: LIB3029-006-Q1-B1-D9
agtagccaaggttctcattacctatgatgcctccaccagcctcttggttgcttctttggtctacccttcacagagaaccagcaatatcctctccgatgtggtcgatttgaagacttctcttcccgagtgggtgaggatagggttctctgctgccacgggactcgacatacctggggaatcgcatgacgtgctttcttggtcttttgcttccaatttgccacacgctagcagtaacattgatcctttggatcttacaagctttgtgttgcatgaggccatctaaatgtgacagatcgaaggaagaaagtgtaattagacgactctcactactcg

SEQ ID NO: 5928 - DNA, 361 bp, Glycine max
  Clone ID: LIB3029-006-Q1-B1-E10
aaaaaaaaaaaaaaaaaaaaaaaaaaaaaaaaaaaaaaaaaaaaaaaaaaaaaaaaaaaaaaaaaaaaaaaaaaaaaaaaaaaaaaaaaaaaaaaaaaaaaaaaaaaaaaaaaaaaaaaaaaaaaaaaaaaaagaagggggggcccccaaaaatgggccccgtcacccgggaaattatttcgggccgggtcctggaggggttaaaattttccccaagggggatcccttttaggcttggggttacccagggcaaaagctgttcccgggggaaatttgttaccggcccaaatttccaaaaacttaagaaccggggaccaaaagttttaacccgggggggccctaaggggtgggaaaccccaaa

SEQ ID NO: 5929 - DNA, 384 bp, Glycine max
  Clone ID: LIB3029-006-Q1-B1-E11
gaagaacatgggtttgacgaacaccatggtagtgctaacggtgtgtatggtgctacttttccttgtgaggggtactacaagtgccaacttgatgctaagtaaccttggcctgcgcatgaaaagtgatcatcatcagcactcaaatcatgatcagtcctcaaaaccatgctgtgatcaatgcgcatgcacaaagtcataccctcctcaatgccgctgttcatatatgaggctgaattcgtgccattcagcttgcagatcttgtaattgcacattaacgtctcctgcacaatgtttctgtgctgacataagcgcattctgctatgaagcttgcagacccagtgaggatgacaacgatttctactaatgaacaagtgttacgcatgt

SEQ ID NO: 5930 - DNA, 389 bp, Glycine max
  Clone ID: LIB3029-006-Q1-B1-E12
gctactggaagcccatttgtgtgcagggttcatattgccctcaagttgaagggagttcaatacaaatatgtcgaagaaaatttgaggaacaagagtgaactgcttctcaaatccaacccagttcacaagaaggttccagtgtttattcacaatgagaagcccatagcagagtctcttgtgattgttgaatacattgatgagacatggaagaacaaccccatcttgccttctgatccttaccaaagagccttggctcgtttctggtccaaattcattgatgataaggtttttggtgctgcatggaaatccgttttcacagctgatgagaaagagcgtgagaagaatgttgaggaagcaattgaggctctgcagtttcttgagaatgagat

SEQ ID NO: 5931 - DNA, 255 bp, Glycine max
  unsure (1)..(255): unsure at all n locations
  Clone ID: LIB3029-006-Q1-B1-E2
gccaaganattccccaaattgcaatctatatatatagctagatagcattgtgtactggacatccttcaaccagatcattcagccgaacggcctgctaggtgataaaacattccacctcgtgataagtctaggactccaccaggaggccttgaaacttctggggcccacattgggtgcacgaccggtccttgcctcatctgtaacacgtcgtaatcgtgggaatgttccgctctacgggtgcttctaagcgtcgaa

SEQ ID NO: 5932 - DNA, 402 bp, Glycine max
  Clone ID: LIB3029-006-Q1-B1-E4
gctaaattactttctttccattttccttcgttttctctctctttctcagtttctcagtttctcagtcatcaccatcgcagcagcaagatgtggaaccaaccattcggaaaaaccgatttggaaagcggttctcggcctctgtatccgatgatgctcgagagccctgaactgcggtggtcgttcatcagaaaagtgtactccataatcgccatccagttgctcgtaaccatcgtcgtcggcgccgtcgtcgtcaccgtccgcccaatcagtgtcttcttcgccaccaccggcgccggactggctctctacatcgtcctcatttttgttccctttataacgttgtgtccactttactactattcccagaagcatcccgtcaattacttgctcctaggggttttc

SEQ ID NO: 5933 - DNA, 243 bp, Glycine max
  Clone ID: LIB3029-006-Q1-B1-E5
gttctagatcgcgagcgggcaagaacaagactgccgagactgctgaggcagcgaagcagataaccgcacatgcaaaggacaacgccaaggaaaatgtgagtggtgcagatgaaggagcaaggaggaaaatggaggacctaaggcttcgaggtaaagggtatggaagtcatgaatctgcacgggggcgtggagataaggtggtggtgataatgctgacacagtaatcaggggcatttgcagctt

SEQ ID NO: 5934 - DNA, 392 bp, Glycine max
  unsure (1)..(392): unsure at all n locations
  Clone ID: LIB3029-006-Q1-B1-E6
aagaatcaaagaaaggggtggtggctgcttcgaaagcttaataatttgtttatttccagaacatcatagttttcgcagcagcaaactaacaaattactcatatcatataataagatggcccgttctctctcgcaagccaaacgtattggtgtccttgttgctcaatctatctccctaattcccgttcatcggcgaggttacgcagtggcatccgatgtatcggtaagagttggattgggtaatattgggcgaaggaatggaatcgtgggaggtgtagaagagaagcctgatacaagagatggttcanaagcctactcaactgattgggccccagacccagtaacaggttactatanggccattaaccacacccctgaaattgacccggtgga

SEQ ID NO: 5935 - DNA, 372 bp, Glycine max
  Clone ID: LIB3029-006-Q1-B1-E7
aagaatcaaagaaaggggtggtggctgcttcgaaagcttaataatttgtttatttccagaacatcatagttttcgcagcagcaaactaacaaattactcatatcatataataagatggcccgttctctctcgcaagccaaacgtattggtgtccttgttgctcaatctatctccctaattcccgttcatcggcgaggttacgcagtggcatccgatgtatcggtaagagttggattgggtaatattgggcgaaggaatggaatcgtgggaggtgtacaagagaagcctgatacaagagatggttcagaagcctactcaactgattgggccccagacccagtaacaggttactataggcccattaaccacacc

SEQ ID NO: 5936 - DNA, 262 bp, Glycine max
  Clone ID: LIB3029-006-Q1-B1-E8
ctcaaacgaagcccttttctctctctcttcaatttcacccttttagcatttgtacattcctttcccttccttgaatcgttcttaattgcgagaggggatatcggagaagttgattggcctcccattaattgcaggtctgaatgatctgatggagtctaaagttgggaagaagaagtcgtctagtagtaagtcccttttgtacgaagctcctctcgattacaccattgaagacgttcgaccacacggtggaattaagaagttc

SEQ ID NO: 5937 - DNA, 389 bp, Glycine max
  Clone ID: LIB3029-006-Q1-B1-E9
gatcttcttccttaccatttccttgtggggagttaaggtatcaagtgaagagcaccaccaccatggcaaatctaaagagggaaaggaggagacaggaagaagaagctaaaaaatgggcagaagagaaggctgaaagggagcaagaacaagctacgagagaagcagaagaagcacagagggaacaagaacaagctaaaagagaagcagcacagagggaacaagaacgggcaaaaagagagcaagaaaggaggcggcgagaagaagtagctggaaagggagaagaggaggaagaacacgcaggaagagggcacgaaaggagaaaagaagaagaagaaacagcacggagggaacaagaacaagaacaggctgaaagacagcaacaaaagaga

SEQ ID NO: 5938 - DNA, 341 bp, Glycine max
  Clone ID: LIB3029-006-Q1-B1-F1
agggtgatttgatcgcagtgcctactggtgttgcatggtggatgtacaacaatgaagacactcctgttgttgccgtttctattattgacaccaacagcttggagaaccagctcgaccagatgcctaggagattctatcttgctgggaaccaagagcaagagtttctaaaatatcagcaagagcaaggaggtcatcaaagccagaaaggaaagcatcagcaagaagaagaaaacgaaggaggcagcatattgagtggcttcaccctggaattcttggaacatgcattcagcgtggacaagcagatagcgaaaaacctacaaggagagaacgaaggggaagac

SEQ ID NO: 5939 - DNA, 362 bp, Glycine max
  Clone ID: LIB3029-006-Q1-B1-F10
taaaattcttccaccaagttatgggtttccttgtgttgcttcttttctccctcttaggtctctcttctagttccagcatatcaactcatcgttccatattggaccttgacctaaccaagtttaccacacagaaacaggtgtcttcactgttccaactatggaagagtgagcatggacgtgtctaccataaccacgaagaagaggcaaagagacttgagattttcaagaataacttgaactatatcagggacatgaatgcaaacagaaaatcaccccattctcatcgtttaggattgaacaagtttgctgacatcactcctcaagagttcagcaaaaagtacttgcaagctcccaaggatgtg

SEQ ID NO: 5940 - DNA, 380 bp, Glycine max
  Clone ID: LIB3029-006-Q1-B1-F11
cttttcacttcaactctaaaaggttccaaactctcttcaaaaaccaatatggccacgttcgcgtcctccagaggttcaacaaacgctcccaacagcttcagaatctccgagactaccgcattttggagttcaactccaaacccaacacccttcttctcccccaccatgctgacgctgattacctcatcgttatccttaacgggactgccattcttaccttggtgaacaacgacgaccgagactcttacaaccttcaatctggcgatgccctaagagtccctgcaggaaccacatactatgtggttaaccctgacaacgacgagaatctcagaatgataacactcgccatacccgttaacataccccgtagatttgagagt

SEQ ID NO: 5941 - DNA, 405 bp, Glycine max
  unsure (1)..(405): unsure at all n locations
  Clone ID: LIB3029-006-Q1-B1-F12
atgagtttgaagaacaacatggtggtgctaaaggtgtgtttgttgcttcttttccttgtgggggttacagctgcacgcatggaactgagcttcttcaaaagtgatcagtcatcaagttatgatgatgatgagtattcaaaaccatgctgtgatctctgcatgtgcacacgctcaatgcctcctcaatgcagctgtgaagatattaggctgaattcatgccactcagattgtaagagctgtatgtgcacacgctcacagccaggacagtgtcgttgtcttgacaccaacgacttctgctacaaaccttgcaagtccagagatgactagaaaaactaatagctctctcaaatggacgaagcccctttaggctttgtttgttatgttaagggagacanataaaacaag

SEQ ID NO: 5942 - DNA, 355 bp, Glycine max
  Clone ID: LIB3029-006-Q1-B1-F5
gtgatttctagcgttttgtatatatagaaagtccaatagaactggaaaaggctgaagaggtagaaataagacacctatgaaatagttgatggtgcagtgatcaaaagaatggcatgtagcaaaataagcaaggctcttttcaaccttagttaaggtgatgatgtttgataaggacttatagggtttggtttctaaggtaaaattatacctaagttttgggggtagaggatatgtaaatagtggctaagtgaggttggggaagaggacaaatgaaaatgtacttcttggaaaataggtggtatgtctatattatatgaaaatagacaataaagatgtatttattattacaaattca

SEQ ID NO: 5943 - DNA, 333 bp, Glycine max
  Clone ID: LIB3029-006-Q1-B1-F6
gctgtctgcagggcaatattgatgtttttccaagagcttgaggtggactctgcaaaatgcctggaaaatggagaaagtggaacgttgattgctccgcaggacgcatgcaatagaattgctgaagtggtgcaggaggctataagaaagatggaaatggtagctgatgagaagatgaggatgttcaagaaggctcgcttggctcttgaagcttgtgaacatgaactagctgacaaggccagggaggtgacagagctcaagatggagagacagaaaaagaagctgcagatagaagagctggagaaaattgtgaagctgaaaaatgcaaaagctgat

SEQ ID NO: 5944 - DNA, 389 bp, Glycine max
  Clone ID: LIB3029-006-Q1-B1-F7
gtttcaatttggtaccagtgaaaatgacaagaggggaaactcgtgtatcaagggcttttattgtgtcattaaaaggggacatgtgaaagtcccttgactcaaaaggcagttaatgcatttttcttcccatgtaatcgtttaggtctttagatatttttatgctttggcaggtctggtctggtggtactatattatgggttaataaatcatgggtgttcccataatgtaacccttttaatgtgtgtctttttgtgttagccctatgttgttacttactatcatatatgtacgactgtgacatacataaaagatttttattctcttataaaatcatatttccattgctacattcatagttaacgaatctgaatatatggctcttttattat

SEQ ID NO: 5945 - DNA, 407 bp, Glycine max
  unsure (1)..(407): unsure at all n locations
  Clone ID: LIB3029-006-Q1-B1-F8
ctcgagccgattcggctcgagaggcaacatgggaacatcggtggcccttactatggaaccaacaccgcagacaccggtactggtcccagaagtggaaccacgggcggcaccggttatggaggcactggtggcactgattatggaacaactggtggcactggttatggaagtggaactgggtatggagtcaacactgggggtgcgcacactgaagcaggatatangaaggaacatcgtcagcatgaccaatctcatggtgatcagaacgagaagaaagggattatggacaagattaaggagaagcttcctggaggacacagtgacaagtagatgcatcgtgcatcatgcatgcatgcatatatataatattgttgtctttgaataaatttgctgcatatgtacttacg

SEQ ID NO: 5946 - DNA, 400 bp, Glycine max
  Clone ID: LIB3029-006-Q1-B1-F9
aaagattagaaatcgacatatggggggagcaaagagttactcttgttttgcagtaatagctgtggccttggttttgctacttctgaatgtggctgtggtttgcaatggaggcaagacaagcacattcattaggaaggttgagaaaactgaggacatgccccttcatagtgatgtatttgttgccccttctggctataatgctcctcagcaggttcatataacacaaggtgaccaagtgggaagggccatgatcgtgtcatgggtgactgtggacgaaccaggaaagagtctagtgcattactggagtgacgccagccagcacaagagagtggccaagggaaatcatgtcacatatagatacttcaattattcttctggttttatacatcactgcaccctt

SEQ ID NO: 5947 - DNA, 363 bp, Glycine max
  Clone ID: LIB3029-006-Q1-B1-G1
agatcaatgaatgatctccatcatcattcccttccccatgtgatgtgccactcctctctctagggttttcaatcccccaatttcaatcgcagcccaacccaaagcttttccacctttcccattcattcgcacaattcccttcgcccttttccttttcggccaaaagggtctccggcgcttcgcctctctttgaccgttccgggctcgcctccccaggcctcttgagagagagagaaaactgcttttctagagagagaaagtcaccatgggaatgtagagtggagcttcttcccttgttgctgttgttgttgttgttggtgaccgagcaatgttggaaatggacaacgattttgactccaagct

SEQ ID NO: 5948 - DNA, 404 bp, Glycine max
  Clone ID: LIB3029-006-Q1-B1-G10
agagagagaaaaatggctgatacaagtggaggagatgcagtgagaccggtggtaatatgtgataacaagtgtggctgcacagttccatgcactggtggttccacttgcaggtgcacaagtgtcggcatgacaactggaggcggtgatcacgtgacatgctcgtgcggagagtactgtgggtgcaatccatgctcatgtcccaagactgcggcttctggaactggttgcagatgtggcacagattgctcatgtgcctcttgccgcacttaacatcataccttaattaagtctcaaacttcacaaatcttgaatgtgctttaaatctagctatgtactagatagtctcgttcaatgttagtgttcaaattgtggatgtgatttctaatattagtctactactctat

SEQ ID NO: 5949 - DNA, 402 bp, Glycine max
  Clone ID: LIB3029-006-Q1-B1-G11
ctcagaaccaaactcgccaaaactagggttttgcattgatggcactgtgcaaccgcgtcagatcgggaatctctctcttcaccaaatccacgttccttacttcccagcgatccagtctccaacgatccctcgttgcccctttcatttccctcgcctccagaaattacgccaacgtgccggggcaaaaggaaaccaaagttaaggtccctctggctttgtttggaggttcaggaaactaagcctccgctttggataatgcaaccgttaaagccaatgcaattgaaaagggtgagactgagcttctgcaatttgttgaggcagtaaagaatagtcccatattttcacagtttataagggacttgtctgtggctaaggatgttagagtgaaagttatccaggata

SEQ ID NO: 5950 - DNA, 364 bp, Glycine max
  Clone ID: LIB3029-006-Q1-B1-G12
acagtccagaggaagctcgccaattgagaaggaaagctctctctcgtattgaatggctgcaaaaagctgatgtgcctaccatagcacagattgaagagttccattcgatgcagaggatgatgaatgctcctgattcaaatgataatattgatctactgttgagcattgatttgttgggtttacaaggagcaggtaaagcttttccaaacaagattgtttttgatgataagcttgtgttggctaacacacaagaattctttgatggaaattttccagtggattcttggttaccaatttttgtgaattgtctttatcctgtaagtcaattaccttcagaagctgtcgttgtaaatgttacatgtgg

SEQ ID NO: 5951 - DNA, 314 bp, Glycine max
  Clone ID: LIB3029-006-Q1-B1-G2
accccggaattcggtccaaggtcatggaaaacaaacctacccttttgcttttgcccttggtcctttgcaatggattggcaacaacaacaatggccttcaataatgataagggtggtgataaaaattcaccaaaaagtttgtttttgatgagcaactccacaagggttttcaaaacggatgcaggggaaatgcttttgctgaaaacccatggtggtaggatattttataggcaaatgcacattggcttcacctcaatggaaccaaagtccttgtttgttccccattacctcgactccaatctcatcatattcatc

SEQ ID NO: 5952 - DNA, 157 bp, Glycine max
  Clone ID: LIB3029-006-Q1-B1-G3
ccaagcaaaacttccacttgagagacaatagtgtatgaacactacacattttcaatttttcaatggcgtcgaggcagcctaccgaggatcgagctgaggcagctgcgaaagttgctgcgaaagaactcgaacaactcaaccgacaaagataccgtga

SEQ ID NO: 5953 - DNA, 343 bp, Glycine max
  Clone ID: LIB3029-006-Q1-B1-G5
ggtgttctccatcatcattctcttcccaatgtgatgtagtagtcgtcgctccaaggtttgaaatgcggcatcgtcatccgcagccgaggcgatacattttccactttgactagtcgcgccttcaagtcacttcacccttttctattcgcagcaggtcggtcacctgcgctacgcctctcgttaaacgttccgggttcgcgatccactggcctcttgacagagagagaccaatgcagtttcgaaagagatacattctccaggtgaatgtcggttggagccacttgccgtgatgctgttgttgttgtagttggtgaccgatcaatgttgggtatggagaaggatt

SEQ ID NO: 5954 - DNA, 268 bp, Glycine max
  Clone ID: LIB3029-006-Q1-B1-G6
tggaaatgtctgctgtagtttacaaggattgggtttttacagatcaagcattgcctgctgatcttataaaaagaggaatggcaattgaggatccatcgtgccctcatggcattcgccttgtgatagaggactacccttatgctgttgatggacttgagatatgggatgctatcaagacatgggtccatgaatacgttttcttgtactacaaatcagatgacacacttagagaagatcctgaactccaagcctgctggaaagaactcgt

SEQ ID NO: 5955 - DNA, 400 bp, Glycine max
  Clone ID: LIB3029-006-Q1-B1-G8
aaactttcatttcagagattttcatcatctcagcaaaggaatcaatcaatcaagccatggcaggcttcagtggcgacgaaaccgctcctttcttcggcttcctcggtgccgctgcggccctcgtcttctcctgtacgggagcggcgtatggaacggcgaaaagtggggtgggggtggcgtcgatgggagtgatgaggccggagctggtgatgaagtcgatcgtgccggtggttatggctggagtgttggggatttacgggttgattactgcagttattatcagcactgggataaacccaaacgctaagtcttactagctctttgatggatatgctcatttgtcctctggccttgcctgtggcctatctgagctctctgctggaatggccattgggattgt

SEQ ID NO: 5956 - DNA, 166 bp, Glycine max
  Clone ID: LIB3029-006-Q1-B1-G9
gttcaggggcatgtcactccctacataattggcaccatccaggatcgctgtcttactcatgtttatatcactagtagagatggtacatacaaaggaactactgcttttcactatgaagttttaccgcagtgtcagtttctcacaattgccgttattcatatgtcca

SEQ ID NO: 5957 - DNA, 366 bp, Glycine max
  Clone ID: LIB3029-006-Q1-B1-H1
cttcaccgaggccaccgtcacacggccgtggaaattcaagcaccaacagtggaccaaagccaaccaggagggaaaggagatgaggaaacagttctcctccagtttggtaaagtaggggatgatacttttaccatggattatagacagcccctatctgctttccaggcttttgccatttgcttaactagctttggcactaaacttgcttgtgagtaatataattttggtgtcactgcttatttattccgtggatggatgttttaagtgaatagttgttttcttttttactcggctttaagtctacaatttgattgcaggaagcttgttgtaaatgttatatcatcaataggacatgacatctttcat

SEQ ID NO: 5958 - DNA, 394 bp, Glycine max
  Clone ID: LIB3029-006-Q1-B1-H10
acaagacgaggacgaggacgaagatgaagataaacctcgtcctagtcgaccaagccaaggaaagcgtgaacaagaccaggaccaggacgaggacgaagatgaagatgaagatcaacctcgcaagagccgcgaatggagatcgaaaaagacacaacccagaagacctagacaagaagaaccacgtgaaagaggatgcgagacaagaaacggggttgaggaaaatatctgcaccttgaagcttcacgagaacattgctcgcccttcacgcgctgacttctacaaccctaaagctggtcgcattagtaccctcaacagcctcaccctcccagccctccgccaattccaactcagtgcccaatatgttgtcctctacaagaatggaatttactctcca

SEQ ID NO: 5959 - DNA, 379 bp, Glycine max
  unsure (1)..(379): unsure at all n locations
  Clone ID: LIB3029-006-Q1-B1-H11
cttcttcgtctcaaatctcttcgttccttcgattcgttccatttcttccaaaatggccaaagacccagttcgcgttctcgtcactggagctgcagggcaaattgggtatgctcttgtccctatgattgctangggagtgatgttgggtcctgaccagcccgtgatcctccacatgcttgacattcctccggcagcagagtcattgaatggggttaaaatggaattggtggatgctgcattccctcttcttaaaggtgttgttgccacaactgatgtggttgaggcatgcactggggtcaatattgccgtgatggttggtggattcccaagaaaagaaggtatggagaggaaggatgtgatgactaagaacgtctccatt

SEQ ID NO: 5960 - DNA, 394 bp, Glycine max
  unsure (1)..(394): unsure at all n locations
  Clone ID: LIB3029-006-Q1-B1-H2
atatcctagtacaccgtattaaagaatttaagatatactatgatgagagcgcggttcccattactgttgctgggagttgttttcctggcatcagtttctgtctcatttggcattgcgtattgggaaaagcagaaccccagtcacaacaagtgcctccgaagttgcaatagcgagaaagactcctacaggaaccaagcatgccacgctcgttgcaacctccttaaggtggaggaagaagaagaatgcgaagaaggtcaaattccacgaccacgaccacaacacccggagagggaacgtcagcaacacggtgagaaggaggaagacgaaggtgagcagccacgtccattcncattcncacgcccacgccaacctcatcaagaggaagagcacgagc

SEQ ID NO: 5961 - DNA, 388 bp, Glycine max
  Clone ID: LIB3029-004-Q1-B1-G2
ggcttcctgttatcacaaacaatgtctgacggtcaagaatcaaacaagaataatgagaaaaggaaaattaagaaatttataaagggattggaaactggcccaagtaatgggaacagcatgatttctctgataatgcctccacgtgatcaaatatctcgggtcactaagatgttgggagatgaatttggaactgcttcaaacatcaaaagtatggtgaaccgacagtctgtgttgggagccattacttctgctcagcagaggttgaaactatataacaaggtccctccaaatggtttggttctttacactggaaccattgtcactgaagatggcaaaggaaaaaaggtgacaattgattttgagcctttcaagcctaacaatgcatcac

SEQ ID NO: 5962 - DNA, 273 bp, Glycine max
  Clone ID: LIB3029-002-Q1-B1-E9
gcaatctcacgcaggtagcagcacagacgctattacccgtgacttcgcagccctactggcctcacacactcagtgcccagtgatggatcaggctgcaagaatcctaggttcgcgcgacgctatctcctgatcacaaatagcatgatgaacgtattgaatgggcaggcacaggaatcaatggcgaattgctgtcgtgagagagtgtacgaaggagagctgccacagggaagcgtgctgcatgtgacactataacacactgtggctgcaacatgc

SEQ ID NO: 5963 - DNA, 418 bp, Glycine max
  Clone ID: LIB3029-002-Q1-B1-F1
gtactttcttgcgaaacagaagggcgaaggggcaaacacaacttttttgtttttttgtagagcgagagagaaaaaaaatgttggggatcttcagcagtttcgtggtgtcgccgccggaggagctggtggctgccggcagcagaacgccgtcgccgaagacgacggcggggaagctgctgaaccggttcgtggagaacaaggcgtcggcggtgtcgctgcaggtgggagaacacgtgcagttggcttacacgcaccacaacgagtcaccgtggcatcccagatcatttgctgttaaggatgagatattctgcttgtttgagggggctctagacaatttgggcagcctgagacaacagtatggactggccaagtcagccaatgaagtggttttggtgattgaggcttacaaagctttacg

SEQ ID NO: 5964 - DNA, 400 bp, Glycine max
  Clone ID: LIB3029-002-Q1-B1-F11
cttggttgaagataactggaagtttgaagggcctcgttcgcggatccacctagtatcacatcgaggtggtcatctctataggccaacagaaatttctaagaattggaatttgactccaccaaaatagttggaacactcaccttgtaacactgtgcctctattataaagtgattatggttgtgatctgcagataagaactgctatgccaatttctttcccccgtggtagaaaacacagctgttagttgttactctacatcttcaggtgacatgacatgtagttctgtgagggcatgaagattgcaaatgaaggttctttctatgcaagattgttagtcatattttctgctagtctttctaactgggttgagaagctggtgtttttaacatttatgtggtat

SEQ ID NO: 5965 - DNA, 402 bp, Glycine max
  Clone ID: LIB3029-002-Q1-B1-F12
gaggaagctcgccaattgagaaggaaagctctctctcgtattgaatggctgcaaaaagctgatgtgcctaccatagcacagattgaagagttccattcgatgcagaggatgatgaatgctcctgattcaaatgataatattgatctactgttgagcattgatttgttgggtttacaaggagcaggtaaagcttttccaaacaagattgtttttgatgataagcttgtgttggctaacacacaagaattctttgatggaaattttccagtggattcttggttaccaatttttgtgaattgtctttatcctgtaagtcaattaccttcagaagctgtcgttgtaaatgttacatgtggtagtggacgtggtggtttacccaccactgcttggattagttctgca

SEQ ID NO: 5966 - DNA, 376 bp, Glycine max
  Clone ID: LIB3029-002-Q1-B1-F3
ggctaacacacaagaattctttgatggaaattttccagtggattcttggttaccaatttttgtgaattgtctttatcctgtaagtcaattaccttcagaagctgtcgttgtaaatgttacatgtggtagtggacgtggtggtttacccaccactgcttggattagttctgcagttaacaatcgctcctcagatatcaacaaaaggattcgcacagcacttgggaaaggtaagaaaattgtttttcttactagagttgatccttttccagtagctttactggctgttctttttggcgttaagaatgaaattctgagttctaacgccactaatcctatgctgacgcgacttcttgagaactgttagagtctcaaatat

SEQ ID NO: 5967 - DNA, 373 bp, Glycine max
  unsure (1)..(373): unsure at all n locations
  Clone ID: LIB3029-002-Q1-B1-F4
tataacttaagagagggtgatttgatcgcagtgcctactggtgttgcatggtggatgtacaacaatgaagacactcctgttgttgccgtttctattattgacaccaacagcttggagaaccagctcgaccagatgcctaggagattctatcttgctgggaaccaagagcaagagtttctaaaatatcagcaagagcaaggaggtcatcaaagccagaaaggaaagcatcagcaagaagaagaaaacgaaggaggcagcatattgagtggcttcaccctggaattcttggaacatgcattcagcgtggacaagcagatagcganaaacctacaaagagagaacgaaagggaaaacaagggagccattgtgacag

SEQ ID NO: 5968 - DNA, 390 bp, Glycine max
  Clone ID: LIB3029-002-Q1-B1-F5
gcttggaagaacctcactgaagaattaaggagagaaaaatcaacatcaaagttataacgatgaagcccattgacgataaacaagagacagtgacgatcagagcggtgagccacgacgaggaagggagaaagagggtggaaaaaatagagctcaacactcacaacatccacactataaagtacgtcgagaagaagctcatcaacaagggtgtgcagcgcaaggaccgccacccagccgacggcatcagaatcggccggccaccgccaaagtccggccacggcggcaaattcacgtgggagggcccggctagcgtggaggataacgagctcatgacggagccggcggccatggacgaaggagaccccaactacttggactgggaagagagag

SEQ ID NO: 5969 - DNA, 401 bp, Glycine max
  Clone ID: LIB3029-002-Q1-B1-F6
aacaaatcccagggagccaccaaccatggcttccaagctctgcgactcatgcaaatcagccactgctaccttgtactgccgccccgacgcggccttcctctgcggcgcctgtgactctaaggttcatgccgccaacaagctcgcatcgcgccacccgcgcgtcgtgctctgcgaggtgtgcgagcaggcgcccgcgcatgtgacctgtaaagccgacgccgccgcgctctgccttgcctgcgatcgcgatatccactccgccaaccccctcgccagccgccacgagcgcatccccgtcacgccgttcttcgagtccgtacattcagtcaaggcctcctcgccgatcaacttccaccaccgcttcttctccgacgccgacgctgatgctgacgtcagcaccg

SEQ ID NO: 5970 - DNA, 415 bp, Glycine max
  Clone ID: LIB3029-002-Q1-B1-F8
caccatcctcaaaatctccaaactcgcgatcctcctcgttttgttcgcttcagtctgcaacgtcgctatgtcggactccaccgccaaacccctcgaccagcacgccaccacgggctctgaccctactgcgccagcggttcacatcgtgtacaccgagagaccacagaacgaggagcctgaggcctaccacatcagaaccctcacttcagtccttggcagtgaggaggctgcaaaggaagctttgttgtatagttacaagtctgcagccagtgggttctcagctaagcttactccggagcaggttgaacagatttcaagtgttcttcaagttgttcctagcaggacatatcagctccatggaccaaataacctgcagtagagaatgttcacctaaagttgtatcggttaaaccgtt

SEQ ID NO: 5971 - DNA, 351 bp, Glycine max
  Clone ID: LIB3029-002-Q1-B1-G1
gcggttgttgatcaagtgcttaagatcattgagaaggaagatagaaaactcttgattccttgtgtaaaggctattgggaatctggccaggaccttccgggcgacggagaccaggataatcggtcccttggtccggcttctcgacgaaagagaggcagaagtgtccagggaagcagccatatctctcacgaaattggcctgctcggagaactacctccaccttgatcactccaaggcaatcataagtgccagtggtgccaaacacttggtccagcttgtgtatcttggagaacagacagtgcagatttcagcactagtcctgctctcctacattgcattgcatgtgcctgac

SEQ ID NO: 5972 - DNA, 407 bp, Glycine max
  Clone ID: LIB3029-002-Q1-B1-G10
ctgtctctctcgaacacaatgtccaactccaccaccggcaccaccgcggccttaccaccgaagcccacctgggtcctcccataccgaaccgagaatctccgcgaggtctacaccctaagccgaaagctcggccagggccaattcggcacaaccttcctctgcacgcacaacgccacgggacgcaccttcgcctgcaagtcaatcccgaagcggaagctgctctgcaaggaggactacgacgacgtatggagggagattcagataatgcaccacctctccgagcaccccaacgtcgttcgcatccacggcacctacgaggacgccgcctccgtccacctcgtcatggagctctgcgagggaagggagttgttcgacaggattgtgcagaaggggcactacagcgagcg

SEQ ID NO: 5973 - DNA, 395 bp, Glycine max
  Clone ID: LIB3029-002-Q1-B1-G11
atcccatccgccgcatctcccgagagtaaagtgttttaccttaaaatgaagggtgattaccacaggtaccttgccgagttcaagactggggcagagaggaaagaggcagcagagagtactttgcttgcttacaaatctgctcaggatattgctcttgctgacttggcccccactcaccccattaggctgggacttgctctcaacttttctgtcttctattatgaaatccttaactcgccagatcgggcttgtaatcttgccaaacaggcatttgatgaggcaatttccgagcttgacacattgggtgaagagtcatacaaggatagtacgttgatcatgcaacttctccgtgacaatctgactttgtggacatcagacatcacggacgatgctgg

SEQ ID NO: 5974 - DNA, 396 bp, Glycine max
  unsure (1)..(396): unsure at all n locations
  Clone ID: LIB3029-002-Q1-B1-G12
acaagagcagcatgaggaacaagatgaaaatccctacatttttgaggaagataaggattttgagaccagagtcgaaactgaaggtggcagaattcgggttctcaagaagttcactgaaaaatccaagcttcttcagggcattgagaacttccgtttggccattttggaagctagagcacacacgttcgtgtctcctcgccactttgattccgaggttgtttttttcaacatcaaggggcgagccgtacttgggttggtgagtgaaagtgaaacagaaaaaatcacccttgaacctgnggacatgatacacataccagctggcaccccactgtacatcgttaacagagatgagaatgataagctcttccttgccatgctccatatacctgtctctgt

SEQ ID NO: 5975 - DNA, 383 bp, Glycine max
  Clone ID: LIB3029-002-Q1-B1-G2
cggctcgagcttcagagcgcaggcaaacaacttcttctcagacatggcatctcaaggtttgtgtccttcgataaaaaatattcttcttttggactctgaagggaagcgtgtggcagtcaagtattactcagatgactggccaacaaacaatgcaaagttagcttttgagaagtttgtatttactaagactgttaagacaaatgctcgtacggaagctgaggtaacactacttgagaacaatattattatttacaaatttgtacaagacctgcatttctttgtcactggtggtgaagatgaaaatgagctcattctagcatcagttcttcaaggtttctttgatgcagtcacccttctgttgaggagtaatgtttacaaaagag

SEQ ID NO: 5976 - DNA, 422 bp, Glycine max
  Clone ID: LIB3029-002-Q1-B1-G4
cgctccggaggcgcctgggacgacgagaagccgcgcgaggagtgcggcgtggtgggcatatacggcgaccctgaggcctcgcgcctttgctacctcgccctccacgcgcttcagcaccgcggccaggaaggcgccggaatcgttacggttcacaacaacgtcctccaatccatcaccggcgttggtctcgtttccgacgtgttcaaccagtcgaagctggaccagctccccggcagcctcgccatcggccacgtccgctactccaccgccggccaatccatgctcaaaaacgtgcaacccttcgttgccggctaccgcttcggctccgtcggcgtggcccacaacggcaacctcgtcaactaccgcaccctccgaaccaacctcgaggacagccggtccatcttcaacactacctccgacac

SEQ ID NO: 5977 - DNA, 341 bp, Glycine max
  Clone ID: LIB3029-002-Q1-B1-G5
cacaccagcaccatggcagcaagagcaaaaacgccccttaacactctctcctctttcacattcagactcttgctctcagtctctctcctccagctttcgctctcctcccccacgagcatccacgagcttctccgctccaaaggcttaccaccggggcgcctccgggaggaggtgaaatcctacaccttctctgagactgggcacttggaagtgttcctggacgcaccatgcctcacagaatacgagaacagagtcctcttcgaacaagtcgtcactgctaagctcacctacggaagcctcataggagtggagggtctccagcaagaagaactcttcgtgtg

SEQ ID NO: 5978 - DNA, 420 bp, Glycine max
  Clone ID: LIB3029-002-Q1-B1-G6
gcagcgtcaatcgcgtaagtgcgagaaggaggagaaatcggagaagctgaaggtgaagaaggcgatcgagaaaggcaacatggacggcgctcgaatctacgcggagaacgcgatccgtaagcgcacggagcagatgaactacctccgcctggcctcgcgcctcgacgccgtggtcgcccgcctcgacacgcaggcgaagatgacgacgatcagcaagtcgatgggcaacatcgtgaaatcgctggagtcatcgctggccacggggaacctccagaagatgtcggagaccatggactcgttcgagaagcagttcgtgaacatggaggtccaggccgagttcatggagagcgccatggccggatccacctccctctccactcccgaccgagaggtcaacagcctcaagcagcacgttgccga

SEQ ID NO: 5979 - DNA, 388 bp, Glycine max
  Clone ID: LIB3029-002-Q1-B1-G7
gattgttgtgactcgttcttcttcgtcgttatcttcttcttttgttgtttgtgtgtttgttttttctctcacctgaaaatgtcttgctgcggtggtaactgtggttgcggaagcgcctgcaagtgcggcaacggctgcggaggctgcaagatgtacccagagttgagctacaccgagtcaaccaccaccgagaccttggtcatgggagtggcaccagttaaggctcaattcgagagtgctgaaatgggtgttcccgctgagaacgatggctgcaaatgtggagctaactgcacctgcaacccctgcacttgcaagtgacgtcttggagagctaaagcttcaagcataaatggcccttagaattaatgatacaaactacaagtaatttc

SEQ ID NO: 5980 - DNA, 403 bp, Glycine max
  Clone ID: LIB3029-002-Q1-B1-G8
cagtggtgccttatcgctgtggttatcatcttcttcttcctctttcttagatctcttctttctctacgccgcacgccgaaaccatggccggaaaaggagagggtcctgctatcggaatcgatctcggaaccacctactcttgcgtcggtgtgtggcaacatgaccgcgttgaaatcatcgccaacgaccaagggaacagaaccacgccgtcttacgtcggattcactgacaccgagcgtctcatcggtgatgcggccaagaatcaagtcgccatgaaccccatcaacaccgtcttcgatgccaagaggttgattggtcgtagattcagtgattcctctgttcagagtgatatcaaattgtggcctttcaaggtcattcctggtgctgctgacaagccaatgat

SEQ ID NO: 5981 - DNA, 401 bp, Glycine max
  unsure (1)..(401): unsure at all n locations
  Clone ID: LIB3029-002-Q1-B1-G9
cgccttcttcgtccatgtctccacccgccgctgctccttcaccttcatcctccgtcgtgagctctccgccgtctcctcctacttcagttccggcgtcttctccgtcgccttccatctctccgtcgtcgatctcttcccctccgtccgatgcccccgcaccgtccgagaatgccgccgtctcgaatggattcgccgctgtcggatctgtcgtagtcggtctcgtcgccgccgcatcgatcatgtgaaccgctacataggcgtatatagaaaatttattatctcctatatattctccttattttttttttacttttttatagttattattttttcatttagagttttatatctggagaatttcgagtttgtatangacaagcgatttaccttggtagtttttc

SEQ ID NO: 5982 - DNA, 408 bp, Glycine max
  Clone ID: LIB3029-002-Q1-B1-H1
gtgaccaaactccatttctcactcgccgtcgtctcttccgtctagggtttctcctcttcacaaaaatggttgccgcaaaaaaaactaagaagacccatgagagcatcaacaacaggctcgctctcgtcatgaagagtggcaaattcaccctcggttacaagaccgttctcaaatctcttaggagctccaaagggaaattgattatcattgctaacaactgcccccctttgaggaagtcagagattgaatactatgctatgttggcaaaggttggggttcatcattacaatgggaacaatgtggatttgggcactgcatgtggcaaatattacagagtgtgctgccttagcattagtgatcctggtgattcggatatcatcaagacactgcctggcgaacagtaaagta

SEQ ID NO: 5983 - DNA, 398 bp, Glycine max
  Clone ID: LIB3029-002-Q1-B1-H10
ctaagtgagaaacaaagaaaggaaataattgatctttgaaaatgcagggaggaaagaaagctggagagtccatcaaggaaacagctgcaaacattggtgcttctgccaaggctggcatggagaaaaccaaggccactgtccaggagaaggcagaaagaatgacggcacgtgatccgatgcaaaaggagttggcaacccagaagaaagaggcaaagatgagccaggcagagctggacaagcaggcggcgcgtcagcataacacggcggcgaagcaggctgccacggcagggcacatgggacaacccatggggacccatcagacgtcagctatgcccggtcatggaaccggacagcccacgggccatgtcaccgagggagtggtgggctcacaccctatt

SEQ ID NO: 5984 - DNA, 403 bp, Glycine max
  Clone ID: LIB3029-002-Q1-B1-H11
tgggtttacaaggagcaggtaaagcttttccaaacaagattgtttttgatgataaacttgtgctggctaacacacaagaattctttgctggaaattttccagtggattcttggttaccaatttttgtgaattgtctttatcctgtaagtcaattaccttcagaagctgtcgttgtaaatgttacatgtggtagtggacgtggtggtttacctaccactgcttggattagttctgcagttaacaatcgctcctcagatatcaacaaaaagattcgcacagcacttgggaaaggtaagaaaattgtttttcttactagagttgatccttttccagtagctctactggctgttctttttggcgttaagaatgaaattctgagttccaacgccactaaccctatgct

SEQ ID NO: 5985 - DNA, 368 bp, Glycine max
  unsure (1)..(368): unsure at all n locations
  Clone ID: LIB3029-002-Q1-B1-H12
ctttctccgagaacaaaaaaaaaaaaaaaaaaaatccgcgattcgctcttctcttggaaaagtgaaaaccagaagtacgaacgaaagagaagagcgatttagaagtgagagaagatggggttgtcgttcacgaagctgttcagcaggttgtttgcgaagaaggaaatgaggattctgatggtaggtctcgatgctgctggtaagacancatcttgtacaagctcaagcttggagaaatcgtcaccactatccccaccatcggatttaatgttgagactgtggagtacaagaacatcagcttcactgtgtgggatgttggtggtcaggacaagatccgtccactgtggaggcattatttccagaacact

SEQ ID NO: 5986 - DNA, 383 bp, Glycine max
  Clone ID: LIB3029-002-Q1-B1-H2
atcatcatcatcttcattagtgttagccctaaacttcaccttcaaccatgaccacagtgccaccacacagtgtccaagtgcacacaacaacacaccgctacgaagccggcgtcgtcccgccggctcgttttgaggcgccgcgttacgaagccggcatcaaggcgccctcttccatttaccattccgagagaggtccgacgacctctcaggttctcgcagttgtcgccggccttccggtcggcggcatcctcctgctcctggcaggactgaccctggctggaactctcaccgggccggtggtggcaacaccgctcttcatcatcttcagcccggtgctgattccgggcacggtcgcaattggcctggccgtggcgggttcctga

SEQ ID NO: 5987 - DNA, 359 bp, Glycine max
  Clone ID: LIB3029-002-Q1-B1-H5
gattgtttagatgcaatcttcagcagatctatgaagtaccctttcttcgctcagttcgaggtgtcgtattctttagagtaggacaacctcttggctttctgtcttcttggcctctcttcactttaacacatcacttagtgatgttttattgtgcagagaaggtgtacccaggacagcgctttactaggtatgccattcttggagacgatgtttgtatcgccgacgagaatgtggcctctctttatcgccagacagtaaatgatctaggtctcgcaataagaaagggggtgagataggcgacaggtagcttgcttccaagccggcccggccgcgaggaagagatctttgccggtgctgac

SEQ ID NO: 5988 - DNA, 342 bp, Glycine max
  Clone ID: LIB3029-002-Q1-B1-H6
tcctttaccaccattctagatatcagagaactttgcagctctcttaggtttttaaaaaacaccacgcaaacagcaagatggccacttccgacagtaacatgctactaaattatgttccagtttatgtgatgctcccactcggagttgtcaatgttgacaatgtttttgaagacccagatggccttaaagaacagctcttgcagcttcgagctgcgggtgttgacggggttatggttgatgtgtggtgggggatcatagaactgaaggggcctaagcagtatgattggagagcctacaggagtttgtttcagctggttcaagaatgtggcttgacactgcaag

SEQ ID NO: 5989 - DNA, 193 bp, Glycine max
  Clone ID: LIB3029-002-Q1-B1-H7
ggagtcaacactgggggtgcgcacactgaagcaggatatacgaaggaacatcgtcagcatgaccaatctcatggtgatcagaacgagaagacagggattatggacaagattaaggacaagcttcctggaggacacagtgacaagtagatgcatcgtgcatcatgcttgcatgcacatatcgaatactgttgtc

SEQ ID NO: 5990 - DNA, 406 bp, Glycine max
  Clone ID: LIB3029-002-Q1-B1-H8
atagcattttcagaggaacaatggcgggtaaggtttcgacgtgcttcttcttcgtgtttgctctttctctccttcttccttttcagatctccgctgaggaatcatcggagaaagagttcgtactcacattggattactctaactttcacgacactgtcagcaagcacgatttcatcgtcgtcgagttctacgctccatggtgtggccactgtaagaagcttgctcccgagtatgagaaagctgcttctatcttgagtagtcatgatcctccggttgttttggctaaaattgatgccaatgaggagaagaacaaagaccttgcatctcaatatgatgttaggggatacccaacaattaagattctgagaaatgggggaaagaatgttcaggaatacaaaggtccccg

SEQ ID NO: 5991 - DNA, 331 bp, Glycine max
  Clone ID: LIB3029-002-Q1-B1-H9
agatgaagttcaatccacgtgtgtcgagcagccgccgcaagagccgaaaggctcatttcacggcgccatcgagcgtgcggcgggtgcttatgagcgcccctctgtcggcggagctgcggtctaagtacaacgtgaggtcgatcccagtacggaaggaggacgaggtgcaggtgatgcgaggaacatacaagggtcgcgaggggaaggtgactcaggtctaccgtcgaaagtgggtgattcacattgagcgcataacccgcgagaaggtgaatggttccaccgtcaacgttgggattcacccctccaaggttgtgctgaccaagctcaaatt

SEQ ID NO: 5992 - DNA, 366 bp, Glycine max
  Clone ID: LIB3029-003-Q1-B1-A11
ggaaatggctgaagcacaactacgagaccagcatggcaaccctgtcccactcaccgatcaatacggtaatccggttatcttaactgacgagcgcggtaatcccgtccaactcactggtgtcgctaccaccgctaccggcacagcaggttctgggtttgggtcctatggtaccggtgcttacggtggtggtgcaagtgcaaccaccgttgcagatcttttggcaacccaaccaaggagtggcagggaggctagagagcttcgtcgttcctccagttcaagctctagctcgtctgaggatgatgggcaaggtgggaggaggaagaagggagtgaaggataaaataaaagagaaactaccaggggtaag

SEQ ID NO: 5993 - DNA, 381 bp, Glycine max
  Clone ID: LIB3029-003-Q1-B1-A12
caacgatagtaaaagcagaaaaggtaaactttgcttctaaatctagagttaatttggagttgatttttaacgaactcagggctgagaaatcgaaaggtatcaccattcccaactctgtaaccaataatactagactggggagcgttgaaactggacaagttacaccaccagcttattataagagcaatgctaataccagtagagattttgggatgccggcaaatcaagtgggtcaacagcatggaaaccaatatagcaatatttcttctgcaggtgctgctcctggttcatatacatcatgcaccaactgtggagtctctggtcatagctctgcactttgcccaaatattagaaatgtacctggacattctgcaagaaggg

SEQ ID NO: 5994 - DNA, 393 bp, Glycine max
  Clone ID: LIB3029-003-Q1-B1-A2
gcggtggtggaggtggcaagagtggaaagacaatgtccaccaacagcaaggagaatttgttcatagtttttcttgttacactttggtactcttcaaacattggtgtgatccttctgaacaagtatctgctctcaaactatggattcaagttcccaatcttcctcacaatgtgccacatgtcggcctgtgctgtcctcagctatgtctccattgtgttcttcaaggtggtgcctcagcagatgatcaaatcaaggtcccagttcatcaagattgcaactttgagccttgttttctgtgcctctgtggttggtggcaacatttctctcaggtaccttgctgtgtcattcaaccaggctgttggggcaaccacaccctttttcactgctgtttttg

SEQ ID NO: 5995 - DNA, 376 bp, Glycine max
  Clone ID: LIB3029-003-Q1-B1-A3
ggttaaacactcttcttcatcgtcgtcgcaatgggacgtgtgatccgtgcgcagcgtaagggagcaggctcggtcttcaagtcccacacgcaccaccgcaagggccctgcccgcttccggagcctggatttcggagagcgcaacggctacctgaagggtgtcgtcactgacgtcatccacgatcctggccgtggcgcgcctctcgctaaggtcgccttccgccacccgttccgctacaagaagcagaacgagctcttcatcgccgccgagggtctctacaccggccagttcatctactgcggcaagaatgccaccctcgttgtcggcaatgtgttgcctcttcgattcattcctgaaggagctgtcatctgcaacg

SEQ ID NO: 5996 - DNA, 394 bp, Glycine max
  Clone ID: LIB3029-003-Q1-B1-A4
cattgtctttgaacactcatcaccatggccaagcttgttctttccctttgtttccttcttttcagtggctgcttcgctctgagagagcaggcacagcaaaatgagtgccagatccaaaagctgaatgccctcaaaccggataaccgtatagagtcggaaggtgggttcattgagacctggaaccctaacaacaagccattccagtgtgccggtgttgccctctctcgctgcacccttaaccgcaatgcccttcgtagaccttcctacaccaacggtccccaggaaatctacatacaacaaggtaatggtatttttggcatgatattcccgggttgtcctagcacttatcaagagccgcaagaatctcagcaacgaggacgaagccagaaggccc

SEQ ID NO: 5997 - DNA, 393 bp, Glycine max
  Clone ID: LIB3029-003-Q1-B1-A5
gtaaagcttttccaaacaagattgtttttgatgataagcttgtgttggctaacacacaagaattctttgatggaaattttccagtggattcttggttaccaatttttgtgaattgtctttatcctgtaagtcaattaccttcagaagctgtcgttgtaaatgttacatgtggtagtggacgtggtggtttacccaccactgcttggattagttctgcagttaataatcgctcctcagatatcaacaaaaagattcgcacagcacttgggaaaggtaagaaaattgtttttcttactagagttgatccttttccagtagctttactggctgttctttttggcgttaagaatgaaattctgagttctaacgccactaaccctatgctgacgcgac

SEQ ID NO: 5998 - DNA, 396 bp, Glycine max
  Clone ID: LIB3029-003-Q1-B1-A6
ctcgagccgaatcggctcgagaattcttccaccaagttatgggtttccttgtgttgcttcttttctccctcttaggtctctcttctagttccagcatatcaactcatcgttccatattggaccttgacctaaccaagtttaccacacagaaacaggtgtcttcactgttccaactatggaagagtgagcatggacgtgtctaccataaccacgaagaagaggcaaagagacttgagattttcaagaataacttgaactatatcagggacatgaatgcaaacagaaaatcaccccattctcatcgtttaggattgaacaagtttgctgacatcactcctcaagagttcagcaaaaagtacttgcaagctcccaaagatgtgtcgcagcaaatcaaaa

SEQ ID NO: 5999 - DNA, 358 bp, Glycine max
  Clone ID: LIB3029-003-Q1-B1-A7
cttcaccacctctaccgccaccacgtccggcgccggaggtgccggaatagcttctccggctaccagatccggcatctccgcgcgtccactgaagagatcttttcccgaggagccctcgccgccggcggatcctccgtcttcagaccagacgaccccgtcggaggcgaagcgcgtggtgaaccgctgctccggctgcaggaggaaggtcggactcaccggatttcggtgccgatgcggcgagctcttctgcgccgagcaccggtactccgaccgccacgactgcagctacgactacaaagccgccggaagagaagccatcgcgagggagaatccggtgattagagccgcgaagatcgtc

SEQ ID NO: 6000 - DNA, 449 bp, Glycine max
  Clone ID: LIB3029-003-Q1-B1-A8
ggagagacaaacttgcatgcgatgcaggtctactctagacgatccctcggggaattccaattccacattttcaagaaataacgaggcacagatgttcatatatgaattggcattatttgatttcttattacgcctatcctgaagccaaaggatatgagatcggaattcctcggggaattccaattccacattttcaagaactaaggaggcagtaatgttcatatatgaattggaattatttgttttcttactaggcctatcctgaagccaaaggaaatgagatcggaattcctcagggaattcgaattccacattttcaagaaataaggaagcacagatgttcatatatgaattggaattatttgtattcatactaggcctatcctgaatccaaaggaaatgagatatgaattcctcgggggtaccgagctcgaattccgtatagtgag

SEQ ID NO: 6001 - DNA, 271 bp, Glycine max
  unsure (1)..(271): unsure at all n locations
  Clone ID: LIB3029-003-Q1-B1-A9
gtctctgttcggtttttgaaacattggttttctgtgcattgtgcgaaccacagacctttagtggcttatgataacaatctaagcgaaaaataaggcacaagctagtttgcgattaaagtaataagatagtgggacacttggatggataggaaggatctgtataggtctctgcaagaaaatgttaggagactcgaggcaagtatnnnntacatagtttaggttgtccatatacaactcatgcaatctcccataccatctccattcatacatc

SEQ ID NO: 6002 - DNA, 354 bp, Glycine max
  Clone ID: LIB3029-003-Q1-B1-B1
ctcaaggataaggttaaaggaaagaaatacgtagcttagatatttagtacattcttgtagagtcaaattaagaaagaacctgtccctgctgcctcatttttggtgctggagtccaactgcttaaaaatatgtcatgctacatgcttgcttcttaagttaactccttatcaaggggtagaaccattttcccccatttttaaaccattttatttcatagttttgatctattggatttcatttagatagaggtttttctggggggcttcctaagtctgttggtattatagagaattactgtgatgtacatcgtgatttttttgttttcatactcgtgtcaatatctgaattcttttt

SEQ ID NO: 6003 - DNA, 392 bp, Glycine max
  Clone ID: LIB3029-003-Q1-B1-B10
ctccaacttcaacaatcagcttgatcaaaaccccagagtattttaccttgctgggaacccagatatagagcacccagagaccatgcaacaacagcagcagcagaagagtcatggtggacgcaagcaggggcaacaccagcagcaggaggaagaaggtggcagtgtgctcagtggcttcagcaaacatttcttagcacaatccttcaacaccaacgaggacacagctgagaaacttcggtctccagatgacgaaaggaagcagatcgtgacagtggagggaggcctcagcgttatcagccccaagtggcaagaacaagaagacgaagacgaagatgaagacgaagaatatgaacaaactccctcttatcctccaagaagaacaagccaatgga

SEQ ID NO: 6004 - DNA, 364 bp, Glycine max
  Clone ID: LIB3029-003-Q1-B1-B11
cggtgagaaggaggaagacgaagatgagcaaccacgtccaatcccattcccacgcccacaacctcgtcaagaagaagagcacgagcagagagaggaacaggaatggcctcgcaaggaggaaaaacgcggagaaaagggaagtgaagaggaagatgaggatgaggatgaggaacaagatgaacgtcaattcccattcccacgcccacctcatcagaaggaagagcgaaagcaagaggaagatgaggatgaggagcagcagcgagagagcgaagaaagtgaagattctgagttacgaagacataagaataagaacccttttctcttcggctctaacaggttcgaaactctcttcaaaaaccaatat

SEQ ID NO: 6005 - DNA, 369 bp, Glycine max
  unsure (1)..(369): unsure at all n locations
  Clone ID: LIB3029-003-Q1-B1-B12
gtctatttcacagcaaactgtttggaatcaaatggcaacagtgagaacaccattgaattttgatcctagcaagcagagcttttgtcaattttctattgaccttcttggtggaggaattttagtggacaaaactggagattggatcacacttatacaaaattctccaattagtaacttgttgagagttgctgcttggaagaaaggctgtttaatggttaagattgtgatgtctgggaatgcagtagtcaaaaggagtgattgggcctcattggtacaagtgtttctaacaaacagcaacagtacagagcattttgatgcatgtaagtggacaaaatcggaaccacattcctgngaattgatcttcccaat

SEQ ID NO: 6006 - DNA, 400 bp, Glycine max
  Clone ID: LIB3029-003-Q1-B1-B3
cttcatagttcagtgtgtcgtttaaaaatgtcgcagttgctggataaagccaagaacttcgtgtcggagaaggtaaatgatatggccaagccggaggcgagtgtcactgacgtggacttcaagcgcgtgagcaaagataatgtcgagtacttggccaaggtctctgttcgtaacccttattcaacttccatacccatttgtgagatcaactactctttcaaaagcgcatccagggagatagcatcagggaaaattccagacccaggatcgttgaagtcaaaggacacaacaatggtggatgtgccagttaaggttccatacagcatattgatgagcttggcaaaggacattggtgctgactgggacatagactatcaattggatcctggtccgggtaatg

SEQ ID NO: 6007 - DNA, 381 bp, Glycine max
  Clone ID: LIB3029-003-Q1-B1-B4
cactttctctcgtttccccttcgcaatttcccctctcgaaagagacacgcatcgaagaaaatcacatcacggcaatggaggaaaagcacgcagcagccatcgaatccgcacacgccgaatctaacggcgtctctcacggcgccgaccacggctggcagaaggtgacctacgctaagaaacagaagaagaagactgttaacgccgctaacggcggccccgattcccgcgccaattccagcaagctcgttccgaacggcacgctgtccggcaacgacggcgtgttccggtcgctcgaactgcaatcggaggaccggcgccgaaaaattgtggaggcgaagaagctggctgatgccgcgtacgacgacgaagacgcgccgctca

SEQ ID NO: 6008 - DNA, 65 bp, Glycine max
  Clone ID: LIB3029-003-Q1-B1-B6
ataaaaaaataaacttgaatagttttagatgtttgccttgtatagttcagttgctataatatatc

SEQ ID NO: 6009 - DNA, 386 bp, Glycine max
  Clone ID: LIB3029-003-Q1-B1-C1
cttccaccaagttatgggtttccttgtgttgcttcttttctccctcttaggtctctcttctagttccagcatatcaactcatcgttccatattggaccttgacctaaccaagtttaccacacagaaacaggtgtcttcactgttccaactatggaagagtgagcatggacgtgtctaccataaccacgaagaagaggcaaagagacttgagattttcaagaataacttgaactatatcagggacatgaatgcaaacagaaaatcaccccattctcatcgtttaggattgaacaagtttgctgacatcactcctcaagagttcagcaaaaagtacttgcaagctcccaaggatgtgtcgcagcaaatcaaaatggccaacaagaaaa

SEQ ID NO: 6010 - DNA, 373 bp, Glycine max
  Clone ID: LIB3029-003-Q1-B1-C10
tcggctccgttaggttttccttccgcgtgtttgctcggaactactcctccactcatcgtttaaaatgtctgacgtggaagagtttcgttgcttcattggtggccttgcatggtcaacgtctgatagaaagttaaaggatacatttgaaaagtttggcaagcttattgaggcaaaggtggttgttgacaagttctctgggcgttctcgtggttttggatttgtcacatttgatgacaagaaagcaatggacgaggctattgatgctatgaatgggatagatttagacgggcgaactattactgttgatagagctcagcctcaacaaggatcaactagagatgatggtgatcgttaccgggagcgtggtcgtgat

SEQ ID NO: 6011 - DNA, 383 bp, Glycine max
  Clone ID: LIB3029-003-Q1-B1-C11
gcactatcaatcgttcgaatgggttttagaacatggtgggattgccactgatgatgattatccttacagagctaaagagggtagatgcaaagccaataagatacaagacaaggttacaattgacggatatgaaactctaataatgtcagatgagagtacagaatcagagacagagcaagcgttcttaagcgccatccttgagcaaccaattagtgtctccattgatgcaaaagattttcatttatacaccgggggaatttatgatggagaaaactgtacaagtccgtatgggattaatcactttgttttacttgtgggttatggttcagcggatggtgtagattactggatagcgaaaaattcatggggagaagattggggaa

SEQ ID NO: 6012 - DNA, 358 bp, Glycine max
  Clone ID: LIB3029-003-Q1-B1-C12
agccaatcctttgtgtaggtgctcaaccctagtaagccgcaatggtgaagtactcaagggagcctgacaatccaactaagtcttgcaaggctagaggcgccgaccttagggttcattttaagaacacaagggaaactgcctttgcaatcaggaagttgcccttggtcaaggctaaaaggtacttggaagatgttcttgcccacaagcaggcaattccattcagacgtttttgtcgaggtgttggaaggacagcccaggctaagaatagacactctaatggccaaggacggtggcctgtcaagtcagcaaaattcattcttgatttgctcaaaaatgctgagagcaatgctgaagtgaa

SEQ ID NO: 6013 - DNA, 376 bp, Glycine max
  Clone ID: LIB3029-003-Q1-B1-C2
cacacacaactactacaagtacttccttacaatcaaaaccaacaacaactatggcaagttatcaaaagcactacgatgatcagggtcgcaaggttgacgagtatggcaacgttgagaagcaaaccgacgaatacggcaaccctgttcatgctgctagtgtcacctatgtagccaccagaactgctgctggtggttacagtgatgacattaataagcaacatgataccaccaatgcctacggcgtagacactggtagacagcattctagtggtggctacgatggtgacactaataaacatcatggaactactggtggctataatgatgacaccaatagacatcatggaactaccggtgtctatggtatagacaccga

SEQ ID NO: 6014 - DNA, 382 bp, Glycine max
  Clone ID: LIB3029-003-Q1-B1-C3
gcaagaggaagatgaggatgaggagcagcagcgagagagcgaagaaagtgaagattctgagttacgaagacataagaataagaagccttttcgcttcggctctaacaggttcgaaactctcttcaaaaaccaatatggtcgcattcgcgtcctccagaggttcaaccaacgctccccacaacttcagaatctccgagactaccgcattttggagttcaactccaaacccaacaccctccttctccccaaccatgctgacgctgattacctcatcgttatccttaacgggactgccattctttccttggtgaacaacgacgacagagactcctacagacttcaatctggtgatgccctgagagtcccctcaggaaccacatac

SEQ ID NO: 6015 - DNA, 286 bp, Glycine max
  Clone ID: LIB3029-003-Q1-B1-C4
ctcgagccgaatcggctcgagaaacagagaaaggtaaagaaaaagggtcttctgtgagagcaatggatgagcttgttacaaccattttatcacccaaggttctgtgatttgttgcatttagaatttaggatttgaatgatataataaagttgcttgtgtgagcatacttgtcataaactgctcaccaatctttaacataagactgagtctttgacagtgtctgtatgaagatcatttccagaatttgctctgattatttaaaatctttttctacttgatgttgctc

SEQ ID NO: 6016 - DNA, 92 bp, Glycine max
  Clone ID: LIB3029-003-Q1-B1-C5
cttaatttccttcctttccaaggtacacgctctattgtacttttgagggatctgaaactcgatgtttaagataaagccggtgtttttatgtg

SEQ ID NO: 6017 - DNA, 387 bp, Glycine max
  Clone ID: LIB3029-003-Q1-B1-C6
attggcggagagagaaaaagagagaggtagagaaaagcgaagagtctctctcttcctatctctctctttcaatgtcagggcacaaatcttccacctctacttcttcttcttcttccttctaacctatatcagaaggaaacgcgaaaaaagaaaaaaaaaaaagaggcagaaggttctagaagccgccaatttttatttcttttaatttgtctgagtcagagacgttcgtgattgtaaccatggattcttcgtgtgtcccaaacggcgacgtttctgggttcaaagataaggagtcaatggttgaccctttcttggtcgaggctcttgagaaccctcggcaccgtgtcaccattttgcggatggagctggatatccagaggttcctga

SEQ ID NO: 6018 - DNA, 393 bp, Glycine max
  Clone ID: LIB3029-003-Q1-B1-C7
cttgttcacactaaaacaaactaaagcataacatatgaagtagagggaagtgctattttcaaaagaggagggaggtcagtgtaaattaagcatttttttggagaaggtgaatgtaatttgccctatttattgttctgttcttttaatgaggagttatataatgtgtgattaaatgttttcttatttatacaggctttggacgtttaaacaattccgatcaagatccaattttgccttcccattttctcgtcgtttttttgtaacggtctttccatggcatatcccttctctgatttcaagtactcagatggcctcagtgtagtgggtatctccttctgcacagctattgtctgtgaggctatctcatgggttcttatctatcggaccaattct

SEQ ID NO: 6019 - DNA, 387 bp, Glycine max
  Clone ID: LIB3029-003-Q1-B1-C8
cggctcgagaggctggcatggagaaaaccaaggccactgtccaggagaaggcagaaagaatgacggcacgtgatccgatgcaaaaggagttggcaacccagaagaaagaggcaaagatgagccaggcagagctggacaagcaggcggcgcgtcagcataacacggcggcgaagcaggctgccacggcagggcacatgggacaacccatggggacccatcagacgtcagctatgcccggtcatggaaccggacagcccacgggccatgtcaccgacggagtggtgggctcacaccctattggaaccaacagaggcccgggtgggactgctacagcccataatacccgtgcggggggaaacccaaatgattatgggtatggaactgggg

SEQ ID NO: 6020 - DNA, 216 bp, Glycine max
  Clone ID: LIB3029-003-Q1-B1-C9
tttttgttccgtctctgcggctagctttttgagcatcaatggcggactctgaaaccttcgctttccaggcatggagatcaaccaacttcgcagccgcatcaacaacatctgctacagcaccaatgagattctcttgcgtggactcatcaggaacgcttctgatgcttgggttaagatttgatttgagactctaaccgagaagatgaagctcgatgc

SEQ ID NO: 6021 - DNA, 348 bp, Glycine max
  Clone ID: LIB3029-003-Q1-B1-D10
gggaatccatctgctgcatctatgcacgtgctcatgtcactcgtctagttccatcatattctgacagcgtaccacattggtcacttgacttgcctttctttacagacagtcccaagtattctacaggttctaacaatcgcatggtaatcacggacgtgtctaccattgccactaatactctgcagccagacttgacagtttcacaagtaacttgaactatatcagggacatgaatgctcctcagcatgctccgcaatcccagcgttcatgagcgagcacgtttgctgacatcactcctcaggagttcagcatgaagtacttgcaaactccgaacgatctatctcaaca

SEQ ID NO: 6022 - DNA, 360 bp, Glycine max
  Clone ID: LIB3029-003-Q1-B1-D12
aaacactcctccgaactataatacagttttcttattttcattgttgaagctcacaagcaaaggctaaagtagattctattctcctcaagcaaaacctatagctcccccacactcctccagtacttgaataaaagctaaataaatattaaagcctttccttcatcaaggtactgtttgatctttgaatttcagtcctcaaagattggaacaacaggaacatgtgtactctcacaactgttcctgtgctcccttctaagcttaacaagccttcgctttctccgcaccacaattctctttttccctactgtggaagacgggtcgggaagaagaacaaagcaatggttcctgttgcaaggttgt

SEQ ID NO: 6023 - DNA, 378 bp, Glycine max
  Clone ID: LIB3029-003-Q1-B1-D2
accccctattaaccctcaccgcaatctctgattcgatcttcttcaatttcggggtttcccatataccacaaggcataggcctgtgtgaatttgcgatatgctgggtaattgtcgccaagacccaatctcttgggtactcctttaccaacccccaccgccgcattaattgtttttctattggaatcggacaaaggttccactgcgactgaaactttcaaaggccaaaaaatgctcgattcggtccttctggcgcttttcttgccgtgccttggcatgagcggggtttttatcgtctacatgtgccttctttggtacgccaccacccggcaccaccagcaaccccccatcgacgggcaaccggtgaagcccgtcgctgac

SEQ ID NO: 6024 - DNA, 376 bp, Glycine max
  Clone ID: LIB3029-003-Q1-B1-D3
ccgaggcgaagagaagagaaaaattaagatggaggggaaggagcaggatgtgtcgctgggagcgaacaagttcccggagagacagccgattgggacggcggcgcagagccaagacgacggcaaggactaccaggagccggcgccggcgccactggttgacccgacggagtttacgtcatggtccttttacagagcagggatagcagagtttgtggccacttttctgtttctatacatcactgtcttaaccgtcatgggagtcgccggggctaagtctaagtgcagtaccgttgggattcaaggaatcgcttgggccctcggtggcatgatcttcgccctcgtttactgcaacgctggcatctcagggggacacata

SEQ ID NO: 6025 - DNA, 400 bp, Glycine max
  Clone ID: LIB3029-003-Q1-B1-D4
gtgaagttttttctttgagaagtaaaagatcttagtgcaagtaattaacatggaatctcagcaagcaaaccgtgaagaacttgatgagaaggcaaggcaaggtgaaactgttgttcctggaggaactggtgggaagagtcttgaggctcaagaacatcttgctgaaggaaggagccgtggagggcagacgaggaagcagcagctagggtcagaggggtatcatgaaatggggaccaaaggagggcagacaaggaaggaacagatggggagagaagggtaccaagagatgggacgcaaaggaggactcagcaccatggacaagtctggtggagaacgtgctgaagaggaaggcatagaaatagatgagtctaagtttaaaattacctaaaaaacctaaaaa

SEQ ID NO: 6026 - DNA, 394 bp, Glycine max
  Clone ID: LIB3029-003-Q1-B1-D5
ttgaaattttcacaagaggaatttcttacagcttggtcaactcaggtgcgtcctacaacaactctgttggctgatgggtgtccatatttgtatgctatggtgcatgatagttcagtgtctacaataccaggtgattttgtcattggtgttaagttgacaaccataaacaatatgtgtgcatatgggctcaatcctggtatttcaggttctcgtcttttgggtaccattcctcagtctatttcacagcaaactgtttggaatcaaatggcaacagtgagaacaccattgaattttgattctagcaagcagagcttttgtcaattttctattgaccttctcggtggaggaattttagtggacaaaactggagattggatcacacttatacaaaatt

SEQ ID NO: 6027 - DNA, 371 bp, Glycine max
  Clone ID: LIB3029-003-Q1-B1-D6
ccctagggtattttaccttgctgggaacccagatatagagtacccagagaccatgcaacaacaacaacagcagaaaagtcatggtggacgcaagcaggggcaacaccagcaggaggaagaggaagaaggtggcagcgtgctcagtggcttcagcaaacacttcttggcacaatccttcaacaccaacgaggacatagctgagaaacttcagtctccagacgacgaaaggaagcagatcgtgacagtggaaggaggtctcagcgttatcagccccaagtggcaagaacaacaagatgaagatgaagatgaagacgaagatgatgaagatgaacaaattccctcccaacctcctcgccgaccaagccatggaa

SEQ ID NO: 6028 - DNA, 382 bp, Glycine max
  Clone ID: LIB3029-003-Q1-B1-E1
atcaccattactgatggtattgacaagactagtgcaactttgcaatttagaaagttagcagattgtgattttctcaagagaaactttaagcagatgtctaatgttttgtgggtagctcctgaggacaaggcgagtttatggtcacaacttcattatgtttcgtgtaataatctggaaatgcaagaagcttatcttgtcaatctcgtaaatgtgttacgagaattgtatttgcacagtccagaggaagctcgccaattgagaaggaaagctctctctcgtattgaatggctgcaaaaagctgatgtgcctaccatagcacagattgaagagttccattcgatgcagaggatgatgaatgctcctgattcaaatgataatattg

SEQ ID NO: 6029 - DNA, 377 bp, Glycine max
  Clone ID: LIB3029-003-Q1-B1-E10
gattctcaatagagagaaagagagagaaatggctttcacgatttccagatctcaatctgctttgacagatagagagaaggagaatcttgacaacttagttgacaaggagtgtgcaaccacagagggtatgatatcgagccagctcaagttgaagtcttctttgtcatccaaagcgtcttctcatcaaagcatggacaaacatgcaatccttcgacgtatcaggcaacgcaggtttaataacaaagccaaaaccgctctggaagctctcataggcacctcagaagccaacaataccggcactgcccaagaacagaagtggcttcaactgggtgactctttctcatctccttaactggaaacacaatctccccccaatt

SEQ ID NO: 6030 - DNA, 374 bp, Glycine max
  Clone ID: LIB3029-003-Q1-B1-E11
cggctcgagagctattgaacttatctctcttctcacttctgttgttataagtaacttccctcatcattacaaaacaatcctccacaggtttcaaaatgctgaaatcgggcatgggaattgaggagagaaagcaagtgaagaagccagcacaagccagctcgagaaaagggtgtatgagagggaaaggaggtcccgagaatgctagttgcacctacaaaggtgtgaggcagagaacatggggaaaatgggttgctgaaatccgtgaacccaatcgaggtgctaggctctggctcgggacttttgagacctctcatgaagctgctttggcttatgatgctgctgcacgtaagctctatggctctgatgccaaactc

SEQ ID NO: 6031 - DNA, 361 bp, Glycine max
  Clone ID: LIB3029-003-Q1-B1-E12
atctgcacaagttccagtgccacaacttcaaggtggggttgtgctgtttctgctgttgtctcagaagagaacgctgttggttcctctttctctgcagctgatgtcttcaaactcacgtatttagagggaaacagttggatctggaatgtgggtgggataaacatattggttgatcctattttggtgggcaacttggattttggaattccttggctatatgatgctgctaagaaagtgttgcagaagttccagctcagtgatcttccggaaatcaattgcttactcattactcaaagccttgatgatcactgccatttgaagaccttaaagcctttctctcagaaattcccagatattagag

SEQ ID NO: 6032 - DNA, 385 bp, Glycine max
  Clone ID: LIB3029-003-Q1-B1-E2
caataattccttcacttgcagaacttagttctctgttgcatcatcatcatcttcattagtgttagccctaaacttcaccttcaaccatgaccacagtgccaccacacagtgtccaagtgcacacaacaacacaacgctacgaagccggcgtcgtcccgccggctcgttttgaggcgccgcgttacgaagccggcatcaaggcgccctcttccatttaccattccgagagaggtccgacgacctctcaggttctcgcagttgtcgccggccttccggtcggcggcatcctcctgctcctggcaggactgaccctggctggaactctcaccgggctggtggtggcaacaccgctcttcatcatcttcagcccggtgctgattccggc

SEQ ID NO: 6033 - DNA, 339 bp, Glycine max
  Clone ID: LIB3029-003-Q1-B1-E3
atcaacatcactcacgtgcatgacataactatcggatgcttgaacattatcatcattacagattgtcattttcttaacatacacttatgacaaatgtccaatgatatattggctactcgtgaagacaaagacagttcaacgtcacaagttcattatgtttcgtgcaatatgactgcgaaatgtaagaaacttagcatgtcagtctcgtcaacgagttaccagacctatatatgcacaatcaacacgaaggttcccacattagacggaaagctctctctcggattgattggctgcatcatgctaagattgatactatatcacacactcaccagttccatt

SEQ ID NO: 6034 - DNA, 386 bp, Glycine max
  Clone ID: LIB3029-003-Q1-B1-E4
gttctggacaagtacagctttctgtcgaaggagaaactgaagggggttggaggtgttgaattacggtttaacggtggcggcgaagggacaagagagggtgctgagggaactggacgaggttctggacaagtacagctttctgtcgaaggagaaactgaagggggttggaggttgggaagttttggatggttcagtttcgacggagacatcgccggaggagttacaaggatcggaagagaggaaggaagtggtggaggagcgttctggggcatactggacgacgttggcgccaaacgtggaggattacagtgggagtttcgcgagatggattgcagcagggtcggggcaagtggttagggggattctgtgggctggggatgtgactg

SEQ ID NO: 6035 - DNA, 397 bp, Glycine max
  Clone ID: LIB3029-003-Q1-B1-E5
tggcaacagtgagaacaccattgaattttgattctagcaagcagagcttttgtcaattttctattgaccttctcggtggaggaattttagtggacaaaactggagattggatcacacttatacaaaattctccaattagtaacttgttgagagttgctgcttggaagaaaggctgtttaatggttaagattgtgatgtctggaaatgcagcagtcaaaaggagtgattgggcctcattggtacaagtctttttaacaaacagcaacagtacagagcattttgatgcttgtaagtggacaaaatcggaaccacattcctgggaattgatcttcccaatagaggtatgtggtcctaataatggttttgaaatgtggagttctgagtgggcaaatcaaac

SEQ ID NO: 6036 - DNA, 385 bp, Glycine max
  Clone ID: LIB3029-003-Q1-B1-E6
tttggctctggccattacatttgtggttttgagattactatacttgtttttacctacgctgcttatatgtattcaatatgcttggagaagggtcatccaaaatattagaatagggagcttgttggaacatcctttgatttatttgaagcggctaacacagtcatttaactgcttgaaagagccgtacaagagaagtaatctgcaggaaggagcaatgaatgctagagtgtgggcttccaagtcccttgccaccgtttcaattggagaggaaagcagcagcagccgtgggacgcatcagtgagttgactgtaccgagtggattttcttcttgaaattggagattagaatataccctatgaaaggcttggctgcaagttatgccatg

SEQ ID NO: 6037 - DNA, 397 bp, Glycine max
  Clone ID: LIB3029-003-Q1-B1-E7
ggaaaaagttgtattgaaattttcacaagaggaatttcttacagcttggtcaactcaggtgcgtcctgcaacaactctgttggctgatgggtgtccatatctgtatgctatggtgcatgatagttcagtgtctacaataccaggtgattttgtcattggtgttaagttgacaaccataaacaatatgtgtgcatatgggctcaatcctggtatttcaggttctcgtcttttgggcaccattcctcagtctatttcacagcaaactgtttggaatcaaatggcaacagtgagaacaccattgaattttgattctagcaagcagagcttttgtcaattttctattgaccttctcggtggaggaattttagtggacaaaactggagattggatcacactt

SEQ ID NO: 6038 - DNA, 397 bp, Glycine max
  Clone ID: LIB3029-003-Q1-B1-E8
gatgattttcagtccttcaacctcaatcctccccctccaagtggggaagcaactgcgaatagcaagaaggagagtccttctttgccgtcgggggttcaaggattgggcatgggtttacccgatttgagaacgaagaaaaaggggaaacagaaggcttccaaagacagccacgtgtcggaggcgctcaacaagctcagggagcagaccaaagaggctgtgaaggggctggagtctatatccccacccactgccgatgatttaggtaaggatgccttgatggaagattgggtcaaacaatttgagcagcttgctggctctcaggacatggaatctattgtggagaccatgatgcatcaacttctgtccaaggagattcttcatgaaccaatgaatgaaa

SEQ ID NO: 6039 - DNA, 381 bp, Glycine max
  Clone ID: LIB3029-003-Q1-B1-E9
tagtgattcctcctggtgttccttactggacctataacactggcgatgaaccagttgttgccatcagtcttcttgacacctccaacttcaacaatcagcttgatcaaaaccccagagtattttaccttgctgggaacccagatatagagcacccagagaccatgcaacaacagcagcagcagaagagtcatggtggacgcaagcaggggcaacaccagcagcaggaggaagaaggtggcagtgtgctcagtggcttcagcaaacatttcttagcacaatccttcaacaccaacgaggacacagctgagaaacttcggtctccagatgacgaaaggaagcagatcgtgacagtggagggaggcctcagcgttatcaacccca

SEQ ID NO: 6040 - DNA, 384 bp, Glycine max
  Clone ID: LIB3029-003-Q1-B1-F1
agcgcgtccacagaaactttttttttctgtttgccgtggaagagagaaaccctagggtttggaagaagctgatcggagaagatggtgcagcgtctcacctaccgcaagcgccacagctatgccaccaaatccaaccagcacagagtcgtcaagactcccggtggcaagcttgtttatcagaccacgaagaagagggccagcggacccaagtgccctgtcactggaaagaggattcaagggattccacatttaaggccaacagaatataagagatcaaggttacccaaaaaccgaaggactgtgaaccgtgcatatggtggtgtgttgtctggcagtgctgttagagagagaatcattcgagctttcttggttgaagagcaaaag

SEQ ID NO: 6041 - DNA, 357 bp, Glycine max
  Clone ID: LIB3029-003-Q1-B1-F10
cttaattattaacacttccttagttcaatatggggaagcccttcactctctctctttcttccctttgcttgctactcttgtcgagtgcatgctttgctattagctccagcaagctcaacgagtgccaactcaacaacctcaacgcgttggaacccgaccaccgcgttgagtccgaaggtggtttgattcaaacatggaactctcaacaccctgagctgaaatgcgccggtgtcactgtttccaaactcaccctcaaccgcaatggcctccacttgccatcttactcaccttatccccggatgatcatcatcgcccaagggaaaggagcacttggagttgcaattccaggatgtcctg

SEQ ID NO: 6042 - DNA, 380 bp, Glycine max
  Clone ID: LIB3029-003-Q1-B1-F11
taataattgaatcttcctaagtaatcgcgttttgtttgttctcaaatttaacggttgactcatgatttctgcttttttgtttgtgattattgtttctgaccattccattaggcattcttaaggtttaatttgtttgatgtgattgtgtggtataaataatttgtttaatttgttgatgcatttttatttgagtttatggcaatccatgttttagatgctgacatggatatggaacagaaaaaggtcattgttgtgttcaaacaatgcatgccactcagcgatggttcagttttaagatttttctttttgtctaatgaaattgcaaatgcgtgtcaaagagttgcctttccttaacgcataaaattaacttttgggttaac

SEQ ID NO: 6043 - DNA, 341 bp, Glycine max
  unsure (1)..(341): unsure at all n locations
  Clone ID: LIB3029-003-Q1-B1-F2
atgcaattgaaggtgctaaggagagatacgagagagcaaaaacaaaaacaacaagtaaagcttccaaagagagaaacgtgaaggcaaatganggggctgaaggaggaagaagagaagcagaaagtggtgggggtgttcatcatgtggctaagtttgaagagaagaaaacttcagtggggaaagcataacccgagggaagaataagaaaggtattggaaaaaaattggaacaaagaaaaaaaccaaggaatttgtccagaagggaaattgaaggtaaaaaaaccaggaccattggaacctaattgaaaagaaaaatttgaaaccagaaaggtggtggtaagg

SEQ ID NO: 6044 - DNA, 380 bp, Glycine max
  Clone ID: LIB3029-003-Q1-B1-F3
ctcgtcgctcccacctcccactattgcccccaacacaaccgcagcttccagcaacgccgccgttttgtgcacgtgaatgaattccagcgtctccagccccacattcgccaccccctccgaatctatatccaccacttgtcccgccacaagcccttccgtaccgatcgacttcgctaattccccaatcgctcgaaccacgcgtgacggcgacactccctccgtggacgctgccacgtgctcgaacgcgaaggcgaggagcgcgtcgccggcgaggaccgccacgtcctcgccgtagaccttgtggttggtcggctttccgcggcggaggtcgtcgttgtccatacatggcaggtcgtcgtggatgagcgacatggtgtgga

SEQ ID NO: 6045 - DNA, 379 bp, Glycine max
  Clone ID: LIB3029-003-Q1-B1-F7
ggtggctccagggcccatttggacccctttgataccagcctctttcaaggaggaagaaacggcccaatttggagcgcaggtcccaatgaagagagctggtcaacctattgaggttgctccttcctatgtttttcttgcttccaaccaatgctcctcttacataactggacaagtccttcaccccaatggtggaaccgttgtgaatggttaaaccgttggtgatgatgatattcgggatgaatatatgtggcgagagtattaagccagtgttacgttttgtgtgaatgttttacgatgtgttttaatgcatggctaactcactcacgtcctctcatgtactgttagaggtggggcttggcggattatccacttttgaatg

SEQ ID NO: 6046 - DNA, 395 bp, Glycine max
  Clone ID: LIB3029-003-Q1-B1-F8
aattcttccaccaagttatgggtttccttgtgttgcttcttttctccctcttaggtctctcttctagttccagcatatcaactcatcgttccatattggaccttgacctaaccaagtttaccacacagaaacaggtgtcttcactgttccaactatggaagagtgagcatggacgtgtctaccataaccacgaagaagaggcaaagagacttgagattttcaagaataacttgaactatatcagggacatgaatgcaaacagaaaatcaccccattctcatcgtttaggattgaacaagtttgctgacatcactcctcaagagttcagcaaaaagtacttgcaagctcccaaggatgtgtcgcagcaaatcaaaatggccaacaagaaaatgaag

SEQ ID NO: 6047 - DNA, 370 bp, Glycine max
  Clone ID: LIB3029-003-Q1-B1-F9
gttcaatatcctagtataccttaataaataatttaagatactatgatgagagcacggttcccattactgttgctgggacttgttttcctggcttcagtttctgtctcatttggcattgcttactgggaaaaagagaaccccaaacacaacaagtgtctccagagttgcaatagcgagagagactcgtacaggaaccaagcatgccacgctcgttgcaacctccttaaggtggagaaagaagaatgtgaagaaggtgaaattccacgaccacgaccacgaccacaacacccggagagggaacctcagcaacccggtgagaaggaggaagacgaagatgagcaaccacgtccaatcccattcccacgcccaa

SEQ ID NO: 6048 - DNA, 359 bp, Glycine max
  Clone ID: LIB3029-003-Q1-B1-G1
aaaatgaccaagcttacaattctcctcatcgctcttctcttcatcgcccacacctgctgcgcctccaaatggcaacagcaccagcaagagagctgccgcgagcagctcaaggggatcaacctcaacccctgtgagcacatcatggagaagatccaagctggccgccgcggcgaggacggcagcgacgaagatcacattctcatcaggaccatgccgggaagaatcaactacatcaggaagaaggaaggaaaagaagaagaagaagaaggacacatgcagaagtgctgcagcgaaatgagcgagctgaaaagccccatatgccagtgcaaagcgctacagaagataatggataaccagag

SEQ ID NO: 6049 - DNA, 359 bp, Glycine max
  Clone ID: LIB3029-003-Q1-B1-G10
ccaaaacccacagcacactatgctatgctatgctctctaatccgtttccgccgttccgctccttcctaccacactctccactctctctttccgacgattaaccgtttctcctcctccgcctccgccgccatggttgctcacgcgaaggacgaggcgtacctcagcgcgacgattccgaagcgcatccgtctcttcgagaccatcctggcggagcagcacactcagcgcctctcgctctcgccggatcctatcaaggttactctccccgacggcagcgtcaaggaggcgaagaagtggcatacgacgccgcttgatgttgcgcgtgaaatctcgaagaatttggccaacagcgcgctcat

SEQ ID NO: 6050 - DNA, 371 bp, Glycine max
  Clone ID: LIB3029-003-Q1-B1-G11
ctttactcttctcttcacagaagcgtaaaaacaaaaggcttgactagagaaagagagagagagagcttcgaatcgaaactcagaagtagaaagaaacacaaatcacaatcgctatggctaggtacgaccgagcaatcaccgtgttctcccctgacggccatctcttccaggtcgagtacgccctcgaagccgtccgcaagggcaacgccgccgtcggcgtccgcggcaccgacaatgttgtcctcggcgtcgagaagaaatccaccgccaaactccaagactccaggtcggtgaggaagatagtgaatctggacgaccacattgcgctggcctgcgcggggctgaaggccgacgcacgcgtgctcataaac

SEQ ID NO: 6051 - DNA, 362 bp, Glycine max
  Clone ID: LIB3029-003-Q1-B1-G12
cccaatgcacctagcgaacttccttaatttctcaacctcctcgtcgctcccacctcccactattgcccccaacacaaccgcagcttccagcaacgccgccgttttgtgcacgtgaatgaattccagcgtctccagccccacattcgccaccccctccgaatctatatccaccacttgtcccgccacaagcccttccgtaccgatcgacttcgctaattccccaatcgctcgaaccacgcgtgacggcgacactccctccgtggacgctgccacgtgctcgaacgcgaaggcgaggagcgcgtcgccggcgaggaccgccacgtcctcgccgtagaccttgtggttggtcggctttccgccgc

SEQ ID NO: 6052 - DNA, 378 bp, Glycine max
  Clone ID: LIB3029-003-Q1-B1-G2
aaaatgaccaagcttacaattctcctcatcgctcttctcttcatcgcccacacctgctgcgcctccaaatggcaacagcaccagcaagagagctgccgcgagcagctcaaggggatcaacctcaacccctgtgagcacatcatggagaagatccaagctggccgccgcggcgaggacggcagcgacgaagatcacattctcatcaggaccatgccgggaagaatcaactacatcaggaagaaggaaggaaaagaagaacaagaataaggacacatgcacaagtgctgcagcgaaatgagcgagctgaaaagccccatatgccagtgcaaagcgctacagaagataatggataaccagagcgagcaactggaggggaag

SEQ ID NO: 6053 - DNA, 391 bp, Glycine max
  Clone ID: LIB3029-003-Q1-B1-G4
cttccaccaagttatgggtttccttgtgttgcttcttttctccctcttaggtctctcttctagttccagcatatcaactcatcgttccatattggaccttgacctaaccaagtttaccacacagaaacaggtgtcttcactgttccaactatggaagagtgagcatggacgtgtctaccataaccacgaagaagaggcaaagagacttgagattttcaagaataacttgaactatatcagggacatgaatgcaaacagaaaatcaccccattctcatcgtttaggattgaacaagtttgctgacatcactcctcaagagttcagcaaaaagtacttgcaagctcccaaggatgtgtcgcagcaaatcaaaatggccaacaagaaaatgaag

SEQ ID NO: 6054 - DNA, 397 bp, Glycine max
  Clone ID: LIB3029-003-Q1-B1-G6
aacaataattccttcacttgcagaacttagttctctgttgcatcatcatcatcttcattagtgttagccctaaacttcaccttcaaccatgaccacagtgccaccacacagtgtccaagtgcacacaacaacacaccgctacgaagccggcgtcgtcccgccggctcgttttgaggcgccgcgttacgaagccggcatcaaggcgccctcttccatttaccattccgagagaggtccgacgacctctcaggttctcgcagttgtcgccggccttccggtcggcggcatcctcctgctcctggcaggactgaccctggctggaactctcaccgggctggtggtggcaacaccgctcttcatcatcttcagcccggtgctgattccggccacggtcgca

SEQ ID NO: 6055 - DNA, 216 bp, Glycine max
  Clone ID: LIB3029-003-Q1-B1-G7
cgatctaggttgcgcgaaatatgaagatgaatactgagatcgaccaggcagtaattgatacctgaaaggtctcggcaggcgcagaaggtcactttagaggaagtcatggtaaaactgtgtctggggatagtaaaacctgtgaccggcgtcaaagtgtgataagctcacaatcctatacagtatactatgcagaagcacaaagtatggattctagca

SEQ ID NO: 6056 - DNA, 375 bp, Glycine max
  Clone ID: LIB3029-003-Q1-B1-G9
cacacaactactacaagtacttccttacaatcaaaaccaacaacaactatggcaagttatcaaaagcactacgatgatcagggtcgcaaggttgacgagtatggcaacgttgagaagcaaaccgacgaatacggcaaccctgttcatgctgctagtgtcacctatgtagccaccagaactgctgctggtggttacagtgatgacattaataagcaacatgataccaccaatgcctacggcgtagacactggtagacagcattctagtggtggctacgatggtgacactaataaacatcatggaactactggtggctataatgatgacaccaatagacatcatggaactaccggtgtctatggtatagacaccgat

SEQ ID NO: 6057 - DNA, 384 bp, Glycine max
  Clone ID: LIB3029-003-Q1-B1-H1
caggaatatggggtgtcagtggaaaacatttttgcggttcaaacaggtggttgcccttcctatgaagacattataaaactaccaaataaggttcttctatggtgtggatcacgaagctcaaacctcttgaggcacttgcaaaagggattcttgccagcaatatgctcattacctattccgggttatatgtttggcaaagctattgtctgttctgatgctgcagcagaggctgcaagatatggttttactgctgtggacaggccagaaggattcttggttttggccattgcttctctaggaaatgagattaccgaattgaaaaccccacctgaggatgcatcatctttggaggaaaagaaagttggagtgaaaggaccggggaag

SEQ ID NO: 6058 - DNA, 364 bp, Glycine max
  Clone ID: LIB3029-003-Q1-B1-H10
caaaacggtcgcattcgtctcctccagagattcaacaaacgctccccacaacttgagaaccttcgagactaccggattgtccagtttcagtcaaaacccaacacaatccttctcccccaccatgctgacgccgatttcctcctctttgtccttagcgggagagccatacttaccttggtgaacaacgacgacagagactcctacaaccttcaccctggcgatgcccagagaatcccagctggaaccacttactatttggttaaccctcacgaccaccagaatctcaaaataatcaaacttgccatacccgtcaacaaacctggcagatatgatgatttcttcttatctagcactcaagcccaac

SEQ ID NO: 6059 - DNA, 384 bp, Glycine max
  Clone ID: LIB3029-003-Q1-B1-H3
cttcagttatgcgtttctctctatagccagctatcatcaattcatcatgtcatcgccaaactccgcccgtcagccccacgcgccgctccttctcccgcgccccgatgccgccgcccgcctccccgtcctggcgctcctcctcggccgccgcggccactccgtcatggtccgggagacggcggcgcgtgagctggaggagcggcgcgccgactggacctactcgaagccggtggtggcgctggacatgacgtgggacatggccttcgtcgtggtctcggcggtcatgctcgcctgcaccgtcaaggagaaccccaacacgccgatccgctggtggatctgcggctacgcgctgcagtgcctcctccacgtggccctcgtgtggct

SEQ ID NO: 6060 - DNA, 363 bp, Glycine max
  Clone ID: LIB3029-003-Q1-B1-H5
ggagcaccgccatatccggtcgcgtgtttcctcgttcggggacattgatgattctgcttgttccgccactggctgctgttgtcgtgttccgcttctgggatcaccgcccagtgcctaaaggaacaatcttttggcgctaaattgtggtggggttcctctatttttttctttttttctccaatatgtatagatctggagcaggcatggcttggaacgtgtttaggttctgcactgccctgagaggattaggctcgatcatgatactaatggttcttggggttgtgggtgttacctattacgctgttgtgttgactaattttggacctgccttgtttcttggaggccttgatactcttatctcct

SEQ ID NO: 6061 - DNA, 395 bp, Glycine max
  Clone ID: LIB3029-003-Q1-B1-H6
gaaatccttgtgcaccgtaagggttgtgaagcaggcagagaagagccatggtgcacgtttccttctaccgaaactatgggaaaaccttcaagaagcctcgtcgtccgtacgagaaggagcgtttggacgccgagttgaagctggtcggtgagtacggacttcgctgcaagagggagttgtggagggttcagtacgctctcagccgcatccgtaacaacgccagaaatcttttgaccctcgacgagaagaacccgcgccgtatcttcgagggagaagcccttctccgaagaatgttccgttacggacttctcgatgagactcagaacaagcttgattacgtgttggctctcaccgtcgagaactttctcgaacgccgcctccaaaccctcgttttc

SEQ ID NO: 6062 - DNA, 385 bp, Glycine max
  Clone ID: LIB3029-003-Q1-B1-H8
ctgaatttctttgctattggtattaatgccgagaacaaccagaggaacttcctcgcaggttcgcaagacaatgtgataagccagatacctagtcaagtgcaggagcttgcattccctgggtctgcacaagctgttgagaagctattaaagaaccaaagagaatcctactttgtggatgctcagcctaagaagaaagaggaggggaataagggaagaaagggtcctttgtcttcaattttgagggctttttactgaataagtatgtactaaaatgtatgctgtaatagctcatagtgagcgaggaaagtatcgggctatgtaactatgactagagcttcaactatgaataaataaatcgacagcatatgatgcttttgtttaaaaa

SEQ ID NO: 6063 - DNA, 356 bp, Glycine max
  Clone ID: LIB3029-003-Q1-B1-H9
caagaatggaatttactctccacattggaatctgaatgcaaacagtgtgatctatgtgactcgaggacaaggaaaggttagagttgtgaactgccaagggaatgcagtgttcgacggtgagcttaggaggggacaattgctggtggtaccacagaacttcgtggtggcggagcaagccggagaacaaggattcgaatacatagtattcaagacacaccacaacgcagtcactagctacttgaaggatgtgtttagggcaattccctcagaggttcttgcccattcttacaaccttcgacagagtcaagtgtctgagcttaagtatgaaggaaattggggtcctttggtcaaccctg

SEQ ID NO: 6064 - DNA, 293 bp, Glycine max
  Clone ID: LIB3029-004-Q1-B1-A1
attcaaaccttgctccatactacacagtacacacactagaagaataatggcttccatcctccactactttttagccctctctctttcttgctcttttcttttcttcttatccgactcagtcacccctacaaaaccaataaaccttgttgttctacccgttcaaaatgatggttccacagggctccattgggccaacctccaaaaaagaacccctctaatgcaagtaccagtcctggtggacctcaatggaaatcacttgtgggttaactgtgagcaacagtactcatccaaaa

SEQ ID NO: 6065 - DNA, 200 bp, Glycine max
  Clone ID: LIB3029-004-Q1-B1-A10
attctttgtgaaaccatgacttatccaaggcaatttatggcaattaaacgtcaaggtaacaaaccaaaatatacggggcaaatgatgaaatgctcattttaaaaaaacagttgaaattccgcttgaagccgcagtatatgctgagactgattacttgaggggagtcactgaaaacataatgttaggtcaacttgccccca

SEQ ID NO: 6066 - DNA, 344 bp, Glycine max
  Clone ID: LIB3029-004-Q1-B1-A11
ctttgggacgccctactttttttcttctatcttcattgatcatcacttctctttcttcattttccttttcggtgggaattaggataaccctcctcaatttttcaactctaaatttgatcatcaccttcacccactttactcttactaggaggaacccttctctctgtgtgtgtgttctgagttgattctgtgcttcagctttccacaaagtaaagtagaaagatggcaatgattccttaccacctttgccgtttaccttaccaggattccctcaaagcacttgaggctgatatacagcacgccaatgctttattgtgtgttgtgccctcttctaaggctgctgc

SEQ ID NO: 6067 - DNA, 307 bp, Glycine max
  Clone ID: LIB3029-004-Q1-B1-A12
aaaaaaaaaaaaaaaaaaaaaaaaaaaaaaacaaaaaagaaaaaagaacaaaaatacataacaaacccaaatgagagagaaacacggacccaggttctaaattgcgaccggcccccaaaaaatgggcccgtggtcccagaaattaatcccggaccggtatcggcaggcctaccacctttcccaatccggggccgtattataacgggggcaaaatttggccaaacctgtttcccgtgagaaattggtttccgcccggaattccccaatccatgcgaaccgtaaccataagttctaaaccctgaggggc

SEQ ID NO: 6068 - DNA, 358 bp, Glycine max
  unsure (1)..(358): unsure at all n locations
  Clone ID: LIB3029-004-Q1-B1-A3
tttggttaancctcacgaacaccagaatcccaaaataatcaaacttggcatacccgtcaacaaacctggcagatatgatgatttcctcctatctagcactcaagcccaacagtcctacttgcaaggcttcagccataatattctagagacctccttccatagcgaattcgaggagattaacaaggttttgttgggagaagaagaagagcagaagcagcaagagggaatgatcgtggaactctcaaaggaacaaattccgcaactgaacagacgtgccaaatctagttcaagggaaaccatttcctccgaagatgaaccattcaacttgagaagccgcaaccccatctattccaacaac

SEQ ID NO: 6069 - DNA, 293 bp, Glycine max
  Clone ID: LIB3029-004-Q1-B1-A4
gatcacagagtgaaaattcgagtatgtgtcattcaagaccaatgatacacccatgatcggcactcttgcaggggcaaactcattgttgaacgcattaccagaggaagtgattcagcacactttcaacctaaaaagccagcaagccaggcagataaagaacaacaaccctttcaagttcctggttccacctcaggagtctcagaagagagctgtggcttagagccctttttgtatgtgctaccccacttttgtctttttggcaatagtgctagcaaccaataaataataataat

SEQ ID NO: 6070 - DNA, 389 bp, Glycine max
  Clone ID: LIB3029-004-Q1-B1-A5
caagcgtggttatgttgcctcgaactcaaaggatgatcctgccaaggaggctgctaacttcactgcccaggttatcatcatgaaccatcctggtcagattggaaatggctatgcccctgttcttgactgccacacttcccacattgctgtcaagtttgctgaactcatgaccaagattgacaggcgatctggcaaagagcttgagaaggaacccaagtttttgaagaatggtgatgctggttttgttaagatgattccgaccaaacccatggtggttgaaactttccctgagtaccccccacttggtcgctttgctgtcagggatatgcgtcaaactgttgctgtgggagtcatcaagaacgtggagaagaaggatcctactggagcca

SEQ ID NO: 6071 - DNA, 407 bp, Glycine max
  Clone ID: LIB3029-004-Q1-B1-A6
tcttcatagttcagtgtgtcgtttaaaaatgtcgcagttgctggataaagccaagaacttcgtgtcggagaaggtaaatgatatggccaagccggaggcgagtgtcactgacgtggacttcaagcgcgtgagcaaagataatgtcgagtacttggccaaggtctctgttcgtaacccttattcaacttccatacccatttgtgagatcaactactctttcaaaagcgcatccagggagatagcatcagggaaaattccagacccaggatcgttgaaggcaaaggacacaacaatggtggatgtgccagttaaggttccatacagcatattgatgagcttggcaaaggacattggtgctgactgggacatagactatcaattggatcttggtctggttattgatgttc

SEQ ID NO: 6072 - DNA, 390 bp, Glycine max
  Clone ID: LIB3029-004-Q1-B1-A7
ctctccctttcccccttttcatttcttcctcgattttccatttccataaccttagtcatcttcttctttcatctttctccctaacggtatcgagggaaaaatatggcggaagaacacagatgccaggcaccgcgcttctgcgccaacaattgcggtttctttggcagccctgccacgcagaatatgtgctccaagtgctaccgcgatttccagctcaaggagcagcaatcttccaacgccaagatggttctcaatcagtcgctggttccttcaccgccaccggcggtgatttctcagccgtcgtcttcttcttcggccgcggtagatccgtcatcggcggtggttgatgacgcgccacgcgaggcggaggaggttaaggcgccgcagcag

SEQ ID NO: 6073 - DNA, 353 bp, Glycine max
  Clone ID: LIB3029-004-Q1-B1-A9
attttagggaatgatctgaacaaattgcaggaagttttacgattgcgtcatcaccaaagagatgaattaaagcgtcagaaggaagaagagcttgctcttctttatgctgatccttttgatgttgaagcacaaaagaagattgaagctgccatccgccagaaagggattgatgaaaattgggctgctgcattagaacataatcctgaagcttttgctagagtggtcatgttgtatgttgatatggaggttaatggtgtcccattgaaggcatttgtggatagtggagctcagtctaccattatatcaaaaagctgtgctgagcgtcttggattgttgagacttttagattagcg

SEQ ID NO: 6074 - DNA, 304 bp, Glycine max
  Clone ID: LIB3029-004-Q1-B1-B1
caagttgccgcaccttaaaaccggaaacaaaagcaatcgttacttgatttcaagaatccttcaatttttcctaattccttgtgcacgaattcctaagggaaagaaaatcaatccccgtgccgggcacagacttcgtgaaacaatttcttttccaatcctagtttatttgctgaacaatctcctatttgatataggacttcgtgtcagatttaaacttcttctgtctctttctcagttctctgtttaatttcaagttcaagctggtgaaatcttggattagtgctcccactctcctatctggtat

SEQ ID NO: 6075 - DNA, 315 bp, Glycine max
  Clone ID: LIB3029-004-Q1-B1-B10
cccgagaaagacaccggtagacatcattttggtcgtggttacgacggtgacactaacaagcaacatgatgctactggtgtttatcccggaatagacattggtagagatcatgggactaccggtgtttatggcctaaacaccgacagacatcatggaacttctggggtgaatcccgggatagacacccataaccaacaacatgggactaccgttggttatgctggtgacactggaagacagcatgggaatacaggtggcctttactatggaaccgacaccgcggacacaggaaccggtcctagaagtggaaacacc

SEQ ID NO: 6076 - DNA, 312 bp, Glycine max
  Clone ID: LIB3029-004-Q1-B1-B11
gaattttgagaatgctgatgatgctgctagggctgttgaggctctcaatggcaaaaattttgatgacaaagaatggtatgttggaaaagctcagaagaaatctgaaagggagaatgaattgaaacaacgatttgagcagagcatgaaagaagctgctgataaatatcaaggcgcaaacttgtatgtaaaaaatttagatgatagcattggtgatgaaaaacttaaggagctgttctccccttttggtaccattacctcttgcaaggttatgagagacccaaatggcttaagtcgtggatcgggttttgttgc

SEQ ID NO: 6077 - DNA, 372 bp, Glycine max
  unsure (1)..(372): unsure at all n locations
  Clone ID: LIB3029-004-Q1-B1-B12
aaaacccattcacttttccacaagccttagttcttctcatttattctctttttcaaaatactttcactctctctaaccttccagttctcactaaacctcgtgaagctcgtgatggacaccaagataggttcactagacgcgcccaagcccaacagcaacgacgtcgtatcatgcaacctcaccagcagcgccgccatccagccctgcttgccggcgacggtgatcaacggcgccggctgtagtgactccaccttgggcggccacctggcccgccggctggtggaaatcggcgtcaccgacgtgttctccgttcccggggacttcaacctgacgcntgctggacacctcatcgcggagccggcgctgcacctg

SEQ ID NO: 6078 - DNA, 416 bp, Glycine max
  unsure (1)..(416): unsure at all n locations
  Clone ID: LIB3029-004-Q1-B1-B4
gcaatactagcgatagctgataagagagataccaacaagaaaagaaaaaaagaaagagttgagattccctttgaagaaaagatggcatcccatangcaaagctatgaagctggtcaaactaagggccgaactgaggaaaagacgaaccagacgatgggcaatattggagagaaggctcaagctgcaaaggagaagacccaggaaatggcccaagctgcaaaggagaagacccaacaaacagcccaagctgccaaggacaagacttgcgacacttcccaagcggcaaaggagaagacccaacagaatacaggagctgctcaacaaaagacctcagagatgggccagtccacgaaagaatcggcccagtcagggaanggacacacccaagggttcctgcagcagacaggggagaaggt

SEQ ID NO: 6079 - DNA, 411 bp, Glycine max
  Clone ID: LIB3029-004-Q1-B1-B6
cttgcaacgattaacaatggcttcaaccgacaagtcaccggacccaacgccggcgaagggtccggatccaactccggggaagccgatgagtgttggtcagcacgtgatcgacaagagtgcaatgatggtgcagtcgctggaccccattaagcagatgagtcagcacgtgtgctccttcgctatctacagccatgacatgtctcgccagatagagacacatcactactgctccagactccaccagaacttcatacaatgtgctgtctatgattccgatgaatccaaagctcgtctcctcggggtggagtacatcgttcctgctgatgtctttgaagcctttcctccggaggagcagaaactttggcattctcatgcttatgagattaaatcaggcctgttggtgaatcctaa

SEQ ID NO: 6080 - DNA, 273 bp, Glycine max
  Clone ID: LIB3029-004-Q1-B1-B8
catagtagtgttggtgggttgcaaagatgcttgggggtcttctccataggggtcataagataaaagggacagtggtgttgatgcgcaagaatgtgttggacgtgaatagcgtaaccagcgttgggggaattattggtcaaggtctcgacttagttggctcaacactcgatactcttactgccttcttgggccgatccgtgtctctccagcttattagtgctaccaaagctgatgccaacggaaaagggaaacttggaaaggctacctttttgg

SEQ ID NO: 6081 - DNA, 408 bp, Glycine max
  unsure (1)..(408): unsure at all n locations
  Clone ID: LIB3029-004-Q1-B1-C1
tccataggggtcataagataaaagggacagtggtgttgatgcgcaagaatgtgttggacgtgaatagcgtaaccagcgttgggggaattattggtcaaggtctcgacttagttggctcaacactcgatactcttactgccttcttgggccgatccgtgtctctccagcttattagtgctaccaaagctgatgccaacggaaaagggaaacttggaaaggctacctttttggaaggtatcattacttcattgccaactttgggagcangccaatctgcattcaaaattaattttgaatgggatgatgggagtggaattcctggagcattttatatcaagaattttatgcaaactgagtttttccttgtgagtttgactcttgaagacattccaaaccatggaagcatcc

SEQ ID NO: 6082 - DNA, 369 bp, Glycine max
  Clone ID: LIB3029-004-Q1-B1-C10
cgaagagcttccgcggcgactatatcctcggtgagggaggcttcggcaccgtttacaaaggttacattgatgagaacgtcagagtcggactcaaatcgctccctgtcgctgtcaaagtgttaaacaaagagggtttacaaggacatcgagagtggcttacggaggtgaattttctagggcagctgaggcatcctaatctggtgaagttgattgggtactgctgcgaagatgatcacaggctgcttgtgtatgagttcatgtttcgagggagtttggaaaatcacttgttccgaaaggcaactgtccctttatcatgggctacaagaatgatgattgctcttggagcagccaaaggacttgcctttctcc

SEQ ID NO: 6083 - DNA, 348 bp, Glycine max
  Clone ID: LIB3029-004-Q1-B1-C11
ccttgatgatgtggtgaagcagtgcagggggaagaatctcttcttcagcactgatgtagagaagcatgttgccgaggctgacattgtctttgtctcggtgaacaccccaacgaagactcagggtcttggagccggcaaggcagctgatctcacatattgggagagtgctgccaggatgattgctgatgtatcgaaatcagacaagatcgtggtcgagaaatcgactgtgcctgtgaaaacagctgaggcaattgagagaattctgacccataataggaaaggcatcaatttcacaattctgtcaaaccctgagtttcttgctgagggtacagcaattgcaaacctgtt

SEQ ID NO: 6084 - DNA, 383 bp, Glycine max
  Clone ID: LIB3029-004-Q1-B1-C12
caaggcgagtttatggtcacaacttcattatgtttcgtgtaataatctggaaatgcaagaagcttatcttgtcaatctcgtaaatgtgttacgagaattgtatttgcacagtccagaggaagctcgccaattgagaaggaaagctctctctcgtattgaatggctgcaaaaagctgatgtgcctaccatagcacagattgaagagttccattcgatgcagaggatgatgaatgctcctgattcaaatgataatattgatcttctgttgagcattgatttgttgggtttacaaggagcaggtaaagcttttccgaacaagattgtttttgatgataagcttgtgttggctaacacacaagaattctttgatggaaattttccag

SEQ ID NO: 6085 - DNA, 255 bp, Glycine max
  Clone ID: LIB3029-004-Q1-B1-C2
cagaacaaattcgccttaaaaattttgggaccttcaagactcagcgaaaaaacatcaaaagatgtccctgaatccaaataattttgggggcccaaggaacaaggtgttccattctttcccccctgaactttgggaacccttccatgaatttcaatttcccaactccccatccgccgaaaactccgcaaccgtgaacactcctgtggaatggaaataaaacccaaaagcacaagtgttcaaagctgaaaatccaag

SEQ ID NO: 6086 - DNA, 407 bp, Glycine max
  unsure (1)..(407): unsure at all n locations
  Clone ID: LIB3029-004-Q1-B1-C3
gaaaatctgggttctgaagcccagttggatgaaatgaccatggctgctgctagtcctgaaagaaatcaatccgttaatggcttagattaacttgaagaaaactcccaacaaaagccaagttcctttgaatccgaatggcaacaagatggggaaagttttgccaccgaaaaaaagttcccccctgataaactttaacgagccgccgtattgaagaaacgatttcttgataccatcttgaaagctcgaganaagacactgacacagggtgaaaagggggatcctgagaaattgcgccaggaaagggagaaactggagatggagcanaagaaagcagaaaaggctaggctacaagcagaagcaaaggcagctgaagatgctcgaaagcaggcagaggaagaagctgctgc

SEQ ID NO: 6087 - DNA, 362 bp, Glycine max
  unsure (1)..(362): unsure at all n locations
  Clone ID: LIB3029-004-Q1-B1-C5
ataatactcagcatggctaagcttgttctttccctttgttttctgcttttcagtggctgctgcttcgctttcagtttcagagagcagccacagcaaaacgagtgccagatccaacgcctcaatgccctcaaaccggataaccgtatagagtcagaaggtggcttcattgagacatggaaccctaacaacaagccattccagtgtgccggtgttgccctctctcgctgcaccctcaaccgcaacgcccttcgcagaccttcctacaccaacgctccccaggagatctacatccaacaaggtagtggtatttttggcatgatattcccgggttgtcctancacatttgaagagcctcaacaaaa

SEQ ID NO: 6088 - DNA, 368 bp, Glycine max
  Clone ID: LIB3029-004-Q1-B1-C7
ccttgctctatactacacagtacacacactagaagaataatggcttccatcctccactactttttagccctctctctttcttgctcttttcttttcttcttatccgactcagtcacccctacaaaaccaataaaccttgttgttctacccgttcaaaatgatggttccacagggctccattgggccaacctccaaaaaagaacccctctaatgcaagtaccagtcctggtggacctcaatggaaatcacttgtgggttaactgtgagcagcagtactcatccaaaacgttacaagcacccttctggcactccacccaatgctctagagccaacacccaccaatgcctcagttgccccgcggcatcaag

SEQ ID NO: 6089 - DNA, 404 bp, Glycine max
  unsure (1)..(404): unsure at all n locations
  Clone ID: LIB3029-004-Q1-B1-D1
ctcttgtctttcattttgataattcccacactatggctgagcttcactaccaacaacaacaccaataccctcaacgataccctaatgattcatacgaacaacaaactaactactccaatcaagtcctcaaggggggcaacgccgtcaacgcgggcgggtccctccttattctcccctcgttgaatcttgccggcaacatcatcgccctcaccaatcgtcacaccaccgctcgtcatcttcagtccggtttctcgtcccgcggtgatcaccgtcgcgctgctgagcctgnggttccttgcctccggcgggttcggtgtggcggcgatcacggtgctggcgtggatctacaggtacgtcaccgggaagtacccacctggcgcggattagttggacagcgcgcctca

SEQ ID NO: 6090 - DNA, 406 bp, Glycine max
  Clone ID: LIB3029-004-Q1-B1-D10
ctcaatatctacacaaaagtgttccacttgagtgaaaagtagtgtgttaagaactaaacaatttttcaatggcgtccaagaaacaagaggagcgagctgaggcagctgcgaaagttgctgccaaagaactcgaacaagtcaacagagaaagaagagaccgtgatttcggtgttgttgctgaacaacaacaacaacatcatcaggaagatcaacaaaaacgtggtgtaatcgggtccatgtttaaggcggtgcaagacacctacgagaacgccaaggaagctgtcgttggcaagaaagaagctactaataacgcgtacagtaatacagaggttattcacgatgttaacattcagcccgatgacgtgtcggcaacgggggaagtaagggacatatcagccacaaagac

SEQ ID NO: 6091 - DNA, 348 bp, Glycine max
  Clone ID: LIB3029-004-Q1-B1-D12
aaaattcttccaccaagttatgggtttccttgtgttgcttcttttctccctcttaggtctctcttctagttccagcatatcaactcatcgttccatattggaccttgacctaaccaagtttaccacacagaaacaggtgtcttcactgttccaactatggaagagtgagcatggacgtgtctaccataaccacgaagaagaggcaaagagacttgagattttcaagaataacttgaactatatcagggacatgaatgcaaacagaaaatcaccccattctcatcgtttaggattgaacaagtttgctgacatcactcctcaagagttcagcaaaaagtacttgcaagc

SEQ ID NO: 6092 - DNA, 395 bp, Glycine max
  unsure (1)..(395): unsure at all n locations
  Clone ID: LIB3029-004-Q1-B1-D3
agactatatggtgtttctccacaattcccatggagcctaagacacaaccccaagcgaatagtcctccaccaaaaccttgggaacaagcaagttcctcttcgggtccaacgcctttcaaacccccgtcagctggcaacacaagtgatgtagttgaggcttcaaggaactgaaaacctggggaaattgtttctaattctgataggagtgcagctgtcaacaggaatactcttgggaggcctgttcccacaaggccatgggagcagaattatggaaacagcacctatggaggatatgggtctacaatgaattataattctgggtatggatctggaatgtatggatcttcttatggtggactaagangaggaatgtatggatcatcttatggtgggggg

SEQ ID NO: 6093 - DNA, 234 bp, Glycine max
  Clone ID: LIB3029-004-Q1-B1-D4
caagtgaatgggcctcaatgggacaagtgtttttaacaaacaagaacagttcagagcattttgatgcatgtaagtggacaaaatcggaaccacattcctgggaattgatcttcccaatagaggtatgtggtcctaataatggttttgaaatgtggagttctgagtgggcaaatcaaacttcatggcatttgagtttccttattgacaatcccaaacagtctacagtttttgaaa

SEQ ID NO: 6094 - DNA, 222 bp, Glycine max
  Clone ID: LIB3029-004-Q1-B1-D5
agagtattaccagcaatttctgttccacaggctactgccagatcttctgaaaatgcggaatcctctgcatgatctggaatttgtgttttctttcgcttgttcgtttgtttaattcaataaaggaaattaggcatgaccctcttgttgagtatgctctgcctatttgaaaatttccacacctcttttaattgtcgtaatgatgtgtgaagtgtgtgttatttt

SEQ ID NO: 6095 - DNA, 391 bp, Glycine max
  unsure (1)..(391): unsure at all n locations
  Clone ID: LIB3029-004-Q1-B1-D6
catcagtaatggtgatattgacaagactagtgcaactttgcaatttagaaaatcacaatctgctaactttctcaagagaaactttaagcagatgtctaatgttttgtgggtagctcctgaggacaaggcgagtttatggtcacaacttcattatgtttcgtgtaataatctggaaatgcaagaagcttatcttgtcaatctcgtaaatgtgttacgagaattgtatttgcacagtccagaggaagctcgccaattgagaaggaaagctctctctcgtattgaatggctgcaaaaagctgatgtgcctaccatagcacagattgaagagttccattcgatgcanaggatgatgaatgctcctgattcanatgataatattgatctactgttg

SEQ ID NO: 6096 - DNA, 403 bp, Glycine max
  unsure (1)..(403): unsure at all n locations
  Clone ID: LIB3029-004-Q1-B1-D7
gacgaaggaagtggggcagaagaccaaggaggttgggcaggatattcagagcaaggcacaggatacaagggaggcagctgcaagggatgcaagggaggcagctgcaagggatgcaagggaagctgctgcaagggatgcaaaggtggaggcaagggatgtaaagagaacaacagtgacagcaacaaccgcaaccgcatgatgagtaattctgatattagagggagcattaatgtgttgttgtgatgtggtttatatggggaaattaaataaatgatgtatgtacctcttgcctatgtangtttgtgtgttttgttttgttgtctagctttggttattaagtagtagggacgttcgttcgtgtctcananaaangggtactaccactctgtantgtatatggatg

SEQ ID NO: 6097 - DNA, 412 bp, Glycine max
  Clone ID: LIB3029-004-Q1-B1-D8
ggtccctggagcttgaaaagggggaattcttgcttggaaatgtcataaatgcagttgttagccaagtaatgctactgttaagagaaagaaatttacagttgattcgtgatattcctgaagaaatcaagacattggctgtttatggtgatcaattgaggattcaacaagtgttgtctgatttcttattgaatatagtgcgctatgcaccatctccagatggctgggtagagattcatgtacatccaagaataaaacaaatctcagatgggctcactcttctccatgctgaatttaggtactgtggcaagatcttccaagtatttttcattattattgtcttcaagtaagtgtctatggaagataatcaaaacctcaaataagtgtttttaagagcctcaggtataaatctgtc

SEQ ID NO: 6098 - DNA, 97 bp, Glycine max
  Clone ID: LIB3029-004-Q1-B1-E10
gggaattcttatcctgatggtgttggatttgtgaagaatcttggatggttggggaaggaacctgattttgattggggtggtgattgtcatctggatt

SEQ ID NO: 6099 - DNA, 329 bp, Glycine max
  Clone ID: LIB3029-004-Q1-B1-E11
cgcagcatcagcagtagcatggaatccgaatccaagaacgacacccaagtcgctccggccttaatcgccgttcaacccgaccaatcctccgtcgccgtcgcagtgggcccgcacctccgggtcttcgacctccttagcggttctgcagcttctttaaccgacgactctgatggcgccgtcccgttccacaaggacaacatcagagccattcgcttcggcgcaaaaggaaaactcttcgtgtccgcaggtgacgataaaaccctcaaggtctggtcaacacagtcctggcgttgcatcaccaccgtgtcctccgagaagagagtaactgc

SEQ ID NO: 6100 - DNA, 282 bp, Glycine max
  Clone ID: LIB3029-004-Q1-B1-E12
gtcgcctagtgaaagcaatgccgagtttggtatttacttctgttttggaagataactgtacatcaagaacatgtgctatatgccttgaagactattgtgttggtgagaagctcaggattctgccctgccgtcacaagttcaaggctgcctgtgtggatcctgggctaacttaagggaaaacctttgtccaatttggaaaccttaagccaaaaacgggttaaacggttcaacaactttaaggtccaaaaccctggtcccaataaccccaagaactcaagggaa

SEQ ID NO: 6101 - DNA, 103 bp, Glycine max
  Clone ID: LIB3029-004-Q1-B1-E2
agttaatcctgctgtacaacaagctaataatgcaatttaaaagtttcggatccaactaactgtttttaaaagtttaaatattctttaaagacaaattaatata

SEQ ID NO: 6102 - DNA, 400 bp, Glycine max
  Clone ID: LIB3029-004-Q1-B1-E3
gaaccgtcttatagagccccccatctcctaaatcgcttgttaagtttactcaagaacgtgcggccaggatcagatctcacaaacttccaactgccgcctgtgtttaatttcccaaaatcccaacttcaatgctaaggggaatcagtgtactgcacatcttccaacttgctaagccaatgcaacagtgggcaaagtccactggacaggttcacatcagtagtagcatggagcatatctaccacacgccccacatcttttggtgttgctccttataattccactcttggagagacccaccatgtttccaagggcaatctcaacgtcctagttgagcaggtttcactcaatcctccagtatctgccctccatgcaacagatgagaaagaaaacattgagatga

SEQ ID NO: 6103 - DNA, 399 bp, Glycine max
  Clone ID: LIB3029-004-Q1-B1-E4
attctatatcaattttggttaagagtcttgaaaaagcaagagaaaaaaaaataccaaccatggcaaccatttctgatcaacctagagggtcctactcctatggaacctcatatggagcaccctatggaaccacgtatgagaccaacaccagcattaacaacccaccttcacgccaaacagtgaagttcataactgctgccactattggcatcaaactccttctcctgtccgggtttaccctcaaaagcactgtcatacgtttgattaattgcaaccctccttcttgttatcttcagccccatcctttgtccctgctgcgtttgtgctgttcctagttgcttctggcttttttgttctctgggggctgtggtgtggctgccattgctgctttgtcctgga

SEQ ID NO: 6104 - DNA, 399 bp, Glycine max
  Clone ID: LIB3029-004-Q1-B1-E5
aagcattatacacattgtactttctctctctgacaataagtcattgagttgagtttgaagcctccgtccatgttcttccttccgaaggggcatcaattaacatctctcgtgtcaggtagcacttggaacgtatcatcatgaacacagttggagaaagaatgacaaagagagagacttcggagaatgatgaggaggaaagtttattgaagaatgagaatagcggaacagataatgaatctaagattaactacagagggtggaaggtcatgcccttcattataggaaatgagatttttgagaagctaggagccattggcactttatccaatctcttggtccatctcactactgtattcaacttggaaaacatcacggctacaaataatatcaacatcttta

SEQ ID NO: 6105 - DNA, 406 bp, Glycine max
  Clone ID: LIB3029-004-Q1-B1-E6
tccaggtttgaccaagttggaatctctcaatttaaagtggtgtaattgcataacagattatgatatgaaacctctttcaggtttgttgcatcttgctttctttttagcaaagtggctgaaacttttgcccaaaattaattgtctcgactttcttttatgcaattattgtgttttctactacagagtagttcttactcatattccacctaagtttatttaccttgagtggaatggtttaatatctctttgaaaagaacatgttgcaatagctgtatttgacaacatataattgccaaggtgcctttgtgtttatactatagaagtgttcactgccatcttccttgtagacatatgattcaataatcaacagtacaattgtctaattcaatttacttccagagcttgc

SEQ ID NO: 6106 - DNA, 410 bp, Glycine max
  Clone ID: LIB3029-004-Q1-B1-E8
caggaaaatggctcccaaaggtttaacctttccgggtgtgttaataagcctttcaacaatgtcactgaatccttccgttgccggggaaaggcaaaataatggccttgttaagaacttccacaaagaatcatgccctcaagctgaagacatcatcacagaacaagtcaagcttctctacaagcgccacaagaacactgctttctcctggctcaagaacatcttccatgactgtgctgttcacagttgtgatgcctcacagttgctggactccacaagaaagagcttgtctgagaaagaaacacatataaacttttggttgagaaatttcacgtacattgagaccatcacagaaactttgtgaaaagaataccctggagttgtttcatgtgctgatatcctcgttctctctg

SEQ ID NO: 6107 - DNA, 402 bp, Glycine max
  unsure (1)..(402): unsure at all n locations
  Clone ID: LIB3029-004-Q1-B1-F1
cgcgtcgctccgcaccagtttcaccgcacgaatatcttgttgtttggagcgatccgagaaaaactctgtaaacatgttggtttaccaggacctccttacaggtgatgagcttctctctgactccttccgttacaaggaaattgagaatggaatgctgtgggaagttgaggggaagtgggttgttaaaggagcagttgatgtagacattggtgcaaacccttctgctgagggtggaggagaagatgaaggagttgatgatgcagctgttaaggttgttgacattgttgacacattcagacttcangagcaacccgcattcgataagaagcagtttgttaccttcatgaagaggtttatcaagaatttgactcccaagctcgatgcagagcaacaggagttgtt

SEQ ID NO: 6108 - DNA, 374 bp, Glycine max
  Clone ID: LIB3029-004-Q1-B1-F10
gaccgagctagctagctagcaagcaagcacagagatggaggcaaagcgaggccatgccctcatgtgcttggcacgtgtttcactcttcctctgcgctctaaccctatccgctgctcacggaagcaccacggttcaagacatcgcgagaaagttgaaactcggggacaacgagcttctgcgcacggagaagaagttcaaggttttcatggagaattacgggaggagctactccacagaggaggagtatttgcgccgtttggggattttcgcccagaacatggtcagagcggcggagcatcaggcgctggaccccaccgccgtccacggcgtcacgcagttctccgatctcaccgaggacgagtttgagaagctct

SEQ ID NO: 6109 - DNA, 369 bp, Glycine max
  Clone ID: LIB3029-004-Q1-B1-F11
ggcgaataaaaatattgtcttggctactgtaaaacatggaggacatctggcattctttgaagggataactgcatctggcctttggtgggtaagagctgttaatgaattccttggtgaattacgtgctagccattttatgcatgtacagaagaagatcactaaaccaaccataccattggactcgtcaattgatcaaggcccttatgttaatgttaaggaagatggaatggtggctgcattgaacaatgagccaaaaactgacaacgtggaagaaatacaggtaatacaggatacagataatgacggtctagagatgattccagaagaaaaagtggttaaacaagatgagcttgagactaatgcaaagat

SEQ ID NO: 6110 - DNA, 352 bp, Glycine max
  Clone ID: LIB3029-004-Q1-B1-F12
tgcttctgatcctgttcatggacccgtcctgaaaagtgctagagaagcagtgcaatttggcctcacaggaagtgctttgggagcattatttactgcaggctatgcctggaaatattcaaagagtttacatggcgctggactgtcatttttagctggaggtatatttgggtggacttttgggcatgaaatcgcaaatcacacacttcaactttacagggtagacacattggctgctgaggccaagtttctggactggtggaataagaagactggagggtattaaaactgttggcttatgggaattaatgctacatttgttatcgtttctgaaaaatgaagaataatttttggt

SEQ ID NO: 6111 - DNA, 411 bp, Glycine max
  Clone ID: LIB3029-004-Q1-B1-F2
cagctaaatgagaaacaacaaaaggaaataattgatcttttaaaatgcaaggaggaaagaaagctggagagtccatcaaggaaacagctgcaaacattggtgcctctgccaagggtggcatggagaaaaccaatggcaatgtccaagaaaaaggaaaaagaatgacagcacgtgattccaagcaaaaaggattgggcacccaaaataaagatgcaaagatgagccacgcagagctggacaaggcaggcggcgcgtcagcataacacggcggcgaagcatgctgccacggcatggcacatgggacaacccatggggaaccatcagacgtcagctatgcccggtcatggaaccggacagcccacgggccatgtcaccgacggaatggtgggctcacaccctattggaaccaac

SEQ ID NO: 6112 - DNA, 382 bp, Glycine max
  unsure (1)..(382): unsure at all n locations
  Clone ID: LIB3029-004-Q1-B1-F3
aggtttttctttgagaagtaaaagatcttaatgcaagtaattaacatggaatctcaacaagcaaaccgttaaaaaacttattaaaaagcaaagcaaagtgaaactgttgttcctggaggaactggtgggaagaatcttgaggctcaagaacatcttgctgaaggaaagagccgtgganggcagacgaagaaacagcaactaaggtcagaggggtatcatgaaatggggaccaaagganggcagacaaggaaggaacagatggggagagaagggtaccaagagatgggacgcaaaggaggactcagcaccatggacaagtctggtggagaacgtgctgaagaggaaggcatagaaatagatgagtctaagtttanaattacct

SEQ ID NO: 6113 - DNA, 413 bp, Glycine max
  Clone ID: LIB3029-004-Q1-B1-F4
ccaatgtctttgaacactcatcaccatgggcaagcttgttctttccctttggttccttcctttcaatggctgcttcgctctgagagagcaagcacagcaaaatgagtgccagattcaaaagctgaatgccctcaaaccggataaccgtatagagtccgaaagtgggttcaatgagacctggaaccctaacaacaagccaatccaatgtggcggtgttgccctctctcgctgcaaccttaaacgcaatggccttcgtaaaacttcctaaaacaaacggtccccaaggaaatctacatacaacaaagtaatggtatttttggcatgatattcccggggttgtcctagcacttatcaagagccgcaagaatctcagcaacgaggacgaagccagaggccccaagaccgtcaccaaa

SEQ ID NO: 6114 - DNA, 399 bp, Glycine max
  Clone ID: LIB3029-004-Q1-B1-F5
taaaattcttccaccaagttatgggtttccttgtgttgcttcttttctccctcttaggtctctcttctagttccagcatatcaactcatcgttccatattggaccttgacctaaccaagtttaccacacagaaacaggtgtcttcactgttccaactatggaagagtgagcatggacgtgtctaccataaccacgaagaagaggcaaagagacttgagattttcaagaataacttgaactatatcagggacatgaatgcaaacagaaaatcaccccattctcatcgtttaggattgaacaagtttgctgacatcactcctcaagagttcagcaaaaagtacttgcaagctcccaaggatgtgtcgcagcaaatcaaaatgggcaacaagaaaatgaaga

SEQ ID NO: 6115 - DNA, 408 bp, Glycine max
  Clone ID: LIB3029-004-Q1-B1-F6
aaaaaatggctgatacaggtggaggagatgcagtgagaccagtggtaatatgtgataacaagtgtggctgcacacttccatgcactggtggttccacttgcaggtctcttaagttcatgatttcaacaaagtaacttgcttaaaatagttcctttttttttttacatcgtactgatgttctgatattcgaatttatgatctcttacattttaatatactattctaattctcttccgttaggccgacctaatgttctccttgtttgctttattgctacccgaatctctctagtttctgggttcgatagatgcacaatttctttggttcgagtttttaatttcttctaaaatcaaatacttgtgttgttgaaaaattaccatattgagacttttatcaattttctgttaa

SEQ ID NO: 6116 - DNA, 319 bp, Glycine max
  Clone ID: LIB3029-004-Q1-B1-F7
atgaactcggggcaagtcagtgtctgatgaactgggaaaccttgaggcaagcgatctacaacgttggttgcgggtatctgtggactgaacaggccaatgatcatcccagttgactccaccatcggcagtcactcaggggacattcaacattctgtctattgcatcgaactctgatggacatatgtgcaaatgctcctggtgatgatgaggatgcatatgatgcccatactgactccgtcagtggtgacattcaacttcctcgaggatcacccatttggtatttgcatgacatgagggggcaatgttgtacacacatgaa

SEQ ID NO: 6117 - DNA, 411 bp, Glycine max
  Clone ID: LIB3029-004-Q1-B1-F8
gaaccatggtgtgttacttgtgggatatggtgcaaaaggcttctcaattcttaggcttggcaacaaaccatactggatcatcaagaattcgtggggggagaaatggggagaagatggctattacaagctctgcagagggcatggcatgtgtggaataaacactatggtttctgctgcaatggtgcctcaaccacaaacaacacctacaaagaattatgcttcttattagctatgcacttaaggaaatctaaataaatatttttcattctaggtgatgtatcatgtatgtaccaaaatattttggtacgtaagtcttttaaaaagtttgcatctcctctttggttttccttagttctgaaagttatctcctaagaagacaatcatatgtactgtacgtagtgtgaagatata

SEQ ID NO: 6118 - DNA, 347 bp, Glycine max
  Clone ID: LIB3029-004-Q1-B1-F9
ggggctacccgctgagtttaagttcttcagataagcggagagaggaatgttgaaaaagaagacaagaatgatacgtggcatcgcgtggagcgaagcagtggcaagttggtgaggaggtttagattgccggagaatgctaaagtggaccaagtgaaggcttccatggaaaatggggttctcactgtaactgttcctaaggaagagattaagaagcctgatgttaaggccatagacatctctggttaatctatgttgctctgttccttcgttgaaatgtgtttatgttttcttattctgaggatcatttgtgtgagtcgtgtgaaaaatatttcaggttttatgttggc

SEQ ID NO: 6119 - DNA, 344 bp, Glycine max
  Clone ID: LIB3029-004-Q1-B1-G1
ctcgagccgctcgagccgttacaggataaagacaattaccttcagaagctgtcgttgtaaatgttacatgtggtagtggacgtggtggtttacctaccactgcttggattagttctgcagttaacaatcgctcctcagatatcaacaaaaagattcgcacagcacttgggaaaggtaagaaaattgtttttcttactagagttgatccttttccagtagctctactggctgttctttttggcgttaagaatgaaattctgagttccaacgccactaaccctatgctgacgcgacttcctgagaactgtaagagtctcaaatatctggttgatgaatgtcccttt

SEQ ID NO: 6120 - DNA, 324 bp, Glycine max
  Clone ID: LIB3029-004-Q1-B1-G12
atcataaaattcttccaccaagttatgggtttccttgtgttgcttcttttctccctcttaagtctctcctccagttccagcatatcaactcatcgttccataatggaccttgacctaaccaagtttaccacacagaaacaggtgtcttcactggtccaactaaggaagaatgagcatggacgtgtctaacataaccaagaagaagaggcaaagagacttgagattttcaagaataactttgactatatcagggacatgaatgcaaacagaaaatcaacccattctcatcgtttaggattgaacaagtttgctgacatcactcct

SEQ ID NO: 6121 - DNA, 417 bp, Glycine max
  Clone ID: LIB3029-002-Q1-B1-E8
cgcgatcttctgttcaaggattatcagaatgaccacaagttcaccatcaccacttacacttccaccggagtggaaatcacttcaactggagtcaggaaaggtgagatatatttggccgatgtcagcactaaggtgaagaacaagaacatcacaactgatgtcaaagtggacactaactcaaatctgcgtacaatcattactgtggatgaacctgcccctggactcaagacaatttttagctttaattttccagatcagaaatctggcaaggtagaactccagtaccagcatgagtatgctggaatcagcaccagcattggattgacagcaaatcctgttgttaacttctctggtgtggttggaaataatttggttgccgttgggacagatctttcatttgatactacctccggcaac

SEQ ID NO: 6122 - DNA, 309 bp, Glycine max
  Clone ID: LIB3029-001-Q1-B1-A1
gatttttcatccttggagatcgatgctaatctcatgaaattgctcctaccaagacttggatttgccccataccttcctccagttgaggagggtgcaaattctgcgttgaagagagcatttgaggccttgaacactcatcttgcctccaatacttaccttgttggccattctgttacccttgctgacatcataacaacatgcaacttgtatttaggattcagccagctcttagttaagagcttcacctctgagttccctcacgttgaacgatacttttggaccttggtcaaccagcctaacttcagaaag

SEQ ID NO: 6123 - DNA, 362 bp, Glycine max
  Clone ID: LIB3029-001-Q1-B1-A10
cgcattttggagttcaactccaaacccaacaccctccttctccccaaccatgctgacgctgattacctcatcgttatccttaacgggactgccattctttccttggtgaacaacgacgacagagactcctacagacttcaatctggtgatgccctgagagtcccctcaggaaccacatactatgtggtcaaccctgacaacaacgaaaatctcagattaataacactcgccatacccgttaacaagcctggtagatttgagagtttcttcctatctagcactgaagctcaacaatcctactttcaaggattcagcaggaacattttaaaggcctcctacgataccaaattcgaggagataaa

SEQ ID NO: 6124 - DNA, 376 bp, Glycine max
  unsure (1)..(376): unsure at all n locations
  Clone ID: LIB3029-001-Q1-B1-A11
agttgagaagtgaatacacaagcaaaattaaattaattaattaagctgaaagcaagagaaaatgaagatggaaattgaggaagttggcaactgcgaagcacttcccctgctttcactgaaccacgtgtcccttttgtgcagatcagtgtgggagtctatgaggttttatgaggatgtcttgggctttgttcccatcaaacgcccttcttctttcaagttcactggagcctggttttacaattatggtattggaatccacttgatcgagaatcccaacattgatgaatttgatacctgcgtggttgaagaaaggcctattaatcccaaggacanacatatctcattccagtgtactgatgttgaacttgttaagaag

SEQ ID NO: 6125 - DNA, 413 bp, Glycine max
  Clone ID: LIB3029-001-Q1-B1-A4
ggacgcacctgctgttggcttgttgttcaaggatggcaatttgtaaaaaagatgtttggagagttgaatgtggaatcccttctggatttccgctcacagttatttgcaatagcatttttaatgagatgctcattagatatagctatgaaaaattactgcgtcaggctaaagctccaagtatgtttttacaatccttcaaaaattttgtttctttgtgtgtgtatggtgatgacaacttaattagtgtacatgaatatgtcaagccttactttagtggttctaaattgaaaagctttctagctggtcataatatcaccattactgatggtattgacaaaactagcgcaactttgcaatttagaaagttagcagattgtgactttctcaaaagaaactttaagcagatgtctaac

SEQ ID NO: 6126 - DNA, 393 bp, Glycine max
  unsure (1)..(393): unsure at all n locations
  Clone ID: LIB3029-001-Q1-B1-A5
agcgcattggaaatgtgagtactggattgagtgaggaaaccctatcgaaactcttgaaacagagaaagcactcggttgaaaaagggtctgagactgatgcagaatcctgttgtgtttgtcaggacgattatggtgatgggactgatattggaacgcttgattgtggccatgatttccatagcagctgtatcaaacagtggctaatgcaaaagaatctgtgtcccatttgtaagacaacgggcttggcaacatgatgtatgtgactctctgtcctcaggcaaataccatgaccatgaaggaaaaaaaaaattggcacaatttacccaggaaattctggtgcttggtgccttgtcntctgtttccagcctagtaaattggcgtacctgactgaca

SEQ ID NO: 6127 - DNA, 402 bp, Glycine max
  Clone ID: LIB3029-001-Q1-B1-A6
gttcaatatcctagtacaccgtattaaagaatttaagatatactatgatgagagcgcggttcccattactgttgctgggagttgttttcctggcatcagtttctgtctcatttggcattgcgtattgggaaaagcagaaccccagtcacaacaagtgcctccgaagttgcaatagcgagaaagactcctacaggaaccaagcatgccacgctcgttgcaacctccttaaggtggaggaagaagaagaatgcgaagaaggtcaaattccacgaccacgaccacaacacccggagagggaacgtcagcaacacggtgagaaggaggaagacgaaggtgagcagccacgtccattcccattcccacgcccacgccaacctcatcaagaggaagagcacgagcaga

SEQ ID NO: 6128 - DNA, 287 bp, Glycine max
  Clone ID: LIB3029-001-Q1-B1-A7
ttcgagggtttgggtttctcttcctcccttggagaaaaagaagagccaccgctgcgacgccgttcgtgcatttttgaggtgccgctgtcaagtttgggccttgtggaccaaaggagaatgataactccaaataataagaaaatccccggaattccaaaaatgccaatgaagatgtaaatcaaaaagggcaaaaaaaaggggggatttaaaaacccacccaatttgggaaggaattccgaaaaattttaggggtttgggccaaccaattaaattttaaagtgatccgg

SEQ ID NO: 6129 - DNA, 368 bp, Glycine max
  Clone ID: LIB3029-001-Q1-B1-A9
tacttgtgggatatggtgcaaaaggcttctcaattcttaggcttggcaacaaaccatactggatcatcaagaattcgtggggggagaaatggggagaagatggctattacaagctctgcagagggcatggcatgtgtggaataaacactatggtttctgctgcaatggtgcctcaaccacaaacaacacctacaaagaattatgcttcttattagctatgcacttaaggaaatctaaataaatatttttcattctaggtgatgtatcatgtatgtaccaaaatattttggtacgtaagtcttttaaaaagtttgcatctcctctttggttttccttagttctgaaagttatctcctaagaagacaatc

SEQ ID NO: 6130 - DNA, 346 bp, Glycine max
  Clone ID: LIB3029-001-Q1-B1-B1
ctcgagccggctcctgattcaaatgataatattgatctactgttgagcattgatttgttgggtttacaaggagcaggcaaagcttttccaaacaagattgtttttgatgataagcttgtgttggctaacacacaagaattctttgatggaaattttccagtggattcctggttaccaatttttgtgaattgtccttatcctgtaagtcaattaccttcaaaagctgtcgttgtaaatgtcacatgtggtaatggacgttgtggtttaaccaccaatgcttggaataattctgcagttaacaatcgctcctcagatatcaaccaaaggaattccacaacactttgga

SEQ ID NO: 6131 - DNA, 379 bp, Glycine max
  Clone ID: LIB3029-001-Q1-B1-B10
tgcttgcacaaaagcaatgactatgtcatttaatccaaacccgtgttctgatgcatggagtttggaatttctgaagcgtactggatttcattgcgatatcatttgtgtcactggatggactgccaccccaatgcaggatgttcaggttacaattgattggtttatttcctctcaggaatgtgttcccaggacctattgtgttttaaatccacaaaatccttttgtgttaaataggtggatgggaaaattgactttcccccagggcacttcccgaagtgttaagagaatgcctctttctatagggggaggagctggtgcaaagaatgctattctcatgaatatgccaaatgctgttctttcaatgtggagatattttgtt

SEQ ID NO: 6132 - DNA, 350 bp, Glycine max
  Clone ID: LIB3029-001-Q1-B1-B11
atttaatccaaacccgtgttctgatgcatggagtttggaatttctgaagcgtactggatttcattgcgatatcatttgtgtcactggatggactgccaccccaatgcaggatgttcaggttacaattgattggtttatttcctctcaggaatgtgttcccaggacctattgtgttttaaatccacaaaatccttttgtgttaaataggtggatgggaaaattgactttcccccagggcacttcccgaagtgttaagagaatgcctctttctatagggggaggagctggtgcaaagaatgctattctcatgaatatgccaaatgctgttctttcaatgtggagatattttg

SEQ ID NO: 6133 - DNA, 362 bp, Glycine max
  Clone ID: LIB3029-001-Q1-B1-B12
gagaaacaaagaaaggaaataattgatctttgaaaatgcagggaggaaagaaagctggagagtccatcaaggaaacagctgcaaacattggtgcttctgccaaggctggcatggagaaaaccaaggccactgtccaggagaaggcagaaagaatgacggcacgtgatccgatgcaaaaggagttggcaacccagaagaaagaggcaaagatgagccaggcagagctggacaagcaggcggcgcgtcagcataacacggcggcgaagcaggctgccacggcagggcacatgggacaacccatggggacccatcagacgtcagctatgcccggtcatggaaccggacagcccacgggccatgtc

SEQ ID NO: 6134 - DNA, 394 bp, Glycine max
  Clone ID: LIB3029-001-Q1-B1-B2
gtggaaaccccagagcacttagaaggttgaggactgcttgtgagagggccaagagaacactttcatcgactgctcagaccaccattgaaattgattctctatacgagggaattgatttctactccactgttactcgtgccagatttgaggagctcaacatggatctcttcaggaaatgtatggagccggtggagaaatgtttgagggatgctaagatggacaaaagaagtgttgatgatgttgtccttgttggtggttctaccagaattcccaaggttcaacaactgctgcaggacttctttaatggaaaagagctttgcaagagcattaatcccgatgaggctgttgcatatggtgcggctgttcaagctgcaatcttaagtggtgagggcaa

SEQ ID NO: 6135 - DNA, 411 bp, Glycine max
  Clone ID: LIB3029-001-Q1-B1-B3
acaaatccttcacttgttgctcgtcttagtttctgtgttgtgtcatttttattgctatatcctaattaaacttcaccctcaaaatgagtgatcccacactagcacaaccacacctagtcgaagtccacacaacactcgaaaccgttgttaccacacacaaccataaccatagaccctcaataaatgcctcaggtgaaaagaagaaaattgtgggggtgttctacaaagggaatgagtatgctaaattgaaccccaatttcgtggggtgtgttgaaggagcattgggtatacgtgagtggctggaatcacagggtcatcagtacattgtcactgatgacaaagaaggaccagattctgaacttgagaaacacattccagatggccatgtcatcatatctactccaattcacc

SEQ ID NO: 6136 - DNA, 408 bp, Glycine max
  unsure (1)..(408): unsure at all n locations
  Clone ID: LIB3029-001-Q1-B1-B4
gcgaaatatcttcgcgtgatactggaaagacaatggtagatgcctctttaggagaaataatgacaacatgtgagaagatcaattggctactgtcagagggtgagcagtggttaaagcctgaataccggtcttctggaagatcaatgcttcataagagagctaaagtagaatttcatcnccttggtgttattggagccattgtttcatggaattatcccttccacaatatttttaatcctatgctggctgcaattttttctggaaacggtattgtgattaagatatcagaacatgcaagttggtctggatgcttctacttccggatcatccaatcagcccttgctgccataggagctccagaggaccttgttgaggtgataacagggtttgctgaaacaggagaagcat

SEQ ID NO: 6137 - DNA, 409 bp, Glycine max
  Clone ID: LIB3029-001-Q1-B1-B5
aacgaggacacagctgagaaacttcggtctccagatgacgaaaggaagcagatcgtgacagtggagggaggcctcagcgttatcagccccaagtggcaagaacaagaagacgaagacgaagatgaagacgaagaatatgaacaaactccctcttatcctccacgacgaccaagccatggaaagcatgaagatgacgaggacgaggacgaagaagaagatcaacctcgtcctgatcaccctccacagcgaccaagcaggcccgaacaacaagaaccacgtggaagaggatgtcagactagaaatggggttgaggaaaatatttgcaccatgaagcttcacgagaacattgctcgcccttcacgtgctgacttctacaacccaaaagctggtcgcattagcaccctcaaca

SEQ ID NO: 6138 - DNA, 406 bp, Glycine max
  Clone ID: LIB3029-001-Q1-B1-B6
gcattaagcgtctttgatccatcttcttctgtccccgaaaggacgtacccaaaccaaatcgccacatatcaaatgctaagctacgcgcccttttctcagtgaccgattcttcagttaactctctctgatccaattcaattgaatgggcctcaacctcttcgctctccctccatggcaatggcaaactatttctctgctgtgatcctccaccgccatcccatcaccgccctcgatcttctcctcatcttcctccacaccctcttatagctctcacccgacaagagtaaaaaaacccaaccattttttttctctctctggtttcgaattttttaaggatataaaaactagaacaaaattcgtttttgattgtgattcctgatacccttttggattctgatggcgtcgg

SEQ ID NO: 6139 - DNA, 358 bp, Glycine max
  Clone ID: LIB3029-001-Q1-B1-B9
caagaatgctatgttcgtgccacactacaccctgaacgcgaacagcataatatacgcattgaatgggcgggcattggtacaagtggtgaattgcaatggtgagagagtgtttgatggagagctgcaagagggaggggtgctgatcgttccacaaaactttgcggtggctgcaaaatcccagagcgataactttgagtatgtgtcattcaagaccaatgatagaccctcgatcggaaaccttgcaggggcaaactcattgttgaacgcattgccagaggaagtgattcagcacacttttaacctaaagagccagcaggccaggcaggtgaagaacaacaaccctttcagcttcctggtt

SEQ ID NO: 6140 - DNA, 381 bp, Glycine max
  Clone ID: LIB3029-001-Q1-B1-C1
attatgctaattcgaatcaaatttctttttgactacaaactatataaaggatctttttattttattttaatttcaatcataatacacacacattttaagtagaccttcattttttaggtagttcttttgttcatttttgtttagatacttacttggattccacaaatgcttgttctttttaacagcatcttgaggagcttcttgaatattttcgctttggactgtggtgggttgcccttggggttgcttcttcaattggtctaggatctggtttgcacacatttgtcctatatttgggtccccacatagcactgtttacaataggagcagtgcaatgtggccgagttgatttgaaaagtgctccttatgatacgatacaat

SEQ ID NO: 6141 - DNA, 374 bp, Glycine max
  Clone ID: LIB3029-001-Q1-B1-C10
ggaattttagtggacaaaactggagattggatcacacttatacaaaattctccaattagtaacttgttgagagttgctgcttggaagaaaggctgtttaatggttaagattgtgatgtctgggaatgcagcagtcaaaaggagtgattgggcctcattggtacaagtgtttttaacaaacagcaacagtacagagcattttgatgcatgtaagtggacaaaatcggaaccacattcctgggaattgatcttcccaatagaggtatgcggtcctaataatggttttgaaatgtggagttctgagtgggcaaatcaaacttcatggcatttgagtttccttattgacaatcccaaacagtctacagtttttgacat

SEQ ID NO: 6142 - DNA, 382 bp, Glycine max
  Clone ID: LIB3029-001-Q1-B1-C11
gggctgctgaatatgctagtgatgcggctcataggaccaaagagtatgctggtgatgctaccaagagaagcaaagaggcttctaatgatcatgccaatgacatggctcagaagaccaaagactacgccagtgacactgctcagagaaccaaggaaaaactccaagacattgcatctgaagctggtcaatacagtgcagagaaagctagagaaatgaaggatgcagcagcagagaaggcaagtgacatagcaaaggctgcaaagcaaaaatcacaagaggtgaaagagaaattaggtggacaacaccgggatgccgagctttgagaattgagatgtttgaatcactttgaaccttttaattatgccacaatagttgtctaaat

SEQ ID NO: 6143 - DNA, 357 bp, Glycine max
  Clone ID: LIB3029-001-Q1-B1-C12
gggctgctgaatatgctagtgatgcagctcataggaccaaagagtatgctggtgatgctaccaatagaagcagagaggcttctaatgatcatgccaatgacatggctcagaagaccaaagactacgccagtgacactgctcagagaaccaaggaaaaactccaagacattgcatctgaagctggtcaatacagtgcagagaaagctagagaaatgaaggatgcagcagcagagaaggcaagtgacatagcaaaggctgcagagcaaaaatcacatgaggtgaaagagaaattaggtggacaacaccgggatgccgagctttgagaattgagatgtttgaatcactttgaacctttta

SEQ ID NO: 6144 - DNA, 410 bp, Glycine max
  unsure (1)..(410): unsure at all n locations
  Clone ID: LIB3029-001-Q1-B1-C2
ctcgtcttttgggcaccattcctcagtccatttcacagcaaactgtttggaatcaaatggcaacagtgagaacaccattgaattttgattctagcaagcagagcttttgtcaattctctattgatcttcttggtggaggaattttagtggacaaaactggagattggatcacacttatacaaaattctccaattagtaacttgttgagagttgctgcttggaagaaaggctgtttaatggttaagattgtgatgtctgggaatgcagcagtcaaaaggagtgattgggcctcattggtacaagtgtttttaacaaacagcaacagtacagagcattttgatgcatgtaagtggacaaaatcggaaccacattcctgngaattgatcttcccaatagaggtatgcggtcct

SEQ ID NO: 6145 - DNA, 405 bp, Glycine max
  Clone ID: LIB3029-001-Q1-B1-C3
gctgatcttataaaaagaggaatggcaattgaggatccatcgtgccctcatggcattcgccttgtgatagaggactacccttatgctgttgatggacttgagatatgggatgctatcaagacatgggtccatgaatacgttttcttgtactacaaatcagatgacacacttagagaagatcctgaactccaagcctgctggaaagaactcgtacaggtgggtcatggagacaagaaaaatgagccatggtggcctaagatgcaaactcgtgaagagctagttgaagcttgcgctatcatcatatggactgcttcagcacttcatgcagctgttaattttggacagtatccctatggaggtttaatcttaaaccgtccaactcttagtacgcgattcatgcctgag

SEQ ID NO: 6146 - DNA, 412 bp, Glycine max
  Clone ID: LIB3029-001-Q1-B1-C4
tttttgttccctctctgccgttaaccttttggacctcaaaggggggccccgaaaacctccccttccaagccggaaataaacaacctcccaagccccaccaccacaaccttcaaaagcaacaaggaaatttcctggcgtgaacccatcagcaacgcttcggaggcttgggataaaatttgatttgaaagttaaaccgacaagagcaagctcgatgctcagccaaagctcttcattcgtcttgtgcccgacaaggccaacaagactctttccgttattgacagcggcattggaatgaccaaagcagatttggtgaacaacttgggtaccattgcgaggtccgggaccaaggagttcatggaggcattgcaggctggtgctgatgtaagcatgattgggcagttcggtgtggggt

SEQ ID NO: 6147 - DNA, 406 bp, Glycine max
  Clone ID: LIB3029-001-Q1-B1-C6
ctcgagccgattcggctcgagctttgaagtttctaagatgacttctccctacattaaatgtacagtctctttcttcatagcatttggaaatttggctgatgacaccatcaattttgaggcttttccccacaagctggtgcagtttggagagattcaggaaaaagttgtattgaaattttcacaagaggaatttcttacagcttggtcaactcaggtgcgtcctgcaacaactctgttggctgatgggtgcccatatttgtatgctatggtgcatgatagttcagtgtctacaataccaggtgattttgtcattggtgttaagttgacaaccataaacaatatgtgtgcatatgggctcaatcctggtatttcaggttctcgtcttttgggcaccattcctcagtca

SEQ ID NO: 6148 - DNA, 405 bp, Glycine max
  Clone ID: LIB3029-001-Q1-B1-C8
tccaacctctacgttattctcctccatcccgatctctttattgtcttctttctctcttcctggttttcgttggagaatcctgaaaaccgcttgattttaatcaaagggtcatcaggattcgggcacccatatctcgtatcactccttctctcctctgttgtcttagaaagaagaccaagaaaagcatcaatttttgcaagcaatcttcttcttttgccctttctcttgtcttaaacacacacacacaacaacccagctgctgaagctgaagcatcacaactcagacatgattcgagtggccacaaattaagcgtgttggtgttatgagtgagagaatggaatcgagtagcattgagagcagcactgtatcatcgatgactatgatggaagaagatgagcatcccc

SEQ ID NO: 6149 - DNA, 404 bp, Glycine max
  Clone ID: LIB3029-001-Q1-B1-D1
atacactctgcttcttctgatgccatcactctccccgcttcgcctaccaccgcgctggtccacgcaaaaacatctactttgacccttccattgttcgcgttgccattgtcacctgcgggggtctctgtcccggccttaacaccgtcatccgagagcttgtcgtgggcctgtggcaactctatggcgtccgtcatattttcggcatcaccgccggctacagggggttttactcctctgtcccactccccctcaatcccaaactcgttcatcattggcacaacgtcggtggcaccctccttcagacatccaagggcggtttcgaccttcataaaatcgtcgatgccatccaaactcacgccttcaatcacgtgtacattatacgtggagatgggactatgcgagga

SEQ ID NO: 6150 - DNA, 378 bp, Glycine max
  Clone ID: LIB3029-001-Q1-B1-D10
gagcgagatagagaacagatagagataacactaggcagcacaagagaatggcgctgctgtgtggttcaacttccgtgactccattcctttctcacaagaacgttggtttcacaacctcagcaaaatcttcctttgttggctttcaattgccgcttccaaagctcacattatcttcttccgttcgaacccttctgccggcaacatcccgtgtccgttgccagcaagagtctactactgttacccctgtcgcagaagaagacccgcgcttcgcgtgcgtcgaacccgaaccccgattcaaaggcccggacatttggaacaagagctggtatccaaaagctgcagatcatgtgaatacagaaaaaacatggtatgttgttg

SEQ ID NO: 6151 - DNA, 383 bp, Glycine max
  Clone ID: LIB3029-001-Q1-B1-D12
caaaaaaaagcctcgtctctcgtgccgattctccaggacaattcccttcacccaacctaattgcaattagtgtagaagatgagtacgttggatgcaacaagggctgaacttggtcttcttgttttatatttgggcaaggctgaagcaagggacaaaatatgcagggcaatacaatatggttccaaatttttgagtaacggggaacctggtactgctcagaatgtcgacaaaacaaccagcttggcacgaaaagtcttccgtctttttaagtttgtcaatgacctacatgctttgataagtccaacaccacagggcactcccctccccctaattctgttgggaaagttcaagaatgcactactctccactttcttgtttcttga

SEQ ID NO: 6152 - DNA, 155 bp, Glycine max
  Clone ID: LIB3029-001-Q1-B1-D3
aatggctggcatcggcatccagccataccaccagcaatgggctccggcagctgcctctcctcctccttcttatgcagcctctggcggtcctcgtcctcatcctgtggatgatgttccagggattcttattccgggtcttcctgaagaactgaagc

SEQ ID NO: 6153 - DNA, 414 bp, Glycine max
  unsure (1)..(414): unsure at all n locations
  Clone ID: LIB3029-001-Q1-B1-D4
cagtcnctggagaagtgggcccaacaagctggtatagattaccaagattttcctgatctgtgtaacaaacctgaaactgtcactgaggttcttcagtctatttccaagaaagggttacttatggaggggcttaccagaaaggctaagtgaagcattgtagagtgtcaactgcggcgatgtcacctatcaggctatcaagggtggtgctatagtanggacttggatatcatcaagtgcttaagtcccacatcgactagtatgtgaaggaggttgcaaaatctgcaaagctggagaaaactgaaatccctgcaaagattaagttgctgccggatccatggactcctgaatctggattggtcactgcagctctcaagataaagagagagcagctgaaagccaaattcaaagatgagc

SEQ ID NO: 6154 - DNA, 408 bp, Glycine max
  Clone ID: LIB3029-001-Q1-B1-D6
gaatcagcaccacattcacctgagctttttgtgaggattccaaagcatggcttcccttgcagcatccactgctgctgcttcccttggcatgtcagaaatgcttggaaaccccatcaacctcagtggtgccacaaggccagctccatctgcctctagccctgcctccttcaagactgtggctcttttctccaaaaagaaggctgcacctccaaaaaaagctgcagctgctgctcctgccaatgatgagcttgccaagtggtatggtcctgacagaaggatcttcttgcctgagggtctcttggaccgatctgagatcccagagtacttgaccggagaagtccccggagactatggttatgacccatttggtcttagcaagaagccagaagatttttccaaatatcaggc

SEQ ID NO: 6155 - DNA, 399 bp, Glycine max
  Clone ID: LIB3029-001-Q1-B1-D7
aaattccaatagttttcctatcatgttcaacatgcattgtatggatacttggatagaaggtagcataaacgttggatgagatatttcatttcattttatacatattttatagctaaaaaagattgtatgacttttgttgaatgcaatacagatccagggagcttgtcaccaaagcggacatctgttgattccacgcacagtgattctggagttaactattccgcttgatactcaatggacatcacaaaatcatagatggttgcaccctcttggaataccttttcgcttgtgaacaataaccctagctttttttttttctccccattttcatgtatagaaccttcttgtgtagctaatagatggacatgatggtgggcaagcctgcttatttttcaacca

SEQ ID NO: 6156 - DNA, 369 bp, Glycine max
  Clone ID: LIB3029-001-Q1-B1-D9
tgatgagagtgcggtttccctttgttggtgttgctgggaactgttttcctggcatcagtttgtgtctcattaaaggtgagagaggatgagaataaccctttctacttgagaagctctaacagcttccaaactctctttgagaaccaaaacggtcgcattcgtctcctccagagattcaacaaacgctccccacaacttgagaaccttcgagactaccggattgtccagtttcagtcaaaacccaacacaatccttctcccccaccatgctgacgccgatttcctcctctttgtccttagcgggagagccatacttaccttggtgaacaacgacgacagagactcctacaaccttcaccctggcgatgcc

SEQ ID NO: 6157 - DNA, 406 bp, Glycine max
  Clone ID: LIB3029-001-Q1-B1-E1
ttcagatattattttcgtccctgaccggagttacaggaaatcagatgctttattttgtggggctgaaatattcatccgctacaattgcatgtgcactgacaaatttgctcccagctttcactttcatccttgcagttctcttcagacaagagaatttgggaatcaagaagagggctggtctagcaaaggtattcgggacaatattgtgtgtgagtggagccttgcttttgtcattttaccatggaaaaaccattggtttaggccaatcaagtattcactggagatatgctgagaaaatggaaggaactagctcttctggcaaaggaaacatgttcctaagccctttggtcgtaattcttagcacccttgtttgggcagcatggttcataattcaaaaagacataag

SEQ ID NO: 6158 - DNA, 349 bp, Glycine max
  Clone ID: LIB3029-001-Q1-B1-E11
tgcagaccgagctagctagctagcaagcaagcacagagatggaggcaaagcgaggccatgccctcatgtgcttggcacgtgtttcactcttcctctgcgctctaaccctatccgctgctcacggaagcaccacggttcaagacatcgcgagaaagttgaaactcggggacaacgagcttctgcgcacggagaagaagttcaaggttttcatggagaattacgggaggagctactccacagaggaggagtatttgcgccgtttggggattttcgcccagaacatggtcagagcggcggagcatcaggcgctggaccccaccgccgtccacggcgtcacgcagttctccga

SEQ ID NO: 6159 - DNA, 371 bp, Glycine max
  Clone ID: LIB3029-001-Q1-B1-E12
gttcttcatagttcagtgtgtcgtttaaaaatgtcgcagttgctggataaagccaagaacttcgtgtcggagaaggtaaatgatatggccaagccggaggcgagtgtcactgacgtggacttcaagcgcgtgagcaaagataatgtcgagtacttggccaaggtctctgttcgtaacccttattcaacttccatacccatttgtgagatcaactactctttcaaaagcgcatccagggagatagcatcagggaaaattccagacccaggatcgttgaaggcaaaggacacaacaatggtggatgtgccagttaaggttccatacagcatattgatgagcttggcaaaggacattggtgctgactgggacat

SEQ ID NO: 6160 - DNA, 340 bp, Glycine max
  Clone ID: LIB3029-001-Q1-B1-E2
caagaggccctctgacaagcccctcaggcttccccttcaggatgtgtacaagattggaggtattggaactgtgccagtgggacgtgttgagaccggtgtcatgaagcctggaatggtggtgacttttgcatgaactggactgacaactgaagtcaagtctgtggagatgcacgatgaatctcttacagatgcacatcctggtgacaatgtgggattcaatcttgcgaatgtcgctgttacggatttgaagcgtggttatgtggcctcaaactcatcggatgacactgcctaggaggctgctaagttcacagcccatgtcatcatcatgacacatccctgg

SEQ ID NO: 6161 - DNA, 412 bp, Glycine max
  unsure (1)..(412): unsure at all n locations
  Clone ID: LIB3029-001-Q1-B1-E3
ccctccacagcgaccaagcaggcccgaacaacaagaaccacgtggaagaggatgtcagactagaaatggggttgaggaaaatatttgcaccatgaagcttcacgagaacattgctcgcccttcacgtgctgacttctacaacccaaaagctggtcgcattagcaccctcaacagtctcaccctcccagccctccgccaattcggactcagtgcccaatatgttgtcctctacaggaatggaatttactctccacattggaacttgaacgcgaacagtgtgatctatgtgactcgagggaaaggaagagttagagtggtgaactgccaagggaatgcagtgttcgacggtgagctaaggaggggacaattgctantggtgccgcagaactttgtggtggctgagcaaggggga

SEQ ID NO: 6162 - DNA, 380 bp, Glycine max
  Clone ID: LIB3029-001-Q1-B1-E4
gaccaagccatggcgatgagaacaaactttccttagccatctttttcctttttccttttagccttattttaaacctagcctttggcaaatgtaaagaaaccgaggtagaagaagaagaccctgagctcgtaacattcaaacaccaatgccaacagccacagcaatacactgatggttacaagcgggtatgcttgcaaagatgtgacaggtatcatcgtatgaagcaagagcgagagaaacaaatccaagaggaaactcgtgagaagaaagaggaggaaagccgtgaaagggaagaagaacaacaagagcagcatgaggaacaagatgaaaatccctacatttttgaggaagattaggattttgagaacagagtccaaact

SEQ ID NO: 6163 - DNA, 401 bp, Glycine max
  Clone ID: LIB3029-001-Q1-B1-E5
ctcactcaccccttcctttctaactcctcaaattgtgtgttctgagaatggaaatgcctccttctccatcggggcattccgcactctccatcccataaaagtcccagatccaagatggcttaccaccatcaaaaatcccttttggacaccctatactgctccgaagagcattggataggggaaggtgaatttgaccaagcagaggaggagtacggtaacagtaatagcaatagtagcagcaccttagtaaacaactcccctgagtcctcccctcatttgttgctcgaaagcgacatgttttgggacgaacaagagttggcatcgctgttggagaaagaacaacacaacccactaagcacttgctgtctccaaagcaaccctgccttggagggtgctcgcat

SEQ ID NO: 6164 - DNA, 370 bp, Glycine max
  Clone ID: LIB3029-001-Q1-B1-E7
gccaaaaacaccgtagcttcgaagcttggttttggcgacacagcaacaacaacacaacaagagaagagaactgaccatgctgctgctcctacagaatatggaaaaagtgttgctcagtccctgacagagaaactagctccagtttctggaaaagatgctggtgtaggaagtggtgtgaagtccaaagtttctggaactcaaactagtagtatgggtgtggaacaggacaagggggtttctgtgaaggactatttggtggacaaactgaagcgtggtgataaagacaggggtctctctgaaatgatatcacagactctgtacaaaaaagagctgtgctcactgggaatttttgaaaaaagtgtgtgagaag

SEQ ID NO: 6165 - DNA, 369 bp, Glycine max
  Clone ID: LIB3029-001-Q1-B1-E8
caactgcagcattatcatcatactgaattattagaccgttgtcattgatcaagaaggaaatccaaaaggaactcgaatcttttgtgcaatcgcccgggaattgagacagttaactttcactaaaatagtttcattagcacccgaggtattataagacgaaactgtgctatggatacattacttttttgtgaaatagattaattaatctaatttatctaacatatatcccttttgtagcaattattagaatttgtagtaattattagaagtattagaagcagcaattcgtacttacttcagattaatacttgataacctaaacaatatatctatatatagaatatagatagatatatgtataatagaacg

SEQ ID NO: 6166 - DNA, 376 bp, Glycine max
  Clone ID: LIB3029-001-Q1-B1-E9
aaactagtcagacacagactagtcaaacacagactactcagacacaaactagtcagacacaaactagtcagacacagactggtgagacaagcaattcagacaaggacacagcgacagaaaaatctaaagaatcatctacagcgagctaaactgtaagcaaccatggagtggtgtgatttactaatcaactgtcagtctcaggttgaattagcctagacctaacctagactaactgcggtgggctctctccagacaaaggaatgaagagccaatattgctgaatttaacatattcagatagctaaatagttgggccatgtgctcttgaccccttctttgtaactttgcattaggcaacagcctggcgtgtaaatgta

SEQ ID NO: 6167 - DNA, 355 bp, Glycine max
  Clone ID: LIB3029-001-Q1-B1-F10
cattaattttgaggcttttccccacaagctggtgcagtttggagagattcaggaaaaagttgtattgaaattttcacaagaggaatttcttacagcttggtcaactcaggtgcgtcctgcaacaactctgttggctgatgggtgtccatatctgtatgctatggtgcatgatagttcagtgtctacaataccaggtgattttgtcattggtgttaagttgacaaccataaacaatatgtgtgcatatgggctcaatcctggtatttcaggttctcgtcttttgggcaccattcctcagtctatttcacagcaaactgtttggaatcaaatggcaacagtgagaacaccattgaat

SEQ ID NO: 6168 - DNA, 185 bp, Glycine max
  Clone ID: LIB3029-001-Q1-B1-F11
gccctacaaaagctgacgttggtgcatcctgttccgttgaatgaaacattgcaataatggatacccgtttggggaaatccgcagctgcatcatttaatgcacattatgctgatgtaacaggtacgtcagggaacaaggttgccaattgtaagtttgaccctgggaattatcaacggactaattcg

SEQ ID NO: 6169 - DNA, 345 bp, Glycine max
  Clone ID: LIB3029-001-Q1-B1-F12
gctacttcaaagttgaaaacccagaatgtggttgtatctctctccctaaccttaaccttggtactggtgctactgaccagcaaggcaaactcagcggaaactgtttctttcagctggaacaagttcgtgccgaagcaaccaaacatgatcctccaaggagacgctattgtgacctcctcgggaaagttacaactcaataaggttgacgaaaacggcaccccaaaaccctcgtctcttggtcgcgccctctactccacccccatccacatttgggacaaagaaaccggtagcgttgccagcttcgccgcttccttcaacttcaccttctatgcccctgacacaaaa

SEQ ID NO: 6170 - DNA, 85 bp, Glycine max
  Clone ID: LIB3029-001-Q1-B1-F2
cagagtcataaaaaaccaaagttttccaatccccggagctcaaaaggtgggctaagaataaccgaattttggggtggaaagtatg

SEQ ID NO: 6171 - DNA, 429 bp, Glycine max
  Clone ID: LIB3029-001-Q1-B1-F4
aatacgtcacatatgacctctacatgcacctctgcattcgctccgaagtcggctcgcgcaaatttgatacagataactcactctcatagtgtttggctgcaaacagcttatcatgtgcgagtcaaagcacacaattggagcgttctaatgcatgtacaagatttgcagcgactcctgatctcaaatgtcaatattgatctgactgtagcgtaatgactgggttggtgcagaacgagcacgtaacatctttcagaagatgattgtttttgtggagtaatctggtccatgtataacgcagtgaatcacatgctacgagaattccaacgagactctcgttgacaagattgtgtgtactaacatcacctagtgtattacatatgttacacacgatgtcaacattcatgttaaatatgtgtctgcaactgggga

SEQ ID NO: 6172 - DNA, 401 bp, Glycine max
  Clone ID: LIB3029-001-Q1-B1-F5
ctcgagccgtgccaatattatgcaaaaagatgtactgttatcattgtatcaactatattgtgcccttctttttttatttgatttggcaaacacggctacttttctccaaataagatggatcatttgtattgccggctttgtgcacaattatctacttgtaagaagtccaatttcgggcaacaacgtttgtaatgcagaaataggtcattagcattgtaaatctccaggcgataaatggaatatcaaatggaagacgccgcatagcttctggtgtgacaatatcattgtgttgggcaaagcattttcgaagaaattacgtggatttaggaagattctgattattcttctacatctacaattattaaggtgaagataatttcggctctttacaagtaaagaat

SEQ ID NO: 6173 - DNA, 403 bp, Glycine max
  unsure (1)..(403): unsure at all n locations
  Clone ID: LIB3029-001-Q1-B1-F6
attttgataaaccgcgatcacaggttgccgcaccttaaaaccggaaacaaaagcaatcgttacttgatttcaagaatctctcaatttcttcctacttctttgtgtacgatttcttaagggaaagaaaatcactctctgtgctggccacagacttcgtgaatcattttcttttccactctcagtttatttgctgaacactctcctatttgatataggacttcgtgtcagatttaaactacttctgtctctttcttagttctctgtttaatttcaagttcaagctggtgaaatcttggattagtgctcccactctcctatctggtataggacttcgtgggtagacttttctatttctctcctttcnttcactctcttcttctcactgatccgcattgccgttcaa

SEQ ID NO: 6174 - DNA, 405 bp, Glycine max
  unsure (1)..(405): unsure at all n locations
  Clone ID: LIB3029-001-Q1-B1-F7
cggctcgagtaaaattcttccaccaagttatgggtttccttgtgttgcttcttttctccctcttaggtctctcttctagttccagcatatcaactcatcgttccatattggaccttgacctaaccaagtttaccacacagaaacaggtgtcttcactgttccaactatggaagagtgagcatggacgtgtctaccataaccacgaagaagaggcaaagagacttgagattttcaagaataacttgaactatatcagggacatgaatgcaaacagaaaatcaccccattctcatcgtttaggattgaacaagtttgctgacatcactcctcaagagttcagcanaaagtacttgcaagctcccaaggatgtgtcgcagcanatcaaaatggccaacaagaaaatga

SEQ ID NO: 6175 - DNA, 427 bp, Glycine max
  Clone ID: LIB3029-001-Q1-B1-F8
tccgaagtcggatcgagcaaattgagacagatgactcacacgtattgtgttaagaagtaaacaatttttcattggcgtccaagaaccaagaggagcgagctgaggcagctgcgagagttgctgccaaagaactcgaacaagtcaacagagaaagaagagaccgtgatttcggtgttgttgctgaacaacaacagcaacatcatcaggaagatcaacaaaaacgtggtgtaatcgggtccatgtttaaggcggtgcaagacacctacgagaacgccaaggaagctgtcgttggcaagaaagaagctactaataacgcgtacagtaatacagaggttattcacgatgttaacattcagcccgatgacgtgtcggcaacgggggaagtaagggacatatcagccacaaagactcatgatatctacgattc

SEQ ID NO: 6176 - DNA, 367 bp, Glycine max
  Clone ID: LIB3029-001-Q1-B1-F9
cacagaagcagaaggaggagaagcagaaagaggagacgaagcaatggcgccgaagaagccccgaaccacgtcgaggaaccctgatttggtcaggggaattggcaaatattcgaggtcgcagatgtaccacaagaggggcatctgggccatcaaggccaaaaacggcggtgttttgcccctccacgatcccaagcccaaacccgaggccccggcccagaagccgcccaagttctacccggccgatgacgtgaagaagcccctcgtcaacaagcacaagcccaagcccgcgaaactcagggctagcattactccagggactgttctgatcctgcttgctgggaggttcaagggaaaagaggttgttttc

SEQ ID NO: 6177 - DNA, 406 bp, Glycine max
  Clone ID: LIB3029-001-Q1-B1-G1
caactcatcgttccatattggaccttgacctaaccaagtttaccacacagaaacaggtgtcttcactgttccaactatggaagagtgagcatggacgtgtctaccataaccacgaagaagaggcaaagagacttgagattttcaagaataacttgaactatatcagggacatgaatgcaaacagaaaatcaccccattctcatcgtttaggattgaacaagtttgctgacatcactcctcaagagttcagcaaaaagtacttgcaagctcccaaggatgtgtcgcagcaaatcaaaatggccaacaagaaaatgaagaaggaacaatattcttgtgaccatccacctgcatcatgggattggaggaaaaaaggtgtcatcacccaagtaaagtaccaagggggctg

SEQ ID NO: 6178 - DNA, 345 bp, Glycine max
  Clone ID: LIB3029-001-Q1-B1-G10
atggatttgatggacaaaaagaaagggacaattctgaaatggattgggcacggagagatgatgatctctataacagaagggttagaaatgatgaacctagaaagagggatagggctaaggttcgagaaaatgagagaaacgacaaagaagatagccttcattctagaaaacagttggataatggtagctacagggttttgtatgaaaaagatgttgggtccagagattcaagacatagggaaagagacgagggcttgaggattaggtacgaagcagtggaggattaccgtggcaagaggaggaaggatgaggaatatcttaagagggagcatattgacaaagaag

SEQ ID NO: 6179 - DNA, 417 bp, Glycine max
  Clone ID: LIB3029-001-Q1-B1-G2
ccaaaatggcggctgctacgacgtcgtattcttccgcaatcgccgcctcgtccgataccctagccaaacctgcttccaccagaacattctccgccaccaacctcgcccttcaatcgtcgtcttccaagctcggtttcaaatccctaaagcttcaccgatgcgccgccgccgccggctccgccctcggcgcgcggatggtgtcggcgccggcggtcaaggcccccgcactgctcgatttcgacacgaaggttttcaagaaggagaagattaacctcgctggacacgatgagtacatcgtaaaaggaggcaaggatttgtttcacttgttgcccgatgctttcaagggtatcaagcagattggtgttatcggttggggatctcagggacctgctcaggctcagaatctacgggactctc

SEQ ID NO: 6180 - DNA, 410 bp, Glycine max
  Clone ID: LIB3029-001-Q1-B1-G3
gaaaagctttctagctggtcataatatcaccattactgatggtattgacaagactagtgcaactttgcaatttagaaagttagcagattgtgagtttctcaggagatactttaagcagatgtctaatgttttgtgggtagctcctgaggacaaggcgagtttatgggcacaacatcattatgtttcgtgtaataatctggaaatgcaagaagcttatcttgtcaatctcgtaaatgtgttaccagaattgtatttgcacagtccagaggaagctcgccaattgagaatgaaagctctctcgcgtaatgaatggctgcataaagctgatgtgcctaccatagcacagattgaagagttccattcgatgcagacgatgatgaatgctcctgattcagatgataatattgatc

SEQ ID NO: 6181 - DNA, 402 bp, Glycine max
  Clone ID: LIB3029-001-Q1-B1-G5
gtgagaacaccattgaattttgattctagcaagcagagcttttgtcaattttctattgaccttctcggtggaggaattttagtggacaaaactggagattggatcacacttatacaaaattctccaattagtaacttgttgagagttgctgcttggaagaaaggctgtttaatggttaagattgtgatgtctgggaatgcagcagtcaaaaggagtgattgggcctcattggtacaagtgtttttaacaaacagcaacagtacagagcattttgatgcatgtaagtggacaaaatcggaaccacattcctgggaattgatcttcccaatagaggtatgtggtcctaataatggttttgaaatgtggagttctgagtgggcaaatcaaacttcatggcatttg

SEQ ID NO: 6182 - DNA, 412 bp, Glycine max
  Clone ID: LIB3029-001-Q1-B1-G6
catccataaatctactggcaaagaagaaagccttgttatatgggctactcctcgcttacaggatagtaggcgagtaataagggagttggttgatccacaattgaaaggaaacttcccagaagaagaggtgcagataatggcatacttagcgaaggagtgtttgctgctggatcctgacactcgaccaaccatgagcgaggtcgttcagattcttttgagtatttccccgggaaaatctaggaggagaagaaacattccagccagcctctttcaggaaccagaggatgcagaaaagcaaaggcaatctacacccagtaaatttccaacacatagttcattgccaatatataatgatcacaatctttctgttgagaacaaaaacaaagcagaagatgcagtttcagctgagaat

SEQ ID NO: 6183 - DNA, 381 bp, Glycine max
  unsure (1)..(381): unsure at all n locations
  Clone ID: LIB3029-001-Q1-B1-G8
ggaaatttggctgatgacaccatcaattttgaggcttttccccacaagctggtgcagtttggagagattcaggaaaaagttgtattgaaattttcacaagaggaatttcttacagcttggtcaactcaggtgcgtcctgcaacaactctgttggctgatgggtgcccatatttgtatgctatggtgcatgatagttcagtgtctacaataccaggtgattttgtcattggtgttaagttgacaaccataaacaatatgtgtgcatatgggctcaatcctggtatttcaggttctcgtcttttgggcaccattcctcagtccatttcacagcanactgtttggaatcaaatggcaacagtgagaacaccattgaattttgat

SEQ ID NO: 6184 - DNA, 408 bp, Glycine max
  Clone ID: LIB3029-001-Q1-B1-H1
cggctcttctgtggggatcttggtaacgaggtgaatgatgatgttctctcaaaagcattttcacggtttccttcctttaacttggcacgagtaagtggattcctcatctaactcgagttctctttatgtttagttatgattgttgtgctagtgtgagcatttttttatttcctgttcagatttttgtttgaagggacggagttgttaatgtgtattttaaggtacgtgttgctttataatttacattcgattagacattttttatgattaaaattgatgtgttattttgtcatctcaggtgtccgctttgttgttgctccttattcacaaatcaagggcaattgaaattatatgccggtgacataatgcaccttaatttgaacaatcgattcatttaaattagtgttg

SEQ ID NO: 6185 - DNA, 359 bp, Glycine max
  Clone ID: LIB3029-001-Q1-B1-H10
aagaggggtcgcgacgcatatattacaatatgaagtcccagcatattgaaaatgatggggtttctggggaagaatctgaagtggcagatgtttcaattgataaggatgttgataagattgggagtgagggtacttctggagctggccaaactccagtggggaatgtactaaagaaattctccaagactcgagcttcaatccctgagtggcagtattccacaagaaaaatagatcatgatgaaaagttccttgttagtttgatgagagaaaaaggggttacatatagctctgcccctcaatctgtactaaggtcaatgaggagtactttgatcactgtgataacactgtggataccttta

SEQ ID NO: 6186 - DNA, 368 bp, Glycine max
  Clone ID: LIB3029-001-Q1-B1-H11
cccgttcaaaatgatggttccacagggctccattgggccaacctccaaaaaagaacccctctaatgcaagtaccagtcctggtggacctcaatggaaatcacttgtgggttaactgtgagcagcagtactcatccaaaacgtaccaagcacccttctgccactccacccaatgctctagagccaacacccaccaatgcctcagttgccccgcggcatcaaggccagggtgccacaaaaacacgtgtggcctcatgtccactaatcccatcacccaacaaaccggtttaggtgaactaggagaagacgttcttgcaatccacgccacacaagggtcgacccaacaacttggcccattggtcacagtccc

SEQ ID NO: 6187 - DNA, 329 bp, Glycine max
  Clone ID: LIB3029-001-Q1-B1-H12
atattataccatatttatatatcttcacatacttaataatatataataatgggtgttgtacggacgtgggagagcaggagggcggagctggaggcctttcgccggagcctggtggcagccgccggcatccagcggcggaaagacgatgagggggggagaacccacaagtttgtttcctcctatgaacatgatgatggaaagggtaccttaatctgtgtcacttgtggagtttcctactttggtcttgccttggtcaaccatctcttgctcttaggttactctcttcgagtcaccgttgacaacccagaggacatagagaagctgaggga

SEQ ID NO: 6188 - DNA, 423 bp, Glycine max
  Clone ID: LIB3029-001-Q1-B1-H2
ttccaatcggagctcagaaaaaaaagaaacctaatcgccgatcgcgtcgaaagtccctaagcttacatcctgcttctagatagttggtaatcttatctgagggtagtagctagtaccatgggagaagtggcagtaatgcactctgagcctctgcagtttgagtgcaatgacattagtgtgaatatgactgagaaggaagtgtatcctccagaatcaaatgtggagcgcttacctggagaagaatcgagtcaatcaacagaccacaaaaatatcaatgacttgcaagagagaggatatatggagtatggatgtcagcattaccggagaagatgccgtatcagggccccatgttgcaatgagatttttgattgccgccattgtcataatgaggcaaaaaatgatatcaacattgatcagaagcat

SEQ ID NO: 6189 - DNA, 413 bp, Glycine max
  Clone ID: LIB3029-001-Q1-B1-H3
aaaccctactcattctccatacctcaacgaagaggttaaagagacggcaacactttgccgtccgccttgaccgaacaaaacttcgtccttggcctcgattttgccctaaagtactctcaagtcacaacagacaccgtcgtcgtcgtcgtcgtcatcaatggcaccgaaacagaccaaggctgagaagaagatcgcttacgatgcgaagctgtgcgacctaatggaggagtacggccagatcctcgttgtgaactccgataacgtgggatcgaaccagctccagaacattcgcaagggtctccgtggcgactccgtcgtcctcatggggaagaacaccatgatgaagcgctcagtcaggatgcacgctgagaaaaccggaaacaacgcctatctcaaccttatcccgctccttg

SEQ ID NO: 6190 - DNA, 406 bp, Glycine max
  Clone ID: LIB3029-001-Q1-B1-H5
cttaattattaacacttccttagttcaatatggggaagcccttcactctctctctttcttccctttgcttgctactcttgtcgagtgcatgctttgctattagctccagcaagctcaacgagtgccaactcaacaacctcaacgcgttggaacccgaccaccgcgttgagtccgaaggtggtttgattcaaacatggaactctcaacaccctgagctgaaatgcgccggtgtcactgtttccaaactcaccctcaaccgcaatggcctccacttgccatcttactcaccttatccccggatgatcatcatcgcccaagggaaaggagcacttggagttgcaattccaggatgtcctgagacgtttgaggagccacaagaacaatcaaacagaagaggctcaaggtc

SEQ ID NO: 6191 - DNA, 409 bp, Glycine max
  Clone ID: LIB3029-001-Q1-B1-H6
tttaccttgctgggaacccagatatagagtacccagagaccatgcaacaacaacaacagcagaaaagtcatggtggacgcaagcaggggcaacaccagcaggaggaagaggaagaaggtggcagcgtgctcagtggcttcagcaaacacttcttggcacaatccttcaacaccaacgaggacatagctgagaaacttcagtctccagacgacgaaaggaagcagatcgtgacagtggaaggaggtctcagcgttatcagccccaagtggcaagaacaacaagatgaagatgaagatgaagacgaagatgatgaagatgaacaaattccctctcaccctcctcgccgaccaagccatggaaagcgtgaacaagacgaggacgaggacgaagatgaagataaacctcgtcc

SEQ ID NO: 6192 - DNA, 399 bp, Glycine max
  Clone ID: LIB3029-001-Q1-B1-H7
tttaccttgtaggaaatccatatttcaagttgggaaagaccatgaatcaccctcattcgtacctatgtcatggtggacgtatgcagtggcagcattagtatgaggactaggaagctcgtggcatcgtactcaatggcctcacacattcatttcttggcaaactccgtcttgagtacggaggtgatatctgtcaaacatcagtctctaaacaactagaggaaacatatcctgatagtagtatgacgtctcacagtttccagcgccatgtggtagaattaacatcattatcatcattatgaagaggaggtaatcatcggatcaacggattcgatcacatcctcttcgccgtccaggccatcctcagcattttgaggaccaagacgatgactaagatgaaga

SEQ ID NO: 6193 - DNA, 281 bp, Glycine max
  Clone ID: LIB3029-001-Q1-B1-H8
gattacaaattattgcaagggttgctcttagcttcttcatttcaagcttttgtttacactttgcagtgctatggcaaagataagagtatcatggatggaaaaagggggggaaaaaatgttgctttgtactccaaattatgaataatagaactttatattatttatcaaaaaaaaaaaaaaaaaaaaaaaaaaaaaaaaaaaaaaaaaaaaaaaaaacaaaaaaaataaaaaaaaaaaaaaaaggggcggcccccaataattaacctcttcaacccggaaat

SEQ ID NO: 6194 - DNA, 377 bp, Glycine max
  Clone ID: LIB3029-001-Q1-B1-H9
ctcgagccgaatcggctcgagagcatttggaaatttggctgatgataccatcaattttgaggcttttccccacaagctggtgcagtttggagagattcaggaaaaagttgtattgaaattttcacaagaggaatttcttacagcttggtcaactcaggtgcgtcctgcaacaactctgttggctgatgggtgtccatatttgtatgcaatggtgcatgatagttcagtgtctacaataccaggtgattttgtcattggtgtcaagttgacaaccataaacaatatgtgtgcatatgggctcaatcctggtatttcaggttctcgtcttttgggcaccattcctcagtccatttcacagcaaactgtttggaatcaaa

SEQ ID NO: 6195 - DNA, 91 bp, Glycine max
  Clone ID: LIB3029-002-Q1-B1-A1
tgttgatgagtgtccttttgcatttgtgaactagtatgtaatattttattcacttaaataaagcgcattactatgtgcaatgagtgtgttt

SEQ ID NO: 6196 - DNA, 377 bp, Glycine max
  Clone ID: LIB3029-002-Q1-B1-A10
gggattgggaaggcgagggattgcgctgcgtctcttcctcttctctttcgattcatccctcattcataatcttccaatccaacaacctcagcctcacactcacacatacacacatctgaacgcgtatcgtccctcccatggcttcaaagcgcatcctcaaggagctcaaggacttgcagaaagacccaccaacttcttgcagcgctggtccagtagctgaggacatgttccattggcaagcaacgattatgggtcctgctgatagtccttatgctggaggtgtattcctagtcactattcactttcctccggattatcctttcaaacctcccaaggttgcctttaggactaaggtgtttcatccgaacatcaacagc

SEQ ID NO: 6197 - DNA, 387 bp, Glycine max
  Clone ID: LIB3029-002-Q1-B1-A11
ggaagaagaagaaaatggaggaggaacaaaacggcggtcgtttcgacctcataatcctgggcgcctcaggcttcacaggcaaatacgtcctccgcgaagccctcaaattcctcaacaccccatcctcccccctcaaatccatagccatagcgggccgaagcccacaaaaactaacccaggcccttcagtgggcctccaggcccaaccctcccccctccctccccatcctcaccgcggacaccgccgacccctcctccctccgttccctctgcgcccgcacgggcctcctcctcaactgcgtgggccccttccgcctccacggcgagcccgtcgtggccgcctgcgccgcagcgggctgcgactacctcgacatctccggcgagcccg

SEQ ID NO: 6198 - DNA, 369 bp, Glycine max
  Clone ID: LIB3029-002-Q1-B1-A12
gttcagcaaaaagtacttgcaagctcccaaggatgtgtcgcagcaaatcaaaatggccaacaagaaaatgaagaaggaacaatattcttgtgaccatccacctgcatcatgggattggaggaaaaaaggtgtcatcacccaagtaaagtaccaagggggctgtggaagcggttgggcgttttctgccacgggagccatagaagcagcacatgcaatagcaacaggagaccttgttagcctttctgaacaagaactcgtagactgtgtggaagaaagcgaaggttgttacaatggatggcactatcaatcgttcgaatgggttttagaacatggtgggattgccactgatgatgattatccttacagagc

SEQ ID NO: 6199 - DNA, 199 bp, Glycine max
  Clone ID: LIB3029-002-Q1-B1-A2
ttcctaacattattgtttcctaccaagttctctgtctggggagttcttagcaccaccaccagcttctgcagtagctttaagctacgaaagattttccttgaccatggggcaaaagcatttagtgacggtgttctgtttatgggctttaacatgttcccttcttccatctttctcctttggaattctgaaaattggtttg

SEQ ID NO: 6200 - DNA, 387 bp, Glycine max
  Clone ID: LIB3029-002-Q1-B1-A3
gggaattccaattcaacattttcacgaaataaggacgcagacatggttcatatctgaattggaattaattgttttcatattacgcctatcctgaagccaaatgaaatgagatcgggattcctcggggaattccaattccacattttcaagaaataaggaggcaaaaatgttcaaatatgaattggaattatttgttttcttagtatgcctatcctgaagccaaatgaaatgagatcggaattcctcggggaattccaattccacattttcaagaaataacgaggcaaaaatgttcatatatgaattggaattaattgttttcgtaataagcctatcctgaagccaaaggaaatgagatcggaattcctcgggggtaccgagctcgaa

SEQ ID NO: 6201 - DNA, 420 bp, Glycine max
  Clone ID: LIB3029-002-Q1-B1-A5
gatatatgatatagaaagagagagaagaagaaaagaagaacaaagatgcaatcctcaaaggagaagatgaaaaacatggcaagtgctgccaaggaacaagtcgacatctataaagccaaaatagacgagaaggcagagaaagcaacggcaagaacagaagaggagagggtgatagcccatgagcacgcaaaggcaaaggaagctggagcaaagatggagctgcatgaagctaaagcaaggcatgcagcagagaagctaagcgccaaccaatcacattatggtctccaccatggccacaacaaccctcccttagtaggaacaactcagactcactaccagcaagggcaccagcaccagccacttggggcagttcctatgcctggaaacacttatccatcttaaccactacgaggaaaccct

SEQ ID NO: 6202 - DNA, 394 bp, Glycine max
  Clone ID: LIB3029-002-Q1-B1-A7
cacaactactacaagtacttccttacaatcaaaaccaacaacaactatggcaagttatcaaaagcactacgatgatcagggtcgcaaggttgacgagtatggcaacgttgagaagcaaaccgacgaatacggcaaccctgttcatgctgctagtgtcacctatgtagccaccagaactgctgctggtggttacagtgatgacattaataagcaacatgataccaccaatgcctacggcgtagacactggtagacagcattctagtggtggctacgatggtgacactaataaacatcatggaactactggtggctataatgatgacaccaatagacatcatggaactaccggtgtctatggtatagacaccgataggcaacaacatgggactact

SEQ ID NO: 6203 - DNA, 416 bp, Glycine max
  Clone ID: LIB3029-002-Q1-B1-A8
ccgcaaccatgagtggtgttacatgctgtcttcgtttccctggtcaactcaactctgatctgaggaaactggccgtgaatctcatccctttccctcgtctgcacttcttcatggttggatttgcgcctctcacctctcgtggctctcagcagtaccgtgcattgacagttccagagctgacacagcaaatgtgggatgccaagaatatgatgtgttgccgctgattccaggcacgggcgttacctcacggcatcagccatgttccgtggcaagatgagcacgaaggaggtggatgagcagatgataaacgtgcagaacaaaaactcttcgtactttgtcgagtggattcgcaacaatgtcaagtcgagtgtgtgtgacattgctcctaaagggctctccatggcgtccacattcat

SEQ ID NO: 6204 - DNA, 387 bp, Glycine max
  Clone ID: LIB3029-002-Q1-B1-A9
tgaatttctttgctattggtattaatgccgagaacaaccagaggaacttcctcgcaggttcgcaagacaatgtgataagccagatacctagtcaagtgcaggagcttgcattccctgggtctgcacaagctgttgagaagctattaaagaaccaaagagaatcctactttgtggatgctcagcctaagaagaaagaggaggggaataagggaagaaagggtcctttgtcttcaattttgagggctttttactgaataagtatgtactaaaatgtatgctgtaatagctcatagtgagcgaggaaagtatcgggctatgtaactatgactagagcttcaactatgaataaataaatcgacagcatatgatgcttttgttttgtgtcaa

SEQ ID NO: 6205 - DNA, 381 bp, Glycine max
  Clone ID: LIB3029-002-Q1-B1-B11
gaacaacaagatgaagatgaagatgaagacgaagatgatgaagatgaacaaattccctctcaccctcctcgccgaccaagccatggaaagcgtgaacaagacgaggacgaggacgaagatgaagataaacctcgtcctagtcgaccaagccaaggaaagcgtgaacaagaccaggaccaggacgaggacgaagatgaagatgaagatcaacctcgcaagagccgcgaatggagatcgaaaaagacacaacccagaagacctagacaagaagaaccacgtgaaagaggatgcgagacaagaaacggggttgaggaaaatatctgcaccttgaagcttcacgagaacattgctccgccttcacgcgctgacttctacaaccct

SEQ ID NO: 6206 - DNA, 405 bp, Glycine max
  unsure (1)..(405): unsure at all n locations
  Clone ID: LIB3029-002-Q1-B1-B12
tgccaaggcaccgaggcagtggaaggaagacaatggcggtttctctatcggcgctcacaacctccctctcttcactttccttctcttcccacatttcccagagaccaaacactctctccttcgccagaaccgaatccctctccgtctccgtctcgcgcttccccaaaaccccctcctccctcgtcgtttccgccaccgcactcgcggaaccggaaaccgaagacctcaagaactacgtcaagtcgaggctcccaggtggattcgccgcgcaaactatcataggcaccggtcgccgtaagagcgccatcgctcgcgtcgttcttcaggaaggaaacgggcaaatcatcatcaattaccgtgacgctaaggaatatcttcaaggaaatcnattgtggcttcaataca

SEQ ID NO: 6207 - DNA, 416 bp, Glycine max
  unsure (1)..(416): unsure at all n locations
  Clone ID: LIB3029-002-Q1-B1-B2
aatgcattgagaaaaagagggctgttgccagatttgagaaaacagaaacaggtacatattcatcatgctgcttcggttgatatgggagatgtcaaggttggtgagagtcagagatcaaatcgtgtttcatctgataagctagccaaaggaaacctgttaaatctggaacaatctcgcagcaaaaatatttctctcgaaaggcgctggagtcttgaagtatctattgagaaactgattgggcatgattcaaaattaggatcaacagattctgtagcagaaaatggagataaagtcncaattttggaacgcgagtatatgcaaggtgtgttaataagtgagttagttttaaataatagtttttcatcaatgtctagaagggcaaaacagcttcaaaaaaaaattgccanagaaattaa

SEQ ID NO: 6208 - DNA, 408 bp, Glycine max
  Clone ID: LIB3029-002-Q1-B1-B4
cacaatctaatgctgagttattggagtggactaagaaagataagcgccgcttcctgcatgttgtgtatcgtgttggtgatcatgatcgcaccattaagttttatactgaatgttttgggatgaagcttttgaggaaaagagatattccagaagagaaatatgccaatgcttttcttggatttggccctgaacaatcccattttgttgtggaattaacatataattatggggtgacctcatatgatagtgggaacgggtttggacattttgccaacgcaactccaagatgtgtacaaattggttgaagacatccgggctaagggtggaaatatcaccagggaagccgggtccagttaagggtgggaagtctgttattgccttcgtgaaggatcctgatggttatgcttt

SEQ ID NO: 6209 - DNA, 343 bp, Glycine max
  Clone ID: LIB3029-002-Q1-B1-B6
gcggaatggagaagaagaggatttgagaggagacgccacttcaaggagaagatgagtcaagaagaagctcaccaccataggaagccatggataagagcttgaaggtagaagaagatgagtggaaggagaaggagagaaggagcacaaaattttatgcctcaaaagaggtctgaacattgaagtataattttcaaatgatcaaagttgaaaaaatgcacacccatgacctttatttatagcctaagtgtcacacaaaattggagggaaatttgaacttctattcaaatttcacttgaacttgtggagccaaaatttcacgaattatgactagtgaattttagct

SEQ ID NO: 6210 - DNA, 387 bp, Glycine max
  Clone ID: LIB3029-002-Q1-B1-B7
cttccatagccccccaaaaatgaagagcaccatcttctttgctctctttctcttttgtgccttcaccacctcatacctaccttcagccatcgctgatttcgtgctcgataatgaaggtaaccctcttgaaaatggtggcacatattatatcttgtcagacataacagcatttggtggaataagagcagccccaacgggaaatgaaagatgccctctcactgtggtgcaatctcgcaatgagctcgacaaagggattggaacaatcatctcgtccccatatcgaatccgttttatcgccgaaggccatcctttgagccttaagttcgattcatttgcagttataatgctgtgtgttggaattcctaccgagtggtctgttgtggagga

SEQ ID NO: 6211 - DNA, 383 bp, Glycine max
  Clone ID: LIB3029-002-Q1-B1-B9
ctcttcttcgtctcaaatctcttcgttccttcgattcgttccatttcttccaaaatggccaaagacccagttcgcgttctcgtcactggagctgcagggcaaattgggtatgctcttgtccctatgattgctaggggagtgatgttgggtcctgaccagcccgtgatcctccacatgcttgacattcctccggcagcagagtcattgaatggggttaaaatggaattggtggatgctgcattccctcttcttaaaggtgttgttgccacaactgatgtggttgaggcatgcactggggtcaatattgccgtgatggttggtggattcccaagaaaagaaagtatggagaagaaggatgtgatgactaagaacgtctccattta

SEQ ID NO: 6212 - DNA, 331 bp, Glycine max
  Clone ID: LIB3029-002-Q1-B1-C1
cacaatatgatgttaagggattcccaacaattaatattctgagaaatgggggaaagaatgttcatgaatacaaaggtccccgtgaagcagatggcatcgttgactatttgaagaaacaaagtggtcctgcttcaactgaaattaaatctgctgatgaagctactgcttttattggtgaaaataaagttgctattgttggagttttcccgaaattttctggagaggagtttgacaacttttctgccttagcagagaagttgcgttctgattatgactttggtcacactctgaatgccaaactccttccaagaggagagtcatcagtttctgg

SEQ ID NO: 6213 - DNA, 405 bp, Glycine max
  Clone ID: LIB3029-002-Q1-B1-C10
cacagctccagccatgaggaagccacagcaagaagaagatgatgatgatgaggaagagcagccacagtgcgtggagacagacaaaggttgccaacgccaaagcaaaaggagcagaaatggcattgatgagaccatttgcacaatgagacttcgccaaaacattggtcagaattcatcacctgacatctacaaccctcaagctggtagcatcacaaccgccaccagccttgacttcccagccctctggcttctcaaactcagtgcccagtatggatcactccgcaagaatgctatgttcgtgccacactacaccctgaacgcgaacagcataatatacgcattgaatgggcgggcattggtacaagtggtgaattgcaatggtgagagagtgtttgatggagagct

SEQ ID NO: 6214 - DNA, 400 bp, Glycine max
  Clone ID: LIB3029-002-Q1-B1-C11
ttcgtttgttgttcaatctaacaaacttctctatatcgtttactttttcaacacaccttacacacttctttatttgagcctttcatataaatatcatggcttcgagggtggtttcggttttggtgatagcgatgatgttgtttgccatgaactgtaactgcactagtgttggccacatgccttcaaccaaagaggaaggtcacgattttcaggaggctaaagccaagacaacacaaactgcgaacaaggccatggaaactggtaaagatgggaaagaagccgcagagtcatggacagaatgggctaaagagaaactcactgaaggtcttggcttcaaacatgatcaagaatccaccactaagaaagtctctgactatgccggtgatgctgctcagaaatc

SEQ ID NO: 6215 - DNA, 422 bp, Glycine max
  Clone ID: LIB3029-002-Q1-B1-C2
agaaaaaagagaagaagatgggtttgaagaacaacatggtggtgctaaaggtgtgtttggtgctacttttccttgtggggggtactactagtgccaacttgaggctgagtaagcttggcctgctcatgaaaagtgatcatcatcaacactcaaatgatgatgagtcttcaaaaccatgctgtgatcaatgcgcatgcacaaagtcaaaccctcctcaatgccgctgttcagatatgatgctgaattcgtgccattcagcttgcaaatcttgtatttgcgcattatcgtatcctgcacagtgtttttgtgttgacataaccgatttctgctatgaaccttgcaaacccagtgaggatgacaatgaacactactaatgaacaagtgttatgcatgtaagctctctctccaacggacaaagcccc

SEQ ID NO: 6216 - DNA, 298 bp, Glycine max
  Clone ID: LIB3029-002-Q1-B1-C3
agaaataagagaagaagatgggtttgaagaacaacatggtggtgctaaaggtgtgtttggtgcaacatttccttgtggggggtactacaaatgccaacttgaggcagattaagcttggcctgcgcactacaactgatcatcatcaatacgcaaatgatgatgattcttcaaaagcatgctgtgatcaatgcacatgcacaatgtccaaccctcctcaatgccactgttcagacatcatgctgaactcatgccattcatcttgcaaatcttgtaattgcgcattaacgtatcctgcaca

SEQ ID NO: 6217 - DNA, 414 bp, Glycine max
  Clone ID: LIB3029-002-Q1-B1-C4
tgaaaatcgttgctttgcagagtataagatcttgctcccacgtctctgattacttgcaagcttcatctgcactcatggatcccaaccagcctgtgggtgaaaactacgccaatcccaggacttgcttctttcatgtcctcttcaaggctgcagccttggcattttacattctctcggccctctttattgataactttgtcatcattttcgtggtgactgtccttcttgccgcccttgatttttgggtagtcaagaatgtcagtgggcgaattttagttggattgaggtggtggaatgaaattaaagattcgggtgagaatgtttgggaaattggatgtcctgaacaagaatcaatggctccgatgaacaagaaagactcatggcttttctggtggaccctgtatcttacagcga

SEQ ID NO: 6218 - DNA, 387 bp, Glycine max
  Clone ID: LIB3029-002-Q1-B1-C5
ctcgagccgattcggctcgagcacaattattccacaaaatttccctcaattatttctcaccatcatcaccccctttccttctctcaagaaaaaaaaaagttaatttcttgaacccaatggcttcagagacagaggtgccggatattatttcctctgttttcgaaaggtttcaacaaaacagagacatgtctctgtttctgcccttcctcttcggcttctctgacgccaccccaggacgaaatagcgacgacccagatcacgaaactgctcccacagaagccccacaacgtcaaagaataatcttggtgaaccccttgactcagggcatggtggtgatcgacggtggttcgagcctcgaggctctgtttcgcgaattcaccaacggaa

SEQ ID NO: 6219 - DNA, 414 bp, Glycine max
  Clone ID: LIB3029-002-Q1-B1-C6
ttgtatttcgtttgttgttcaatctaacaaacttctctatatcgtttactttttcaacacaccttacacacttctttatttgagcctttcatataaatatcatggcttcgagggtggtttcggttttggtgatagcgatgatgttgtttgccatgaactgtaactgcactagtgttggccacatgccttcaaccaaagaggaaggtcacgattttcaggaggctaaagccaagacaacacaaactgcgaacaaggccatggaaactggtaaagatgggaaagaagccgcagagtcatggacagaatgggctaaagagaaactcactgaaggtcttggcttcaaacatgatcaagaatcaccactaagaaagtccctgactatgccggtgatgctgctcagaaatcaaaggacta

SEQ ID NO: 6220 - DNA, 390 bp, Glycine max
  Clone ID: LIB3029-002-Q1-B1-C7
taacaattccttcacttgcagcactgttgcatcatcatcttcattgcaaaaccctaaacttcaccttcaaccatgaccacacaagtaccaccacacagtgtccaagtccacacaacaacacaccgctacgaagctggcgtcgtcccccccggagcccgtttcgaaccgccgcgttatgaagccggcgtcaaagcgccctccatttaccattccgagagaggtccaacgacttcccaggtcctcgccgtcctcgccggcctcccggtcggtggcatcctgctcctcctggcgggattgaccctggcaggaaccctcaccggactggcagttgccacgccgctcttcgtcctcttcagcccggtgctggttccagccacggtcgccatcggc

SEQ ID NO: 6221 - DNA, 401 bp, Glycine max
  Clone ID: LIB3029-002-Q1-B1-C8
ctcaatctctcttcttacccatttcctccccccctctttctcttttcttgttctgtttttattttcactgttctctgataacaacgttgttagttgtcaccatggttgttctgtctcagccagcattaaaccagtttttccttctgaaaacatgcaagcccacgcccttgttcgcggggattcctgtggtcgacctcacggaccccgatgccaagacccacatagtcaatgcctgcagggacttcggcttcttcaagctcgtgaaccacggtgttccgttacagttcatggccaatttggaaaacgaaaccctcgggttcttcaaaaaacctcaatccgagaaagacagggctggtccccctgacccttttggctacggcagcacgaggattggccctaac

SEQ ID NO: 6222 - DNA, 405 bp, Glycine max
  unsure (1)..(405): unsure at all n locations
  Clone ID: LIB3029-002-Q1-B1-C9
ccaatatattccattctctctgtgtatttccctacctctcccttcaagatgcagatcttcgtcaagaccctcaccggcaagaccatcacccttgaggtggaaagctctgacaccatcgacaacgtcaaggccaagatccaggacaaggaaggaatccccccggaccagcaacgtctcattttcgccggaaagcaacttgaggacggccgtacccttgctgactacaacattcagaaggagagtactcttcacctcgtcctccgtctccgtggtggcatgcagatcttcgttaagacactcaccggcaagaccataaccctagaggttgaaagctccgacaccatcgataacgtcaaggccaagatccaggacaaggacggtatncccccgggaccagcaacgtct

SEQ ID NO: 6223 - DNA, 399 bp, Glycine max
  Clone ID: LIB3029-002-Q1-B1-D10
cacttcccgaaatgttaaaagaatgcctctttctatagggggaggagctggtgcaaagaatgctattctcatgaatatgccaaatgctgttctttcaatgtggagatattttgttggagatctcgtctttgaagtttctaagatgacttctccctacattaaatgtacagtctctttcttcatagcatttggaaatttggctgatgacaccatcaattttgaggcttttccccacaagctggtgcagtttggagagattcaggaaaaagttgtattgaaattttcacaagaggaatttcttacagcttggtcaactcaggtgcgtcctgcaacaaccctgttggctgatgggtgtccatatttgtatgccatggtgcatgacagttcagtgtctacaat

SEQ ID NO: 6224 - DNA, 167 bp, Glycine max
  Clone ID: LIB3029-002-Q1-B1-D11
tgggaagcaaggaattatggtgacgtctcagagtcagaaccctatagagcaaatccaagcgcgcttcaaggagttggagactggcgtccgcctctggctctccaaacagtctctccccgtctgaggccgcctgtcagtctcactaatggcgtctcccaccgtgaccg

SEQ ID NO: 6225 - DNA, 358 bp, Glycine max
  Clone ID: LIB3029-002-Q1-B1-D12
gtaggtgcacacgtcaacatctgaattgacatctgcagtcatgtctgtgtataagctcactaatgtcatatacacgcaaaggctggagactctgtgggattcaatgttaaggttgtgtcagtgaaggatttggtgcgtggtcagtttgcactcgcagtcacaggatgacactagccatgacgttacaaatttcagagctcaagtgatcatcatgaaacagctttgtcaggatgcagatagctatgcgcatgtcatccactgactcacatcgcacattaccgtcatatatgccgaactgatgtccaccattcagaggagatttggcactaagcttgagaaagaaccgaaatttttgaca

SEQ ID NO: 6226 - DNA, 282 bp, Glycine max
  Clone ID: LIB3029-002-Q1-B1-D3
caacgcccatgtcttacccgaaccagacctttttatgcacactcccggtggtaaccgcattccagcgcacgcaaccattctggcttcggcatccccagttttagaaaacgtcattgcgtccaaccgagtcgtcaaaatccacggcgttcccgacggcgccgtcacggccttcgtagcgttcctctactcctccaggtgcacggaggaggacatggacaagtacggaatccaccttctaccattgtcgcacgtgtattcggtgccgcagctgaagcacaggtg

SEQ ID NO: 6227 - DNA, 281 bp, Glycine max
  Clone ID: LIB3029-002-Q1-B1-D4
gctctatactacacagtacacacactagaagaataatggcttccatcctccactactttttagccctctctctttcttgctcttttcttttcttcttatccgactcagtcacccctacaaaaccaataaaccttgttgttctacccgttcaaaatgatggttccacagggctccattgggccaacctccaaaaaagaacccctctaatgcaagtaccagtcctggtggacctcaatggaaatcacttgtgggttaactgtgagcagcagtactcatccaaa

SEQ ID NO: 6228 - DNA, 380 bp, Glycine max
  Clone ID: LIB3029-002-Q1-B1-D5
tagggttttaggaaaagacactgtctcgcgagtgaacacaggttacagcaatggctttctttggtagaattgggaatttattaagacagacagcaagcaggcaggttagttcagaattgcgatcatccccttcgttttttcaggctatacgcagtgtttcatattctactgacgagcaaagtttgagggaagctttttcaaaatatggtgaagttgttgatgctaggataattatggatcgtgaaactggtagatccagaggatttggctttattacatacacttcggttgaggaggcatcaagtgccattcaggccttggatggtcaggacctacatggtcgcccgattaaggttaattatgctaatgaaagacctcgt

SEQ ID NO: 6229 - DNA, 418 bp, Glycine max
  Clone ID: LIB3029-002-Q1-B1-D6
ttcatcctttcccaagccagccaagcgaggcatgctctcaatttttgaaattacttgcatagatagagcatcatggccatgatgaaacgtgctgcttcctcttcggttcgctcgctactttcctcatcctccaccttcaccagaaaccttcatgcctcaggtgaaaagaagaaaattgtgggggtgttctacaaagggaatgagtatgctaaattgaaccccaatttcgtggggtgtgttgaaggagcattgggtatacgtgagtggctggaatcacagggtcatcagtacattgtcactgatgacaaagaaggaccagattctgaacttgagaaacacattccagatgcccatgtcatcatatctactccatttcaccccgcctatgtcaccgcggaaagaataaagaaagcgcaaa

SEQ ID NO: 6230 - DNA, 404 bp, Glycine max
  Clone ID: LIB3029-002-Q1-B1-D7
gcaccctcaaccgcaacggcctccacttgccatcttactcaccttatccccaaatgatcattgtcgttcaagggaagggagcaattggatttgcatttccgggatgtcctgagacgtttgagaagccacaacagcaatcaagcagaagaggctcaaggtcgcagcagcaactacaagacagtcaccagaagattcgtcacttcaatgaaggagacgtactagtgattcctcctggtgttccttactggacctataacactggcgatgaaccagttgttgccatcagtcttcttgacacctccaacttcaacaatcagcttgatcaaaaccccagagtattttaccttgctgggaaaccagatatagagcacccagagaccatgcaacaacagcagcagcagaag

SEQ ID NO: 6231 - DNA, 361 bp, Glycine max
  Clone ID: LIB3029-002-Q1-B1-D8
aaacagtagtggagagagggagaaaaaccaaagaagattgaccatggcttcttcattgaggatctcaaggctcctctctcgttcttttctttctgcttccactactactcctttgttttctagaggcggaagtggtgctcttggtgcagggctcagtaaattcagcactgctgctgccattgaagaaccaattaaaccaccacttaaagttgaacacacccagctcttaattgatggaaaatttgttgatgctgctactggcaaaacttttccaacgttggaccccaggacaggagatgtgatttctcatgttgctgagggtgaccatgaagatgttgatcgagcagttgcagctgctcgc

SEQ ID NO: 6232 - DNA, 344 bp, Glycine max
  Clone ID: LIB3029-002-Q1-B1-E1
ccccagggcacttcccgaaatgttaagagaatgcctctttctatagggggaggagctggtgcaaagaatgctattctcatgaatatgccaaatgctgttctttcaatgtggagatattttgttggagatctcgtctttgaagtttctaagatgacttctccctacattaaatgtacagtctctttcttcatagcatttggaaatttggctgatgacaccatcaattttgaggcttttccccacaagctggtacagtttggagagattcaggaaaaagttgtattgaaattttcacaagaggaatttcttacagcttggtcaacccaagtgcgtcctgcaacaac

SEQ ID NO: 6233 - DNA, 398 bp, Glycine max
  Clone ID: LIB3029-002-Q1-B1-E10
taaaattcttccaccaagttatgggtttccttgtgttgcttcttttctccctcttaggtctctcttctagttccagcatatcaactcatcgttccatattggaccttgacctaaccaagtttaccacacagaaacaggtgtcttcactgttccaactatggaagagtgagcatggacgtgtctaccataaccacgaagaagaggcaaagagacttgagattttcaagaataacttgaactatatcagggacatgaatgcaaacagaaaatcaccccattctcatcgtttaggattgaacaagtttgctgacatcactcctcaagagttcagcaaaaagtacttgcaagctcccaaggatgtgtcgcagcaaatcaaaatggccaacaagaaaatgaag

SEQ ID NO: 6234 - DNA, 403 bp, Glycine max
  Clone ID: LIB3029-002-Q1-B1-E12
agattgtaatggtgcatgttcacctttcgagatgccaccgtgccgctcacgtgattgtcgttgtgtccctataggactagttgctggtttctgcatacatccaactggactttcatctgttgcgaagatgatcgacgaacatcccaacttatgtcaatctgatgatgaatgcatgaagaaaggaagtggcaatttttgcgctcgttaccctaataattatatcgattatggatggtgttttgattctgattctgaagcactgaaaggcttcttggccatgcctagggcaaccaccaagtaatatggtgggtatgccaaagtgggcatgcttgatgcatcttctactacttaaaaataaaagcttatgatgcatctactgctttaaacaaaagagtgctccact

SEQ ID NO: 6235 - DNA, 377 bp, Glycine max
  Clone ID: LIB3029-002-Q1-B1-E3
gcatctaaagtcactgaagcggatcaccattggatttctgatcgtgaatttggccatgggatctctaatggggcctcagtgaataccgcatgcaatcaatttggtattgggagtagatagcggatgcatggtccgagtaatatctggaagcagcacttacgatgagacacaatgtcagaacatgatgtttattgttaatgaaagtgatgcatatctgctgcctatgtctcatccagaggcatcatatgtcagtcaaatcacgaccacttgtttttctcggcttaagcatctcatctcagaactatcatcctccaattttggcaggataggcgtcaatgcttcagactctatgacaaaagatactggccaactccttc

SEQ ID NO: 6236 - DNA, 404 bp, Glycine max
  Clone ID: LIB3029-002-Q1-B1-E4
catcagttgagttgagagaaggaaagggaaaatgggtaaggatctgagcgaggaacaagtgtcttccatgaaggaagccttctctctattcgacactgacggcaagatccgctacgaggatttcatcgccagaatggtcgccaagtaacgccgattccattctctctttccagtgttattttctctctttctttcgcttttggttgtttgcttttcagtggaccaattaatagattaatcaattgtcttgtgtttactttttattttatggtgtgtggctaaccgagggtggttttaggaaacggtggctagctactcaatttgccctatttgctttgggttatacttgtattattatgagatctgattctgagctagtctatatatgcatgctgtaattcaga

SEQ ID NO: 6237 - DNA, 402 bp, Glycine max
  Clone ID: LIB3029-002-Q1-B1-E6
atcatcatctctctcgtgtccctgtctccatctccatctcttagtttcttcttcaaatggcagaagttgaagacatagacaaccctcatcacgaccaccatcattacctttcttcttctacaacacaacctccaatgatcaatttcccgcgagatctgttaagaaccttcgtgggagtgaacaacaacagcaataaaaacaataacaacagtcagcaccacaatttgcctatgccagtggtgaagttagaggatgagaaagaagagctggaactaagtctcggcctttcgatgaatggtagatttggggtggaccctacagcgaagaagataaagagaacaacctcgataccggagtttgtgcgcgacgaggagatgggatatgctgctgcgatggggtgca

SEQ ID NO: 6238 - DNA, 379 bp, Glycine max
  Clone ID: LIB3029-002-Q1-B1-E7
gtcaacatctctctcgagtccctgtcacaagctcaatctcatagttgcttcttcagatggcagaagttgatgacatagagaaccctcatcaagaccaccatcagtacctttcttcgtctacaacacaacctccaatgatgaatttcccgcgagatctgttaagaaccttcgtgggagtgaacagcaacagcaataaacacaataccaacagtcagcaccacaatttgcctatgccagtggtgaagttagaggatgagacagaatagctggaactaagtctcggcctttcgatgaatggcagatttggggtggaccctacatcgaagaagatcaagagaacaacctcgataccggagtttgtgcgcgacgaggagatggg

SEQ ID NO: 6239 - DNA, 209 bp, Glycine max
  Clone ID: LIB3029-001-Q1-B1-C7
gaggaaggacacatgcagaagtgctgcagcgaaatgagcgagctgaaaagccccatatgccagtgcaaagcgctacagaagataatggataaccagagcgagcaactggaggggaaggagaagaagcagatggagagagagctcatgaacttggctattacgtgcaggttgggacccatgatagggtgcgacttgtcctccgatgactg

SEQ ID NO: 6240 - DNA, 384 bp, Glycine max
  Clone ID: LIB3029-001-Q1-B1-C9
tcggggaattccaattccacattttcaagaaataaggaggcaaaaatgttcatatatgaattggaattatttgttttcttattaggcctatcctgaagccaaaggaaatgagatcggaattcctcggggaattccaattccacattttcaagaaataaggaggcaaaaatgttcatatatgaattggaattatttgttttcttattaggcctatcctgaagccaaaggaaatgagatcggaattcctcggggaattccaattccacattttcaagaaataaggaggcaaaaatgttcatatatgaattggaattatttgttttcttattaggcctatcctgaagccaaaggaaatgagatcggaattcctcgggggtaacgaac

SEQ ID NO: 6241 - DNA, 376 bp, Glycine max
  Clone ID: LIB3029-001-Q1-B1-E10
tcggggaattccaattccacattttcaagaaataaggaggcaaaaatgttcatatatgaattggaattatttgttttcttattaggcctatcctgaagccaaaggaaatgagatcggaattcctcggggaattccaattccacattttcaagaaataaggaggcaaaaatgttcatatatgaattggaattatttgttttcttattaggcctatcctgaagccaaaggaaatgagatcggaattcctcggggaattccaattccacattttcaagaaataaggaggcaaaaatgttcatatatgaattggaattatttgttttcttattaagcctatcctgaagccaaaggaaatgagatcggaattcctccgggg

SEQ ID NO: 6242 - DNA, 385 bp, Glycine max
  unsure (1)..(385): unsure at all n locations
  Clone ID: LIB3029-001-Q1-B1-E6
gttctccaatggtggtgggcgtggcggcaactggggtggaaagagatggtgaagctgagaagggactttgggagttgagtgttttcactctgctcggtgtgggatcataactgcgtgacgaccacgtggggatgaatacttcagtcgtgaatgaagaaacagttgatgttggttaaggcccacggaggattcgagttcaagatggattcaatgtgtcccctaacaacatattctatgtttcatttttgttttgttattttttattcttttgcggggaagcgtaagtttagatttttatattctgtctttcacaggagaaattttgatgtagtagtatatacttttacgatatcaagcgtggcaaattccatttaaaaaaaagnaa

SEQ ID NO: 6243 - DNA, 174 bp, Glycine max
  Clone ID: LIB3029-001-Q1-B1-F1
aaaatgcggaatcctctgcatgatctggaatttgtgttttcttttgcttgttcgtttgtttaattcaataaaggaaattaggcatgaccctcttgttgagtatgctctgcctatttgaaaatttccacacctcttttaattatcgtaatgatgtgtgaagtgtgtgttatttta

SEQ ID NO: 6244 - DNA, 318 bp, Glycine max
  Clone ID: LIB3029-001-Q1-B1-G9
ttttcgcaaaagtctcagttatcaaaacagagggcaaggccacaaagcacactctaagtgcttccattgcccactacgttacatacacgatcaccattcaccagtgatgatctttttattaatatacaacatacggagatagcttatacgttcttctagctagcataaactaacacatatatgtgttagtagtacttttttttcagtcatcggaggacaagtcgcaccctatcatgggtcccaacctgcacctaatagccaagttcatgagctctctctccatctgcttcttctccttcccctccagttgctcgctct

SEQ ID NO: 6245 - DNA, 328 bp, Glycine max
  Clone ID: LIB3029-001-Q1-B1-H4
agtctactctagaggatcccctaggggaattccaattccacattttcaagaaataaggaggcaaaaatgttcatatatgaattggaattatttgttttcttattaggcctatcctgaagccaaaggaaatgagatcggaattcctcggggaattccaattccacattttcaagaaataaggaggcaaaaatgttcatatatgaattggaattatttgttttcttattaggcctatcctgaagccaaaggaaatgagatcggaattcctcggggaattccaattccacattttcaagatataaggaggcaaaaatgttcatatatgaat

SEQ ID NO: 6246 - DNA, 230 bp, Glycine max
  Clone ID: LIB3029-002-Q1-B1-B3
gcaagagtccttgatcgtgattggagctcacttaatcctgctactgtccaagctttggtgtgttcacaagattggattaagagtgaactggaaaattagattgctttttccctgcattctaattgtacatgccaattctccccatagaaatatttccatgtaagttaatatcttctaactccacatttcaattttcctgacctttttatattttggttctatttagccaa

SEQ ID NO: 6247 - DNA, 332 bp, Glycine max
  Clone ID: LIB3029-003-Q1-B1-B8
caagcctacaggcactgagacttgatgggaatcctctcagaagcattcgaagaactgtgttggataaaggaactaaagctgttctgcaatatttgaaggacaaattgccagagcaatagtgtttttagttttttccctcctttgaaagtgttgtgcttgacatgaacagcaatatttaaagtgtccaatttttttttcaggtgtcacattctgtgtttgctctttattttgttcaattattttcccgtggtacctctgcttttgtgtgctatttcatgtaacaattttgacggtttgaatatttaacattacaaactaatttgcatggctta

SEQ ID NO: 6248 - DNA, 104 bp, Glycine max
  Clone ID: LIB3029-003-Q1-B1-D1
aaaaaaaaaaaaaaaaaaaaaaaaaaaaaaaaaaaaaaaaaaaaaaaaaaaaaaaaaaaaaaaaaaaaaaaaaaaaaaaaaaaaaaaaaaaaaaaaaaaaaaat

SEQ ID NO: 6249 - DNA, 84 bp, Glycine max
  Clone ID: LIB3029-003-Q1-B1-G3
gaggaaagtatcgggctatttaactatgacttgagctccatctatgaataaataaatcagcatatgatgcttttgttttgtgta

SEQ ID NO: 6250 - DNA, 309 bp, Glycine max
  Clone ID: LIB3029-003-Q1-B1-H11
gagagaaacaacgatgagaaactgagaaaccgttgtggaccagttcaaatgccttatactctgcttttgccttctagtaaggaaggattaactttcagaggaattcccaacagtatctctatctgaagaggtttgtggttccttaagttttgtggctttgaataaaagatagaagagaaggaatctgaatttcttcatccaacctgcacatggtaatctagtgtgtttgagtgctttcatgtttggctttaataaaataaaagcagttgttttgtaaaatgttcagaatcaataaaagcatttactgca

SEQ ID NO: 6251 - DNA, 343 bp, Glycine max
  Clone ID: LIB3029-003-Q1-B1-H2
ttttgtttatttatgtttttttcttgctcctccttgtcttagcttctgatgtgacggggaagacagcagaggcgatagattgcttgacaaggaggcacgggttccagggtagatgcttattcgacaggcaatgtgcacatgtgtgcaggagcgatggtttcatcggtggtcagtgccgaggccctcttcgcaaatgcttttgcagcaggccatgttgatcgaaattactactgccaaagaggccatgaaataaacaaacaaacaaataaataaatagctctaaccgacacatatgtacgtagtgtccgggttctagctagctaagtaaggtactgtgtccttt

SEQ ID NO: 6252 - DNA, 134 bp, Glycine max
  Clone ID: LIB3029-004-Q1-B1-G10
ggcttttgtgtttcatgatatttatttttgggcagtggcttgtaaattatagcgggagagaaggcccgctatgagcaatcacgctgtaaagttcattattcaattgaataaaagtttcttcgtttcgtactaaa

SEQ ID NO: 6253 - DNA, 177 bp, Glycine max
  Clone ID: LIB3029-005-Q1-B1-D5
ctcgagccgattcggttattggattcatgctacatgagtgtgtaaagaggtaatgggggtgatgactttcttggtcattgtcgtggctttgtgatttctattgcaaatgttgtcttgtaactttgttgtattttcagcaatatatgatatatgatatctatcttaatttctatctta

SEQ ID NO: 6254 - DNA, 53 bp, Glycine max; identical to SEQ ID NO: 531
  Clone ID: LIB3029-005-Q1-B1-F5

SEQ ID NO: 6255 - DNA, 350 bp, Glycine max
  Clone ID: LIB3029-005-Q1-B1-H1
caaggagaagaaaggcaacagtgaagaagtcatcaggatccttactacaagaagcaaaactcaacttgtggcaactttcaaccgctacagagatgaacatggaatttccatcagtaagaaattgttggatcaaacatctgatgacttccacaaggtgttgcacactgctattcgctgcatcaatgaccataagaagtactatgagaaggttttgcgcaatgcagtcaagaagtttggaactgacgaggatggactaagccgtgtgattgttacaagggctgagaaggatctgaaggacatcaaagagctctactacaagagaaacagtgttcacccttgagatgaagtgt

SEQ ID NO: 6256 - DNA, 55 bp, Glycine max
  Clone ID: LIB3029-005-Q1-B1-H7
aaaaaaaaaaaaaaaaaaaaaaaaaaaaaaaaaaaaaaaaaaaaaaataaaaaaa

SEQ ID NO: 6257 - DNA, 194 bp, Glycine max
  Clone ID: LIB3029-007-Q1-B1-D11
gtgctaccacacttttgtccttttgggctctagctagtgctggtagcagtaaataagaatgaataaaagaaacaaaggcttagatgccctttgttaagtgtagaataacgggtatagtaactatgtacccttgtgtaatgagtcactcaagtacctatgcgggaaaagcataaataaaagaagaaattccaata

SEQ ID NO: 6258 - DNA, 185 bp, Glycine max
  Clone ID: LIB3029-007-Q1-B1-H8
cagatcttctgaaaatgcggaatcctctgcatgatctggaatttgtgttttctttcgcttgttcgtttgtttaattcaataaaggaaattaggcatgaccctcttgttgagtatgctctgcctatttgaaaatttccacacctcttttaattgtcgtaatgatgtgtgaagtgtgtgttatttta

SEQ ID NO: 6259 - DNA, 262 bp, Glycine max
  Clone ID: LIB3029-008-Q1-B1-A12
aagaaagggtcctttgttcccctcctctttctgtggatgctcagcctcagcagaaagaggatgggaacaatggaagaaagggtcctttgtcttcaattttgaaggctttttactgaataagtatgtagtactaaaatgtatgctgtaatagctcatagtgagcgaggaaagtatcgggctatttaactatgacttgagctccatctatgaataaacaaatcagcatatgatgcttttgttttgtgtaaaagaaataaacatg

SEQ ID NO: 6260 - DNA, 55 bp, Glycine max
  Clone ID: LIB3029-008-Q1-B1-A4
aaaaaaaaaaaaaaaaaaaaaaaaaaaaaaaaaaaaaaacaaaaaaaaaaaaaaa

SEQ ID NO: 6261 - DNA, 338 bp, Glycine max
  Clone ID: LIB3029-008-Q1-B1-G1
ccgaaggagcacaagaggtacaacttaaagaagctgacatatgaggagaggaaggctaagttgatttcacgtgtggcagctctcaactctgctgctgataatgatgaagatgatgagtgaaagttcattgcagatgccttctcatggctacactagtagaaactatcttatttggtatctacagaatcattttcttgaaaatttatttgcctgcctgtttatttctaggcccaaaatttggatactttttttggagttgagtaagccttaattttggtcaaaaaaataaaaaaaaaaataaaaaaaatataatataaaaaaaaaatgtaaatagatat

SEQ ID NO: 6262 - DNA, 124 bp, Glycine max
  Clone ID: LIB3029-008-Q1-B1-G12
tggatagattgaactctttctccaacgtcaaagattctttatattttctccctttttctttttttcttcttgtttttgttttccctttaagcttataatatttgtatctatcatttaatcaaaa

SEQ ID NO: 6263 - DNA, 59 bp, Glycine max
  Clone ID: LIB3029-008-Q1-B1-G5
ttgatattatgtcatatttctattctcattccaaacgttctgaatattttactattatc

SEQ ID NO: 6264 - DNA, 257 bp, Glycine max
  Clone ID: LIB3029-008-Q1-B1-H2
aagaaagggtcctttgttcccctcctctttctgtggatgctcagcctcagcagaaagaggaggggaacaagggaagaaagggtcctttgtcttcaattttgagggctttttactgaataagtatgtagtactaaaatgtatgctgtaatagctcatagtgagcgaggaaagtatcgggctatttaactatgacttgagctccatctatgaataaacaaatcagcatatgatgcttttgttttgtgtaaaaaaactat

SEQ ID NO: 6265 - DNA, 393 bp, Glycine max
  unsure (1)..(393): unsure at all n locations
  Clone ID: LIB3029-008-Q1-B1-H3
ctcgagccgaatcggctcgaggagaaaggaaggaaaaatggagttgttcttctacgcggtgttcggcggtttgggagcggttgttgcagtgacggagctgagcaagagcaacaaggaccgaatcaacacctcttccgcattcaattccttcaagaacaactacctcatcgtctattccctcatgatggctggagattggctacaaggtccatatgtctactacctttacagtacatatggatatgggaagggagacatangacaactcttcattgctggttttgggtcttccatgctctttggaacaattgtcggatctctagctgacaaacaaggccggaagagggcttgtgtgacttactgcataacctacattttgagttgcatcaccaa

SEQ ID NO: 6266 - DNA, 59 bp, Glycine max
  Clone ID: LIB3029-009-Q1-B1-B5
ctcgagccgaaaaaaaaaaaataaatataaaagaaaagaagaaaatcaaaaaaataaac

SEQ ID NO: 6267 - DNA, 75 bp, Glycine max
  Clone ID: LIB3029-009-Q1-B1-E7
gacgtcgcacgcacgcgtacgtaaacccgaattccgctcgagctcgagccggtttttgatgataaacttgtgctg

SEQ ID NO: 6268 - DNA, 61 bp, Glycine max
  Clone ID: LIB3029-010-Q1-B1-C6
aaaaaaaaaaaaaaaaaaaaaaaaaaaaaaaaaaaaaaaaaaaaaaaaaaaaaaaaaaaaa

SEQ ID NO: 6269 - DNA, 66 bp, Glycine max
  Clone ID: LIB3029-010-Q1-B1-F10
agctcggaattcagctcgagcccattaagcgcagcggaagggaagtgttaccgaacaaggttttag

SEQ ID NO: 6270 - DNA, 437 bp, Glycine max
  Clone ID: LIB3029-011-Q1-B1-B12
ctcgacaggtcacctctgaccgtttgaaggaagctgtcaatcgcctctctcaaggccaggcgtctctcacccagagccacacagccttaaacaccaaaatgaattccatccactccttccttaacactaaaattaactccctcatagaccaaatcgcagccatcaccaccaaccccagctcaccttccccttcctctcagccatctccttctccgattcaccgtcctcacatgaaactggacgcacctcgtttcaatggtcacgacccgcttggatggatatttaaaatatcccaattctttgactaccagacaattctggagcaagagcctctcactgttgcgtctttctacatggatgggtcggcgcttcactgatatcagtggatgtctcgacaggttcttttcatcgtgggctgtgatgtggtgcatcacatg

SEQ ID NO: 6271 - DNA, 385 bp, Glycine max
  Clone ID: LIB3029-011-Q1-B1-D6
tcggggaattccaattccacattttcaagaaataaggaggcaaaaatgttcatatatgaattggaattatttgttttcttattacgcctatcctgaagccaaaggaaatgagatcggaattcctcggggaattccaattccacattttcaagaaataaggaggcaaaaatgttcatatatgaattggaattatttgttttcttattaggcctatcctgaagccaaaggaaatgagatcggaattcctcggggaattccaattccacattttcaagaaataaggaggcaaaaatgttcatatatgaattggaattatttgttttcttattaggcctatcctgaagccaaaggaaatgagatcggaattcctcgggggtaccgagct

SEQ ID NO: 6272 - DNA, 77 bp, Glycine max
  Clone ID: LIB3029-011-Q1-B1-G4
cacgcgtccgtaagctcggaaatcggctcgagcttgatcagaacttattgttgatgtaatacgtatactgatatcct

SEQ ID NO: 6273 - DNA, 205 bp, Glycine max
  Clone ID: LIB3029-001-Q1-B1-G11
ttcacattaaaacaatctaatgagaattgaggaagttgaacatttatacagtttatcctctaaatgggatgaaaaattggctagcttgatcattctcttgccattactgcttcctttctgggaattttatgactttggtcgcaagagtaaaaatctgatggcaaagtagacaatgcaagaatgagaaggatgaatttgtatgatg

SEQ ID NO: 6274 - DNA, 166 bp, Glycine max
  Clone ID: LIB3029-002-Q1-B1-A4
ttcaatacaaatctacacccttgaccctggggactggatatatatacaatctggaaccccactgtcaatcgttaccataaatgagaatgataagctcttccgtgctatgctccatatacctgtctcagtccctactcctggaaaatttgaggaatttttcgggcct

SEQ ID NO: 6275 - DNA, 295 bp, Glycine max
  unsure (1)..(295): unsure at all n locations
  Clone ID: LIB3029-002-Q1-B1-A6
cttattgacaatcccaaacagtctacagtttttgacattctcttgggaatttctcaagattttgaaattgctggtaatactcttatgccagctttttctgttccacaggctactgccagatcttctganaatgcggaatcctctgcatgatctggaattttgtgtttctttcaattgtccgtttgtttattcaatanaggaaataggcatgaccctctgttgagtatgctctgcctatttgaaaatttcacacctcttttaatgtcgtaatgaagttttgaagtgtgtgtaattt

SEQ ID NO: 6276 - DNA, 427 bp, Glycine max
  unsure (1)..(427): unsure at all n locations
  Clone ID: LIB3029-002-Q1-B1-H4
acacgtacgtatactcagacttcggattcagcacnatgtaaatttgcatatcagcatcaatggctccaattgcaatgggaaacgtcattccagacggcattttggcttacttggatgaagaaaacaaaccccaaactgtctccattcactctctcgccaccggcaagaaagtcatcatctttggggttcccggtgccttcactcctacttgcagcttgaagcacgttcctggcttcattgagagagcagaagagctgaaagggaagggtgtggacgaaataatctgtatcagtgtgaatgatccatttgtgatgaactcatgggccaaaacattcccagagaacaagcatgttaagttccttgctgatggtgcagccaaatacaccaatgcccttggtcttgagcttgacctcactgacaagggtct

SEQ ID NO: 6277 - DNA, 605 bp, Glycine max
  unsure (1)..(605): unsure at all n locations
  Clone ID: LIB3029-003-Q1-B1-E11.F1
cggctcgagagctattgaacttatctctcttctcacttctgttgttataagtaacttccctcatcattacaaaacaatcctccacaggtttcaaaatgctgaaatcgggcatgggaattgaggagagaaagcaagtgaagaagccagcacaagccagctcgagaaaagggtgtatgagagggaaaggaggtcccgagaatgctagttgcacctacaaaggtgtgaggcagagaacatggggaaaatgggttgctgaaatccgtgaacccaatcgaggtgctaggctctggctcgggacttttgagacctctcatgaagctgctttggcttatgatgctgctgcacgtaagctctatggctctgatgccaaactcaacttaccagagctctctatcaaatcacaatctcagtgtccaccaccaccttcttctgtttccaacaacactcagattcctcaaatggagaacctgcagcagcagattcaaaacaattacatggacatggctacattttctaataatttctacactacaccaataatcttcagaagtttcatgggctctcagcaggttggangtggagtaccatttacacagtgactcatc

SEQ ID NO: 6278 - DNA, 546 bp, Glycine max
  unsure (1)..(546): unsure at all n locations
  Clone ID: LIB3029-003-Q1-B1-E11.F2
cggctcgagngctattgaacttatctctcttctcacttctgttgttataagtaacttccctcatcattacaaaacaatcctccacaggtttcaaaatgctgaaatcgggcatgggaattgaggagagaaagcaagtgaagaagccagcacaagccagctcgagaaagggtgtatgagagggaaaggaggtcccgagaatgctagttgcacctacaaaggtgtgaggcagagaacatggggaaaatgggttgctgaaatccgtgaacccaatcgaggtgctaggctctggctcgggacttttgagacctctcatgaagctgctttggcttatgatgctgctgcacgtaagctctatggctctgatgccaaactcaacttaccagagctctctatcaaatcacaatctcagtgtccaccaccaccttcttctgtttccaacaacactcagattcctcaaatggagaacctgcagcagcagattcaaaacaattacatggacatggctacatngtctaataatttcaacaacaacaccaataatccttc

SEQ ID NO: 6279 - DNA, 318 bp, Glycine max
  Clone ID: LIB3029-004-Q1-B1-C6
aaatccgccagtcatcaccatgggcaagctagttttttccctttgttttctgcttttcagtggctgctgcttcgctttcagttccagatagcagcctcagcaaaacgagtgccagatccaagaactcaatgccctcaaaccggataaccgtatagagtcagaaggagggctcattgagacatggaaccctaacaacaagccattcgagtgtgccggtgttgccctctctcgctgcaccctcaatcgcaacgcccttcgtagaccttcctacaccaacggtccccaggaaatctacaatccacaaaggaaagggtaatt

SEQ ID NO: 6280 - DNA, 170 bp, Glycine max
  Clone ID: LIB3029-004-Q1-B1-C8
caagaaaacgaaaaaggaagaaggaattagaaggaaaattttccggccaaacaaaggaaggttccttccttttgggggaaaaaattggaaccggccttggcttgcttaaaaaaggactcctcaacctttaaaaggttggtttccttaaattttgcgcctttccaattttc

SEQ ID NO: 6281 - DNA, 404 bp, Glycine max
  unsure (1)..(404): unsure at all n locations
  Clone ID: LIB3029-004-Q1-B1-E1
tccaaccttccccttccccttttaaaattccccggccgtttcaagttagaaaaaattcaacaaaacggtaagaaaaaatccccaaattactaaaaaatcaaccctttcctggttcccctggccccccctaaaaccgtaaacaattggtgttttaacctccgggaaaaaaaaaaaggtttaaagcactctctggtgtggaaggcaaaaacactaattctaaggaattaggtantggtaagtgaattacaaacaaacaagactttaagatttgagaactaaggcntaaggagctcgctaanggctgangaggcacttgccgagatgaaagttaatgaaaacaaaaatgaagtggctggtgatcgttccagtgatttggagaaagagcaaaaggaagggaatgaaga

SEQ ID NO: 6282 - DNA, 117 bp, Glycine max
  Clone ID: LIB3029-005-Q1-B1-E8
aaaaaaaaaaaaaaaaaaaaaaaaaaaaaaaaaaaaaaaaaaaaaaaaaaaaaaaaaaaaaaaaaaaaaaaaaaaaaaaaaaaaaaaaaaaaaaaaaaaaaaaaaaaaaaaaaaaaa

SEQ ID NO: 6283 - DNA, 521 bp, Glycine max
  Clone ID: LIB3029-010-Q1-B1-B7.F1
cgcgcctttgccgccgaaccaaccaccgaacctcagaaaccctctccaaagaaaaccgtcgacaccttcggccaacgcacctccatctaccgcggcgtcacccgacatagatggacgggaagatacgagctcatctatgggacaatagttgtagaagagaaggccaaagcaggaaaggaagacaagtttacctgggtggttatgacaaggaagataaggcagccagggcttacgatctcgcagctctcaagtactggggtccaactaccaccaccaactttcccatttccaactatgagaaggaactggaggagatgaagaacatgaccaggcaagagtttgttgcttctctacgaagaagagcagtggtttctctaggggggcctctatatacagaggagtgacgagacaccaccagcattgccggatggcaggcgaggatacgcagagttggcggaaacaaagacctctaccttggaactttcagcacccaagaagatctgctgagggctatgacattg

SEQ ID NO: 6284 - DNA, 586 bp, Glycine max
  Clone ID: LIB3029-010-Q1-B1-B7.F2
cgcgcctttgccgccgaaccaaccaccgaacctcagaaaccctctccaaagaaaaccgtcgacaccttcggccaacgcacctccatctaccgcggcgtcacccgacatagatggacgggaagatacgaagctcatctatgggacaatagttgtagaagagaaggccaaagcaggaaaggaagacaagtttacctgggtggttatgacaaggaagataaggcagccagggcttacgatctcgcagctctcaagtactggggtccaactaccaccaccaactttcccatttccaactatgagaaggaactggaggagatgaagaacatgaccaggcaagagtttgttgcttctctacgaaggaagagcagtggtttctctaggggggcctctatatacagaggagtgacgagacaccaccagcatggccgatggcaggcgagaataggcagagttgccgggaacaaagacctctaccttggaactttcagcacccaagaagaagctgctgaggcctatgacattgctgctatcaaattcaggggattaaatgcagtcacaaactttgacatgagtcgctacgatgtaa

SEQ ID NO: 6285 - DNA, 222 bp, Glycine max
  Clone ID: LIB3029-010-Q1-B1-B9
agggagaaaagaaaatatttacatcgatgataaatatagaattagcacgaatcttttcatttcaagtcagatatgtatcagttgacatctctttcatgtatatgcagtcagagttatagataaattttgaatttacgcggaatattctgtacagaataagaggtggaattatgcaaggacgtggtaattaatttaattgattagcgtatggtttttttcaaa

SEQ ID NO: 6286 - DNA, 409 bp, Glycine max
  Clone ID: LIB3029-011-Q1-B1-D9
gtcgacactagaggatcccctcggggaattccaattccacattttcaagaaataaggaggcaaaaatgttcatatatgaattggaattatttgttttcttattaggcctatcctgaagccaaaggaaatgagatcggaattcctcggggaattccaattccacattttcaagaaataaggaggcaaaaatgttcatatatgaattggaattatttgttttcttattaggcctatcctgaagccaaaggaaatgagatcggaattcctcggggaattccaattccacattttcaagaaataaggaggcaaaaatgttcatatatgaattggaattatttgttttcttattaggcctatcctgaagccaaaggaaatgagatcggaattcctcggaggtaccgagctcgaa

SEQ ID NO: 6287 - DNA, 409 bp, Glycine max
  Clone ID: LIB3029-011-Q1-B1-F10
gtcgacactagaggatcccctcggggaattccaattccacattttcaagaaataaggaggcaaaaatgttcatatatgaattggaattatttgttttcttattaggcctatcctgaagccaaaggaaatgagatcggaattcctcggggaattccaattccacattttcaagaaataaggaggcaaaaatgttcatatatgaattggaattatttgttttcttattaggcctatcctgaagccaaaggaaatgagatcggaattcctcggggaattccaattccacattttcaagaaataaggaggcaaaaatgttcatatatgaattggaattatttgttttcttattaggcctatcctgaagccaaaggaaatgagatcggaattcctcgggggtaccgagctcgaa

SEQ ID NO: 6288 - DNA, 603 bp, Glycine max
  Clone ID: LIB3029-011-Q1-B1-G3.F1
caaactttccccatcgtcatctttttcctcatttcagtctcagattctctcctttgacaatcctaacccaacctcatcttccaacaccaccacccagttttatgggtttgactgtaccttaaacccaacacagaacgagatggtgtcagtgtcagtccccaacatgagaaaaccacggttcccaactcaaaccgcaaaaggttcaccgaaaaatcaaaactttgaaacaaaaacctcacatggtaagaggtctccagctcatgctcaagatcacatcatggctgaaagaaaacgagagagaaactcagccagagcttcattgcccttgcagctcttgttcctggcctaaagaagatggacaaggcttctgtgttaggggacgctatcaaatatgtgaaagagcttaaagagcggttaacagtgcttgaagagcgagcaaaaaatcaagggcagagtcagtagtggttctgaacaagccagacctctctggcgatgatgattcttcttcatgtgatgagagcattggtgctgatagtgtcagtgactcactgttttgagtggaatcaagagtatcagggaaggagatgctgctcaggatccact

SEQ ID NO: 6289 - DNA, 553 bp, Glycine max
  Clone ID: LIB3029-011-Q1-B1-G3.F2
caaactttccccatcgtcatctttttcctcatttcagtctcagattctctcctttgacaatcctaacccaacctcatcttccaacaccaccacccagttttatgggtttgactgtaccttaaacccaacacagaacgagatggtgtcagtgtcagtccccaaccatgagaaaaccacggttcccaactcaaaccgcaaaaggttcaaccgaaaaatcaaaactttgaaacaaaaacctcacatggtaagaggtctccagctcatgctcaagatcacatcatggctgaaagaaaacgaagagagaaactcagccagagcttcattgcccttgcagctcttgttcctggcctaaagaagatggacaaggcttctgtgttaggggacgctatcaaatatgtgaaagagcttaaagagcggttaacagtgcttgaagagcagagcaaaaaatcaagggcagagtcagtagtggttctgaacaagccagacctctctggcgatgatgattcttcttcatgtgatgagagcattggtgctgatagtgtcagtgactcac

SEQ ID NO: 6290 - DNA, 183 bp, Glycine max
  Clone ID: LIB3029-012-Q1-B1-B10
aaatgtgctgacctcttcaactttgccaatgcatgatgagccaagatcgcgagactttttataatatgcttatttataattaagcaagcatctactacatgttatggttaataaaagtaataatgtaagaataaagactttgaactaaataataatatgaacgattctctttcgttgttcaaa

SEQ ID NO: 6291 - DNA, 295 bp, Glycine max
  Clone ID: LIB3029-012-Q1-B1-F5
aggaacctgaggccatacctgctggaaaccccatggacaattcaggatatggactctagagcaacgagcaacggctgcttcagtgagaagagtattttgttctccctcggatgaaatgcaaaatttggtggccatttagcaatgagtccaaatgtattgttagtgtggtgaactagatagtgatgcaccctttcctcccttatttttttcaagttaataataatttttttttgcttaaaaaaaaaaaaaaaaaaaaaaaaaaaaaaaaaaaaaaaaaaaaaaaaaaaaaaaacac

SEQ ID NO: 6292 - DNA, 532 bp, Glycine max
  Clone ID: LIB3029-003-Q1-B1-E11.R1
acaataatacattttatatgtacaccattattactacacaactactagttgtacattcttattgacatatataactcacaagatgcttacataaaactcacaataaactgcacaaaagctaacacaacttattaatatcggggcgatagagcatcaccaccatcgcttatcgtattaagtaatatttacatataacataatattactatagactataaggcagaaaacgacgtcgtgcgaaaataagcacgtcatggttttccatacactccaaggtagacaccatatatatgatatgatatagtatcctatttaactaaactagtcttaatttgggtatcatatatgtctttacaaagtacttacttacccctcttatatatacactatatattttaacaagcagatatcagtccagctggcatgagaagaaagctatagcttgtggctttcccttgcccttttgaaagtgatgaattacatgcaccatggggttttgcgagagtccacacaccacatcggccagttgtta

SEQ ID NO: 6293 - DNA, 520 bp, Glycine max
  unsure (1)..(520): unsure at all n locations
  Clone ID: LIB3029-003-Q1-B1-E11.R2
acaataatacattttatatgtacaccattattactacacaactactagttgtacattcttattgacatatataactcacaagatgcttacataaaactcacaataaactgcacaaaagctaacacaacttattaatatcggggcgatagagcatcaccaccatcccttatcgtattaagtaatatttacatataacataatattactatngactataaggcagaaaacgacgtcgtgcgaaaataagcacgtcatggttttccatacactccaaggtagacaccatatatatgatatgatatagtatcctatttaactaaactagtcttaatttgggtatcatatatgtctttacaaagtacttacttacccctcttatatatacactatatattttaacaagcagatatcagtccagctggcatgagaagaaaagctatagcttgtggctttcccttgcccttttgaaagtgatgaaattacatgcaccatggggtttgcagagagtcccacacaccca

SEQ ID NO: 6294 - DNA, 427 bp, Glycine max
  Clone ID: LIB3029-010-Q1-B1-B7.R1
gaaaaaaaagaaaattcatccaaaacataacaaaggaactttgaggttagtacagtgtcagctgctgctaggtatagctacgcttctcatgaaattatgactgtcagtccaactcattcaaatactgcatcagctaaaggtactagttcgtccttgcttcttttgcatgctaaaacaccatcaccactattgcccttcccctttcatcattatatgcacagattctcatcccacctcgtgcatgagctcattccattccaaatattggcgtttgaaagagacttggttttgcatgggattggaatgtgtgcagggtaggtccaatccagtttccaaaaccagcactgttctcataactagtattgctatttagagaaaagatgggcgtggcgaatgggtttgaaccgcttaaagaagaagaggggga

SEQ ID NO: 6295 - DNA, 372 bp, Glycine max
  Clone ID: LIB3029-010-Q1-B1-B7.R2
ggaaaaaaaagaaattcatccaaaacataacaaaggaactttgagttagtacagggtcagctgctgctaggtatagctccccttctcatgaaattatgactggcagcccaactcattcaaatactgcatcagctaaggggactagttcgcccttgctttttttgcatgctaaaacaccatcaccactattgcccttcccctttcatcattatatgcccagattctcatcccacctggggcatgagctcattccattccaaatattggcgtttgaaagaaacttggttttgcatgggattggaatgtgtgcagggtaggtccaatccagtttccataaccagcactgttctcataactaggattgctatttaa

SEQ ID NO: 6296 - DNA, 298 bp, Glycine max
  Clone ID: LIB3029-011-Q1-B1-G3.R1
ttttttttttttttttgttttttttttttttttttttttttttttttttttttttttttttttttttttttttttttttttttaaaaaaaatttccacccttcaaacattttcaaaaaaccaaatggaacaccaaaaactgtcaatttccccattacccagtttcaaaccccaattaaaccccctgtaaattaacccgtgccatattaaaattttcccaaaaacctttaaaaaattatccaattattttccccccaataaggaacccccagaaggccgtaaaacccaaaacatacccc

SEQ ID NO: 6297 - DNA, 270 bp, Glycine max
  Clone ID: LIB3029-011-Q1-B1-G3.R2
ttttttttttttttttggttttttttttttttttttttttttttttttttttttttttttttttttttttttttttttttttaaaaaaaaatttgcctccttaaaaaattttaaaaaaaaacaaaggtaaaaaaaaaacttgaaattccaccattacccacctttaaaattttattaaaccccatttaaaaaaaccccggtaaaaataaaatttttcccaacattttaaaaaaataattcaattttttttccctcgaccagccccacatt

SEQ ID NO: 6298 - DNA, 625 bp, Glycine max
  unsure (1)..(625): unsure at all n locations
  Clone ID: LIB3029-003-Q1-B1-E11.F3
tttcaaacacaccataatccttcanagtttcctggcctctcagcagttggagttggagtaccaatttacaccagtgactccatcgtgtctcttcccttggacaccaatcccaagcctgtggagaatgatggtgactttcgtccttcgtggggtacaatgaatgagggtttgccagtttttgatgattctatttgggctgaagctgccatgtctctagattttcctcaaattgcagcagagactgcgatttattcatcgggtaacaacttggccgatgtgggtgtgtgggactctctgcaaaccccatggtgcatgtaatttcatcactttcaaaagggcaagggaaagccacaagctatagcttttcttctcatgccagctggactgatatctgcttgttaaaatatatagtgtatatataagaggggtaagtaagtactttgtaaagacatatatgatacccaaattaagactagtttagttaaataggatactatatcatatcatatatatggtgtctaccttggagtgtatggaaaaccatgacgtgcttattttcgcacgacgtcgttttctgccttatagtctatagtaatattatgttatatgtaaatattacttaata

SEQ ID NO: 6299 - DNA, 441 bp, Glycine max
  Clone ID: LIB3029-003-Q1-B1-E11.R3
ttgttggtaacggagcaggtggtggtggccactgcggatgtgatttggatagatgctctggtaagttgagtttggcatcagagccatagagcttacgtgcagcagcatcataagccaaagcgcttcatgagaggtctcaaaagtcccgagccagagcctagcacctcgattgggttcacggattgtcagcaacccattttccccatgttctctgcctcacacctttgtaggtgcaactagcattctcgggacctcctttccctctcatacacccttttctcgagctggcttgtgctggcttcttcacttgctttctctcctcaattcccatgcccgatttcagcattttgaaacctgtggaggattgttttgtaatgatgagggaagttacttataacaacagaagtgagaagagagataagttcaatagctctcgagccg

SEQ ID NO: 6300 - DNA, 629 bp, Glycine max
  Clone ID: LIB3029-003-Q1-B1-E11.R4
gcttttcttggggctttccttgcccttttgagggctgtgattgcatgcaccatggtggttggccgagtagtcaccacactcccacatgggccaggttgctaccctgaggaacaatcgcatgctatgctgcaatgtgtggaaattctgaaccttgggaacctgcgcccaaagggaatgatcaaccactggcgaaccctgattcattgtacccgacgaaggcacgaaggtcaccatcattctgcacaggctggataagggggttcaatgggttgagacacggaggcgacactgtataaaatggggtcttcagctacaacctgctgggaggacttgtaaacttgtgaaggattattggtgtagcagttgtatttactagatcatgtaaccgtgtgcatgtaagagaggtgaatcatgtgttgcaacaaatagctgtgaagaacctgtgtgttgtaccatacagaagaaggggtttctgacactgagattgatatcagatcgatactgtgtaataacataagggacactgtgtcatattgatcaccagtcagtatgccgatatgcacttgaaccttatttataagatctattagtattgtagcttaacctagcaccttgtttgggttcacgga

SEQ ID NO: 6301 - DNA, 246 bp, Glycine max
  unsure (1)..(246): unsure at all n locations
  Clone ID: LIB3029-010-Q1-B1-B7.F4
agctcatgcacgagtgggatgagnatctgtgcatataatggatgaaggggaagggcaatagtggtgatggtgttttagcatgcaaaagaagcaaggacgaactagtacctttagctgatgcagtatttgaatgagttggactgacagtcataatttcatgagaagcgtagctatacctagcagcagctgacactgtactaactcaaagttcctttgttatgttttggatgaattttcttttttttc

SEQ ID NO: 6302 - DNA, 340 bp, Glycine max
  Clone ID: LIB3029-010-Q1-B1-B7.R3
aaactcttgcctggtcatgttcttcatctcctccattccttctctagttggaaatgggaaagttggtggtggtagttggaccccagtacttgagagctgcgagatcgtaagccctggctgccttatcttccttgtcataaccacccaggtaaacttgtcttcctttcctgctttggccttctcttctacaactattgtcccatagatgagcttcgtatcttcccgtccatctatgtcgggtgacgccgcggtagatggaggtgcgttggccgaaggtgtcgacggttttctttggagagggtttctgaggttcggtggttggttcggcggcaaaggcgcg

SEQ ID NO: 6303 - DNA, 626 bp, Glycine max
  unsure (1)..(626): unsure at all n locations
  Clone ID: LIB3029-010-Q1-B1-B7.R4
actagtattgctatttagnanaaaanagggcgtggcngaatgggattgacagcttaaanaanaanaggaggaaccactgcttccacttccatgaccattaccatgaccactttgttgctgaacaaagagcctcctccatgaaaaacgcggcatcgttatcactgccggtacttgtgggggcatttgagaattccatgtggaagggtgtcaaactactagtagtgccattgttgnngaggatggaaaagaagttgcagtaacactagtagtgttcctgatgccagtgttgtcaaggggagaattatggtaccccaggatggaccagtaatctgaagggtcttgcttaatgggtatggcaaagcttaaggtggagctcgaaggctgttgctgtgatgcaaaggtcacggatgaagccgctgatggatctcgttcgtcggatcggcttgcctcgtggctcttgctctcagatgcagaatctgtggagttcttgttcttgccagataaacctccaattggaagagtgctatttgcaatgctctttacatcgtagcgactcatgtcaaagtttgtgactgcatttaatcccctgaatttgatagcagcaatgtcataggcctcagcagctt

SEQ ID NO: 6304 - DNA, 663 bp, Glycine max
  unsure (1)..(663): unsure at all n locations
  Clone ID: LIB3029-010-Q1-B1-B7.F5
cgcttgtattgntatttagagaaaagagggcgtggcgaatgggattgaacagcttaaagaagaagaggaggaaccactgcttccacttccatgaccattaccatgaccactttgttgctgaacaaagatgcctcctccactgaaaaacgcggcatcgttatcactgccggtacttgtgggggcatttgagaattccatgtggaagggtgtcaaactactagtagtgccattgttggaggatggaaaagaagttgcagtaacactagtagtgttcctgatgccagtgttgtcaaggggagaattatggtaccccaggatggaccagtaatctgaagggtcttgcttaatgggtatggcaaagcttaaggtggagctcgaaggctgttgctgtgatgcaaaggtcacggatgaagccgctgatggatctcgttcgtcggatcggcttgcctcgtggctcttgctctcagatgcagaatctgtggagttcttgttcttgccagataaacctccaattggaagagtgctatttgcaatgctctttacatcgtagcgactcatgtcaaagtttgtgactgcatttaatcccctgaatttgatagcagcaatgtcataggcctcagcagcttcttcttggggtgctgaaagtccaaggtagaggtcttt

SEQ ID NO: 6305 - DNA, 671 bp, Glycine max
  Clone ID: LIB3029-010-Q1-B1-B7.R5
agcggcttcatccgtgacctttgcatcacagcaacagccttcgagctccaccttaagctttgccatacccattaagcaagacccttcagattactggtccatcctggggtaccataattctccccttgacaacactggcatcaggaacactactagtgttactgcaacttcttttccatcctccaacaatggcactactagtagtttgacacccttccacatggaattctcaaatgcccccacaagtaccggcagtgataacgatgccgcgtttttcagtggaggaggcatctttgttcagcaacaaagtggtcatggtaatggtcatggaagtggaagcagtggttcctcctcttcttctttaagctgttcaatcccattcgccacgcccatcttttctctaaatagcaatactagttatgagaacagtgctggttatggaaactggattggacctaccctgcacacattccaatcccatgcaaaaccaagtctctttcaaacgccaatatttggaatggaatgagctcatgcacgaggtgggatgagaatctgtgcatataatgatgaaaggggaagggcaatagtggtgatggtgttttagcatgcaaaaagagcaaggacgaactagtacctttagctgatgcagtatttgaatgagttggactgac

SEQ ID NO: 6306 - DNA, 623 bp, Glycine max
  unsure (1)..(623): unsure at all n locations
  Clone ID: LIB3029-011-Q1-B1-G3.F5
tgccagnagcaaagggtcttttggtcaaatactggccgagnatcaaagccatcacttatttgttgctaatagcagtgtattaccctttggtgattctatccttgacattaccatagtggctcagatgggagaaagttacaatttgaccactaaggaacttgtcaagaacctacgcgtggctgcattgaagatattgtcataacatgaacgtggcttgagtatggaggataccctcatgacatatgatatggattggaactctgaatcacatttaatgcgccagccaccgagtaaatcacaaccaaaatggaagccttgttattaatgtgtgatttccgctacaacctgcagtgttccccaatatgtagattcagcttgatcccaagtgatcttgtctttttcgtgttatgttttggtttctcaggccttcagtgtgtgcctgctcgagggaaaaataattgaataattttgtaaagatgttaggaataatttcaatctgacacggcttaattaacatgagcttaaatagagattagaagctggataatggtgacattgacagtttttgatgtaccatttgttcttttgaacatgtttgaaggatgcaaatctctcttanaaaa

SEQ ID NO: 6307 - DNA, 360 bp, Glycine max
  unsure (1)..(360): unsure at all n locations
  Clone ID: LIB3029-011-Q1-B1-G3.F6
catcgccagagagccgggctacgcgcacaaccacgactgacccggcccaggcagcagagcgcagacacagaagcacagcgaaccgaccnagaagactcgtcacatattcagatagcggcccctaacacagaagccttgtccatcttctttaggccccgaacaagagctgcggagggcgaggaagctctggctgaggttctctcttcgttttctttcagccatcatgcgatcttgagcatgagctggagaccactaaccatgagaggcatggcgtggcaaaggtcggattggtgggttaaccttgcgctgggggaggaggggagaccgtgtttgctcatgttggggactgacactgacacc

SEQ ID NO: 6308 - DNA, 555 bp, Glycine max
  unsure (1)..(555): unsure at all n locations
  Clone ID: LIB3029-011-Q1-B1-G3.R5
tcactggcactatcagcaccaatgctctcanacatgaagaagaatcatcatcgccagagaggtctggcttgttcagaaccactactgactctgcccttgattttttgctctgctcttcaagcactgttaaccgctctttaagctctttcacatatttgatagcgtcccctaacacagaagccttgtccatcttctttaggccaggaacaagagctgcaagggcaatgaagctctggctgagtttctctcttcgttttctttcagccatgatgtgatcttgagcatgagctggagacctcttaccatgtgaggtttttgtttcaaagttttgatttttcggtgaaccttttgcggtttgagttgggaaccgtggttttctcatgttggggactgacactgacaccatctcgttctgtgttgggtttaaggtacagtcaaacccataaaactgggtnggtggtgttggaagatgaggttgggttaggattgtaaaggagagaattgagactgaaatgaggaaaaagagacgatggggaaagtttgntngagnngaat

SEQ ID NO: 6309 - DNA, 609 bp, Glycine max
  unsure (1)..(609): unsure at all n locations
  Clone ID: LIB3029-011-Q1-B1-G3.R6
gccacagcaaagggtcttttggtcaaattactgggccgagnatcaaagccatcacttatttgttgctaatagcagtgtattaccctttggtgattctatccttgacattaccatagtggctcagatgggagaaagttacaatttgaccactaaggaacttgtcaagaacctacgcgtggctgcattgaagatattgtcataacatgaacgtggcttgagtatggaggataccctcatgacatatgatatggattggaactctgaatcacatttaatgcgccagccaccgagtaaatcacaaccaaaatggaagccttgttattaatgtgtgatttccgctacaacctgcagtgttccccaatatgtagattcagcttgatcccaagtgatcttgtctttttcgtgttatgttttggtttctcaggccttcagtgtgtgcctgctcgagggaaaaataattgaataattttgtaaagatgttaggaataatttcaatctgacacggcttaattaacatgagcttaaatagagattagaagctggataatggtgacattgacagtttttgatgtaccatttgttcttttgaacatgtttgaaggatgcaaa

SEQ ID NO: 6310 - DNA, 395 bp, Glycine max
  Clone ID: LIB3030-006-Q1-B1-D2
cacagcaccaaactagttggctcaattctctttgaatggctttggaggctttgaattcaccaacagcagccaccactcccttccgtggttaccaagaagaggaggaggaggttgaccttcacctacgcgagccttgggccaagagaaaacgctccaaacgacctcgttttgagtcggaggaagagtacttggctctttgcctcatcatgcttgcacaaagcggtaacaacaacaacacccaattaccgtcttcgtcacagtcacacacagaagcgtcaccgccgctgaaactatcacacaggtgcaccgtttgcaacaaggcttttccttcttaccaagcactcggtggacacaatgccagccaccgcaatgcctcgtcggaatccaaacacacc

SEQ ID NO: 6311 - DNA, 386 bp, Glycine max
  Clone ID: LIB3030-011-Q1-B1-H9
ggagaagagaaattactcgctgtggcgcggcacatagccaaaacgctgggccacaacaacaccatgtctgatgacatattccaaatactatcgaacttcgatggaagattctcgagagagaatctttctgagaagggcgcagatgtggatcccagaggctgcgccgcactggatcattccctcaaatccctagaccgccggatctctccctacgtctcctccgaccgcacaatctgggccgacgccgccgattctgctgccttcctcgacgccgtggacgagctcgtcgccgtcgtcgccgagtggaaccacctcgcctccgacaagtccgtcgccgcctgcctcgtccgcgccgaggacatgctccagcacgccatgttccgcct

SEQ ID NO: 6312 - DNA, 408 bp, Glycine max
  unsure (1)..(408): unsure at all n locations
  Clone ID: LIB3030-002-Q1-B1-A10
attcttttttttatttcttggtggaaaacagattgtgcatctaattccaaattcacccataaaaatacttccttttgctcaccagccatatattatgatggagggagatgagaatattcaagcatcatcaaagggaaaatatgttgaaagcttcaactgctcggaggcaccaaggaagaaaagcaagaagatagaaaacaagaggaggtttagtgatgaacagataagatcactagaatgcatatttgagtcagagtcaaagcttgagccaaggaagaagatgcaactggctagagatcntggnctgcagcctcgccaagtggctatatggtttcaaaacagaagggcaagggtggaatcaaaacgaatagagcaagagtaccgaaaactcaaagatgaatatgacaa

SEQ ID NO: 6313 - DNA, 400 bp, Glycine max
  Clone ID: LIB3030-007-Q1-B1-A2
gattatgtcttgatttgaaaacagacgaacacagtccgaggaacaaccacgcgtatgggagggagtttcagtccatgctggaaggactcgacgaagaacggtgcgtggaagaaccagggcaccactctgagaagaaacgacgactaagcgtggatcacgtgaaggctttggagaagaacttcgaagtagagaacaaactcgaacctgaccgaaagttgaagctggcacaagaacttggcttgcaaccaagacaagttgcggtttggttccaaaaccgtcgtgccagatggaagacaaagcaattggaaagagattacggcgtcctcaaagccaattatgaatcacttaaacttaactacgacaccctccaacaagaccacgaagccttactcaaagagat

SEQ ID NO: 6314 - DNA, 396 bp, Glycine max
  Clone ID: LIB3030-008-Q1-B1-G4
aattcggcccaagccttttgagtgaaaaaccttgtcttcccacctttctttcgaaaaatcttaaagacattgactaacaacactaaagtggatcaatcaaaagacttacttcttcgtctaacaacattaagatcacatctgtcccactcatgaagagacttagcagctcagattcttccagtgccctcatgacaatttgtccatcaacagaggaacatagtccgaggaacagccaacacatgtatggtagggagttccaatcgatgttggacggactcgacgaggaagggtgtgttgaagaaccggggtatcaatctgagaagaagcgtcgtctaagtgtggatcaagtgaaggctttggagaagaactttgaggttgaaaacaagcttgaacctg

SEQ ID NO: 6315 - DNA, 384 bp, Glycine max
  Clone ID: LIB3030-008-Q1-B1-G5
gccagcagcagcaccatctgaatgacttgagctgttacatacagcctcgccccggtgccagttctgtgagtagatctggtcggtccaagaccctaactccatcaaatctggaagagctcttttctgctgagatttctttgtctccccggtattctgatccagcagccggttctgtgttttcccctactcacaaatcagctgttctcaatcagtttcaacagctccaaagtatgttatcacctataaatactaatttgctgtctcctaagaatgttgagcatcctctttttcaggcttcatttggtgtctctccttctggaaggatgtcaccaagaagtgttgaaccaatctctccaatgagtgctcgtttatctgcatttgctc

SEQ ID NO: 6316 - DNA, 390 bp, Glycine max
  Clone ID: LIB3030-006-Q1-B1-D8
cttccgttggctttgtcacagtccactgtgcccccaagaaagttccttaacctcaaaccccttatggcaagttgctaacttctcttacttttatctttgaagccaccctcttctaacttctccatttcacaaggaagaagatcagagaacatttagaacaaaaaagagagtttgagaaatggggaggggtaagattgagatcaagaggatagagaactcaagcaacaggcaagttacatactcaaagagaaagaatgggatcctaaagaaggccaaggaaatcactgttctatgtgatgctcaagtttcgcttatcatctttgctgcatctggaaagatgcatgactacatcagccctttctacacgttgattgacatattggagaggta

SEQ ID NO: 6317 - DNA, 356 bp, Glycine max
  Clone ID: LIB3030-005-Q1-B1-F12
ctctctgaaatgggtttcgctttggcatacacagcatctggttgttgctcaaacctacaatttcagtctctgttattcgctgctgcttcattgagatcaaaaccgtgtctctctctctgcaactctacttatcgacccaaacgcattctccagcgttctccaattgttggcgctcagtctgaaaatggagctctggttacttcggagaagcccgacactaattacggaagacaatacttccccctcgctgctgttgtaggccaagattctataaaaactgctcttttacttggtgcaattgaccccggggttggaggaattgccatatcaggaaagcgaggaactgccaaaactgt

SEQ ID NO: 6318 - DNA, 340 bp, Glycine max
  unsure (1)..(340): unsure at all n locations
  Clone ID: LIB3030-009-Q1-B1-A1
gaagaagtaatacatgacaaagaagctcaatttagcagcccaaatctgaacgttgcttacaaaatgaatgtccgagaataccaaagtctaactccctatgccacagcattagaagaaaactggggaaaacctcctgggaatctgaattcagatggagagaatctattggtatatgggaaacaatatggtaatgtattcataggtgttcaacccacatttggctatgaaggcgatcctatgcggttgcttttctccaaatctgcaagtcctcatcatggatttgcagcatnatactcttttgtttgagaaattttcaaagctgaagcggttcttcattttg

SEQ ID NO: 6319 - DNA, 387 bp, Glycine max
  Clone ID: LIB3030-003-Q1-B1-C9
gtcacacgcagttgtattgtagaactgaacaagggtttctctttctctttctctgtctgcttcttcactttctctcgtttcaatcgaaaaaaatcatgggcagaaaattcttcgtcggtggcaactggaaatgcaatgggaccactgaggaggtgaagaagattgttactactttaaatgaagctaaagtccctggagaagatgttgtagaagttgttgtgagccctccttttgtgttccttccttttgtaaaaagtttgctgcgccctgatttccatgtctcggcccaaaattgttgggttcgcaaaggtggtgcttatactggagaggttagtgctgaaatgcttgttaatttgggaattccttgggttattattggtcactctg

SEQ ID NO: 6320 - DNA, 392 bp, Glycine max
  Clone ID: LIB3030-010-Q1-B1-D7
caacctctaacctacctctttttcttctctctcaacaacttcaccttcttcctcctcgatcatgtctcacttcaagggcaagtaccatgatgagcttatcgccaatgctgcgtacattggcactcctggaaagggtattcttgctgctgatgagtcaacagggacaattggcaagcgtttggccagcatcagtgtagagaacattgaatccaacaggcgagctcttagggagctgcttttcactgctcctggtgttcttcaatatctcagtggtgtcatcctctttgaggaaaccctctaccagagcacagctgcaaggaaaccccttggtgaaggtcttgaaggaagctggtgtgcttcctgccatcaaggttgacaagggcacagtcgag

SEQ ID NO: 6321 - DNA, 393 bp, Glycine max
  Clone ID: LIB3030-010-Q1-B1-C7
ccccactccatcatttattatactttcttcttcttctttattattgttgattaatataacatacacccacatatttcatatgggtacttgttaatttgggtgtggattgttggtttgttacttgttttgttccgttcaggtgattgtttgattgagccttgaagaaatggaccacagcgctgatgcacatcgcacggacttgatgaccataacgcggttcgtgctgaacgagcaatccaagcaccccgagtcacgcggcgatttcaccatcttgctcagtcacattgttctcggttgcaagttcgtttgttccgctgttaacaaaggctggccttgctaaacttattggactcgctggagaaaccaatgttcaaggtgaagaacagaataaac

SEQ ID NO: 6322 - DNA, 292 bp, Glycine max
  Clone ID: LIB3030-005-Q1-B1-F1
caccttttcaaccgttcactccttcttctgcgtcaccgtcaccatcataatcaccatccctttccttattcttcttctgtttcatccctctccccattttctcgctctcgtttcttgtcctctactcctttctccatggcttctgattcccctttccctgtcaccgctcaaaacatcaaccccaaggttctgaaatgtgagtatgctgttagaggagaggttgtcacacttgcccagaatttgcaaaaggatttacaggccaatccaggttctcacccatttgatgagatac

SEQ ID NO: 6323 - DNA, 389 bp, Glycine max
  unsure (1)..(389): unsure at all n locations
  Clone ID: LIB3030-001-Q1-B1-B7
gtaattcgtggagggaatacttttccattacgcacgcactttaattacagacgagacaattataattaatagtaatacagacagcagcatgcgcccaccggttattctcaaaactacgacctctcttttggattcttcttcttcttcaccaccctgtgatcgcagactcaacactctcgctagacacttccttccgcatatggcttctcacgacagcatctccgcatcgccaaactccgcttctggatccgtcttcaagcacctcgtacgtgctcccgaagatcctatcctcggggtaactgtcgcttacaacaaagatccangtccagttaagctcaacttgggagttggtgcataccgaactgaggaatgaaaacctcttgttttga

SEQ ID NO: 6324 - DNA, 368 bp, Glycine max
  Clone ID: LIB3030-001-Q1-B1-F10
gatggccgttttgttccaaatattacaattggacctcttgtggttgatgcattgcgccctgtgacagatcttcctttggatgtacacctgatgattgtacagcctgaacaaagggtaccagattttagtaaggcacgagctgatatagtcagtgttcattgtgaacaatcttccaccatccatttgcatcgtactgttaatcaagtgaaaagtctgggagctaaagctggagttgtcttaaaccctgctacccccttaagtgcaatagaatatgtccttgatgtggtggatttggtcctaattaagtccgtaaaccctggctttggtggccacagttttaatgagagtcaagtaaagaaaatttctga

SEQ ID NO: 6325 - DNA, 395 bp, Glycine max
  unsure (1)..(395): unsure at all n locations
  Clone ID: LIB3030-005-Q1-B1-E5
cttagtctcactatcaagcaatgcaataacatcagtacataacataacataacatccttaaccctttgaacatcgttttgcagccatggaaacaggcatagcatgctacactcgcgggcctttcttgcctagtgtttcttccaagcactctccaccttccatttctccatcttttggcttgaggagtctgaaatcaagctctttatttggagaatcgctaagagtggcctccaaatcaacaataaacgtttcaaagacaaagaatacttcactcgtgaccagatgtganattggtgacagtctcgaagaattcctcacanaagcaacaccagataaggggttgatcaggttgttggtgtccatgggagaagcattgagaacaatttccttcaaag

SEQ ID NO: 6326 - DNA, 395 bp, Glycine max
  Clone ID: LIB3030-012-Q1-B1-D5
ggacgagaagacccttctcttcggtgacaagccagtcactatttttggacacagaaaccctgaagagatcccatgggggtcaactggagctgacatcattgctgagtccaccggagttttcaccgcggaggacaaggccgccgcacatttgaagggtgctgcaaagcaggttcctatttctgcccccagtaaggatgcccccatgtctgttgttcgcgtcaaccagcacgagtacaagccagagcttgacattatttccaatgctagctgcacaaccaactgccttgccccacttgccacggttagcaatgacaggtttggcagtgttgacggtttgattaccactgttcattccatcagcgctacccacacgactgtttatggaccatccgccc

SEQ ID NO: 6327 - DNA, 389 bp, Glycine max
  Clone ID: LIB3030-004-Q1-B1-G2
aaccaacgaatttgaaatgttgaaggtcctaagaacaatgttcaagccatcaaagctactccaaagaatgttgattgtccaataaacaaagactggaagggttgaaaaactgcttcccttaataataatcccaagcaacactggacctgctaaggctgtatgatcagttcttcagcactgaatggtaaattgactggcatgtccttccgagttcccactgtagatgtttcagttgttgacctcactgttaggctacagaagccagcaacctatgagcaaatcatatctgctatcaaggaagaatcagagggcacattgaagggtattttgggttacacagaagatgatgttgtgtctactgattttgttggtgataacaggtctaacat

SEQ ID NO: 6328 - DNA, 443 bp, Glycine max
  Clone ID: LIB3030-009-Q1-B1-G2
gcagaagaacaagtagttgagaactaagaaggagaagcaaatggcttcctcaatgatctcttccccagctgttaccactgtcaaccgtgccggtgccggcatggttgctccattcactggcctcaagtccatggctggcttccccaccaggaagaccaacaatgacattacctccattgctagcaacggtggaagagtgcaatgcatgcaggtgtggccaccagttggcaagaagaagtttgagactctttcctacctgccagaccttgatgatgcacaattggcaaatgaagtagaataccttcttaggaaagggatgattccttgcttggaattcgagttggagcacggtttcgtgtaccgtgagcacaacatgtcaccaggatactacgatggacgctactggaccatgtggaagctgcctatgtttggttgcactgatg

SEQ ID NO: 6329 - DNA, 374 bp, Glycine max
  Clone ID: LIB3030-002-Q1-B1-F12
tctctttccaccaaaccattctcagccgacgctctctccgccttcgcttctctcaattccgatctcggatccctctcccccgcctacctccgactctcactccgtcctcgtcttcccaagagacttcgcatacaggcggctgggagtacctatggaaatcactttcgtgttacaacatatggggaatcacatggaggaggtgttggttgtgttattgatggatgtcctcctcgccttcctctctctgaagctgatatgcaagtggatcttgacagaaggaggccaggtcagagccgaattacaactcctagaaaggagactgatacatgtaaaatattttcaggagtttccgaaggaatcactactggaactcc

SEQ ID NO: 6330 - DNA, 388 bp, Glycine max
  Clone ID: LIB3030-009-Q1-B1-B5
gccattttagcccaggacaaggataggttgatggatatgctaacatatccgaaagttgaagaggaaaacatgataagagtagaggaaaaggccaaaaaatttggcctagtagtggatttaaatgcaaagaagcctcgagctgagccactgtacataataaatccaagtgtggtttctgatctgtatggccattgggtcatgccattgacaaaggaagtgcaagttgcatatttattgaggaggctggactaaacatatagtaagagttcttggttatgttggtggtagagaaccaataattcatgtatataaataaagcttagactgagtaataatgtctttgaatggacttgaatttgatagaaattaacaaacaccgttttctttc

SEQ ID NO: 6331 - DNA, 282 bp, Glycine max
  Clone ID: LIB3030-012-Q1-B1-A1
gattgacaagtaattaaaataggctgcacttgggagtgctaaggaagatgctagtaacaagggaactttcttccagtcttgaattgattgcaaagcaaagttgggaagtaaataattcagtacctgaaagttgagctgatccaagtgctacaagttgtgatgggacttgcgtgtaacattcttataattcacaatgtcttaggtgcagagagaacatgccaagtttgagatgagtttaccatatttttcagattggactggcttccggtaaaaatttaagtt

SEQ ID NO: 6332 - DNA, 394 bp, Glycine max
  Clone ID: LIB3030-012-Q1-B1-A10
tcttatcttagctaccccatcacaacaaccacgatactatttctcatactctattaggcaaaaacaccaccaaatgggagaggaaaaggagcagcctaagaatgacaccgagaaaaagcccgaggaggtagcccccaagaaagacgacggacccatccctgtcgtttacaaactcgacttgcattgcgagggatgcgtcaagaagatcaaacgcacctgtcgccacttcgaaggtgtggaaaccgttaaggcggatctatcgtcgaacaaggtgactgttaccggtaaaatggacgccgagaagctgcgagataagattgccgagagaacaaagaacaaggttgatatcatatcagctccgccgaaaaaagaacccgccgttggcgaaaaaccg

SEQ ID NO: 6333 - DNA, 378 bp, Glycine max
  Clone ID: LIB3030-012-Q1-B1-A11
accaacaatggcaatggcaacccaagcctctctcttcaccccacccctctccggtctcaaacccagcgaccgagccaccgcgccatggaaacaatcctccaccctctccttctccacctcgaagcccctcaagttctcgcgaacaatcagagcagcagccaccgaccagaccacagaggcaccggttgggttcaccccaccggaactggacccaaacaccccttccccgatcttcggaggcagcaccggcgggctcctgcgcaaggcccaagtggaggagttttatgtcatcacatgggactctccgaaagaacagatctttgaaatgcccactggcgggcgctgccatcatgagggaggggcccaaccttctcaagt

SEQ ID NO: 6334 - DNA, 421 bp, Glycine max
  Clone ID: LIB3030-012-Q1-B1-A12
gaaaatcagtaaacgcacaaaggtttagggcactgaactcaagtgaagtggcgacaaacaccgcacttcaacggctggcaccgagccaggaccacaccggtggttctataaggctacatctatatggaatcccaattagttgatggtaatgatgatatgggagtttctggggatgtgggtttgagtacgtatgaagttcagatgcatcaagaaacatatgaagtggatccaaatgaggagtgtagagtactagagagttcttctgggggagaggtgggtatctgcgatgatcatgctattcaggaaccatatgaaggcatggaatttgaatctgaagatgctgctaagatattctatgatgaatatgcccggcgtttaggatttgttatgcgtgtgatgtcttgtcgaccctcaaaaaggg

SEQ ID NO: 6335 - DNA, 416 bp, Glycine max
  Clone ID: LIB3030-012-Q1-B1-A2
cagcaactccactcaattgtatgcattgatccatggctagatacattaatattgtacttttgggaatagtgttggtagtggtgagattgaaaggtgcagaggcacagcgggcgttccttgtgtttggggattctcttgtggataatgggaacaacaactttttggcaactacagctcgagcagatgctcctccttatggcattgattacccaaccggaagacccactggccggttctctaatggctacaacattcctgacttcattagtcaatcacttggggccgaatccacattgccttatttagatcccgagctcgacggggaaagattgcttgttggtgccaactttgcttctgctggtattggaattctcaatgacactggaatccactttgtaaacataatcagaatatac

SEQ ID NO: 6336 - DNA, 402 bp, Glycine max
  Clone ID: LIB3030-012-Q1-B1-A3
aataaaaatgggttcttcacagtggacctgtctgattttgttatcacttgcttctgcttccttcaccgccaacccaagagcaccaattgatgtgccatttggcagaaactatgtgcctacctgggcctttgatcacatcaaatacctcaatggtggttctgagattcagcttcatcttgataaatacacaggtactggcttccaatcaaaagggtcctacatgtttggtcacttcagcatgtacataaaattggttgctggtgattcagctggcacagtcactgctttctatttatcatccatatactcagaacatcatgaaatagactttgagttcttgggaaacagaaccgggcaaccttatattttgcaaacaaatgtgtttaccggctggaagggtga

SEQ ID NO: 6337 - DNA, 254 bp, Glycine max
  Clone ID: LIB3030-012-Q1-B1-A4
aacaagtatagtttaaaattgtgcattattgatgaagtgataaatggcagataatgatgttggtagtggcggcctgactcgagacatctgttggtatgtcagtggaaacgaaatccgttaaatactatgtggtggctgcttctactgcgtcagcatttaaggggaaccgtgtatcagtgtctttcatatatgaatatagatattacgagtggattcatacatttttggcagaattttataatacttagaattgt

SEQ ID NO: 6338 - DNA, 270 bp, Glycine max
  Clone ID: LIB3030-012-Q1-B1-A5
cggagcgattccacttctggtgagcctcctgaagagtggagggttctgcgcgaagaacgacgcatcgacagcgctgtactcgcggtgcacggcgacagagaataagactcacggcgctaaagcagggatcagaaacgtacatgaggagctcaagggggacttccagtcaatcactgtagacaactctgggtacgtggaaaccctactggaggtcgtagacgatgcaatcgctcgacaagcagttcatggagatgtacgtccacccctagt

SEQ ID NO: 6339 - DNA, 104 bp, Glycine max
  Clone ID: LIB3030-012-Q1-B1-A6
gtggaggtgtggggagagagagttgggtttcactatcacatgtctgtacgtgattacgaattctgaggtggggtttgagggagtgaggatttgggttgagagtt

SEQ ID NO: 6340 - DNA, 249 bp, Glycine max
  Clone ID: LIB3030-012-Q1-B1-A7
gtgcatttacagaacagttagattgtagctcggtagattgtgctttagttcccctgggacctcctttactgtcctaccaaagcaactgcaaggcaatgctaacgtgctgttgatggcgctgttgagcttgcagttgatcgcccgtataaagccggggacccaattgttgtgtggtgtggccctcaacctaactcaaagttgcttataaactatggttttgttgatgaatatatttccactgatcgtcgt

SEQ ID NO: 6341 - DNA, 408 bp, Glycine max
  Clone ID: LIB3030-012-Q1-B1-A8
atttaatagattctgatcgtaacggtggtgatactagtgatttacttgaaggtcagcggcaatacaattctgccatacattcaattcaagaaaaggtaagcgagcaaccatctattcttcaaggtggagaattaagaccataccaactagaaggcctccagtggatgctttctttgtttaataacaatttaaatggaatattggctgatgaaatggggcttgggaagacaatacaaaccatctcattgatagcatatcttatggaacacaagggtgtgactggtcctcacttgattgtggctccaaaggctgttctgccaaattggatcaatgaattctcaacatgggctcctagcatcacaaccattctttatgatggacggctggatgagagaaagcaatgaagga

SEQ ID NO: 6342 - DNA, 385 bp, Glycine max
  Clone ID: LIB3030-012-Q1-B1-A9
cgagagaaagtcaaccaatctgcaaggtttgcacacaaacgacatgtacaaacctcgggggaactctgtattgataacacgccattgaagctctaattcgaattccatcacagacccttttcgtttgtcctctcacagttttgttcttttggcctcgaattgatattcagcgcaaaattttctttttggctgataatatctgtaaacagtatatgcacatacatgccctattttggtctttgttttaggtgttccaatggatggcaaaatcttggattctcagaatcaggttaactttgtggaaaatttatctgcaagggtttctaattgctcccttggagacaagatatcctattccgattctcctctggatgtatatgtggat

SEQ ID NO: 6343 - DNA, 268 bp, Glycine max
  Clone ID: LIB3030-012-Q1-B1-B1
gcaagcaaaaagaaagaatcccaggcgaggagaaagatggaggggaaggagcacgatgtgtcgttgggagcgaacaagttccccgagagacagccgattgggacggcggcgcagagccaatacgacggcaaggactaccatgagccggcgccggcgccgctggttgacccgacggagtttacgtcatggtcgttttacagagcagggatagcatagtttgtggccacatttctgtttctctacatcaccgtcttaaccgttatgggag

SEQ ID NO: 6344 - DNA, 398 bp, Glycine max
  Clone ID: LIB3030-012-Q1-B1-B10
ggaaaagaagaaagacagagagagaatggaagaagaaaaacgcgtattctgaaaaagaagccacccctctctcttcgccgctgttttctctcttctgataatttcccaatctcaagcaccgaaccaaaacaaattagggttagggttttccgaaaaccctttcgttttgcccactgcaactgaaagggtttttcgaagaagctctctgcgatgttttcttcttcttcagtgatcaaatggaggttccatcacaagcccatgacgctcgtgcgactcttcacactcgcgtccctccttatgctctctctaaacgacgtcgtttcgtcagattccgacaaatcagtgctcctcgagctgaaacactagctctccgaccgcttcgggctgctcgccacgtg

SEQ ID NO: 6345 - DNA, 397 bp, Glycine max
  Clone ID: LIB3030-012-Q1-B1-B11
gtccttgtcccactccctctcttggctcatatagatatacaatcttttcaaattttcttctaaaacatgttttgctcttctcttgtccctttgatgcatagcagcaaaaggggtgtttgcataaagcagaaaagttggtaaatggcatggtatatctttaacagtggagccttttggggttgaatattctgaaaaaaaagttgaagagttcagaaagtttagatcttgttgttgttagaaaaaggtgaaaaaagttgggaaggagtgaggataataataatatgccaactgtgtggttctctttgaagaggtctctacactgcaaatcagagccatcagatgttcatgaccccaaaacaaggaagcagttaaccacaatctttaccaagaagggaag

SEQ ID NO: 6346 - DNA, 387 bp, Glycine max
  Clone ID: LIB3030-012-Q1-B1-B12
gaaatatcagatcatcgaaccaaccaaacgaaggcagaaacaggcaaagagctcatagaaattctcgtcctcttcctacataagtcttctcttatcataaacgcgtgttgctcggataaggttgtgctgcggtgattcactcgtactttgcttaatatggcggttgagaagttgagcattgcaaaagatgtgactgaattaattggcaaaactccattggtatatctcaaccgcatcgtggatggctgtgttgccaaagttgctgcgaagctagaaatgatggaaccttgctccagtgtcaaagacaggatagggtatagcatgattgtagatgctgaggagaaaggactcatcacaccgggtgaaagtgtcctcattgagcctact

SEQ ID NO: 6347 - DNA, 383 bp, Glycine max
  Clone ID: LIB3030-012-Q1-B1-B2
tccaaggcaaaaattgcggtcggttcatccaaaaccggaagcagcaatgggaatcgatctcaaggccggaggtaaaatcaaaacaaccaacttaacagcacccatgtcgagtgatatctatctcaagctcttggtcaagcgttatcgcttccttgttcggagaactggcagcatattcaatgcctttatactcacgagattgttcatgaacaaggttaacaatcccccattgtctttctcaacgttgattaagtatactaaagggaaggaagattagattgctgtggtggtgggcaatataacctatgattttcgtgtatatcaagttccaccctttaaggtcacagtacctcacgtttacacacactcctctcgcactaatt

SEQ ID NO: 6348 - DNA, 291 bp, Glycine max
  Clone ID: LIB3030-012-Q1-B1-B5
tgcttatgcattcctcctattatcattatcgctcgattcttttggacactttcttttccatctatctccttcaccgaacatctttcaaggttctctcacccactacatccccccattcaagccatacggatggcttctgtatttcttatcggaatttcaggatctatatttctggggagagatacagcatcagtactagagatcatcatgaggactagcaagtttgaaggatcgtgtgggagaagccatgttttgagtgtagaggtctgtgagtctcgttcagttacaagt

SEQ ID NO: 6349 - DNA, 133 bp, Glycine max
  Clone ID: LIB3030-012-Q1-B1-B6
cttgtatctctatctcctactcgacgatccgatcttccatcacgcatcgatcgttaccgctatataaaccgtaacggacttccctccagcaaaaggtagggaccacgtcactcggctcatcccttcggtgggg

SEQ ID NO: 6350 - DNA, 311 bp, Glycine max
  Clone ID: LIB3030-012-Q1-B1-B7
gggttcttctcccactcttttcgccaccattgttgaaacctcacaacattctccatagtttcacccttcttcggatcagctcaaatgggtaagcatcttctcttgctggttctcactctccaccgtgtccgtctattcgccactctccatgtctcagctgccccttccactacttcccctgcacagattgtaaatgggtttctctcgaatgctgtgcctgctttcaccaagtgggtgtggtcgctcaaggccaccaccaagactgcggtttcgagcaggtcgatgatcaagttctatatttggtacaatgt

SEQ ID NO: 6351 - DNA, 373 bp, Glycine max
  Clone ID: LIB3030-012-Q1-B1-B8
gtgaaatgaaaaaaaaaaaaaaaattctcccttagctgcttttcttcctctgagaaaattctcagcaactctaaaaagggaaaacaacaccattacaacccatcaatcaaaaccccatttttcttcttgaagccaaacaaaatgaaagaaaactggagaggggcaacatcattacatcccatcaacccaaaatcacatcttctctgggaagccaaccataagccagaaaaaagaaaaagggtaggaaagtgggggaagaaaatcatgaagaaaccaaatccccttagttgatgttgttgttttcagcaccttgtaaggcaattaagttgttgatgatcacgaagttgacttttttcttgggatcatttgggca

SEQ ID NO: 6352 - DNA, 351 bp, Glycine max
  Clone ID: LIB3030-012-Q1-B1-B9
gtggagaatagcagtcatctcacgccacgaagatttctttggctctgtgctttgcgtccgagtctctcccagagcgacagcatccatcttctttcacagtttgccactacattatggttcgtcgtcatttcggattgaatgattcaatagcttagcaaacgatgccatggcaactctgcaatctctgccaccttctttccgtcgatcaatcctagccccaaattcccactcattcacagccactccctttaactagtcccccaaattcattgcctcaaagggtgtcatcgttaggctcaggatctccatcagttctcccagggtttcggtttccagttcggagtatagtcc

SEQ ID NO: 6353 - DNA, 179 bp, Glycine max
  Clone ID: LIB3030-012-Q1-B1-C1
tgcagattgagacattccaccatgcagacacagtcaccgtggaatattagattcttgatcttctcgtatggcttcatcgcttggctaccagaagtacggctgtcagtgatactcgcatagtatggcctgggaacaggtctcctgttgtgactgctttgcatggcacagatgagcaccta

SEQ ID NO: 6354 - DNA, 259 bp, Glycine max
  Clone ID: LIB3030-012-Q1-B1-C10
caataactatcttcttccaaataaaaaacaaaaaagaaaaaggaatgagatatgaaagggttaattgaatccaaacaaaagaagagatcatcagaatgggcacggtttggacttcgatgatagtattgttgcgttgcctgaacagatcatcggttctgggcgaggacccatacatctactacatatccaacgttacctacggcaccattgccccattgggtgataaccaacagggtatcgtcatcaacggtcattttcc

SEQ ID NO: 6355 - DNA, 375 bp, Glycine max
  Clone ID: LIB3030-012-Q1-B1-C11
gttcaaagggctatggtttcgtcaggtttggagatgacaatgagagaacccaggccatgactcagatgaatggtgtttactgttctagcaggccaatgcgtattggtgctgcaactcctaggaaatcatctggccatcaacagggtgggctgtcaaatggcacagccaaccaatctgaagcagattctactaacacaactatatttgttggaggactggaccctaatgtttcagatgaagatctcaggcagccattctcccagtatggtgagatagtctctgttaagatacctgttgttaagggctgtggctttgtccaatttgcacacacacataatgctgaagaggcattgcacaagctaaatgggacaccca

SEQ ID NO: 6356 - DNA, 400 bp, Glycine max
  Clone ID: LIB3030-012-Q1-B1-C12
gtgagaaagagagagagagagagagaaactgagagaaattcgcaaaccctaatttcggaaagatcggcgatggctgcctccaaggatcgcgagaacttcgtctacatcgccaagctcgccgaacaggccgagcgatacgaagagatggtggaatcaatgaagaacgttgcgaatctcgacgttgaactgactgtggaggagcggaatttactttctgttgggtacaagaatgtgattggtgctcggagagcatcgtggaggatcctgtcttccattgagcaaaaggaagaaacaaaagggaacgagttgaatgcgaagcggattaaggagtacaggcagaaggttgaattggagctttcaaacatctgtaatgatgttatgacagtgattgatgagcaac

SEQ ID NO: 6357 - DNA, 259 bp, Glycine max
  Clone ID: LIB3030-012-Q1-B1-C5
gttctgggctttggctttgagttatgcactcagttgttagctagcttctacatgctcatgcacctgaaactccaaccggcaaactcactacctccatgcgaaggagcattatcataacttccgtcatgccactgggattattacttccactaatagaggtggaagtccctcgcatcaatagtatatcaccagcatacactcctaccatgttgcacgtgcagcacccaaactctcacctttaagatcacaacctcaacgt

SEQ ID NO: 6358 - DNA, 185 bp, Glycine max
  Clone ID: LIB3030-012-Q1-B1-C6
ctcctgtcaatgaccatggatgctgtgcgatctgttgggcattctcagctatcggttcagtctaccgcatccatcacatactcacacgcgacctgactgcgttatcacagcatcaactggttgattgtgggacgccatattaccagcgatgcagtcgacgacttatggactatgcatctgcgtcc

SEQ ID NO: 6359 - DNA, 376 bp, Glycine max
  Clone ID: LIB3030-012-Q1-B1-C8
ctctctccctctttcctatcacactttctagatagctagcctgtaagatatatatatagatatttcatatatatcctatggtccgtgagtgcccttgttctgtaccaaccctttcttccacatgttgagtttcagcatcgtcctctcttgagtccccatatcaaatacccaccgaattcaaccccccatataacaaatctcctcccatcccatttttcagcaccaaagtttgaaacttttctcaattgggttgaggagagtttgactcaaatttttatttttctaacgaagcagtagctattagaagtgcaaaattaaatgtccaacatcttcttgttgatgtctgagattcatgtatccgattctcagtgaaatc

SEQ ID NO: 6360 - DNA, 276 bp, Glycine max
  Clone ID: LIB3030-012-Q1-B1-C9
tccaacttcactttggtggcagttgaacgagtttgcaaccccacacacagtaaccatcacccttaaaaatgtcatccccctcgccggtggctacggtggtccccgccgccgcgctgtacgagtgcgccacaggggtggaagaatgctacgacaccaaggtcggagtcaacggtttgatcgattcgggaatcagtaccatcccgcctttcttcgtccacccgagggaaaccttagcggacctcaagcgcggaacctatccctggtctccgccggaca

SEQ ID NO: 6361 - DNA, 376 bp, Glycine max
  Clone ID: LIB3030-012-Q1-B1-D1
cagtaaagcaagtgaagtcgtgcacttccccaacactcacaccatggatttgctctcaatctctccctctcaccctttaccttcttccattcgcaccctttcgtcaaaccctaagtcccccatttcctcctccttcttcacccccaaaccgcattcacgcttctccaaaccctccaaaacccccgcaaggtgtgtcttcacggcctcgccaatcccctccaaaatcccaaactttgggtctcaatctcgcaacccgggcctcactttcgagctctccgcgccccagacgccttcgacggctgcgataggcacggacggcgacctgatggggctgttgctgagggagaggattgtgttccccgggagcagcatcgac

SEQ ID NO: 6362 - DNA, 54 bp, Glycine max
  Clone ID: LIB3030-012-Q1-B1-D10
gtaatttctacctcattaagagactgctctggctacctcaatgagttcttcctc

SEQ ID NO: 6363 - DNA, 373 bp, Glycine max
  Clone ID: LIB3030-012-Q1-B1-D11
gagaaaataaaaaaataaaaaattcaggttctcaaaaactgtacgcaactagaaacaatggctgagatgaagaagaaagcagaactgatcttctttcccataccggagattggccacttagcttcattcctcgaattagcacaactcctaatcaaccatcataaccatctttccatcacattcctctgcatgaaactcccttacgctccctctttagatgcatacatcagatcagttatagcctcacaacctcaaattcaagtcattgatctccctcaagtagaaccacctccacaggaactattgagaccactatcacactacatctggtcctacttgcagaccctcaaaccccatgtcaaaggtatagtgc

SEQ ID NO: 6364 - DNA, 416 bp, Glycine max
  Clone ID: LIB3030-012-Q1-B1-D12
gagtactctgtggaaactttggaaagagatcttaagaacacgaggaaatactacgggagtggaaaaacaaaggaagcaccatggagagaatcacagcttaaagggttgcacaattttctcgtggaaaaagaggaagaaattgtgacggccctcaagcatgatttggggaagcattacgtggaggcttttagagacgagcttggaacattaatgaagaccttaaacttggcaaccaagtctttgaaaaattggatggcggggaaagaggcaaagctgccacgaatagcactgctctcaagtgcagaaatagttcctgagccacttggtcttgttctcataatctcatcatggaactttctctttggactttccttggagccactgatcggagcagttactgcggggaacagtgtggt

SEQ ID NO: 6365 - DNA, 409 bp, Glycine max
  Clone ID: LIB3030-012-Q1-B1-D2
aaaagacatgtcggtgaaggagtgcgagcaccacaaggggaagaagaggaagatcttccggcaagtgttctggtgcttagtggtgttccttttcatcgtgctggtcacaattcttttgatatgggcaatccttagacccaccaaacccaccttcacgctccaagacgtcaccgtctacgccttcaacgccaccgtggcgaacttcctcacttcgaattttcaggtcacgctcatctcgcgtaacccgaacgaccgcatcggtgtttactatgatcgcctcgaaaccttcgtgacctatcttagccagcacgtcacgtaccgaaccgccatccctccgacatattaatgccataaagagatcaatgttttggccccctttgtttaagggaccacatcccctctcgccctt

SEQ ID NO: 6366 - DNA, 405 bp, Glycine max
  Clone ID: LIB3030-012-Q1-B1-D8
ctctttcacctcttgttttccccaatccttttcgcctttgtctgcgaatggcgtcgttcgatcaggcacctcccggcgatgtcaaatccggtgacaaaatcttcaggaccaagtgcgctcagtgccacaccgtcgaaaaaggtgccggtcacaagcaaggacccaatctgaatggtttgtttggaaggcaatctggcacaactcccggatattcctactcttcagctaacaagaacatggctgtgacttgggaagaaaagacactatacgattacttgcttaaccccaaaaagtatattccacggacaaagatggtatttcctggtcttaagaagcctcaggaacctcctgatcttattgcatacctgaaagaatccactgcacagtgattatgcactttcaccc

SEQ ID NO: 6367 - DNA, 319 bp, Glycine max
  Clone ID: LIB3030-012-Q1-B1-D9
gtagttgcgaagtaagaaggacatccaaatggcttcctcaatgatctcttctccagctgttaccactgtcattcgtgccggtgccggcatggttgctcgattcactggcctcaagtccatggctggcttccgctccagcaagaccatcaatgacattacctctattgctaccaacggtggaagagtgcattgtatgcaggtgtggtcaccagttggcaacaagctgtttgagactctttcctagctgccattccttgatgatgtccaattggcacatgaattataataccttcttatgaatggatggattccttgcttg

SEQ ID NO: 6368 - DNA, 244 bp, Glycine max
  Clone ID: LIB3030-012-Q1-B1-E1
cacaaccacaagaagctgattcttgttaacagttacagaatgaatgctcactggactcgttctcccatatttacagttgagaaaaacttgtccgttaagttttaaatctaagcgatggctcttccatggttcgtcatctgcttcaagatctgcatttcattcacacaccataccattatgttactcataacacaccctttccttaaacttaggctcacactcttctcaatccataaccctttaa

SEQ ID NO: 6369 - DNA, 223 bp, Glycine max
  Clone ID: LIB3030-012-Q1-B1-E10
tcttaatcaacttcacaaataaagtgtcatcactttctcttcctttgctttgggcccatcactcatatgattgccttgcagtaaattaaatagtgcagtggtgaagataaagggacagattcataagtatgggaaagtgataatagttcagtctggagcacctcagttcaaggtaatcagatattcacttgtcacgtacattggtggtacgctgttcggtgta

SEQ ID NO: 6370 - DNA, 402 bp, Glycine max
  Clone ID: LIB3030-012-Q1-B1-E11
acaaaatctgcatgtggggcgtcgttgcttaccgcgtcccacactcctctttctttaattctgaaatttataataaaagaagagagagagactctgcagtatcctaggccttttcttttgtttccttttcaactttttcagttactatttctattcattcaaaatatatccattaatttattatttccaccccactataaatatgcatccttgcacaccaagcactgccacactactccgattcttgcctgcgtcttcctcgcaatcacaacacacccagttcatcctctgaatctgatccatccttttaatcttgttctgtgcaattgcgtgcaaatgcggtgaagaacaacggttcggtgtttattttaacaggatatggccattgaagcacagttgttt

SEQ ID NO: 6371 - DNA, 423 bp, Glycine max
  Clone ID: LIB3030-012-Q1-B1-E12
caattctttatgcatgagaactagaccacataaggtcaagtgagttgtaggagctctcgatgcaggcattggactggggacaccgtgctgtttgtaacaatttattgattactgtaaatccaaggtgtttactgtctgtagtaacgtttatgttgtatattgttagttcatggcaggagaaaaaagggagtaagttttcatatatactctctctctctctctctttttcttctttttttttaaagattatgtatccatacttgagaatgatacgtgtatggtgtggaacttggttccaaaccgtagccagaatgatgatgggcttgaaagtgaaagagccagcgagtcctgaatgtccaaagtattagttggaagcagttattacgcattatgctatttcttgcaatgagtttgataattgat

SEQ ID NO: 6372 - DNA, 263 bp, Glycine max
  Clone ID: LIB3030-012-Q1-B1-E2
atatcttatttcatttttttttcggttcctattcctactctgcatctggaattctcaagcaggttcttacgcctgcttgctagttcaggtttgatggtcttgggatacatatagacatttttctcggtgtggtggtgctcttcgttgggttttcggtcctcccggagtcacgatcatcgctctgccgattcttcaagttgtgatgtttacgctcatctctatacgcgtactgacctcatatctgtccctttatcctttcctct

SEQ ID NO: 6373 - DNA, 217 bp, Glycine max
  Clone ID: LIB3030-012-Q1-B1-E5
gggctttgcagttagttaggcccaataatatattcaaggcccgtgatcttgtttatcaagacggaactttttttttccttctctaatatttgttgtatccgtcgtctcggtgcttaggtgtgggtttggagatgcaatgttatatgtgaataatgtgatactaatccgcatggagaaacaaggaaacatagagatttgatttagttcaaaaaagaaa

SEQ ID NO: 6374 - DNA, 242 bp, Glycine max
  Clone ID: LIB3030-012-Q1-B1-E6
gggctttgcagttaattacgccctctaagataatcaatgcccgtgatcttgtttatcatcaccgcactttttttttccttctctaacatttgttgtaggcgtcctcacggatctgaggtgtcggtggggggatgcaatgtcacatgtcaaaagcgttatcataatcttcatagagagacattgtcacgtatagatttgatttagttcaaaacgaacgagattgcactgacaaccttactatt

SEQ ID NO: 6375 - DNA, 174 bp, Glycine max
  Clone ID: LIB3030-012-Q1-B1-E7
gtaagtttcggtaatggaatcggcagtggctatcaaatgcctctgctgttgcgtatcacatcatgggctcagaggccccccactcctctccggggcagcgctgttccctctcatcacgcttctcgggggggacgtaccctcgggtctctttggagtgacatatcccgtcatggg

SEQ ID NO: 6376 - DNA, 389 bp, Glycine max
  Clone ID: LIB3030-012-Q1-B1-E8
attttgctaatcaatggactcccatttggtgtggtgataacatgggcctgagatatgaggtccacatgtgggggaataaggttgaggtcaatttaggtgaatggacatgcacttgtggagtatggcaactaacagggatgccatgccgacatgccattgcaacaataactcacaaaggacggaagcctgaggacatgtgtcatgagtggctgtcaatagaagcttataataagacataccagcattttattgaaccagtccaaggaccacaatattgggcccagacacagtatacacaccctgttccaccacatacaaaggtccaaagaggaaggccacacaacaatagaaggagatccgtacatgaggacaatgtcacaggacataac

SEQ ID NO: 6377 - DNA, 322 bp, Glycine max
  Clone ID: LIB3030-012-Q1-B1-E9
ctctaatggaattcattcatggcatttcagaaaactcaattggtaatcctgcgtcgcttcacttctcacacaatcttcgatagcgcagaatttacagtcggtgagaagcacttggcgtctaatattcacgtacgggagtagcattagattggttcggaatcaaagttatcgaaatcgatcatgcaggtggtgtcaaatgtatcaatggtcagcttcctgtgttggcggtgaccacggtagagtagaaatcgtggcatcagacacatctaacgttacaattagaagggtgtgacaatgagattgattttgatagatgatgaca

SEQ ID NO: 6378 - DNA, 409 bp, Glycine max
  Clone ID: LIB3030-012-Q1-B1-F1
gtttctgtctctgtgtttgaagctgatgattccgaacgagcgaccttcttcgtttctcgcaaagtttaagtcatcatgggtaaggaaaagactcacatcaacattgtcgtcattggacatgtcgactctgggaagtcaactaccactggtcatttgatctacaagcttggaggtattgacaagcgtgtgattgagaggttcgagaaagaggctgctgagatgaacaagaggtcattcaagtatgcctgggtgcttgacaagctcaatggtgagcgcgaaagacgaattaccactgatattgctttgtggaagtttgaaaccaccaagtactactgcacagtcatcgatgcccccggacatcatgactttatcaagaacatgattactggtacctcccaggatgattgtg

SEQ ID NO: 6379 - DNA, 353 bp, Glycine max
  Clone ID: LIB3030-012-Q1-B1-F10
aaacccttgagtttgttcgtcatgcatggatcaatgtttgttctggaggaattatagggcttggataagcagaggaggatcgtgtacgtttgttacagacattctctacacttctcacccatccagagagtgttcctattaacgcacttgttgctctaaatggaacccctcttaacgatcaaaatcctgttgaagtatgggagatgactcgcatcatatcagctgaacgtatcgtaatctcaaactcattggtcaggttatcagctgacacatttcgattctccatgccagagcaagtattgttctcacttccaggagcatattcaattttcaccggtcaaacctgtctcact

SEQ ID NO: 6380 - DNA, 88 bp, Glycine max
  Clone ID: LIB3030-012-Q1-B1-F11
agagaattggattggacgcagttgtgtgcctcaagttttgcttcttacccgctgatcgcggtgtttcacacagggttgcccactcttg

SEQ ID NO: 6381 - DNA, 422 bp, Glycine max
  Clone ID: LIB3030-012-Q1-B1-F12
gtgcctgttatcaaatctccaaaagctcaaagaaactggtattgtgttcggcataaggaattaggattgatttcagggtgtattctgtacctttttcatttttatctttgttttttcatttgtgctttctgaagagctttggagatgtatgatatagaattgtaggtttgtgttgttagggttgagaaaaatgggatctcagggtggggcagtgcaagagccaaagactactacccctttggctaggcaagggtccttgtataatctgacccttgatgaggtgcataaccaacttgggaatttggggaagccacttggcagcatgaatcttgatgagttgctgaagagtgtgtggagtgctgaagctggtggtggtggtgaggcttctggctgggactttggtgttggtgatgctactaaca

SEQ ID NO: 6382 - DNA, 225 bp, Glycine max
  Clone ID: LIB3030-012-Q1-B1-F2
tgcacgggcttccgggattagtgggaggggtattatgccccgtctctctttattggtggtgcaactgcgatggcttatggaaaattaattagtttggctgttgctgagtctaatcccacaattaacctctctgtgttggaactggcatcaccacaagcttatggcctggttggaattgcagcgactcttgcatgagtttgtcaagtaccaactactgtagttttg

SEQ ID NO: 6383 - DNA, 394 bp, Glycine max
  Clone ID: LIB3030-012-Q1-B1-F5
caccaatcatgtaccgctttgcaacctccctcgcctccaaagctagaattgctaggagcagcactcaacagattggaagtagggtcagttggaacaggaattatgctgccaaagacattaagtttggtgtggaggcccgggctttgatgcttaagggtgttgaagagctcgccgatgccgtcaaagtaaccatgggccctaaggggcgtaatgtggttattgagcaaagttttggagcacccaaagtgacaaaagatggagtaaccgttgctaagagcattgaattcaaggataatgtcatgaacatcggtgccagtctcgtaaagcaggttgccaatgctaccaatgatgtggctggtgacggaaccacttgtgctacaatttccactaaagc

SEQ ID NO: 6384 - DNA, 82 bp, Glycine max
  Clone ID: LIB3030-012-Q1-B1-F6
gcgctttccctctcttccgtgtgtgtttcctgtgctctcagtgctcttctcttctcctctcccatttccccgcttgcgcctt

SEQ ID NO: 6385 - DNA, 271 bp, Glycine max
  Clone ID: LIB3030-012-Q1-B1-F7
cgaaatggagactaaacagagttcggtgacggttacgctcagttacggcgcgttgacgtgcgccgcggaatttctcgcgactttgctagcttctgctgtcgtcaaagcctcgcttttggccacgggtcgctaccggctgctattgatcaacacgcctactgccaaaggagagagcaaacttcagactgaggacaagcaacgtgatgcatagggagaagatggtcacgatgatgaaggcgaccatgacgaccatggatatggtggatctggc

SEQ ID NO: 6386 - DNA, 150 bp, Glycine max
  Clone ID: LIB3030-012-Q1-B1-F9
attttctctcacctgaagatgtcttgctgctgaggtaagtgtggctgcagaaactcatggaagtgcggtaagggctgaggcagctgcactatgtaagtagatatgatctagagtgagtcaacgataagcgggagcttgctaatgggatgt

SEQ ID NO: 6387 - DNA, 437 bp, Glycine max
  Clone ID: LIB3030-012-Q1-B1-G1
tttgagcacaatggcatccacacaatgcttcttgcaccaccatgccctcaccactccaaccagagcttcatcacagcgcttagttgtgagcaccaaaccaaaccacattgtttgcaaggcacaaaagcaggttgtccaagagggtgaggacactactaacattgtctctcgcaggttggccctcactgttctcattggtgctgctgctgttggctctaaggttgcacctgctgatgctgcctatggagaagctgccaatgtgtttggaaagccaaagacaaacactgacttccttccatacaatggggatggattcaaactctcaattccctcaaagtggaacccaagcaaagaggttgagtacccaggtcaggttcttagatatgaggacaattttgactcaaccagcaatgttgctgtcatggtcactgcaactg

SEQ ID NO: 6388 - DNA, 416 bp, Glycine max
  Clone ID: LIB3030-012-Q1-B1-G10
ttcagcttttccctcgttgaaatgaaaatgggttcttctttgtggactttgtgtctaattttggcttcactagcctcttctgcattctgtgcctttccacggaggccagtggatgttccattcggcagaaactacgttcccacttgggcttttgatcacatcaaatacttcaatggaggttctgagattcaacttcatcttgacaagtacactggtactggcttccagtccaaagggtcatacttgtttggtcacttcagcatgaacataaagatggttcctggcgattcagctggcacagtcactgctttttatttatcttctcaaaatgcggagcacgatgagatagattttgagttcttggggaacagaacacgacaaccttacattttgcaaacaaatgtgttccccggagg

SEQ ID NO: 6389 - DNA, 402 bp, Glycine max
  Clone ID: LIB3030-012-Q1-B1-G11
aaaaaccgggaactttatatcactggagagagctatgcaggccattatgttcctcaattagccaaggaaatcttgacctacaacgcaaaaaccaagcaccccatcaatctcaaaggaatcatggtaggaaatgcagtgacagacaactactatgataacttgggcacagtgacgtattggtggagccatgctatgatctccgaccagacttaccggcaactaatgagtacatgtgattttcacaggcagaaggaatctgatgagtgtgagtctgtgtatagctatgccatggatcaagagtttggtaatattgatcagtacaacatctatgctcctccatgcaacaactctgatggtagtagtagctctgccacccgccgcaccatgcgtttacctcaccga

SEQ ID NO: 6390 - DNA, 377 bp, Glycine max
  Clone ID: LIB3030-012-Q1-B1-G12
cgagtttttgaggatggggagcaatctcttggtctttgtttcaatggaaccctagagataaattgctccaaggaaatcaaaattcagggaattattggaccttgcacttcgttggaaaagaaagggccttctgtttctgatactgttataggagagggaaacacaacagcatggaagatgtgtggccttgacaagagtacatgcttgactgtgatgtttgatctttcatcaagtgatcgttcaaacacccctggtgctatcaacccacaattgtacctacagttccttacaagttaccaggacccaagtggtcaatcagtgcttcgtgtcacaacagtaactagaagatgggtagataattctgttagctctgaaga

SEQ ID NO: 6391 - DNA, 377 bp, Glycine max
  Clone ID: LIB3030-012-Q1-B1-G2
cgattccaatcctaggaggcgggatatggctgagcagccggggtaacaataccgactgcctcaagtgcctgcaatggcggcgcatcatcagctgcgtcagcatcatggtcgtgtacctggaggggttcacccgcgcgtgttactgcaacaccttcctcaggctgctctgcctcgtcgtcatgttcctggtcattgccgttctgatcgggttcatcatattcgcctacgttgtcaccgacaatgggtccggtccgagggtgatgaaccacgcttacttggcgtattatcttgaggactattccgggtggttgtgagatcaccttgttactgataactactgggggaacattgttacctgtgttacggactctatcaca

SEQ ID NO: 6392 - DNA, 164 bp, Glycine max
  unsure (1)..(164): unsure at all n locations
  Clone ID: LIB3030-012-Q1-B1-G4
ctcgagctcgagttgattcggntaaagggatgtctcaggcacctttttgctaaaggaaaggttttttcaccgctctttaatgttgttggaattggcgttttaatgcatttagcatcttccatttttgcatcactggggggaaagttggttgcgggtcgtctcct

SEQ ID NO: 6393 - DNA, 266 bp, Glycine max
  Clone ID: LIB3030-012-Q1-B1-G5
cttctcgtccgtaagttgagctcctagactcgaggtcctcccaattgtgctccttcaatttctgtggtcactaaatttgatgatggtacacctgcacctcgtgctctgatgttgctagaagccatatggggcttaacctgccaagactactaatggtggcagccatcatcagatgatgcaactatctagttagatgaagtggttgattgactttctagatcctccaaggatctaggtcggggaatttgtatcccaaattctgaaca

SEQ ID NO: 6394 - DNA, 135 bp, Glycine max
  Clone ID: LIB3030-012-Q1-B1-G6
caaatcgatgggtcgttgagcgactagactatgtgtactcctatgtggagtcattcaatttctgcgcttactccagtcgtggtcgctataccgggacccagtgctacaaattcctcgatgtcatcggggggatag

SEQ ID NO: 6395 - DNA, 82 bp, Glycine max
  Clone ID: LIB3030-012-Q1-B1-G7
catatcgttcgattatcattcgacgaaaacacgggtattcctaattatgttgcttcacttattgcgctcacaaaatacgatt

SEQ ID NO: 6396 - DNA, 435 bp, Glycine max
  Clone ID: LIB3030-012-Q1-B1-G8
cgaacacaatgtccaactccaccaccggcaccaccgcggccttaccaccgaagcccacctgggtcctcccataccgaaccgagaatctccgcgaggtctacaccctaagccgaaagctcggccagggccaattcggcacaaccttcctctgcacgcacaacgccacgggacgcaccttcgcctgcaagtcaatcccgaagcggaagctgctctgcaaggaggactacgacgacgtatggagggagattcagataatgcaccacctctccgagcaccccaacgtcgttcgcatccacggcacctacgaggacgccgcctccgtccacctcgtcatggagctctgcgagggaggggagttgttcgacaggattgtgcagaaggggcactacagcgagcgccaggctgcgaagctcatcaagaccattgttgacgttg

SEQ ID NO: 6397 - DNA, 54 bp, Glycine max
  Clone ID: LIB3030-012-Q1-B1-G9
caagctatacctgatccaaaggagtatgcttagtgagtttgattgcatgtttca

SEQ ID NO: 6398 - DNA, 411 bp, Glycine max
  Clone ID: LIB3030-012-Q1-B1-H10
taaaaaatcaactaccttagaaaaggagtgaaaggaagaaaagagaaacaagaatggaagtgacacaagtactgcacatgaatggaggctcgggagaaacaagctatgcaaacaattccttagttcagcaaaaggtgatttttttgacaaagggtatgagagaggaagccataagcagcctctaccgcagcatgctcccaagaagccttgcagttgcggacttgggttgctcttctggaccaaacactttcttcgtgatatctgaagctataaaatcggtggagaagctttgtcgagaactgaatcatcagtcaccagaataccagatctacatgaacgatcttcccgggaatgatttcagcaacatcttcaagttccttgacagcttcaaagagaaactgtgtaatgaaa

SEQ ID NO: 6399 - DNA, 400 bp, Glycine max
  Clone ID: LIB3030-012-Q1-B1-H11
ctaaaattctctgcattttcttcgtcacaacaacccttctctgattcgtcttcaatttttgtttccaaaaccttaggtcagatttctgtgtttgtcgtttctgataatctggagtggagctaggtcaagatgccgtgggtttccttgtttgtggatcacaaaagaaattgtgttcgcttggtggtgttttttcgtgtgattctgtaatttaattagctcaggtgtagtcccattaggttgcgaagcaactcttttcattaggttgttctccttttcatttccaaagctgttggggggactgaggatgtactttgcggtaacaataaagagataccaagctgtgaaggaagttggacaaattaaaatgagtgttggagttattggatacaaccaattgatg

SEQ ID NO: 6400 - DNA, 424 bp, Glycine max
  Clone ID: LIB3030-012-Q1-B1-H12
gttcatcccttctcaagccaccgaagcctcactttttgaaattacttgcatagatagataatcatggctatgatgaaacgtgctgcttcctctgcgcttcgctctcttattgcctcatcctccaccttcaccagaaaccttcatgcctcaggtgaaaagaagaagattgtgggggtgttctacaaagggaatgaatatgctaaattgaatccaaattttgttggatgtgttgaaggtgcattgggaatacgtgagtggctggaatcacagggtcatcagtacattgtcactgatgacaaagaaggacctgattctgaacttgagaaacacattccagatgcacatgtcatcatatctactccattccaccccgcctatgtcaccgcagaaagaattaagaaagccaaaaatttggagctgcttt

SEQ ID NO: 6401 - DNA, 417 bp, Glycine max
  Clone ID: LIB3030-012-Q1-B1-H2
gatcaggtcttgaaaggacaacaatgccgccgacccaacttccgttaccactcttcacctcactcacaaagctctttccgacataacgtgtttggccaatttcgtaaacttggaaaagcttgacctcaagctcaacaatctcacttctcttgagggattgagatcatgtgttaatttaaagtggctatccgttgtagaaaacatattagaaagcttggaaggaattcaaggacttacgaagctcactgtgctaaatgcaggtaaaaataagcttaaatctattgatcaggtcatgtcagttgttagtctccgagcactgattttgaatgaaaatgagatttcctctatttgcaaacttgatcagctgaaagacttgaacactcttgttctatccaaaaatcctatacgtaaaattgg

SEQ ID NO: 6402 - DNA, 437 bp, Glycine max
  Clone ID: LIB3030-012-Q1-B1-H3
gagatgtgcacacgagaattatgaagagaaactatgaacaagtacctgaatggtggtttgttagcattttgcttctaatgattgttgtatctttgataacttgtgaaggctttggcaagcaactccaattgccatggtggggagtcctaatgtctcttgtaattgcgttagttttcactttgccaattggggtcattcaagcaacaacaaacacgcaagtcggactcaacgtgattacagagttaataattgggtacatttacccaggaaggccacttgctaatgtagccttcaagacttatgggtacatcagcatgtcacaagcactcgggttccttcaagacttcaaattaggccactatatgaaaattcctccaaaatctatgttcgttgtgcagttggtaggtaccatagtggcttcaggtgtgtactttggc

SEQ ID NO: 6403 - DNA, 442 bp, Glycine max
  Clone ID: LIB3030-012-Q1-B1-H4
cgtacaaaagctagggattcagtggttctcccccttctggaaaagaccctcataggtctcttcctcgctgcggtggtcgccatcgccgtctccaccctccgcggccggaaattcaagctcccaccgggcccactccccgtcccaatcttcggcaactggctccaagtcggcgacgacctcaaccaccgcaacctcaccgatttggccaaaaaattcggtgacatcttcctcctccgcatggggcagcgcaacctcgtcgtggtttcttcccctgagctcgccaaagaggttctccacacgcacggcgtggagttcggctcccgcacgcgcaacgtcgtcttcgacatcttcaccggaaagggccaagacatggtcttcaccgtccacggcgagcactggcgcaaaatgcgccgcatcatgaccgtccccttcttcaccaaca

SEQ ID NO: 6404 - DNA, 394 bp, Glycine max
  Clone ID: LIB3030-012-Q1-B1-H5
cacgtctgatcttggactttacagatcatgtttggacagagtgcttctctcaatacttgggaagatggatgcatcttgacccatgtgaaggaatctatgacaagccattattatatgaaaaagggtgggggaaaaaactaaattatgtaatagccatatcaaaagatggagtttatgatgtcaccaaacgatacacaaggaagtggcatgaggtcctatctcgacgtactatccttacagagccttctttgtcaactttactctctaatataacaaaagaaagtcgaataggctttgcatctcaactagtttcaattatctgaatcccatgatatggacgaaaacaatgaacttgagaggagtttacatgctgaagatgacaagttactctcat

SEQ ID NO: 6405 - DNA, 398 bp, Glycine max
  Clone ID: LIB3030-012-Q1-B1-H6
ctgtggagaaactgcagctggatgtccaaccatttgatccaccaactcccataaatctttgccaaaaattgggaaatagcatggattcatttgagcacacaccaagcagccgtatctccaaagcacaagatactgaagatgactctgttgactatatggaaaaaattggtcagggaaccttcatacggcggataggtctgaaaggaatgcagctttggtttcacctttgctagccacatatactcagagaaagaacaagtctgttcgttttgaaagtgaaactgacttggtaacctatggaagctcatcatatgattgggatatgaaggaaaacaagtcaccaaatatccaaagtgcatattaaccatctccttatcctaccccgttgaagttaattg

SEQ ID NO: 6406 - DNA, 197 bp, Glycine max
  Clone ID: LIB3030-012-Q1-B1-H7
ctctacttcatctgtggtttactgggtgcgtttgtgttttattcgacttttgtgctcttgctttgcgtctgcttggttccctttgcctttcggcgtggggcgcttcttcctgttcgcctggtggggtcgggtttccgtgcctgctttttccttcttctgcttctctttcccctctgcgctttcgtccgcctttgttt

SEQ ID NO: 6407 - DNA, 430 bp, Glycine max
  Clone ID: LIB3030-012-Q1-B1-H8
ggacatttgaagaaataatgaatctcaagattgaggctatagcagatacgccttctttcatcttcctttgggtgggtgatggtgtaggccttgaacaaggtcgtcaatgtctaaaaaagtggggttttcggaggtgtgaagatatatgttgggtaaagacaaacaaaagtaatgcaactccaggactgcggcatgattcacatactttatttcaacattcaaaggaacactgcttgatgggcataaaaggaacagttcgtcgaagtactgatggacatataattcatgccaatattgacacggatgtcattatcgctgaagaacctccttatggttcaactcaaaagcctgaagatatgtacaggatcattgagcactttgcccttggaaggaggagactagaactatttggtgaagaacacaatatccg

SEQ ID NO: 6408 - DNA, 403 bp, Glycine max
  Clone ID: LIB3030-012-Q1-B1-H9
gtggtatggcgaaggacgttgaggttgctgagcgtggctccttctctgggaaggactaccaggaccctccaccagcaccactcattgatgctgaggagctcacaaagtggtccttttacagggctctcattgctgaattcattgccactttgctcttcctctacattactgtgctcacagtcatagggtacaagcaccagactgacctcaaggaaaatggtgaaatctgtggtggggttggcattcttggcattgcatgggcctttggtggcatgatcttcatccttgtctactgcactgctgggatctcagggggtcacattaacccagcggtgacatttgggctgtttttggctctcaaggtgtccttgatccgagccatcatgtacatggtggcccagtg

SEQ ID NO: 6409 - DNA, 133 bp, Glycine max
  Clone ID: LIB3030-011-Q1-B1-H8
caactttctctctcaagaaccatcaaatctcgatcctcccctctccctgcaagatgcggtgggggttccgattgctcacatggggtttggtctcgggtcggtcaacgctggccggtagttgggtgaagtaaat

SEQ ID NO: 6410 - DNA, 372 bp, Glycine max
  unsure (1)..(372): unsure at all n locations
  Clone ID: LIB3030-009-Q1-B1-F2
gtttatgtggatgatggcaagaccaagtatttggatcggtgttatgggaaggttggtangaggaagctgaaggagagattggttcaaggctgtgtcccaaatggggttaggtttcacaaggcaaaggtgtggcaagttcagcaccaagagtttgagtcaaaagttttgtgtaatgatggggtggaattgaaggggagtttggttgttgatgctagtggattcgcaagtaattttgtagcatatgacaaggtgagacaccatggttttcagattgctcatggtgttttggctgaggtggatgatcacccttttgatttggacaagatggttttaatggactggagggattctcatttggggaatgaaccctac

SEQ ID NO: 6411 - DNA, 392 bp, Glycine max
  Clone ID: LIB3030-009-Q1-B1-F3
aatatttgtgactcggtcgcggggttggtcttatgttgaacgtcctggtattttgctagtgacagcttttgtgattgctcagctgattgccactttgattgcagtatatgccaattggagctttgctgcaattgaaggcataggttggggttgggctggtgtaaaatggttatataacataatattctacattccacttgaccccatcaagtttttaattcgatatgctttgatcgggagggcttgggagcttgtcatcgagcacaggattgcattcacaaggcaaaaggactttggaaaggaacaaagggaacttcaatgggcccatgcacaaagaacattgcatggacttcatccacctgacaccaagatgttcaccgagcgcacacatt

SEQ ID NO: 6412 - DNA, 206 bp, Glycine max
  Clone ID: LIB3030-009-Q1-B1-F4
gttggctacttcagccgcgagcgcctcaaccttgaaccgcaaccaacttcttcaacaacttcctcttcggctgcggcaaaaaaaaccagggcctcttcggcggttcccccggcctaattggccccggccgcaacccattctccttcttcaaaaaaactgccgccaaataccttaaaacctcccctaacggcttcccctcaacttca

SEQ ID NO: 6413 - DNA, 143 bp, Glycine max
  Clone ID: LIB3030-009-Q1-B1-F5
gtcattcagacttgaaataattcccgaacattgcttgcacggaaacgactctcctccatccttcggcttcatgaaccattgacgtacatcaaggacagtatccagtatccagtgtgaaattatcatacactgagaattctaca

SEQ ID NO: 6414 - DNA, 438 bp, Glycine max
  Clone ID: LIB3030-009-Q1-B1-F6
gggccttccatggcttccgcttgtgcttcctctgcaattacagctgttgccatctctacgccgagttccgggcagaagaatggatcaggaggttgttttcttagtggaaggaaattgagggtgaaaaaggagagagcagcaattggaggacgatcgatgggcactacagtgtgcgcagttgctgagcctgacagacctctatggttcccaggcagcacccctcctccatggcttgatggcactctacctggagacttcggctttgaccctcttggtcttggatctgacccggagagtctgagatggaatgttcaagcagagctagtgcactgcagatgggcaatgttgggtgctgctggcattttcattccagaattcctaacaaagattggtgtcttgaacactccttcatggtactcagctggagagctggaatac

SEQ ID NO: 6415 - DNA, 440 bp, Glycine max
  Clone ID: LIB3030-009-Q1-B1-F7
tgcaagaatggcacttcgttgcttggtgatgtccctttctgttctcttcactcttggtcttgcgagagaaagccatgccagagacgaagatttttggcatgctgtttggccaaacactcccattccaagttcattgcgagatcttctaaagcctggccctgcaagtgttgaaatcgatgatcaccctatgcaaattgaagaaacacagtacccgaaaaccttcttctataaagaagaccttcatccaggcaaaacaatgaaagtacaattcagcaagcctccctttcaacaaccatggggtgttggtacatggttaaaggaaattaaagacactactaaagaaggatatagttttgaagagctatgcatcaagaaagaagccattgagggagaagagaagttttgtgcaaaatccttgggaacagtaattggttttgcca

SEQ ID NO: 6416 - DNA, 439 bp, Glycine max
  Clone ID: LIB3030-009-Q1-B1-F8
ccttttcagctttcattggtgtggcctagctgttttctcaatgagaaagccttcatctctgcaaagcgcacttttgcgctttggggttcccttgttgcttgttatcaccttctgttatgctacttctactgctgcagcaacaactcaagtttcagggaatgaagagctgccaaagacaaacctaaatgggcatgatgaagaagcaaaattcggattttttcatcataaaccaatattcaagaaacatattccaattccagtatataaacctgtaccaaagccatttccagtgtataaacctataccaaagccagttccagttccagtgtacaagcctattccaaagccagtgtataagcctattccaaagccagttccagtgtacaagcctataccaaagccagttccagttccagtgtataagcctattccaaagcca

SEQ ID NO: 6417 - DNA, 376 bp, Glycine max
  Clone ID: LIB3030-009-Q1-B1-F9
ctccaaacctacctttctatcttttctttttcatcggagcattatttgataccctcttgagtcctctctgcagcaacgcatttttcctcattctcttaaacaatttaacttctcctcgtttgatctgcataaaattgcattaatataaaaaatgaagaagtttgtactaaagttagatttgcatgatgacaaggataagcagaaggccttgaaaacagtttcaactctttcaggaattgatgccatagccatggatatgaaagagaagaaattaacagtgataggaacagttgatccggtaactgtggtgagcaaattgcgcaaatactggaaggcagacatagtagcagttggaccagtgaagggaactgagaag

SEQ ID NO: 6418 - DNA, 445 bp, Glycine max
  Clone ID: LIB3030-009-Q1-B1-G1
cagaatcagaataggtcgttggagcaagctggaccctccggctccggtggacaggtgggagtgagagtagtgaattggagtggttccgataggctttgcataagccctaagcgagatcacaagcccgaaaactatgacgaccttcaattcgagttcaatcctaatatcttcgcctctctcgagcactatttgcctcctcatatgctcaacctctcacgtgatgttaagcttcactacatcaggaacattcttcttcgctatttgcctgagaatgaccgcatttggattcaaaagctgagggaatacaggctaaagatcatattgaattatccaccgctgcataaggagatatttactatggatgctgagagctttttcgtaccatcatttctcagagcaataaaagaaaacacagaagcgagttttagaagtataatggctgaac

SEQ ID NO: 6419 - DNA, 418 bp, Glycine max
  Clone ID: LIB3030-009-Q1-B1-G10
ctgctgcataggaagaaaccctagcctctcaccctccctgcgacacgatgcagatcttcgtgaaaaccctaacgggtaagacgatcacccttgaggtggagtcttctgacaccatcgacaacgtgaaggccaagatccaggacaaggaaggcatccctccggaccagcagcgcctcatcttcgccggaaagcagctggaggacggccgcaccctcgccgactacaacatccagaaggagtccaccctccacctcgtcctccgtctccgcggtggcgccaagaagcgcaagaagaagacctacaccaagcccaagaagatcaaacacaagcacaagaaggtcaagctcggcattctccagttctacaaggtcgacgattctggaaaagtgcagacgctccgcaaggagtgccccaacgc

SEQ ID NO: 6420 - DNA, 385 bp, Glycine max
  Clone ID: LIB3030-009-Q1-B1-G11
ctgctggtggacgtcatacgctagcgttatcagatacaggactggtgtgggcttggggctatggaggtgaagggcagcttggtttgggttccagaatacgcatggtttccactcctcatcttgttccttgtattgattcctcttattatagtaaagatagatctgctacactggctcgaggaaacatgggttcagagggacaaacttttagagttcctggaagttatataaagagaattgcttgcggaggtcgacatagtgcagtaattacagatgctggagccttgcttacttttggttggggactctatggacagtgtgggcaaggaattaccgatgatgaactaagcccaacttgtgtatcttccatattgggtatccacat

SEQ ID NO: 6421 - DNA, 363 bp, Glycine max
  Clone ID: LIB3030-009-Q1-B1-G12
ctcattaattgcaagaatggcacttcgttgcttggtgatgtcgctttctgttctcttcactcttggtcttgcgagagaaagccatgccagagacgaagatttttggcatgctgtttggccaaacactcccattccaagttcattgcgagatcttctaaagcctggccctgcaagtgttgaaatcgatgatcaccctatgcaaattgaagaaacacagtacccgaaaaccttcttctataaagaagaccttcatccaggcaaaacaatgaaagtacaattcagcaagcctccctttcaacaaccatggggtgttggtacatggttaaaggaaatttaagacactactaaagaacgatatagttt

SEQ ID NO: 6422 - DNA, 414 bp, Glycine max
  unsure (1)..(414): unsure at all n locations
  Clone ID: LIB3030-009-Q1-B1-G3
attganatggcttctacttcaaatgccatcgtcaattgcacctcttcttcttcgtttgagtatgacgtgtttgtgagcttccgcggtgaagacacacgcatcagcttcaccgcttttctttttggagctctgaatggacacggcatcaaggccttcaacgatgatattgacacacgaaaggcgaatccatagcaccacagctaatacgagccattgaagggtctcatgttttcgttgttgtcatttcaaaggactatgcatcctcagcttggtgcctgcgtgaactagcacatatctgggattgcatgcaagcatcacatagacctcttctgcctattttttatgatgttgatccatcacaagtgcgaaatcagagtggagactatgagaaagcctttgcccaacaccaataaa

SEQ ID NO: 6423 - DNA, 441 bp, Glycine max
  unsure (1)..(441): unsure at all n locations
  Clone ID: LIB3030-009-Q1-B1-G4
atcacctaatcacttcccaacttcccctgtaaatcactttaatttcccacaaggttttaaaaaatggctgatcctaaggaaatccaacccctggtggttaaaaatggaactggaatggccaaggcggtttttgcaggtaataaccccccaagggccttttccccaattataattgggcaacaacccaaaaccggtgtaatggttggaatgggtcaaaaggatgcttacttgggtgatgaacctcaataaaaaaggggtatactcaccttgaagtatccctatagagcatggcatagtcagcaactgggatgatatggagaagatttggcatcacacattttacaatgagcttcgtgttgcccctgaagaacaccctgtacttcttaacgaggcacccctcaatcccaaggccaacanagagaagatgacccaaattatgtt

SEQ ID NO: 6424 - DNA, 434 bp, Glycine max
  Clone ID: LIB3030-009-Q1-B1-G5
ccagtccagaagaaactatccctctaaaggcccacccacctctttttctctctctctctctctctctctaaacacccacaacacaacaaccgaatccttttttttttgttttgttaaacaaaacagagaaaaaaaaagttgtgaattttccagttgcgtttctgttccatacaatttcgatttcaatggcgaggcctaatcaggaggcagttgagacgttcgtcagcatcactggtttgccagaagcagtagcgctacaaaaacttgaggagcatggtggtaatctcaatgaagcagtcaatgcacattttactgaaggagacagaaatctaacgaccggttctcacaacagctctgctgtatttcctcaagatgatttcatggatatagatgacgaacatgatgcagaaattcccagaagaattccaccacta

SEQ ID NO: 6425 - DNA, 404 bp, Glycine max
  Clone ID: LIB3030-009-Q1-B1-G6
cgttggtgaagaacattatgagactgcgcaaagagttaaacaaactttacaacgttacaaagaacttcaagacattatagctatccttggcttggacgaattatccgaagaagatcgcttaaccgtagcaagagcacgaaaaattgagcgtttcttatcacaaccttttttcgtagcagaagtttttaccggttcgccggggaaatatgttagtctagcagaaacaattagagggtttaaattgattctttctggagaattagatggtcttcctgaacaagccttttatttggtaggtaatatcgatgaagctactgcgaaagctacgaacttagaaatggagagcaatttgaagaaatgactttaaatctttgtgtactgacccccaatcgaattgtttggga

SEQ ID NO: 6426 - DNA, 408 bp, Glycine max
  Clone ID: LIB3030-009-Q1-B1-G7
caaatggctggagtgacaaaggaggaagagaggggtagtcctagttggggtgcttcattttttacgcagacaacagaggatgtggctagagctgttgccactgctatgaattctcagaggccatctgtggtatattcattgaaaaatgatcatggtggcagccaacttcaaaggctgcagtatcaagttacgaaaatgataaaaggattttctagccctccagaagttaaatatacaaattacaatccggaaatcttgacaactcagaagcgtcaatgggctgcaaactttcagttgcagtacacggaccataagtcttggaaggagccaacaaagctgtttgaaagcatggtggttgctggacttcatcctaattgtgatattcaggcactgcaaaggcaatgtttt

SEQ ID NO: 6427 - DNA, 429 bp, Glycine max
  Clone ID: LIB3030-009-Q1-B1-G8
gcgattggaggttctgaaagcttctacagtgtatttgaagctgagttagcagatgttatccctgtggtcaagacatccattggtggtactcgtatcattggtcgtctttgtgctggaaacaagaatgggcttctcttgccccataccaccacagaccaagagcttcatcaattgagaaacagtctacctgattaagttgttgttcagcgaatagatgacagattatctgctctgggaaattgtatcgcatgtaatgaccatgtggccctcatacacactgatcttgacagggatactgatgagatgattgcagatgttcttggagtagaagttttcaggcagaccattgctggtaatattcatgttggtagttactgtgccttctcgaacagaggtggcttggttcaccctcatactttcatagaagac

SEQ ID NO: 6428 - DNA, 378 bp, Glycine max
  Clone ID: LIB3030-009-Q1-B1-G9
gtgtattcggatgaacaagcagagagtgtgtagtgcgtagggtttaagatcgcgttctttagatgaacgagttatctcagaagcagactcttgttgtccatgggattgctggtgctggttcggtggctttagccaccgccttcacttaccctcttgacaccatgaaagtcctcattcaggttggttccagcaccggtaaagaattggaccatgcccatgttttgaccagactactctctgtatccggcaatgcaggtttgttcaatggttttggctggttgttggttggaaggatttttggtctgggagcacgatttggggtttatgaaatcctgtctgccttttataaagatggtcgggaaaataattatttgtttg

SEQ ID NO: 6429 - DNA, 364 bp, Glycine max
  Clone ID: LIB3030-009-Q1-B1-H1
tccgagtccgagtttcaactcggtgtagcaatggcgatgatgcaaggtgtgcagaagaacacactgtacgtgggagggttagcggaggaagtgaacgagtcgatcctccacgcggcgttcattcccttcggcgacatcaaggacgtgaagacgccgctggaccaggccacgcagaagcaccgctccttcggcttcgtcaccttcctcgaacgcgaagacgcctccgccgccatggacaacatggacggcgccgagctctacggtcgcgtcctcaccgttaattacgccctccccgaacgcatcaagggaggggagcagggctgggcggcccagcccgtttgggcggatgcggatacctggtttg

SEQ ID NO: 6430 - DNA, 399 bp, Glycine max
  Clone ID: LIB3030-009-Q1-B1-H10
cactacgagaatgtctcagggaagaggcagtgcatctttacctattgtggtcactgtggtttcactactgtgccttttggttcttttggaacgtgctgatgcagcaacttacaccgttggaggacctgggggatggaccttcaacactaatgcttggcccaaaggaaaaagattcagagctggtgatatcctaatcttcaattatgattcaacgacccacaatgtggttgctgtggacagaagtggatacaacagctgcaaaacgccagggggtgctaaagtgttcagttcagggaaggaccaaatcaaactagcaagagggcagaactacttcatatgcaactaccctggtcactgcgaatctgggatgaaagttgccattaatgcagtgtgatggtg

SEQ ID NO: 6431 - DNA, 369 bp, Glycine max
  Clone ID: LIB3030-009-Q1-B1-H11
atgactcaaccctttggaacattttaggccgacaattggagaaaaattattctggacaagcatgaggatacaatgagcaagatgggagcaattttggcatcaggaatccttgatgctggtggcagaaatgtgaccataaggttactttctaagacaaaacatgataaaattactgcagtggttggtcttgcagttttcagccagttttggtattggtaccctcttatctattttataagcctgtccttttcgcctacggcttttattgggttgaactatgatctgaaatctccaaagtttgagttcttgtcacatgcaaagccttcactttttgaataccccaagcctactactgttcccaccactact

SEQ ID NO: 6432 - DNA, 335 bp, Glycine max
  unsure (1)..(335): unsure at all n locations
  Clone ID: LIB3030-009-Q1-B1-H12
ctcggatctaggttcacctctgctcgcctaatttaaattccgtccaatttcaaaaaccaaaacaagccacacaagttcatggcaactcccaataacagactctctcttgccatggagagaactgggcaatgggttttctctcaagacataccaactgatgttatagtggaagttggagaaacaactttctctctgcacaagttcatgctagtggcaaaaagcaactacataagaaaactgatattggaatcagatgagagcgaactcaccagaatcgacctctctgacatnacaggaggcccttcaatcttcgagaaaaccgcgaaattctgtta

SEQ ID NO: 6433 - DNA, 425 bp, Glycine max
  Clone ID: LIB3030-009-Q1-B1-H2
tagggatacggctcgagcaaacctcaagtaatgttttggttgacaaatttgtttcaagttcttccaaccaagatttacaaagttgttctatggggaaaacaatgttaaaacaagaggttgaacaagatgtttcgggctgttaattgaaggacaaaatgtacctgaactggcaaaagctgctcaacaaggattggtggtggggggttaaaagcgcagaaggcgaactagacttaaacctcctttaagtaaaggtgctgatgatggatcatccagttcttctgtcaatcaaaatcagcaaaccagaacagatggtcaacatatattgcaaactcttgcaggtcatggattcgggtttgaattcaagaaatgctaatgggccatcccagcggcccttgccctccagtgatcgtccaattgatgtggct

SEQ ID NO: 6434 - DNA, 105 bp, Glycine max
  Clone ID: LIB3030-009-Q1-B1-H3
gagctatgtggtgactgtggctggggacacccggaacctgacgatgggtccgtccggggcggtgttcgggtcgctgacatggaacgattggaaccacggggttcg

SEQ ID NO: 6435 - DNA, 242 bp, Glycine max
  Clone ID: LIB3030-009-Q1-B1-H4
agcgctaatgtgccacaaacttaatggttaacggccaccaaaacttcctccaatgggtttggaacttcagaaacgccaattctgccaatccaagaaaattcctccttggcaaaagtaaggggtttgagaactcaactggttctgaaaaacatcaagcaattgccctgaaggttcaagccgacaaggccaacctttaaaaatgccgaatggaatggttacaggacacactttacgcccaaaac

SEQ ID NO: 6436 - DNA, 440 bp, Glycine max
  Clone ID: LIB3030-009-Q1-B1-H5
tgaatcgtaagcagcggctaccctaatcctctcctcttcctctctactaatttcagctatggccgacgaagctgtggttgttccagatcccacccagatcgatgtcaagctctttaaccgctggagcttcgacgatattgagattactgacatttctctggctgattatatcggagtggcgacatccaagcacgccacgtatgtgcctcacaccgccggcaggtactcggtgaagcggttcaggaaggcgcaatgccccattgttgagaggctgaccaactctctcatgatgcacggtagaaacaatggcaagaaactcttggctgttaggattatcaaacatgctatggagattattcatttgttgactgaccagaaccccattcaggttattgttgaagctgttgtcaacagtggtccacgtgaagatgcaacaagaa

SEQ ID NO: 6437 - DNA, 213 bp, Glycine max
  Clone ID: LIB3030-009-Q1-B1-H6
cttccatcagatatattttcttcaaaaacaatggcaggcgaggtggtgaagaaggaagactctctcaacctgaaagtcactaacaagagtcatgttcaacctgaggagaaaattggaaggaaagagtaccagctggtcacttttgatcttcccaacttggccttcaactacaaccagaacctgcggttttacaagggtgaaaattttgagggt

SEQ ID NO: 6438 - DNA, 433 bp, Glycine max
  unsure (1)..(433): unsure at all n locations
  Clone ID: LIB3030-009-Q1-B1-H7
agctacttgatcggtggtgtatttggtgtgttgatgttttattaaacttttgtactcttgctttgaaactagttggttagatttgaaattcttctaagatggatacttcttataggactggtggagtcaagtacgagtgcttgctttttgatatggatgacactctttacccattgagcttaggtctcaatttgttttgtcgcaagaacatacaagagtatatgttagaactcttgcatattgaagagagtgaagtgccaaaaatgtgtttggatttgtatagggaatacgggacaactatggcaggattaaaggtccttggttatgagtttgacaatgacgagtttcatgcttacgtgcatggaaggttaccatacgagaaactgaagcctgatccagtattaaggaancttctgctttcaaatgctcagcg

SEQ ID NO: 6439 - DNA, 362 bp, Glycine max
  unsure (1)..(362): unsure at all n locations
  Clone ID: LIB3030-009-Q1-B1-H8
aacggccacagccatagtcgcctgaaaccgattgttgttgcacggaaaacacagagatccgggtcgacccgttgcagatccgatccaaataagaaaagatgaatattttcaggttagccggggacatgacccatttggccagcgtcctcgtccttcttctcaagatccacaccatcaaatcctgcgccggtcggtaccttcctttccaatctcaacattcatcgctcgctctgttttgtttcgttgaggatatgtcgtanattttcattgtaataatgctgacgtgtgtctgccagagctattattgcttagcgctgtggggttgggttgggtgattttgttatgtgttactgtgtttttgt

SEQ ID NO: 6440 - DNA, 383 bp, Glycine max
  Clone ID: LIB3030-009-Q1-B1-H9
gggtggagcatacttagaaacagcaactatgtctctcatgcagcttactagctcccctgttggctcactggtccgtttcattgtaatatttgctttatggtacagaaccatggctttggccaagttgccaccaaacgcttcatcagttccagcagttttagcgtttggagattccatcgtggacccaggcaacaacaacaacataaaaacattgatcaagtgcaacttcccaccttatggaaaggattttcagggaggaaacccaacgggtcgattttgcaatggaaaaattccttctgacttaatagttgaacaattgggtattaaggagtatttgcctgcatatttggatccgaatctcaaatctagtgatcttgttaccg

SEQ ID NO: 6441 - DNA, 409 bp, Glycine max
  Clone ID: LIB3030-010-Q1-B1-A1
ccttgttcttctttctctattgtctatagtcatctccattgttctcttcattacccacacacacaaaagaaacaacactccaagaggaccaccaggtcctccacctcttcctctcatcggcaaccttcaccaactccacaactcatccccacatctctgcctatggcaactcgccaaactccacggtcctctcatgtcgtttcgcctcggcgccgtgcaaaccgtcgtggtttcatcggccagaatcgccgaacaaatcttgaaaacccacgacctcaacttcgcttccaggcctctcttcgtgggcccgaaaaagctctctttacacggggtggacatgggcttcgcaccgtacggcccgtactggagagaaatgaagaaactctgcatcgttcacctcttcagcgcg

SEQ ID NO: 6442 - DNA, 325 bp, Glycine max
  unsure (1)..(325): unsure at all n locations
  Clone ID: LIB3030-010-Q1-B1-A10
tagcaatctcatctcattcatttcaatggcaactcaaggtcaagtcattacctgcaaagctgcggtggcctgggaacccaacaagcccttaactgtccaagacgttcaggtggctccgcctcaggccggcgaggtccgtgtccaaatcctcttcaccgctctctgccacaccgatgcttacacttggggcggcaaggatcccgaaggtctcttcccctgtattcttggccatgaagctgcagggattgtggagagtgttggagaaggtgttactaatgttcagcctgnggatcatgtcattccctgttatcaggctgagtgtggg

SEQ ID NO: 6443 - DNA, 361 bp, Glycine max
  Clone ID: LIB3030-010-Q1-B1-A11
ccacatccatctttgccttctgcatgttggttctctgtaaacagatactgcaaaagaagaataatattgaatatttggttgggttgaatccctgggttgaagcgttgcagacatcacggctattctaagagtgtctcgctctctcattcatgtcccaactgtacgacggaggacaggttgcgtaactgccaccaacccttcgccgcacggtgggcgtggtgctttgccttctgaaggtggtagcccttcagacttgctcttcttagctggtggtggttctgctgtcttctagcttcctcttaactcttttttccttttactacttttaagctaccttgttttcaaaataacaaaaacaaac

SEQ ID NO: 6444 - DNA, 386 bp, Glycine max
  unsure (1)..(386): unsure at all n locations
  Clone ID: LIB3030-010-Q1-B1-A12
caatagtaacttcccgctcgctatcacaatctagggttttagaattttcacaaaaccctccatggcagaagaagcagcaccgaaagtcgtcgatcccaacaccgtcgtcgccgccgccgccgccgccgccgtggacatggacgtcgagaacatcgaggccggcgacaacggcgccgagccgaaccagaagcgcgccagggaggaagaggagcccctggtcgacgacgacgacgttttgaagaagcagaaggtggccgaggaaaaggaacagtccgtanaggaacagcggctggagaagcgcgatgaanaagaagaaaaggaagcagaaaaagaagaggaagagaaggaagcaagtggttccgtgaacttgggattcaagagcttcg

SEQ ID NO: 6445 - DNA, 400 bp, Glycine max
  unsure (1)..(400): unsure at all n locations
  Clone ID: LIB3030-010-Q1-B1-A2
gaaagagaaagcgcaaggtccgacncgatacctcatctttcgccctagtgctcgttttcagagctgcaaaggaatcgacacagaaagtgattaaaaaagggagaagatatctttggtgtcaaacgctcactgattcttctgctgtggactccacttctctactgttccacctctccacactacgattctgtgaaatctctgaacgaacgctctgtaattggtgattttggagccgaactgtttcgtccaatgaaaatcaatcgcgaaagtttccgttgataagtcgtggagaatttactggtaaaatttgattcaatttaaaaaatttattcgttggcgaaattgatttaatgcgtctccgatcttcagccggccgggggacgtaatctgagaagatctg

SEQ ID NO: 6446 - DNA, 403 bp, Glycine max
  Clone ID: LIB3030-010-Q1-B1-A4
gtgcagcatggagctctgccgcctccaacaaaacagagttcagaacacaaaccctcgaaccgaacgtttttgagggtcagtctctccttcttcattcacataatcgcttcttattttctctcagctttcaattgggatctcaaattatgtagctccacggaatttatcttgttttactcttatagtccctttttcttaattttctgtggcaacaaggttgataaagcacgatggttcagtacaattttaagaagattaccgtggtgccaaatgggaaggatgtggtcgacattatcctctctcgcacccagcgtcagacaccaaccgttgtgcacaaaggatatgcgatttcacggctgcgccaattctacatgcgcaaagtgaagtatactcatcagaattt

SEQ ID NO: 6447 - DNA, 396 bp, Glycine max
  Clone ID: LIB3030-010-Q1-B1-A5
cagcttctctaaattctctgtctacttcaccaagcacttttggttgcagctttggttaatttccaatatggtgtttcctctcctatctatctttgctttactcaatcttgcagtggtggcaacccatgcagaaaccttgccccctgaagtttactggaagtcgaagcttcccaccactccaatgccgaaagccattacagatatccttcacccagatttggcagaagacaaaagcacctctgtggccgtatgaaaggggggcgtaaacgttaacgcagggaaaacaaagccaggaggcacatcagtgaaacgtaggaaaaggaggattgaacgtgaacacagggaaaggaaagcccaacataggcacatcagtgaacgtaggcaaaggtggagtga

SEQ ID NO: 6448 - DNA, 270 bp, Glycine max
  Clone ID: LIB3030-010-Q1-B1-A6
gggaagaaagtttaagccttagctagaaaaaggagagtgagtagtgagttttttgagaagcagaagaaaggaagaaaggtggagtgagtgaattcaaaaagatcacccaccatggggaggcctccttgctgtgacaaagttggcatcaagaaaggtccatggacacctgaggaggatatcatccttgtctcttacatccaagaacatggtccaggaaattggagatcagtgcctactaatactgggttatcaaggtgcagcaaaagttgc

SEQ ID NO: 6449 - DNA, 248 bp, Glycine max
  Clone ID: LIB3030-010-Q1-B1-A7
gaatccctaccctgtctctctccttcttcatcatctccttcattgacaatgttttgccatccccatgctgcatcattccactccagcatgtcttggattactacgttgcgtagaggatccattcattcatcgtcaagatgaagagctcaaggcaactacaactcagcaaccatagctttcactcctgcatgtccacctaattcttcgcacgctcatttgaaatactcagttaggctcacaatgacaca

SEQ ID NO: 6450 - DNA, 284 bp, Glycine max
  Clone ID: LIB3030-010-Q1-B1-A8
atgtttttggcgggtacaccctgtggttcttcttctgcacgtactcactatcatcatcctagaccgctgcatcataacagaaacgtcctcgataggtgctcggtgggcatcagcgtgcaggagaatcacgagatcggcaccaagctgcagtgttcggtgtctttccctccgatcatggctgcgaagatggtggttctggttaggcacaggcagatcacgttgaatgccttagggatgatctagagaatctccacattctctgttctcatcataaatggccagtc

SEQ ID NO: 6451 - DNA, 327 bp, Glycine max
  Clone ID: LIB3030-010-Q1-B1-A9
cgcagcaaacggtcaagatggctaacactgacgctctcagctttttcaaggatttcatggccggtggcatctctgccgctgtgtcaaaaaccgccgtcgctcccatcgagcgtgtgaagctgctcctgcaggttcaggcagcatccacccagattgccgccgacaagcagtacaaaggcattgtcgactgctttgtccgtatccccaaggaacagggattcgctagcttctggcgtggtaaccttgccaacgtcatcagatacttccccacccaggctcttaactttgccttcaaagatatctacaagcagattttcctccgtggtg

SEQ ID NO: 6452 - DNA, 403 bp, Glycine max
  unsure (1)..(403): unsure at all n locations
  Clone ID: LIB3030-010-Q1-B1-B1
ggagatgatgacgatgaggttattgttttcaaacctgtagtggctgagacacgagctgatgtgattgcctcatcatgggcaccccatgtgggtttggaaccttttccaaaagcatctggaggggatttaatatttcatgttaattctacttctaatcctctaagtaacctaagtcatcaaactttatctgttcctggtggtggtatggtgcctcaacacctgcaaccagttcagccacatacatcaaggtggttagaggaggaaatttctcttgctaacaatttaaaaggtcctgggttaatttagaatggacatgtgataaaacctggtctacaagaagcggttggcttctccanacatgtttcacttccttttcctatccaacaatctataggtgctgata

SEQ ID NO: 6453 - DNA, 416 bp, Glycine max
  unsure (1)..(416): unsure at all n locations
  Clone ID: LIB3030-010-Q1-B1-B10
gccaaacaaaccaagcagtattataatagaaagaggacacaaagtgaaagagaagggagctatagccataaggagaaaaactttcaaagaggtgaaagcaaaagagttcttcttttccttttttatatatacttgggtgctaagctgtgtgagttcattgacaagcctgaaatggcaactatgctgacaaaggagcatggtctgaacctcaaggagaccgagctttgcctcggtttgcctggtgggggaagcggcggcggcggcggtggtgaggtggaaactccaagggccactgggaagagagggttctctgagactgttgatctgaaacttaatcttcattccaaggaagatctgaatgagaatctgaagaatgtctcaaangagaagaacctccttaaagattctgccaagcc

SEQ ID NO: 6454 - DNA, 378 bp, Glycine max
  Clone ID: LIB3030-010-Q1-B1-B11
catcaattggatccattgaccacattgaaggcacgtgtgaacaactttggcaggacaagtgctctgatccagcatgagtggcgtcccaaatcgttctttaccatatctggtgaggtagacaccaaggccattgaaaagagtgctaaggttggattgggtttggttctcaaaccctaagaattttgatccatcctggcaagagcattgagtaggtgttaggaagcgtatagtctgtgagactaaattatttccttgaagttggttctcttcttgggtaagaagtgttcatggagttttcgttgcatttgagcaattcaaccttgtaaaaataaataggctttctataaaacacatgtgactttttaaatgcccaaagct

SEQ ID NO: 6455 - DNA, 411 bp, Glycine max
  Clone ID: LIB3030-010-Q1-B1-B12
cggaaacttctggtgatgattgagagtgatcaaggagcattaactgcagaagagcgtgaagctgcaaggaaagagtgttttgagtctgctcaagctggggaaaatggcactgaaagtgcagaccaaatggagaatggtggtgaggatgaagataaagatgatccactttcagatgagcattatggttatccaaaagctgaatcagataaatgggcttcctgcatcagagttcttgatccaaggacaggaaatactacttgtcttttggagcttcaggaaaatgaagctgctttcagcatttgcaccataaatttccatgataaggaatacggaactcttttagctgttggcactgcgaagggactgcaatttttgcccaaaaggaccataactgctggattcattcatatt

SEQ ID NO: 6456 - DNA, 407 bp, Glycine max
  Clone ID: LIB3030-010-Q1-B1-B2
gaagtatctgaagtcaaagggcaagatgttgtttgtattataaagaacacagctacattggctgggtcattgttcactttgcatgcctctcagattcatattgatttgcccactctcactgagaaagaccaggaggttataagctcctggggtgttaaaaacaatattgattttctgtcattgtcatatactcgacaagccgaagatgttcgccaggcctcgtgaatttctttcaaagttaagtgatctcagccaaactcaaatttatgcacagattgaaaatgttgagggattgacccattttgatgagaatctacaagaagctgatggtattatcctttcccgtgggaatttgggtattgatcttccaccagagaaggtttttttatttcaaaaatctgcccttt

SEQ ID NO: 6457 - DNA, 323 bp, Glycine max
  Clone ID: LIB3030-010-Q1-B1-B3
gttgaattaggagcaactaaccaaaccaccccaatttccaaccacaacacggaatgttcaaccatcgcaaaacggaaaaaaatggaaggcgagtgaagacacagagagagacagagagagacagagaaacaaagaagagaagagagagagagagagagagagagagagagtaaggcatggctgggttactggcatgggcggtatgaggtggcggaggaaaagaagcggaggacgacggcatcatcccaatcctgttttctgcagatcagcaaaagtacgtcaacgaactcgatcagaaggcgagctctctccggggttgggtt

SEQ ID NO: 6458 - DNA, 265 bp, Glycine max
  Clone ID: LIB3030-010-Q1-B1-B4
caagaaatcctaataagaacgaaaaaagaaaagaaaagaaaaaagagcgatttttcccccaccaaagaagaaccaaaacaatggcggttaaactcaccgatgaacagatctccgagttcaaggaagccttcaccttgtccgataaggacggcgatggttgcatcacaaccaaggagcttggaactgttatgcgttcattggggcaaaacccaactgaggcagaactccaagaacatgatcaatggaattggatgccgatgggaaa

SEQ ID NO: 6459 - DNA, 321 bp, Glycine max
  Clone ID: LIB3030-010-Q1-B1-B5
gattaataaaaaaagtgtagtattttgagagaaagaagaaacagacaataagcatagggaactgtgaagagctgaagggaaccaaccttgtttttgttgttctcgtgttgttcgtctggattgggttgggttggcttcagggctttgaatgccatctggggtttctttctcaggctatcaagctccaaagctgacccctttctctcagttctcacttcttcttcttcttctgttcttctctttctctctctagaactataatggtagaagacgtgtgtttcctctacaaggaaattcttggttatgaagcctccaaagaga

SEQ ID NO: 6460 - DNA, 406 bp, Glycine max
  Clone ID: LIB3030-010-Q1-B1-B6
agcaaatagtgaagacaacattagaactgtgaatgattccaatacagcatctgatgcatcagaacataatggaataagccttgaccctgtaatttgtgtggacaaaaatgatgccttttcacctcataatgtcgatgtgcttcagaatgagggtgctgtatgtgaggatgcagagtgcttgaagccagctgttgttgagattggcacctcaaatgatatgcgtgatattgtgaaagaggtaaaatgtaaaggtccagagcaggatatgaattctgtctcaacatctgatgactgtttgggtgaaaagggaattttgggcaatccgtcaaattcaatccttgtcagacgggggagattgcgttccacaaagttcgcctcctactacgtctgtttgcaatgtttcgac

SEQ ID NO: 6461 - DNA, 398 bp, Glycine max
  Clone ID: LIB3030-010-Q1-B1-B7
caaaaagaaagaatcccaggcgaggagaaagatggaggggaaggagcaggatgtgtcgttgggagcgaacaagttccccgagagacagccgattgggacggcggcgcagagccaagacgacggcaaggactaccaggagccggcgccggcgccgctggttgacccgacggagtttacgtcatggtcgttttacagagcagggatagcagagtttgtggccacttttctgtttctctacatcaccgtcttaaccgttatgggagtcgccggggctaagtctaagtgtagtaccgttgggattcaaggaatccccttggcccttcggtggcatgatcttcgccctcgtttactgcaccgctggcatctcagggggacacataaacccggcggtgacattt

SEQ ID NO: 6462 - DNA, 405 bp, Glycine max
  Clone ID: LIB3030-010-Q1-B1-B8
aagaaaagaacatcctcaattttctgagcagccagacactctctctctgtctctcgagaattctcagtttgcagagaaaatctgaatcatgtcgtggcaagcgtatgtcgaggatcaccttctgtgtgacatcgaaggtaaccacctcactcacgctgctatcatcggccaagacgggagcgtttgggctcagagtaccgagttccctcagttcaaacctgaggagataactgcgatcatgaatgactttaatgagcctggatcacttgctccaactggattgtaactcggtggcaccagatatatggtcatcgagggtgaacccggtgctgtcattcgagggaagaagggtcctggtggtgttactgtgaagaagaccggtgcggccttgatcattggcattta

SEQ ID NO: 6463 - DNA, 401 bp, Glycine max
  Clone ID: LIB3030-010-Q1-B1-C1
gtcactgacctatcttggtagagatttgaagtttaaaccttcaaattaatcaaaccattttaatttgcctatagattctgagtcactgctgctatggcgctacgcgtacttcttgtgttggggatgttgctgatgttgtgccttgttaaggtttcatctgatccaaagatagaagaagaaatactggaagcagaagaagaactgcagtttcccgataacgagccacttatcgtgagagacgcgaacagaaggctaatgcaagatatggattgtggtgggttgtgcaagacgaggtgcagtgcacattcgaaggccaactttgttcaccagggcttgtggcacgtgctgtgtgaggtgcaagtgtgtcccacctggtacatctggaaatagggaactatgtg

SEQ ID NO: 6464 - DNA, 432 bp, Glycine max
  Clone ID: LIB3030-010-Q1-B1-C10
gcccattgggaagagtcacggaagttttcgcaatcctacacaattgagaggggttcttctactaataagggtaccacttcctccagtcattctgcatcagtggatcaagtggagtaccatgaattgcctagtgatgaggggcaggtacaagtgacttcagatgacaaattgccccgtgaagaagaaaagaatctcttgcaagctatgtgcacggttgatttttggatgctgtttgtgatcatgatatcagggttgggttctgggcttgcaactataaataatatgagccaaataggacaatcccttggatatagcgccattgagattaataatttggtgtcactgtggagtatgtggaacttccttggtcgttttggaggtggccatgtatcagattatatcatgcacagaaaaggtttgcctaggcccctg

SEQ ID NO: 6465 - DNA, 373 bp, Glycine max
  Clone ID: LIB3030-010-Q1-B1-C11
tgttgtcaacggaagacccttctcagagaccctcgttgaagtcctctacaacatcaacgagcagctcctaactgaggacgtagacatccctctcacaaaggttaggcctgtcaagaaagttgcacttgttgtggtcaccggcgaccgtggtctctgcggcggtttcaacaacgcaatcataaagaaagctgaggctagaatcagggaattgaaggagcttggcttggaattcactgtcataagtgttggcaagaagggtaactcttatttcatcagaaggccttatattccggttgacaggtttctagaaggtggcacacttccaactgctaaggaagctcaaggcattgctgatgatgtttctcactctttg

SEQ ID NO: 6466 - DNA, 438 bp, Glycine max
  Clone ID: LIB3030-010-Q1-B1-C12
agccaatcttcctgataatttaccttcaaatattgaagctatggctcattcattcattttgacactaattgtcttacgcatgaagaacctgaaagacagagataacctggttatccgcttcttccagcttcctctgtctctctggactatgttgttggaccaaagtaatgcaggaataatgccccctgcttgccagaggtctgtctatgtattgtctgctggcatgttggcgtttgcctgcaaaatatatcagattcatgatctgaatgatgtgtttgcgtcattgccaatgtctgatgttgatccattcttgagtgtcagtgatgattatcatgtatatgctaagatccatgtggatgtgagagaatatggtactgctgctgataatcagttagcatgttcaatgttgtcagagttacagaacaaaatacgggaatg

SEQ ID NO: 6467 - DNA, 181 bp, Glycine max
  Clone ID: LIB3030-010-Q1-B1-C2
gtatccctatcatcactacatacgcggatacagtctgtcaaatcaatcatctctctctctctgtcttactgcctccttagcgaaacttaatatggcccgttatactttcctattcacatctgaatcaatggaaaaggagcacccagacagactgtgtgaccagattcccgatgctgtgctc

SEQ ID NO: 6468 - DNA, 399 bp, Glycine max
  Clone ID: LIB3030-010-Q1-B1-C3
tcctgatatcagaaaaagaaaaaagaaaaaaatgtctctagtgactgcagagatcaaagccaaagcagaggtgtatcatggagatgaactctgccaagagaagtcaaagttgctgctaaaggaggtagggctacctaatgggcttttgccattgaaggacattgaggaatgtgggtatgacagggatagtgggtttgtgtggctgaagcagaagaagagcacaaaccacaagtttgagaagattgggaagctggtttcctatgctcctgagatcactgcctatgttgaggttggtaagatcaaaaagctcactggtggtaaaaacaaaggacttccttggtttggatcacactcagtgagatctttgttgatgatcctcccactggcaagatcactttc

SEQ ID NO: 6469 - DNA, 220 bp, Glycine max
  Clone ID: LIB3030-010-Q1-B1-C4
gttcacatcaaaactaatgggaatgcaactgtcatccttggggcttgatcccagtttggcaattaagagaatgcacagcaaatctgtctctacatgtctgaatagggatttatcgccggacagaataagtgctgataggacggttacagatcgtgatacacctaccaagaaacatcgtctgagtaaattactgtcacagtcgatgtcaatgtcacgccca

SEQ ID NO: 6470 - DNA, 399 bp, Glycine max
  Clone ID: LIB3030-010-Q1-B1-C5
cttcctcaccgattgctagaatggaatttcgatgctcagtcatctcttttaccattctcttctctcttgctcttgcaggagagagccatgtccatgcatcgctacctgaggaagattattgggaagctgtttggccaaacactcccattcccactgcactgcgagagcttctaaagcctctccctgcaggtgttgaaatcgatgaactccctaagcaaattgatgatacacagtacccaaaaacattcttctataaagaagaccttcatccaggcaaaacaatgaaagtacaattcaccaagcgtccctatgcacaaccttaagggggaatataaatggttaacggatattaaagacacctctaaagaaggatatagttttgaagagatatgcatcaag

SEQ ID NO: 6471 - DNA, 409 bp, Glycine max
  unsure (1)..(409): unsure at all n locations
  Clone ID: LIB3030-010-Q1-B1-C6
tagcaatctcatctcattcatttcaatggcaactcaaggtcaagtcattacctgcaaagctgcggtggcctgggaacccaacaagcccttaactgtccaagacgttcaggtggctccgcctcaggccggcgaggtccgtgtccaaatcctcttcaccgctctctgccacaccgatgcttacacttggggcggcaaggatcccgaaggtctcttcccctgtattcttggccatgaagctgcagggattgtggagagtgttggagaaggtgttactaatgttcagcctgnggattatgtcattcccctgtaacaaggctaattgtggggagtgcaagacttgcaaatcagggaagacaaacctatgcggcaaggttcgttccgccactggagttggggtcatgctcaatga

SEQ ID NO: 6472 - DNA, 407 bp, Glycine max
  unsure (1)..(407): unsure at all n locations
  Clone ID: LIB3030-010-Q1-B1-C8
cgcgccggtggacattccggcaatgcacgtcgtgatgaacggcggcgactctgcttacgtggcgcttcttccgtcggggttcgccatcgtgcccgacgggtccgtcgaggagaacggtggcgcgtcgcagcagagggcggcgagtggcgggtgcctcctgacggtggcgtttcagattctggtgaacagcctccccacggcgaagctcacggtggagtcggtggagacggtgaacaacctcatctcctgcaccgtgcagaagatcaaatcagcgcttcactgcgaaagctgaaagtcacttgaatcgggctttgtcnattattattattattatttttgttttggagaatttacgttacattttgtagttaaaggtggcgcgtgtgaaggacgcnaggggtgggggt

SEQ ID NO: 6473 - DNA, 361 bp, Glycine max
  unsure (1)..(361): unsure at all n locations
  Clone ID: LIB3030-010-Q1-B1-C9
gaagatcatggcttctctagcaaccttggctgctgttcaaccagctacgatcaatggccttgctggaagttccctctctggaactaagctctctttcaagccctctcgccacagtgtcaaatccaagaacttcaggttccattccatgcatttccataaattgctatatatatatatatatacacacacacatacatacaagaattttgcataaaagaaatatccttgtatattatgattcgcatgtgttgtaattgtatgctaaaacagtgtaactaagcattacaggagtggtgccgtggtagcanagtatggtgacaagagtgtgtactttgattttggaggatctgggcaacactac

SEQ ID NO: 6474 - DNA, 395 bp, Glycine max
  Clone ID: LIB3030-010-Q1-B1-D1
ggcctgtggagaagaatgagtactttgtgctcgacgaagaggaagaagaggctgccgagattgcgcttagggatgaagaatttgagctttgaagcaatctggctatataactaaatatcagtgcaatatggtttcattcattgatgacttggagaattgatgtttagagcaagtgagcatgcaattgaacaagagtgctgcctggatccatttttcttatactaatagagtaccttgaagcatagcaaggattgattcatgatgggcaagtggggggttttgtggctaactatatcttctaactattcaattggttaatgttagtatgttttatttgctcctggtttatacttgttcattttttgtgaaagatctgctagaaatgttgttgattt

SEQ ID NO: 6475 - DNA, 395 bp, Glycine max
  Clone ID: LIB3030-010-Q1-B1-D11
caaagtgattgattccagttccaatggccttgggcaccagcgccttgatcggaaggaaggttcttgtctcacccccaacccccaaaacaaccaaatcatctactccgctacaattccttttcaagagaagcatcttaaatgctcacaattcacaagctgctctagctgcccttatcttttcctccgcgagcctctctgtgaccccacaagcccttgccgctgataacgtcacccctccccctgtaattgaagcccaacagagccaattaaacccctccaactcatcctcccctttctcacagaacctcctcctcacagctccaaagccacaagcctcctccgacctccccgaaggcaacaactggcgctacagcgagttcttgaacgccgtcaag

SEQ ID NO: 6476 - DNA, 369 bp, Glycine max
  Clone ID: LIB3030-010-Q1-B1-D12
ggactccaagctcctattgtcatggatccggagagtgtgtggccaacagaaaccactcttgtttggagtgagttgagccaagccatcgtgaacaaagactgggaaaaagcaacagaagcaaagaaaacagtggaggaaagacaaagggagctccaaagagaaagagagtcaaaagggaaaacttggattcctaaacactttagagtgtcttatagcaaagaagagggttgggactgttcaccaattcaaaagtcagtcccaaacgcccctatcgtcaccttgtaatgtgctaattatatatgtatggtttatgtgtgctaattatatatgtatggtttatgtgtttgagtaagtgttaataaaattgat

SEQ ID NO: 6477 - DNA, 326 bp, Glycine max
  Clone ID: LIB3030-010-Q1-B1-D2
ctgatgttatgtcttctgtgaagcatgatgactcacgttcttactttcttcagttaccaatgcaaactgtaaagcataatgtccttctaaagatgagtgtgcaaatgaatcgtgaaaacatgttagtcctttactggagattcatcatgcagtcgagtgtgtactccccaataaaattcatcatgcggtcagaagtttaatccccaaccaaaattgatttgtgtaatcaagtaacttgaagcatagcaatgattgattcatgatggggcaatggggggttttgtggctaactatatcctccaactaattcattggttaaaggtagg

SEQ ID NO: 6478 - DNA, 382 bp, Glycine max
  unsure (1)..(382): unsure at all n locations
  Clone ID: LIB3030-010-Q1-B1-D3
ccctctctgtagcagcagcagcagtgatggaacgtgctcgcaggctagcaaaccgcgccattctgaggcgtctggtttcagaggcaaagcagcatcagaagaatgaatccgtgctgcactcttccaccacccccatgctgctctattcttcctccaggtgcatgtcctctgttctgcgaagcaggggatccaaaacagagacccttctgggaaggaacatcaacatgtcacgcggcgttgttgttgctgctgctggtggttttctcggcgttggctcggcccggtccatctcggtcgaagcgcctctcacgaacgaaaaccttcccccggcggcacacctctgccaccccggaggagcagagcangatggcagagtcgtgtg

SEQ ID NO: 6479 - DNA, 397 bp, Glycine max
  Clone ID: LIB3030-010-Q1-B1-D5
tgcggcgcgagctagctagggtttagaacctcgcagttacagaaaacatggcgactgtggtgccaacctccgaagaagacgctgcactctccgtcgttcgattcgcctctgaacttgcctgggccgatgccggtcccgaggttgctgagccccaagttagcagactctgcgtggaggctgaagaattcattgttatgggaaagtggttggagctagcatcattgatgattacctctgctgaattgattttctcgaaggtttctgaaaaagatatagagtccatcttcactatcatctgcaatcttgttacaaagaacggaaattcaagatgaagtgatggagattgtaaaagttataactacaaaaatactccagcagccaaatgaaaagcctgctg

SEQ ID NO: 6480 - DNA, 406 bp, Glycine max
  Clone ID: LIB3030-010-Q1-B1-D6
gtgccgttgaacgttaccgtattgctggtggccccctcggtgaggtcactgacacagtctacccaggtggcagcttcgacccattgggccttgctgatgacccagaggcttttgctgagcttaaggtgaaggaactcaaggacggacgattggccatgttctctatgtttggcttctttgttcaggccattgtcaccggaaatggtccattggagaacctcgccgatcaccttgctgaccctgtcaacaacaacgcctgtgcctatgccactaacttcgtccccggaaagtgagcctccaagcatcgaactgacttttgaaagtttttaaatttgtgtttggtgaagtacttcacataatgtgaattaaccctatgtatccaaatccaacttaatgttacctgctt

SEQ ID NO: 6481 - DNA, 407 bp, Glycine max
  Clone ID: LIB3030-010-Q1-B1-D8
aatggagatttacaaaggatccatgacaaatggcttttgagtagcgcttgcttatcacaaggtgcaaagcttgaagtggaaagactccaacttaaatgcttttggggcctctatgtgatctgcgggcttgcctgcttgcttgcactcttggtatatcttatacagatttggaggcaataccacaagcactacgtctctgaagaacttgattcttctgacggccaaagcttaggatcaaaatcttcacgtcttaagacttttctttcgtttgcagacgaaaaagaagagaccgttaagagcccgtccaagaaaaggaaaaatggagaggatctcatacagaagcagtgaaggaagctcatccatcagctctaataagggatatgctccacgcagaagtgaatgtgcta

SEQ ID NO: 6482 - DNA, 365 bp, Glycine max
  Clone ID: LIB3030-010-Q1-B1-D9
gggtcatcatcatcatcattaaacatgggtggcagtgttagcaagagtaggaggatgagttctgagaaatatgtgatgaatttgaaggagaaagtgaggctcttgcaagaggagataaaggagatgatgtatgagagggagaaggagacaaggagatatgagagggacataatggtgttcactttcaaggaggcagattcgaagcaagaggggaagaggctgagagaggaagtgaagcaattgaggagtttggtggaagagaaagatgagaagataagagagattgaggttggaatgatggagaagaacagtgagaaagattgggaattgatgggaactaacctcttggttgaccagatgaagga

SEQ ID NO: 6483 - DNA, 390 bp, Glycine max
  Clone ID: LIB3030-010-Q1-B1-E1
ggttataatgcacctcaacaagtgcacatcacgcaaggtgactatgatggaaaagcagtaatcatctcatgggtgaccacagaagagccagggcacagccatatacagtatggcacatcagagaataaatttcaaactagtgaagaaggcacagttacaaactatactttccacaaatacaagtctggctacattcatcactgtcttattgaaggccttgagtatgagactaaatactactatagaattggaagtggtgattcttctcgagaattttggttcaaaacacctcccaaagttgatccagattccccccaaaaaatttggaataattggtgatttggggcaaacgtttaattctctttccacccttgagcattatatacaaag

SEQ ID NO: 6484 - DNA, 272 bp, Glycine max
  unsure (1)..(272): unsure at all n locations
  Clone ID: LIB3030-010-Q1-B1-E10
ggtcattctcaataaatgaaatcaattcaatccagttctcttacccctggcaaatgtacaacaggtgagaaccataaaaagaatatggaaaatattctgcgagaaaatgcaggttagtttctgactgcttatgagttatgaatatggattgctagaacttatttggaaaatcttcttcataaatagttataactggaaaaaaaaaaatgaaataagtttcttattgcaattcgtatanagcttggtcaatcttcaggcactaattgttttga

SEQ ID NO: 6485 - DNA, 422 bp, Glycine max
  Clone ID: LIB3030-010-Q1-B1-E11
gcttggacttcattcactccgtcaacgccactggtatatccagagcacttgtgcaacttctggagagggtctctatgagggtttggactggctttctaacaacattgccagcaaagcatgagacatttgaaaaattttggtcttgtctggtgatttcatgcgagtctggcggttcttggagaaagatgcttatcttttctagcgaatgttgtaatagcagaatgcttgctagaagtattctcttttgtgtaacttgggtttgtatgattgcttaaattagctaatacttttagctataattggaactcttgcaccctcttgtgcgtgcgtgctgtgttgcttacatcttgtttgtttgatttttgattgaatatatttccatgcgtttttgttctaaaaaaaaaaaaaaaaaaaaggccggc

SEQ ID NO: 6486 - DNA, 341 bp, Glycine max
  Clone ID: LIB3030-010-Q1-B1-E12
aaaaaactttggagtcactgagtttataaatccaaatgaacatgataaaccaatccagcaggtcataattgatcgcacagatggtggagttgattatagctttgagtgtattggaaatgtctccgtgatgagagctgcgttggaatgctgccacaagggctgggggacgtcagttattgtaggtgttgcagcatcagggcaggaaatatcaacccgtcctttccagttggtgagtggacgagtctggaaaggaacagcttttggtggcttcaagagcacgtcacaagtgccttggcttgtatacaagtacttgaagaacgaaatcaaggttgatgagtaca

SEQ ID NO: 6487 - DNA, 412 bp, Glycine max
  Clone ID: LIB3030-010-Q1-B1-E2
caaactctctctgactagtgatatctatccatggaggccaagaacttgtggcgcttcctggttctttcaatcggtgtggtactagttttacgtgtcacttggctgcccaacaaggaggctctagactgcaacctttactctggatggtgcacctcaaagaaccggttctactcttcagcacatcctaataatccgattaagaaaccatcattttccacatatcatcatcacaagaaccaacaccatgaatccgagattcctcaacaccctcttgaccctctaaccatccaagagttcaacaaagtccgcaacatccttttgaactaacctctcttcaagtcctcatccagctacaccctcaactccgttgtccttgaagagcaagacaaaaaacttgtcctcacatggaaag

SEQ ID NO: 6488 - DNA, 303 bp, Glycine max
  Clone ID: LIB3030-010-Q1-B1-E5
gtatgttctgtcgaaatacacaaacgatggataatgacatcacatcgcattttagaaaacatggaattatctcctatctattacggatctatacaagggatttctcatggtaagacatcatcacttcagtgttgctctctttcagtcgtaaagcatattcgatatcatcatgcacaggcttcattttctgcgatcgcatcaagattcgattaccgctttaatggaacaacattatgaatttctcagttgaatgcggtctcgttcacctaacttacagatggtcttcagatgttggtaaagaaa

SEQ ID NO: 6489 - DNA, 286 bp, Glycine max
  Clone ID: LIB3030-010-Q1-B1-E6
gcaggagggggggcagaacagagtagacgaggagcaaaacacgcacaagtgtggtggtggcgcgccactcattgcccccatcttccatcttccatttctgcactcaacagttcacaagcaacgtaaaaaccaacactttccactcactcttctctcaaatgcacgatggaggaacaacaacaacaacggcaacaaaaaccaaagggtcctctccccattgactggagccggcagttccagagcgactcgccgccgcgcgagtacgacgtcgtgccggcctccgccg

SEQ ID NO: 6490 - DNA, 400 bp, Glycine max
  Clone ID: LIB3030-010-Q1-B1-E7
ctttcaatctctttcccttcctttccttgtctttttatttttttacatcaaaattaaaataataacacccatcaaacaaaccacacttctccccctccctttgaaaacacctcaatcaatctcgatgatcatggcagcactcaattcaagcacttgtgccaaacctcaattccctcaccctctctcctcctctttctcttcttcttcatcattaacaagagatttgggcttccccacaaggtttcagaagaagcccattagaaaggtggtggattgtgctctacactcccccccagtgatccatttcccaaaccagccctacaacaaaccctgaatttaccaaagaacccaccacctccaccgcggaaaggcctcagtggaacccattccaaaaagccgc

SEQ ID NO: 6491 - DNA, 404 bp, Glycine max
  Clone ID: LIB3030-010-Q1-B1-E8
aaaagaagagagagaaggtggatagggtgatacagattacagagtttgtgtatccatcttcgttcgtcgcttggcttgttcgccttcactctccgacattcacatcattcatcagagactggagcctgcgaagaaaagaataatttatggaggacggcgcaggaagaggtttggaatgccagaagactatggatgggaaggtgagtaacagtaatgggccagagaaggaaattccttcttgttgtctgaaggccaaggcttcaatccccgagtcagaggcaaaaatccaattcaacggtggttccggggttggttcccagcttctcaaacttgctctgggaaatctgggaaagctgtttatttcaacaacccaatgtggccaggagaagcccattcaatcaaag

SEQ ID NO: 6492 - DNA, 393 bp, Glycine max
  Clone ID: LIB3030-010-Q1-B1-E9
agaatcaaatctctctctttccgatcagatcggacaccctctgtctgaatcccaacccaccgcacacaattcctttcttcttctcaacgtttcaattcgcaatttttcaaaaacttttcccgttttcatcaattcgaatcttattgtttttttgcactgttttcgttaccaaattctgtgatctgtggaattccttgtgattttagggtttggggttgctggattcgggttcattgcgacggtgatggcaatttgcgcgttgaagttttgaatttgtggatattttttcgttctgaatcgttttttcgtggttctctaatggcgtcggctcaggtgctgccaaactccaccgcgtcgtcgcggaagcaagagcatcttgaagctggcaagcgc

SEQ ID NO: 6493 - DNA, 402 bp, Glycine max
  Clone ID: LIB3030-010-Q1-B1-F1
aattgagtccatggaattcaatggatcatcaaatgctgatgggcagcctcctaatattgagttagggggctctggttttgaaactcccaatccaggtgattcccatgcatcgtcaatttatgctagtactgatgttgatatgggtggtactgatgccgaaggaaatcaatcagagcaaccaactgtttttgaagacgggaggggtgagatgttatcaactcagaacactgaggttgctccagatgctactcaggctgaccaagttagtgcaaataatgaagcttctggtgctaataccattgaccctaacttttttgaaggccctgccctgaaaatctacgggcagaagttctggcatcccaacaagctcattctgttcaacctccagcttatgcaccacct

SEQ ID NO: 6494 - DNA, 380 bp, Glycine max
  unsure (1)..(380): unsure at all n locations
  Clone ID: LIB3030-010-Q1-B1-F10
gaaagcagaaagcagaaagatggggttggaatcggtgggagatttagcgattaacgtgattctgaaaaaattaggagcccaagacattgcgagagtggcgtgtgtgagcaaaaggttcagttcttccgcttccgatgacactctttggattaatctctgcttcaatgaactcgctttgacacaacncctcgatcatctcggaaaccctctctcttccttcaaggaatgctatctagcatggagaggagcttttgttatgttaccttggtctcttgttaagcgtgtaaaaaggtgctgggatagaataaaaacctggttgaccaataattttcctgaagcggaggccactctttgtaaaggtgcaactgaagctgacattc

SEQ ID NO: 6495 - DNA, 371 bp, Glycine max
  unsure (1)..(371): unsure at all n locations
  Clone ID: LIB3030-010-Q1-B1-F11
gtcaaactgcagagaagagggcaaacaattagggtttttcaaattcaacatttcttcgtttaccaattttaggtttttttctctcctcactctgttgccttacctttcaattgcaattcgtacaggaggttgttgtattctcatgcacaattgaaactggcaaatgagtgatgcaaaagaaaacgaggaagctggccaaggggtgccctcggtcgtggaagaaaaccagcagttggttgatgcagaggttcaagattcaactgaagcttgctccgctcctgttcaattanaggaaacttcaaatcatgttgaaattgggtcagatcatgttgaaaatacaaaagaaaagccacctgctgaggataaaaatg

SEQ ID NO: 6496 - DNA, 326 bp, Glycine max
  unsure (1)..(326): unsure at all n locations
  Clone ID: LIB3030-010-Q1-B1-F12
caaattaacaacttctggagaagaagaagaatgtggacgcggatactcgcacgagcaacacgtgctgttgccgttgccggcaactattcactcattaatcaacccatctctgaccctatctttctcaaaatccccaaatcaacttttccccaaattttcaataaccctcgatttttggtcacctccaacctcgacaatgagctctcaccggattcttcagtgaacggcggtgacagacagctcgcagaacaagaagaaggaagaggaggangagacacgtacgaggttgattccgacacgttggagagtgtgctacgtcntctcca

SEQ ID NO: 6497 - DNA, 291 bp, Glycine max
  Clone ID: LIB3030-010-Q1-B1-F2
gcacgcaggaggaggagattgatcgagagaagagaagatgactacacgcttcaagaagaacaggaagaagagaggccacgtgagtgccggccatggccgcatcgggaagcaccggaagcaccctggaggacgcggtaatgccggaggcatgcaccaccaccggatcctctttgacaagtaccaccctgggttcttcggcaaggtcggaatgcgctattttcacaagctccgcaacaaattctactctccgatcctcaacatcgacaagctctggtccctggttccgcaaga

SEQ ID NO: 6498 - DNA, 296 bp, Glycine max
  Clone ID: LIB3030-010-Q1-B1-F3
accttgactggtacaagggaccaactctccttgaggctcttgaccaaatcaatgagcccaagaggccctccgacaagcctctaatgcttccattgcaggatgtctacaagattggtggtattggtactgtgccagtgggacgtgtagagactggggttgtgaatcctggtatggtggtgacttttggtcccactgggctgacaactgaggttaagtctgttgagatgcaccatgaggctctcacagaggctcttccaagtgacaatgttggatttaatgttaagaatgttgcaatc

SEQ ID NO: 6499 - DNA, 379 bp, Glycine max
  Clone ID: LIB3030-010-Q1-B1-F5
aattgtctctgattttctcgtagaacgcgtttcttgccactccgaaaaacaagaggaaaaaattggaagttttcaaggatgttagaacagttactgatatttacaagaggagggttaatcctctggacttgtaaggaacttgggaacgctctgaaaggttcacctatcgataccttgatccgttcctgtcttttggaggagcgatctggtgcggcagcatacaattatgatgcccctggtgcttcctacaccctcaagtggaccttccacaatgatcttggtcctggttttgtggctggttaacaaacggatccttcacctcttatatgtggaggatctgcttgctatggtgaagcgcgagttttcgcaagtttatgat

SEQ ID NO: 6500 - DNA, 401 bp, Glycine max
  Clone ID: LIB3030-010-Q1-B1-F7
cttccttccctgaccaacacccccgtgtaaggtgggcagctattaatgcaattgggcagctgtctactgatttgggtcctgatttgcaagttaaatatcatcaaggagtgttgccagcactagctggtgccatggatgattttcagaaccctcgtgtgcaggcacatgctgcttcagcagttctcaacttcagcgagaactgcacacctgatatcttaacgccatacttggatggaatagttagcaaactacttgtacttcttcagaatggtaagcagatggtgcaagaaggtgccttaactgctttggcaacagttgccgaatccttccaaggaacaactcaaaaaatattatgatgctgtaatgccatatctgaaagctatattggttaatgcaaccga

SEQ ID NO: 6501 - DNA, 270 bp, Glycine max
  Clone ID: LIB3030-010-Q1-B1-F8
gtggactatgagaagattgtgcgtgacacatgcaggaacattggttttgtctctgatgatgttggtcttgatgctgacaactgcaaggtcctcgtcaacattgagcaacagagtcctgatattgctcaaggtgtgcacggccacctcacaaagaggcctgaggagattggtgctggtgaccaaggtcatatgttcggctatgccactgacgagactcccgagctcatgcccttgagccatgtccttgccacgaagctcggtgccaagctc

SEQ ID NO: 6502 - DNA, 251 bp, Glycine max
  unsure (1)..(251): unsure at all n locations
  Clone ID: LIB3030-010-Q1-B1-F9
aaaaaacgttgttgatagcaggaagatgcacttcgcaattgcacaaggaaaacaacggaagccaagtttccgcgcattttgtcacataagaaaaacgaagtgtcaatcnctttcttcttcgtttgtattgtttatgaattattaattactttggttttagacagttgtatggcactgcttttgtctctgtccttgaatgatatcacatgaatgcattttggtttgcaacctgctgcgcttgcaacgggttg

SEQ ID NO: 6503 - DNA, 396 bp, Glycine max
  Clone ID: LIB3030-010-Q1-B1-G1
aacgagaggcccaaagacactcccaattcttgaactcatctcttccccacatcctaatgtggtcacgttatctgaaaggagccaaatccaatatccaacttccaactattacaccacagtttagtcatcaacaatataaggttaaaggaatcatatgtcaaagtcatttccatgcaccaattttattggtcagaaatgagttagtatggttaagtatttcacactggatcatctatttctaatattataagctaaaggaccaagaactgaaattattataacctcaacttgaactatccatacatagccactttacactcaatcctggtgtggttgccttcagggccaagccagtgtccattgaggtatggaacccaagtggcaaatacagagttg

SEQ ID NO: 6504 - DNA, 342 bp, Glycine max
  Clone ID: LIB3030-010-Q1-B1-G10
ctcactttgttttttttctctgcagtaatagaaaaaaaagaaagaaagaagaagaagaagaagaagaagaagaagatgttgagggttgcagctagaaggctctcttctctctcctcctcctctccgtggcggcccaaccacgccgcttccgcttatgtctctcgaaacgcagtcgttgatgaccgcagatccgatccttcctcccatcccctttttcccttcagaggttttgctactgaatccctgatccacccaatagaaaacagcattattcctgagattcctgcaactgttactgctgttaagaaacctacttctaagattgtctatgatgagcacaac

SEQ ID NO: 6505 - DNA, 369 bp, Glycine max
  Clone ID: LIB3030-010-Q1-B1-G11
gcaagacgcaacaatagcgttagcagaagagagccaaatccgtcttttgactcataagtaaccaaccgcttctttcaatcaactgaaagtctttatgttttcttaaggttactgtctgtctctgttttatatgtggcatgggcatgagatggatctgtattccatcatgtccatggaagaatagttaactactttccttttttggtgatttctaaggttctaatttataatatgggagtggaggagaacacccctaactccatttctacctcacaatgccacgaagaacaaagcaacaacaaaatcaacacgcatgtgctcttgaatgtccaacgatctcacccctgtcaataattacgtctactggtt

SEQ ID NO: 6506 - DNA, 291 bp, Glycine max
  Clone ID: LIB3030-010-Q1-B1-G12
aaaatggattcaaatacttccctgtctgatgttccttttggtatgattacacgggatgttttacagaacggacctaattggattgatagttctcaaagggaagccggcagaagcatgccctatgaacctccttcccgactaaatgatgctcaaaacctagacttgttcaagccaatagacagtagatctttgggcaacataacgagtgagttcccagcttgcacatccaagcatcacaaccaacgggggttggtggatgagttccacaccttgatataattaatgacctgc

SEQ ID NO: 6507 - DNA, 283 bp, Glycine max
  Clone ID: LIB3030-010-Q1-B1-G3
acaccccccacttgctcctgagccatacaatacaaaaaaaaaaatcgcttttttttattttttctttcaaatcatggctggtgtgaaccccgaggcaggagggtggaaggcttatccttctgttatggagactgctcttggtagtactggtgatggaaggcgtggccataacatgaatgatgatgggtcggtgatgcatttctctgctacaaggccagtggcagtgccatcatctggacagaataaagtagttcctagtcgaactcagtttagcatcctctac

SEQ ID NO: 6508 - DNA, 279 bp, Glycine max
  Clone ID: LIB3030-010-Q1-B1-G4
ggggcgtgttcttttgtgccgaaccatggatcctccaaggaagaagaagaaaggacgatacggcgtcgcagagctgaaaaccctagggaaccagcttctctcttccgcctcgcacatcaacaacctccctctcctcctcaccttcgtttccccttcttcccctcctcaccacgtcctcgaatccctcctctcgctccaatccttcttcctccctctcctccccaagcttccttcctcctccgccccctcctccggcgacgaacaatccgagttcatcta

SEQ ID NO: 6509 - DNA, 293 bp, Glycine max
  Clone ID: LIB3030-010-Q1-B1-G5
gaaaagtcaaaaattatgatggtgatatctcatcacttggctctgcaaaaagatttcttaaagcagtgattgagatcgctttcgccttcaaagagttgaagctatgggaggtagaggcaaatttgatgcataagttaagtaccttagacagtcttggcaaacgatggaggctgaacgtgaggaattatggatcagccggttactcggcatactcattgacactgttctaacgagaggaaacatgatgaatgttggaactaccagacgggatgctaacgcgttcaaattggtga

SEQ ID NO: 6510 - DNA, 409 bp, Glycine max
  Clone ID: LIB3030-010-Q1-B1-G6
attttcttttctctctctcctctcatttcgcaatcctctctgtggcccgcagctagggttttaatttcaatttccaactatttaacgcttggatcgtttattttatgccagaacaacaactctatattgttttttttttaattcgagtttgtgttcttgagctatccgttacggtggggagagattgaaattgacgaattcgatttgcaattgattgattaggtgagagtgagaagtgcgtggaggacgatgaatcacgcgttccgattcacatcgtgaccgcggcgtcacaacttcccgttcaacttccgggaaccctcgcctcaatccaagctcgtcatcgactttgattgcaagggcgttgacctgtgtcgcaaaggcactctctgcgtaatgcaggtccattcat

SEQ ID NO: 6511 - DNA, 279 bp, Glycine max
  Clone ID: LIB3030-010-Q1-B1-G7
cggaaaacactgaagggtggcacggttcatattacctggcgctacagaacacccgtcttaaccctcgagtttccattctcaatctgacagtctctccatcgtcggggcggatttccacatcaagttttggcaaatataagcagctgggtcagcgatgaatcttcctgtggtttcctatcttactaaactctcatatcatatctctgcaattaatgtgattcgcatcgcgtcatccggggaattgctaccctctggagctgatagatgtgacttgataat

SEQ ID NO: 6512 - DNA, 217 bp, Glycine max
  Clone ID: LIB3030-010-Q1-B1-G8
cgaaaatcaatgcagggtgggaccgttcatataaactggcacgacaggaaacacgtcgtaagcctcgacttccatccacactctgcaagtctcaccatcgacgaggccgatttcgagatcacgttttggcacataaaagcagtcgggtcaactgataatctgccagtggatgcctaacttagtagacgcacttagtataacgctgcaggtaaagtta

SEQ ID NO: 6513 - DNA, 408 bp, Glycine max
  Clone ID: LIB3030-010-Q1-B1-H1
gctgaaccctcacctcaatcttgcgtgctagctagctttattccaattcctacagaaccaaattattctgctagctagctagtacgtcaaataaaataaaataatcaaatatggcattcagcgggacccaacagaaatgcaaggcttgcgacaaaactgttcactttgtcgaaggtttatctgccgatggagctgcttatcacaagaactgcttcagatgcagccattgcaatggccttcttgcgataagcaattactcatccaccgaaggagttttgtactgcaaggtgcactttgagcagcttttcaaggaaactggaaactaacccaaagaaatcccagtcgtctggaaagcctccactcgagctgaatagagcaccaagcaagctttctgccttcttctctggg

SEQ ID NO: 6514 - DNA, 343 bp, Glycine max
  Clone ID: LIB3030-010-Q1-B1-H10
cgtcgcaggccctcgtatatgagctaggctctagctacgaaggcataaagagtgcatgtggctccaacaaacatgctgcagatgatgatgatgacctccaccgtagcagatgctgtcctgtgctggcagcgtggctctattctgcatactcagccactgcccttagtggtggaatgcaacatgaacgtgcctcaaagggccataccacatcctatgacatgcccttgttgcctgatgattcagaaacatgtgtgagtgacttggggaaggccttgaaaattagaggaatccagctttttcagcccaatgagacttgtgatctggtctattgctactgtggcat

SEQ ID NO: 6515 - DNA, 366 bp, Glycine max
  unsure (1)..(366): unsure at all n locations
  Clone ID: LIB3030-010-Q1-B1-H11
ctgagcttgaggatcggaagctccgaatagaggatgccaagaatgcaacttttgctgccattgaggaaggtattgtacctgggggtggcactgcactggttcatctctccactcatgtcccagcaatcaaggacaagcttgaggatgcagatgagaggctaggagctgacattgtgcaaaaggcactgatagctcctgcagcattgattgctcaaaatgctggaatagaaggtgaagttgttgtggagaaaataaagagtggtgaatgggaggtcggttacaatgccatggcagacaggtatgagaatttagtggaggctggagttatcgaccctgccaaggtaacaangtgtgctttgcaaaatg

SEQ ID NO: 6516 - DNA, 406 bp, Glycine max
  Clone ID: LIB3030-010-Q1-B1-H12
cttcttcttctctcgaatcttccaccgcaatgaccaccgccaccgagaagctctccgctctcaaatccgccgtcgccggattgaacgaaatcagtgagagtgagaagaacggattcatcagcctcgtcagccgctatctcagtggcgaagcgcagcatgtggaatggagcaagatccagacgcctacggacgaagtggttgtgccttacgacactttggcgccaactcctgatggttcttcggacgtgaagaatctattggacaagcttgtggtgttgaagctaaatggaggcttgggcacaactatgggttgcactggtcctaaatctgtaattgaagttcgtgatgggttgacatttctagatttaattgtgatccagattgagaatctcaattccaaatatgg

SEQ ID NO: 6517 - DNA, 267 bp, Glycine max
  Clone ID: LIB3030-010-Q1-B1-H2
tgagagatatggcaatgttcacgtaccacgttgaaacggttcaatcatggttggcactgagcagacttcacatactgatccacttagtggcagtgttgtcgctgtgttactaccgcagaactcacttgttactggaacctccaacagggccatggcttctgaggaccgttgcggagcttcttctctcggtgctctggttcttcaaccaagccttccggtggcggccggtgtcgcggagcgtcatgacggagaagctgccgacggatg

SEQ ID NO: 6518 - DNA, 296 bp, Glycine max
  Clone ID: LIB3030-010-Q1-B1-H3
tgataaataccgtggcacatggaattcgcagttttgtcagccgagagttgtgctgcgaaaacagcgtatatagattagccaaaatcgcagtggattgtccgagtcactataaccttgcacatgggtccccactcccacaaaaaagttgagtggctcaaaacagtggatcagtactacgtcggagccaacaacgccattccgggtgcatgtgtgcacaatgtgctggattctgtgacatcagctctcttgaaggacaacaatcccaagtttatctaggttgagatggcatttttcca

SEQ ID NO: 6519 - DNA, 174 bp, Glycine max
  Clone ID: LIB3030-010-Q1-B1-H4
caagaaagcaaatattgcctattccgcaatatggcggaaaatgcttcgattgagctgaacaagtttgtgttcttttgtttgttggggctaatacaagtggaagtttctgaaatcatttttgaagagcgttttgatgatggatggcgaggtaggtgagtgaagtcagactggaaa

SEQ ID NO: 6520 - DNA, 405 bp, Glycine max
  Clone ID: LIB3030-010-Q1-B1-H5
gcgaagacgacaccaccttcgtcgtttggagaccccccgagttcgctagggaccttctccccaactatttcaaacacaacaacttctccagcttcgttcgccaactcaacacctatggttttagaaagattgtgcctgatagatgggagttcgcgaatgagttcttcaagaaaggagagaagaacttgttgtgcgagattcacagaagaaaaacccatcaccagcatcatcaacaagtacaagccatgaacaaccatcaccaccatcataagtttggactcaacgtttcctcgatctttcccttccacaattagcagaattcattgtttccccttctcatgattcggacgaggtaataatacccaattggtgtgactcgcccccaagaggagttgccggtgtaaa

SEQ ID NO: 6521 - DNA, 51 bp, Glycine max
  Clone ID: LIB3030-010-Q1-B1-H6
gagtacttcatgctgataccttatttttaaatatattaattattatttttt

SEQ ID NO: 6522 - DNA, 404 bp, Glycine max
  Clone ID: LIB3030-010-Q1-B1-H7
attccaaaaacacacacacacacaaattctcaaacccaaatcccaagtctcctaaaaccctaattcgcagtgaaaatgagagaaatcttgcacatccagggagggcaatgcggtaaccagatcggagcgaagttctgggaggtgatatgcgacgagcacggcatcgaccacaccggaaagtacagcggcgactccgagctccaattggagcgcatcaatgtttattacaatgaagccagcggcggaaggtacgttccacgcgccgtcctcatggatctggagcccggcaccatggactccgtcagattcggccccaacggccagatcttccgccccgacaacttcgtctttggccagtccggcgccggcaacaactgggccaaaggtcactacaccgaaggcgc

SEQ ID NO: 6523 - DNA, 173 bp, Glycine max
  Clone ID: LIB3030-010-Q1-B1-H8
aagcatccattaataacgggaaggaaccgtagcttcctcaaaaaagctttctctccgatttggcttctcaatttcggttgtcatcgtccgggtgaaacataggttgaacccacagtcagattattgccattttcccaaaagtcagatatcatatcaaaggtcaagtaccagga

SEQ ID NO: 6524 - DNA, 139 bp, Glycine max
  unsure (1)..(139): unsure at all n locations
  Clone ID: LIB3030-011-Q1-B1-A1
gagaaatacgcagagaacttcaagtgagggtgaaagtgacacanatctagagagagcactagtactctagaagtctattatattcttgagactgtggccatgcatggcgagtcttgggcttgtgtcttcggcgttatgg

SEQ ID NO: 6525 - DNA, 297 bp, Glycine max
  Clone ID: LIB3030-011-Q1-B1-A10
cactttcagactctttcactctctcgctctctcactcataattttctcctctctctgattcctttaactaattggagttttcacgctccttggtctttcccatgaagccatttcatcttcgtagggaggtcgggaaagggtcagccacttcgcacgattggtgaatgaggatgtaaatgatggaacctcaactgaggggttcacaatgctgttgaataaggacaacgatgtgaaaaagcacagtggaaacccagagtcagcataatggatagataatgatcctcattgcaaactttt

SEQ ID NO: 6526 - DNA, 297 bp, Glycine max
  Clone ID: LIB3030-011-Q1-B1-A11
gattcgcagcagaagataagggatgtttgggttaatcggaatgaaaggccaatttgttggtaggatcgggaacaagaagaaggtgtgttgagcttcgcaacaacatgccacaaccacttctaatggtggtgcgcatggaggagggcttttgccattgaaggacattgatgaatgtgggtatgagagggatagtgggtttgtgtggctgaagcagaagaacagcacacaccacaagtttgagaacattgggaatctggtttcctatgctcgtgagatcactgcctatcttgacgttcg

SEQ ID NO: 6527 - DNA, 434 bp, Glycine max
  Clone ID: LIB3030-011-Q1-B1-A12
ctcgagccgaatcggctcgagggttgcatgcaactctttgctctctttctctctctctccattcgctctcatttttcatttttctttttctattctttgcttcagtggccttaccagtgtgttgctcactgagaaaccaccaattttcagcatgacaagataagtcctgaagttgaaatcaggatgccaatggaggcatttccaccagtttcagctgatgtgagctttatttctaatagttttccgaaatacaaactggatgttgataatcaagttctggaagagccagttgaggataacctgggtccttctttgaaggatgttattgaacaagaagctttcaatttgtcagaccaacacaagcgtatctcagttcgtgaccttgccagtaaatttgacaagaacttggctgcagctgctaagttgtctaatga

SEQ ID NO: 6528 - DNA, 365 bp, Glycine max
  Clone ID: LIB3030-011-Q1-B1-A9
ctctcgcctcgagcagcttttctatctgcaattgcgatgctttcctacttctacaagcacgaaagttgtgggcagtgcacaccatgcagggagggaactggttgtggttggacaatcatggcaagaatgaacgttgggagtgccaagctagaagaaattgatatgcttcatgaattgactaaacatattgaagggcatacaatttgtgccttgggtgatgctgctgcatggccactgcatggtcttatcaaccatttcaggcttgagcttgagagaaggattagagatcatgcacacttggagctgctgctcgccactggctaggctttcactaaggggtgtcattgtactgctggatagcaaga

SEQ ID NO: 6529 - DNA, 57 bp, Glycine max
  Clone ID: LIB3030-011-Q1-B1-B1
ctagcctagctagctagcacatagcaatgttaaaaaaccaaccacaaccagattggc

SEQ ID NO: 6530 - DNA, 426 bp, Glycine max
  Clone ID: LIB3030-011-Q1-B1-B10
gtacataagctaggcggctcgagataggcgtgtagggaaaccgtttcattttcaagcgcgtgactttcaaatccaatcttccataccaatggccttcagcaacgctctcagatctgccgcgaagcttgtcgcttcttccgaatcctccctcgctaactcagtgagcataggttttcattcaactggcatgaagaggatgggaggtggacatggccatgatgagccctattatcttcatgcaaagcacatgtacaacttggacaggatgaagcaccaggggttgaaaatgtcccttgctgtattcactgctttcagcattgtggttgcagttccagtgtatgctgtcattttccagcccaagaagacagcttctagctacgctcgtctttctacttccatttgcaacaataacgtggatttggggat

SEQ ID NO: 6531 - DNA, 409 bp, Glycine max
  Clone ID: LIB3030-011-Q1-B1-B11
cacaaaagtaaaaaaaaaaaaaaaaaaacagagaaagagtgaagtagaaataaaaccaaggaaattaaggataatggaagtagcaaaggtactgcacatgaacggtggcgttggagacgcaggctatgcaaacaactcctttgttcagcaaaagttgatttgtttgacaaagcccttaagataagaagccataaaaagcctctattgcggcacactccccataaggttggcaatggcagatttgggttgctcttctgggcaacatgctttaattgtcgtgtcagacttcatcaaaactgtggagaagctttgcctacaattgaaccataaatctccggaatacaaggtttttttaaacgatcttcctgagaatgacttcaacaacataattaagtcccttgacagcttc

SEQ ID NO: 6532 - DNA, 426 bp, Glycine max
  Clone ID: LIB3030-011-Q1-B1-B12
gcaaaacctctcttcttcttctgattgattccacctcgcgatttttcgattttcgtttgttttcttctttttcggtttctgatctgaactcgattcgattcgctattgccggaaaatgagtcctccggcaagtgtccggtgatgatcgctccctcgagaggttgttgaggttatcgttgttgttcttcgaagtcatggtttcgatctgaggttttggcgctctcgagttcgttttgtagcatcatcatcatcaccataccttgttcagattctgctcactttcaccacaacggctttactatttaccgcgtttcgttttcgtgtcaccgcaaataatgaaaggaggtgttccctgtatccactcctcgtcagggaagatctgaagcagtgctagctgctcacgtcctgtaatggacgcatactcct

SEQ ID NO: 6533 - DNA, 143 bp, Glycine max
  Clone ID: LIB3030-011-Q1-B1-B7
aacaaaagcattctttaaaggggttgaaacatggaaaaaggaaaccataatgagaaatgatgctgctaaacgacaagaagcaaacggttctggggctgtagtggaatacaaagctcgtcccagtggaccagaaaaggacacca

SEQ ID NO: 6534 - DNA, 130 bp, Glycine max
  Clone ID: LIB3030-011-Q1-B1-B8
cttctaatgtaggattctctattataatatataagaagactgctgtagttggattttgttagagagacatcaactaaatggttgccgtgtatgaactgagaatgttaatgaaagttattcccctcgttga

SEQ ID NO: 6535 - DNA, 286 bp, Glycine max
  Clone ID: LIB3030-011-Q1-B1-B9
tttctctcttccaatctcatttctcaagatcgctttcgctgcttcctcatgaattatgtcttttgtgccgaattatcaagcagacgatcgtggtttaaatagtaggaaccggtccagcttcgctggaaggaactatcgtaccatcactaggaaaggattgcggaatacttaggagtccacgaattgtcagattcacaatcacaaccggattgcattcggcgacaattttaatttttacaatgccgatgatgacgaagtatgccatataggatgccgtccgactacc

SEQ ID NO: 6536 - DNA, 81 bp, Glycine max
  Clone ID: LIB3030-011-Q1-B1-C1
gtttgttgttgtaactcgttcttcttcttttgttgttctgtgtttgggtgtggttgtgctcgcatgtgagaatgtcttgct

SEQ ID NO: 6537 - DNA, 357 bp, Glycine max
  Clone ID: LIB3030-011-Q1-B1-C10
gtcgccgccaccatcgtcccccccgccatcatccccaccaccatcatcttcgcctcctccgtcgccgccaccgccgtcatcaaatgatgagaagagtctcgcctccgccatctgattcatcgtcctgggccgcatctccaccacggctgccacctcctgataaggattcaggcagcgaccggtcgccaccgcctgcgccacattcaagacatgagttttcacctcctccgcctccgagccaccggttgtctccacccaagtcgtcatcatcaggttcctcggatggattgaatgatattgattgacactcattgagcatgccagttagactaggaattgcagctggagctggcattt

SEQ ID NO: 6538 - DNA, 329 bp, Glycine max
  Clone ID: LIB3030-011-Q1-B1-C11
ctcccccaccaccttcaccatcaccaccatcaccttattattatcattcaccacctacatctaaagagcatgtataccctccctactaatacaggtcacgtctagtaccaacgtcgcatcctccagcggacaactatgtgagtcctctatgacgttctctaactcctcctctaacataccattctacagcaacacctccgcattctgcagctcccgcgcccaagtatatttacaaatcatctcgacctccagtttacatctatgctcacccacctgcatttatctccagttgagttgtttctacgacgtcaccattctcgatctgtcat

SEQ ID NO: 6539 - DNA, 437 bp, Glycine max
  Clone ID: LIB3030-011-Q1-B1-C12
ccactattggagctgtcaacagagctccactgagcttgaacagctctgaagctggagattcggttcccagttcagccttctttggcacaagcttgaagaaggttactgcctcaagggtccctaacgtcaagatttcttctggaagtttcaaaatcgttgcggcggagaaagagattgatgagcaacaacagacaaacaaggacagatggaaaggtcttgcctatgatatttcagatgaccagcaagacatcacaagaggaaagggtatggttgattccctcttccaagctccacaggagactggaactcactatgcagtcatgagctcttttgagtaccttagcactggacttaaacagtataacttggataacaacatggacggtttttacattgctcctgcttttatggacaagcttgttgttcacatcaccaag

SEQ ID NO: 6540 - DNA, 76 bp, Glycine max
  Clone ID: LIB3030-011-Q1-B1-C5
cacattggtttgtttggggtcctgtggctgcacatatccaaccttaagttctgccgtcgtggcgctctggtcattg

SEQ ID NO: 6541 - DNA, 77 bp, Glycine max
  Clone ID: LIB3030-011-Q1-B1-C6
cgagcctggtgtccctttgggtcctcttctccggcgttgcgttgtgtgctggaaattgctcgccgcagcatcataac

SEQ ID NO: 6542 - DNA, 77 bp, Glycine max
  Clone ID: LIB3030-011-Q1-B1-C7
agcaaataaagcacagaacagttgaagtgaatggcataaaaatgtatgttgcagcgaaatgagagggtccagtggtg

SEQ ID NO: 6543 - DNA, 145 bp, Glycine max
  Clone ID: LIB3030-011-Q1-B1-C8
aaagaaagaaaaccctagcttaccttttcaactttcaagatgcaaatcgttgtgaagacacgcactggtaagacaatcacgcttgaggtggagagttcagataccatagataatgtggagtccaagattcaagacgtggaaggga

SEQ ID NO: 6544 - DNA, 263 bp, Glycine max
  Clone ID: LIB3030-011-Q1-B1-C9
ccgggacatgacagaagagggttcatcttgttagggaggtcaatgtcaacgttaattctgccattgcagcttccgcttctgaattgaatcttggactggttgctaacatcttctttcagctggaagaagccgaaagttcggatatgtcagatcggttcatcaagacccagatcgccactcatcctctctatccaaatctagtatccgcttacataaaatgtgcgaaaggttgagtcaccgctataactggtgtcacttcttga

SEQ ID NO: 6545 - DNA, 149 bp, Glycine max
  Clone ID: LIB3030-011-Q1-B1-D1
aaaccagtatctgaggtcaaccctagtttacggtctcaagtaaaatctgattctatttctactgagtctctgtcaattaatcgggagagtggactaaaggatactaggattactgagaaggtcaaattagaacacgatattgttaagcc

SEQ ID NO: 6546 - DNA, 293 bp, Glycine max
  Clone ID: LIB3030-011-Q1-B1-D10
gtgggttctttttcttcttccctccacttttcacgggtctcgtagtgctggttctcttctttatacggatggcagcaccattggcatgtcgtgttgggagtggtttatctatacagagtaatggagaactcttggcaacgacgtcaatggaagatatctcttctcatatcatatgctttcagcacagagtaaggagtcaaagacaatatgcataaaggcatccttggatcataggaagcatgaacggagaataggatttctgaaattgttgactgtgggagttggcttatttt

SEQ ID NO: 6547 - DNA, 427 bp, Glycine max
  Clone ID: LIB3030-011-Q1-B1-D11
ctctgcgtcttcttcctctatcaatcgttttccatggctcgtaccaagcaaaccgctcgcaaatccaccggtggaaaggctcctaggaagcaactcgccaccaaggctgcaaggaaatctgcaccgacaaccggtggagtcaagaagcctcatcgctatcgccctggaactgttgctcttcgtgagatccgaaaataccaaaagagcacagagcttctgatccgcaagctccccttccagcgtcttgttcgtgaaattgcgcaagacttcaagaccgatttgaggttccagagtcacgctgttcttgcgcttcaggaagctgcggaggcttacttggtgggtttgtttgaggacaccaacttgtgtgcgattcacgccaagagggtgaccatcatgccaaaggacattcaactcgcacgccgcatcc

SEQ ID NO: 6548 - DNA, 423 bp, Glycine max
  Clone ID: LIB3030-011-Q1-B1-D12
gctgtgaagagctataaacaagcattgattcttcgtccagacttccctgaagcaacttgcaatctccttcatacataccaggttttgtccattctttattataatatttattattttcagtgattttggcagagtatcttttgatataatcctgttgcttatgtgttacatgaattcattatcttctatcccaatgcacccccaatatggttaagtggctattgctttgattggcttcagatagatgttgctggtcatgtcatgtggttggaatgaataataagtatagccttctgttgttaaagctgattggattatatcataaacttgggttttggatttgctttccagtaaaattgattgaagtcatggtttaaatgatgctctatatgttataatgcaacaatgttctctcattgttgt

SEQ ID NO: 6549 - DNA, 54 bp, Glycine max
  Clone ID: LIB3030-011-Q1-B1-D2
atagccttcaaatccttcgtcggcctccgccagtcctcgccggaggccccgcag

SEQ ID NO: 6550 - DNA, 144 bp, Glycine max
  Clone ID: LIB3030-011-Q1-B1-D8
aagcaataagatgaaaatgaaagtgcttgttttgtttgttgctacagttttggtagcatatgagtgccatggctcagacgaccagaagttccctctcgagatggaaactgcgtttggtgggcaatacagcactggcgtggcatg

SEQ ID NO: 6551 - DNA, 278 bp, Glycine max
  Clone ID: LIB3030-011-Q1-B1-D9
ctccagccgaatcagctcgagcgggtctagaaagacatgtcgctgcaacttcagcatcatcttcttcttcttgatcacaggtggttctgttcagtcttccttgcaccttcttctttggagatcgaggttgtgtttttgtgaatatgggaattccacagaaagaccctctttctcaattgagtttacgtcctggcttgcggttttagctcaccgacgatgaactcctcattcagtatctagacatcaatgtcgctggcaaccaattctatcttccaatc

SEQ ID NO: 6552 - DNA, 408 bp, Glycine max
  Clone ID: LIB3030-011-Q1-B1-E11
attggatgctttagttgggcttgtttcgtgatcctacaagctattacgcttaaaacctaccctgctgaactctctctttctgcgtggatatgcttaatgggcacaattgaaggtgccgcagtggctttgattatggaaaggggcaacccttcagtttggtctctaaaattggacatgaaactgctatgtgcagtctacactggcatagtgtgctcgggaatgggctattacttgcaaggagtagtgatgaaaactagaggcccagtcttcgtaacagcttttagtcccctctgcatggtaatcctggctgtcatgagctactttattctggccgaacaagtgtttcttggaagaatgatcggtgccgttattatttgtttgggcctatacgttgtggtgtgggggaaa

SEQ ID NO: 6553 - DNA, 404 bp, Glycine max
  Clone ID: LIB3030-011-Q1-B1-E12
ggcttgcttgcaggtggtgattttgaagcgcagcgtggaacatataagatacttaaggttgtgcctttcaattcagtccggaagaagatgtctgtgctagtaggtcttcctgatggaggtgtccaagctttctgcaaaggtgcatcagaaatagtattaaaattgtgtaacaaagttattgatccaaatggaacagctgttgatctttctgatgagcaggcaaagaaagtctctgacattataaatggatttgccaatgaagctttgagaactctttgtttagctctcaaagatgtaaatggaacccaaggagaaagcagcatccctgaagatagctatactctgatagccattgtgggaatcaaggatcctgtgcgcccctgggttagggaagctgttaaaac

SEQ ID NO: 6554 - DNA, 76 bp, Glycine max
  Clone ID: LIB3030-011-Q1-B1-E7
gaagaatcgaagataagaatgaataaagttgttaggtcgaatttgacggtgcgtcttggtgaggttgtttctgtgc

SEQ ID NO: 6555 - DNA, 112 bp, Glycine max
  Clone ID: LIB3030-011-Q1-B1-E8
tattataccatatttatatatcttcacatacttaataatatataataatgggtgttgtacggacgtgggagagcaggagggcgtccctggaggcctttcgccggagccgggt

SEQ ID NO: 6556 - DNA, 414 bp, Glycine max
  Clone ID: LIB3030-011-Q1-B1-E9
ggaaaaacaactcaactttgaaattcttaaaaccctaactggtccgaaccattggagccaccgtgcaatagttcctcctctcactctctccctcaacacaccattgattttggtttcagcttatttggaagagggttgtaacgctgacgtgaaatttttctgaagacatagatgcaggcttgtacaacgatgagttctttgcagcaacagcctatttggaccaaagggttaaatttccctgcaaaagggtatggcagcaataacgggtttctacctcatgtgaggttctgcaatattaatccatccaaagcttctcatgttgaagcaagtttagtcactgggaagccgtcatctgtgcctttccctgtgcctgatattggaggcgacggaagtagcttcctggaatatggcttg

SEQ ID NO: 6557 - DNA, 304 bp, Glycine max
  Clone ID: LIB3030-011-Q1-B1-F10
tgaaaataagggaagaactaagaagagattttattattattattattattattattacattgggttttggtgggaatcgctcgccatgaatggcgaggggagtgaagcaatgcaagtggagatggagattgagaaggagaggttggtgtacatgtggggttaccttcccggagctctgccgcagaggacgccactgttgacgccggttctcgttagggttccgccctctggttactcttggaaggatgtatgcggtggtggttgtggattcgccatgggtatccctgagcctggaaagctcata

SEQ ID NO: 6558 - DNA, 391 bp, Glycine max
  Clone ID: LIB3030-011-Q1-B1-F12
aaattcgatttgtaccaaattttcttcacaaaatgtctggtcgtgggaaaggtggcaagggtttgggaaagggaggtgccaagaggcacagaaaagttcttcgtgataacattcaaggtatcacgaaacctgcgattcgtaggttagcgagaagaggtggcgttaagaggatcagtggtttgatctatgaggaaaccagaggagttctgaagattttcttggagaacgtgattcgagatgctgtgacctacaccgagcacgctaggaggaagacggtgactgccatggatgtggtttatgcgctcaagaggcacggaaggaccctctatggtttcggaggctgaatgattgattcttagtattattaaattatgttgcaggatataataat

SEQ ID NO: 6559 - DNA, 96 bp, Glycine max
  Clone ID: LIB3030-011-Q1-B1-F7
gcacaaagcaagctcatcctagagttttaaaaatggcagcatcctccgccatggctctctcgtccccatccttggctgcgaaggccgtgaagctgg

SEQ ID NO: 6560 - DNA, 384 bp, Glycine max
  Clone ID: LIB3030-011-Q1-B1-F9
ttagattttatcccactgatgaggagcttttggttcagtacctttgccgcaaggttgctggccatcatttctcgcttccaatcattgctgaagttgatttgtacaactttgatccatgggttcttccaggtaaggcagcgtttggagagaaggagtggtacttcttcagtccaagagacaggaagtaccctaatggttcacgaccaaacatagttgcgggttctgggtattggtaagccactgtaactgacaaaatcatcaccactgaaggtagaaaagttggcataaaaaaagcacttgttttctacgttggcaaagcacccaaaggctccaaaaccaattggatcatgcacgagtatcggcttctctactcttcccggaaac

SEQ ID NO: 6561 - DNA, 82 bp, Glycine max
  Clone ID: LIB3030-011-Q1-B1-G1
gaattctctatcactcttcaccttcctctgcgcaatttgtgcgcactccgtcgcggtcgacgccgcggcatatccttccatc

SEQ ID NO: 6562 - DNA, 212 bp, Glycine max
  Clone ID: LIB3030-011-Q1-B1-G10
gagagaacaaagcacttagtgctattcaataattacgaaaaaccaacagcgagtgttgtttttgtttggtccaggctggaccagggaatgaatagagatgagaggctttcggttgaagagaactgagttaagcggcgaagcaaaacgcagaatcggcggcagaaattgccaccggaagcacgtcgaagacgggtgaaccaaccacaaaattc

SEQ ID NO: 6563 - DNA, 376 bp, Glycine max
  Clone ID: LIB3030-011-Q1-B1-G11
ctcctttgaagaaacaaattagaagagtgtgttgtgttgtgttgaagtagcaagctagcaaagatgtttggcatcttaggaggcaataaggggcacaagatcaagggtactgtggtgttgatgagcaagaatgtgttggacttcaacgaaatagtgtccactactcagggtggtttggttggtgctgccaccggcatcttcggtgctgccaccggtattgttggtggagttgtcgatggtgctactgccatcttcagtcgcaacattgccatccagttgatcagtgccaccaagactgatggacttggaaatgggaaagttggaaagcaaacctatttggagaaacatcttccttcgttaccaaccttgggagaca

SEQ ID NO: 6564 - DNA, 120 bp, Glycine max
  Clone ID: LIB3030-011-Q1-B1-G2
gtgcaagagtaagcaccttgggaggagcacatggcacaaatactgatttaaaacagcgttctggggttactgccacggccacaatcgtcagcgagcctgatgattcagaaggttccagct

SEQ ID NO: 6565 - DNA, 77 bp, Glycine max
  Clone ID: LIB3030-011-Q1-B1-G7
ggacgaccctttggtgtttggatcttcaagaaagagagacccttgggatttcgtcaccatgagtctcgtcggtcttg

SEQ ID NO: 6566 - DNA, 112 bp, Glycine max
  Clone ID: LIB3030-011-Q1-B1-G9
ggagttagatctaaactctatggcatcggtaacgaaatttgcagcagattttaattcctctggtcttccaatcaatagcctatcgtaagaacttgcaactcgaactgtactt

SEQ ID NO: 6567 - DNA, 108 bp, Glycine max
  Clone ID: LIB3030-011-Q1-B1-H1
ggttgctccatcacctaatcacttccccacttcccctgtaaatcacgtttagttctcacaaggtttgaaacaatggctgatgctgacgacattgaacctcttgttgtt

SEQ ID NO: 6568 - DNA, 180 bp, Glycine max
  Clone ID: LIB3030-011-Q1-B1-H10
atccgtataataggtgatcgattcccatggcaagtgaagagtgccatcttgtctactctaactacaatgataaaaaagggtggaatctccctgaagccttttcttcctcagctgcaaacaacatttgtcaagtgtctacaggatattacaagaactgttcgttctaatgctgccctggcg

SEQ ID NO: 6569 - DNA, 214 bp, Glycine max
  Clone ID: LIB3030-011-Q1-B1-H11
cggctcgagatccgttcaataggtgatccattcccacggcaggtgatcagtgccatgttgtccactcgaactgtaatgacccaacagggtggaatctccctgagcccttctcgtcgctcggcgccaggcacatggggtcagtgtccacatcatcttcaacgatctgtaccatatacatccgcacacttgcctcggcaccgtctccgactgtctc

SEQ ID NO: 6570 - DNA, 148 bp, Glycine max
  Clone ID: LIB3030-011-Q1-B1-H3
caagcagaagcctatttggatgatgaaacctgaacagattacgaaggaagaatatgctgctttctaggagagtcttaccaatgacggggaacagcatttggctgtgaagcactttgctgttgagggtcagctcgagtttaaggctgtc

SEQ ID NO: 6571 - DNA, 54 bp, Glycine max
  Clone ID: LIB3030-011-Q1-B1-H4
ctgaggtaactgtacatgtttttgtatttagtgtgctagatggtgggaagcatt

SEQ ID NO: 6572 - DNA, 266 bp, Glycine max
  Clone ID: LIB3030-011-Q1-B1-H5
ctcgagccgattcggctcgaggctcaaacttggtgcctgtgtggatcttcttggagggttcgttcacattggtttgggtgaccctgttgcgaaccagtgctgccccgtgcttcaagggcttgttgaggttgaagctgcggtgtgtctgtgcaccagtcttaagcggaagcgtctcaacctcaacatgtatgtcgcaggtgcactgcagctccttgtgacttgtggcaagtctgctggtcctggttacacgtgctccctctaaacca

SEQ ID NO: 6573 - DNA, 77 bp, Glycine max
  Clone ID: LIB3030-011-Q1-B1-H7
gagaggtacttgctcagagatatatttttttttttgtcggcatcattttctgggtagcgttgggtctctgtggttca

SEQ ID NO: 6574 - DNA, 357 bp, Glycine max
  unsure (1)..(357): unsure at all n locations
  Clone ID: LIB3030-009-Q1-B1-F12
tacctgtacaggaacattcttcaccatctcaaactgatcaacatttgatgagatcagatgctaagtttagctatganatgtctgttaatgggaaaactcttcataaagactatctggatgctcacatccagcaaggtgaggaggcacaaaccatgattttttcagctaccagtgaaacacagtcagtggataagggtcaacttgttgcttcccatcaagatcaaagcatgcaacaaatttcttcacagttctctgatgctttacaattgaactcttttgaaccaaatggtgaaatcaaggagcacaattctgtgacattatctaataatggacctgacgaccaagttttattggctg

SEQ ID NO: 6575 - DNA, 372 bp, Glycine max
  Clone ID: LIB3030-007-Q1-B1-G5
gttcgatccatcgatcatggcggacgaggtcccttctccttcagcagcatctactgctactacctctcttggttcgagtgtgatctccctggtgaaccgccttcaggacatcttcgcccgcgtcggaagccaatccaccatcgacctcccccaagtcgccgtcgtcggcagccagagcagcggcaagtccagcgtcctcgaagccctcgtcggccgagacttcctcccacgcggcaacgacatctgcacacgccgccccctcgttctccagctcgtccagaccaagcgcaagcccgacaacgacgagtacggcgagttcctccacctccctggccggaaattccacgatttctccgagattcgcagggaaat

SEQ ID NO: 6576 - DNA, 393 bp, Glycine max
  Clone ID: LIB3030-007-Q1-B1-G6
aaaccacacacacaaagttgcatcaagatcaagatcagtcttattatactattactattactttccacatcaacaaagagccgctcctaccccacgattgttttagccaccatgtgtgtgaaggaccaagagaaagatatgatggatagcaccacaaccaattcatggcctttgcaacattgccaccttttgctcaagactcacatggacaaaaaaggatctttcctcagaacttcaagtgatgacaccaccaacatcagtgttcaaaattcctttcctctagaaagcatatgtgaggacacagtggttgtagacaagaaacagaatctgatgaattttgttccagctcttcggtctggagagtggtctgatattggagaacgtccttacatg

SEQ ID NO: 6577 - DNA, 354 bp, Glycine max
  Clone ID: LIB3030-007-Q1-B1-G7
atgggaaactctctgcaatgcttactgtggtgaaaactatgggtctactgacttcgacacgcttgaaaacgtgcgagatgcaattttaaggatgacatattactggtataactttatgccactgtctaggggatcggcaggggttggatttatagttatgctgggtttgttacttgctgccaacatggagttcacaggaagcatcccacagggtttgcaggttgattgggaagccattttgaacttggatccaaactcgtttgtggattcggttaaaacgtggctgtatccatctctgaaggtcacaacctcatggaaagactaccctgatattgcttcaacatttgcaacaac

SEQ ID NO: 6578 - DNA, 198 bp, Glycine max
  Clone ID: LIB3030-007-Q1-B1-G8
aacatttctctaatctgaatatggcagtgaacaacagtcgtaagggaattcaattcatgacgtttaatctctttcatcttctccgttctgccatctctgtttattcccatgcatcctctaatgcctttcagatttgccgatgggtataacatcttgggtatcacatcgtgagaactcaccatgtggaagtcgcctaag

SEQ ID NO: 6579 - DNA, 261 bp, Glycine max
  unsure (1)..(261): unsure at all n locations
  Clone ID: LIB3030-007-Q1-B1-G9
aaagaattgatgctaatggtaatgtgatagaagagaggaaggatggaattggtgcaccaaagattgagagacccttacagaaacatggtggcagacttggacatgatgaaaagtattgtggttcatgttttggtgcagaagagtcagatgaacactgttgtaattcttgtgaagaagtgcgtgaagcatatttgtcattgcccagccctttnttccnanatgcgtcaccctcatcttcacctcnccttgggcgttgtccat

SEQ ID NO: 6580 - DNA, 346 bp, Glycine max
  Clone ID: LIB3030-007-Q1-B1-H1
ggagttataagatattcacagaagcagcaaaaatgcttatgcaacaagttcatgtatcaaatccaagttcatcttgtctcatccttcaaaagccatgcctccgtgacattactcacccttcttttcagctttggtcaaggccatcatcgttcccaaaccaaaggaagcaaaaaagggtttcttatggatgcaggagtaatggcaacaaaatcaaagctgtggctgtgactgaagctgaaaacaaatcagtgaaagttaaagccacaatcactgttcagccaaccgttggtgggattttctcagaaatggctatagagagagggttggatgatataaaggatttgct

SEQ ID NO: 6581 - DNA, 362 bp, Glycine max
  Clone ID: LIB3030-007-Q1-B1-H10
tcgcatgatcggactaagctcgatcgccagtgtaagactaagatggtcccggttggtgaacgtttcaaagcttgtgtttccatcttagtactcctccggttggtagcacagtttgcttgggtggatggttgtaaacttggctcacgtgctcatgtgaattcttataacctcaagcatggcctatatcccacgtagaatcatccagtacctgataatgtcgttggtctgtattacagcctttcactcaacccggtactgcatgattctgagtcgtcagtcccaaatgattggcacaataggaacatgtgtattctcactggtgctccagtgctcaattctaagcttaacattacatcgctttc

SEQ ID NO: 6582 - DNA, 391 bp, Glycine max
  Clone ID: LIB3030-007-Q1-B1-H11
gctgagttgagttccgtgttctcgctcagcatggctttggttaacctttcttacatcggcattgtgacccttataacccttctggcttccaccgaggccagggtcccgggcgtgtacagcggcggcgcgtgggagaccgcgcacgccacgttctacggcggcagcgacgcgtcggggacaatgggcggcgcgtgcgggtacgggaacctgtacagccaggggtacggcgtgaacacggcggcgctgagcacggcgctgttcaacaacgggctgagctgcggtgcctgcttcgagataaagtgcgcgaacgaccccagctggtgccacgctggcagcccctccatattcgtaaccgccacaaacttctgccccccaaactacgcccttccga

SEQ ID NO: 6583 - DNA, 414 bp, Glycine max
  unsure (1)..(414): unsure at all n locations
  Clone ID: LIB3030-007-Q1-B1-H12
gagaagaaatctcctagcaagcatgtaaaacatggacgaaaaggtgcctcaaaaaattaattcccatcatgaggatgccaaagagagttctgagttatcaaaccctgaagatatatctaaagctgagattaactcaggtggttctgaagcagaacaggctgaagggtctgaaataattgtaactaagcagaagaaatctaacaagaaagcaaaatcagtttcacgtggaaagaaacttaagaaagagaagagcttaaggtataggaaagaatcagatgaagagaaaaggaagaagaagaagaaggaaaagaaagggctgaaagagaagatcgaggagaaaatagagggtgatcatcatcatcacaaggatgaggacacaagtgtcnctgttgagaaagttgaggttgttgaaac

SEQ ID NO: 6584 - DNA, 382 bp, Glycine max
  Clone ID: LIB3030-007-Q1-B1-H2
cagagaaagtgaaagtgtctgagagtgtgtgtgtgacttatggagtccaattcagagttcgacgtgattatcatcggagctggcgtcatgggcagctccaccgcctaccacgccaccaaacgcggccttaaaacccttctcctggaacagttcgacttcctccaccactgtggctcctcccacggcgaatcccgcaccatccgcctcacctatccccaccactactactaccctttagtcatggactcttaccgcctctggcaagaggcgcatgcccaagtcggctaccagatctacttcaaggcccatcacatggacatggcccatcacaacgagcccgccatgcgcgccctcatcgactactgccgcaatcctccaaatc

SEQ ID NO: 6585 - DNA, 381 bp, Glycine max
  unsure (1)..(381): unsure at all n locations
  Clone ID: LIB3030-007-Q1-B1-H3
aagagttgctgcttcttcagccactccgcacctcgcagcctctgtgccctcaacaaccatggctgaaatcgaaactaccgttccagatccacccaaatcgacgtcaaactcttcaatcgctggagcttcgaggatgttgaggttaatgatatgtctctggctgattacattggagtgtccccatcaaagcatgctacatatgttcctcacactgctggtaggtactcagtgaagaggttcaggaaagcgcagtgccccattgttgagaggctcaccaactctctgatgatgcacgggaggaacaatggaaagaagctcatggctgtcaggattatcaagcatgccatggagatcatccacttgctcactganctgaaccca

SEQ ID NO: 6586 - DNA, 363 bp, Glycine max
  unsure (1)..(363): unsure at all n locations
  Clone ID: LIB3030-007-Q1-B1-H4
gtcaagttccccaaaatccaatggttaacctgcaaaaggaggcgccaaacttaaaacccaaattcaccaccataaacaaccctgtccaaattggaaatggctatccccctgtctccaatggccacacttcccacaattgcgtcaagtttgctgaactcataaccaagattgacaggcgatccggcaaagagcttgagaaggagcccaagtttttgaagaacggtgatgctggttttgttaagatgattccaaccaaacccatggttgttgaaactttctccgagtatcctccacttggtangtttgctgttanggacatgcgtcaaactgttgctgtgggagtcatcaagaacgttgagaaga

SEQ ID NO: 6587 - DNA, 384 bp, Glycine max
  Clone ID: LIB3030-007-Q1-B1-H5
gaaaaaaggtggtagttttgtaattaaaaagtgaaaacagaatatgaaatttggaaattaaaatagaagtaaacatgcccttggtgtttttctcctatagattctaaaaagaattaaatgtttggtttgagttggttttgaagttctgttgtgagtcatgactaatgcttgagtgaggggaatagtttggaaagggaacaaggaaatggagataaagcaatctatttttgttctccatttttagcgttcctttcatctcttcaccaacatatacccgaagacaccagaagtactctttttatgggtttgtgactatttatttttattttttattttattagagcacttcaagaattgacttcatttgcttatctttttctgaaa

SEQ ID NO: 6588 - DNA, 365 bp, Glycine max
  Clone ID: LIB3030-007-Q1-B1-H6
ggcgaaggactttaggttgggatttgggaattagggttattcgcgtggcgaagatgattgaggtggttttgaacgatcgattggggaagaaggtgcgcgtgaagtgcaacgacgatgataccatcggcgacctgaagaagcttgtggcggctcagactggcacaagagccgacaagatccgcatccagaagtggtacaccatctacaaggatcacatcactctcaaggattacgagatccatgacggcatgggtctcgaactctactacaactaaacacaacaaggtgtgttttatgcgtaatatactatgtgctgggaatgggataagcgctaaatgtaattctgacttgcgaaagttcccatg

SEQ ID NO: 6589 - DNA, 377 bp, Glycine max
  Clone ID: LIB3030-007-Q1-B1-H7
gatttcaggaaaatccaggagatagggtgttgggtcatgctcggaaggtggagggatcagtgaggaagaagacgaatgcaaggaaagagcagagaaagagcaaagaggagagaatggctatagaacaaaaggagagggaggaggagttgaaacgcttaaagaatttgaagaagcaggaaatacaggagaaggttaaaaagataatgaagactgcagggatccatggtgatgatattattccattgtccatggcagaaattgaagaggaatttgacccagaggagtatgatagaatgatgaagaaggcatttgacgagaaatattataatgcagtggatgctgaccctgacttttgtagtgacattgatgacaatgag

SEQ ID NO: 6590 - DNA, 341 bp, Glycine max
  Clone ID: LIB3030-007-Q1-B1-H8
tgacacaagcattcaataggatttcaccactttatcgcaacattttaacatgatgcggtaataaagtaaattcttgttgaatatttggataacgatgttatatactcatagtttgtgtgtataaattaaacttatatttattatttactctatatatgtcactctacgtttgtgtgatatattatacagttaagtatttagctatctttgaatatgttaaggatgatcatatcagataaagctctctagagttgaatatgaccagtatacatgttgtatccagggaattatatgtgttaagagctataaataaataaataaataaataaataatgatgttc

SEQ ID NO: 6591 - DNA, 389 bp, Glycine max
  Clone ID: LIB3030-007-Q1-B1-H9
gcattgtggtgacccactttcttgttgctgacgaagagtttcttcctatcaaagaaagctctgtggatttggttgttagttgcttgggactacactggactaatgatctgcctggagcaatgatacagtctagattggcattgaagcctgatggcttatttttagcagctattcttggtggagaaacattaaagtgacaatgtttatttttatttcttgaaatttctttggaacagaaatggatgggggcattctaattaatgatatttgtgctgctaccagggagctcagaatagcttgtacgttggcacaaatggagcgtgaaggagggatcagtccccgagtatcacctttggcacaggttcgagatgctgggaatcttttgacta

SEQ ID NO: 6592 - DNA, 359 bp, Glycine max
  Clone ID: LIB3030-008-Q1-B1-A1
gcctctgtcaacaactccaaactggccaagaaccagatctaagtcaaggaatgataaaggatggactggattgaccacaacacatgatacctctagaccgggaaatactgtgacaaatgatagagaggatatatcatcaacactgtctgatccaggtcctatctgggatgctgaaccaaaatgggatgctgaacctagtaattgggatgtggaaaatccaattgagttgccaggaccatcagatgacacacaaatacgatctgcaaacgatgttgtgccccgttttggagataaatgggttgcgtcaaatggacaatttcttggcattctggtttgcaaccatgcatgtataactgttc

SEQ ID NO: 6593 - DNA, 378 bp, Glycine max
  Clone ID: LIB3030-008-Q1-B1-A10
attggctaactgtgtcagtcagaataatgtgaagaaagcagaggaagtttttagtaaaatgaaggacttggattttcctattacagtatttacttgcaatcagttgctatttctgtataagaggaatgacaggaagaaaatagctgatgtgttattgttgatggaaaatgagaatatcaacccttcttctcatacttactcgatcttaatagacacaaaaggccagtccaaagatattgatggaatggatcaaattgttgataggatgaaggctcaaggcattgaaccagacatcaacacgcaggctgttttgattaggcattacatctcttctgggcttcaagataaagctgaaactttattaaaggagatggaagg

SEQ ID NO: 6594 - DNA, 268 bp, Glycine max
  Clone ID: LIB3030-008-Q1-B1-A11
atggcagggtacaagggcgatgacgagtacgattacctcttcaagctggttctgatcggcgattctggtgtggggaagtccaacctgctttcgcgcttcaccaggaacgagttcaatttggagtccaagtccaccataggggttgagttcgccaccaagagcttgaacatcgatgctaaggtcatcaaggctcagatttgggacaccgctggccaggaaaggtaccgtgccattactagtgcttactaccgaggagctgttggtgcct

SEQ ID NO: 6595 - DNA, 307 bp, Glycine max
  Clone ID: LIB3030-008-Q1-B1-A12
ggcaacggtgacacagccgtgtccttcgtggacgcgcggttccgttcctctctcgaagcgcgtcctcccacgacgtcgtttcaccagacgcctcaccacgtacccacaagctgctctggttcaagcaccgcctccaccaccagcttcttcgcccagagacagctctagctccattcagcttctgaccttgtcacgtgccaatgacctgcaagccgagggcagagccatggcacgtgccgccaatggcaacgtctacaacccgcaactcattgcgtccatgtacggttcccaaaccatcaaggtggtg

SEQ ID NO: 6596 - DNA, 360 bp, Glycine max
  unsure (1)..(360): unsure at all n locations
  Clone ID: LIB3030-008-Q1-B1-A2
ttcttaaccagctctttaacagaggcgttttcggcactcgatgcaaaacatgcctgaacctggcaatttcacgcattaagctgctgcaaaacaagagagatatgcaactgaaacaaatgtgcaaggagattagccaattcttgcacgctggccaagacgcaattgctanaatcagggtggagcatatcatacgggaacaaaatacatgggctgcatatgaaattttggagttgttctgtgaatttgttcctgcacgtgtacctataattgagaatcagagggagtgccccacggaattgcgagaagccattgcaagtataatttttgctgctcctagatgttcagatgtaccagacttat

SEQ ID NO: 6597 - DNA, 395 bp, Glycine max
  Clone ID: LIB3030-008-Q1-B1-A3
gtttgagagtgcgcctcctggttgatcctcatatgccaaaggatggaagtagttcacccaatcttgtcatggacaacccactttcacaaaatccagacagttcatggagtcgcttttttcgcaatgcagagatggagaggatggttgatcaggatttagcacgtttataccccgaacatggcaactatttccagacgccaggatgccaaggcatattgagaagaattttattactatggtgtctcagacacccagagtgtggttatagacaaggaatgcatgaattacttgctccggtgctttatgttctccaatttgatgttgagtgtcttttggaagttcgaaagctttatgaagatcacttcacagacagatttgatggcctcttttgtcaa

SEQ ID NO: 6598 - DNA, 395 bp, Glycine max
  Clone ID: LIB3030-008-Q1-B1-A4
aatcgcccaagacgacacagagtatccaacggaagttccaacaaaccagaggaacaagtgttcaagcagagtagcagaagacggttaatgggagaagatccacagaagctgaagcgactaccggcggattcctacgactacgacaacgactctcgatggcctggttactggaacaatgttctcattcctccccacatggcttctcgcgacgacgtcgtttcacacttcaagcgcaagttctaccagcgctacgttgatcctgaccttgtggtggagccaatgtctgttggtggcagttcatcccaaccgacacgttcatcaactacgtcatcgtcatcatcgcgcccaacatataatcaacctcgtgcaagaagttctggatcaactaatagaac

SEQ ID NO: 6599 - DNA, 227 bp, Glycine max
  Clone ID: LIB3030-008-Q1-B1-A5
cggtccgaggccacacatggcttctgctgcttcaattgtgaagaacctaccgggttacaagggtgatcttccattcaaacttgaaactgggtacataggagtgggagaagaagaaaaggtgcaattatttcacttattggtggattcccagaaaattcaatccattgttcaacggtaaattgggttggttgaaggcctggtttctccggcccaaccggcttcctttt

SEQ ID NO: 6600 - DNA, 382 bp, Glycine max
  Clone ID: LIB3030-008-Q1-B1-A6
cgagaacaataatggcacttatcagtgggttgtcaagcccaaaactgtcaaatatgaatttaaaaccaacacccatgtccctaaactaggggtaatgcttgtggggtgggggggaaacaatggctcaaccctcactggtggtgttattgctaaccgagagggtatttcatgggcaacaaaggacaagattcaacaagccaattactttgggtcgctgacccaggcatcagctatcagagtggggtctttccaaggggaagaaatatatgctccattcaagagcctgcttccaatggtgaaccctgatgatgttgtgtttgggggatgggatatcagtaacttgaacctgactgatgccatggccagggccaaagtgtttgat

SEQ ID NO: 6601 - DNA, 386 bp, Glycine max
  Clone ID: LIB3030-008-Q1-B1-A7
ggaaggggcggtggaggaagaggaggagacagaggtacacccttcaaagctagaggcggtggtagaggtggtggaggccgtggaggaggcaggggtggtggccgtggcggtggcagaggtggaatgaagggtggtagcaaggttgttgttcagccccatagacatgacggtattttcattgccaagggtaaagaagatgctctcgttaccaagaatcttgttcccggtgaagctgtttacaatgagaaaaggattactgttcagaatgaagatggtaccaaagaggagtacagagtttggaatcctttccgattcaagttggctgctgccatccttggtggagttgacaacatatggattaaacccggagccagagtcctttacct

SEQ ID NO: 6602 - DNA, 394 bp, Glycine max
  Clone ID: LIB3030-008-Q1-B1-A8
acggaccgtaatggagagcaaacttccagtgaagaagcacaaaagcagtttcttatcgctggtagaccaccaaatctatcctttcctccaatgcaaaacttccattttctaccttcccaagcacatgcatcccctgtgaactatggagaggggtttgaaaatgatccaaatatcccaagctctcagcttgaagcttatagaaaacttcttcaatgccagattcaggtaatgtgtgctcttttttcttttacccacacagtaagtgatgtgtcaccttggttttacctgaatataaaagatcaaatttgatgattatgatgaccaccaaatgaacccttctcctgtatgcatgctaaattctggcaccccgaaaagggacattaactgatattat

SEQ ID NO: 6603 - DNA, 388 bp, Glycine max
  unsure (1)..(388): unsure at all n locations
  Clone ID: LIB3030-008-Q1-B1-A9
aaaggaatcagaaaatggacaaaacagattatggcagtgaagcaaaagaaagagtgaaacagcacagtttaaggcacggggagaaggcaaaggaatcagactcaaggaaaagatcctctcatgttgatgtcaaggatgataaaaaggaagcagaaaaatcccatagaggtagtgccactgacgatactagccggaaaagggagcatgcaaaggataagggggaacataaatcaaggcaaaaagatgcaagtaataatgacaggcatagaagaaggcgttcatcttcagtaagcagtanaggtagaaccaagaaggattgtattaatcatgctggtgattcaagtggtgaaggatcagatggctcaaaaaggaagctgcattcaagaaa

SEQ ID NO: 6604 - DNA, 360 bp, Glycine max
  Clone ID: LIB3030-008-Q1-B1-B1
acaaaacctagtcttgtccctggtgaggaaagagcggcatggaagtagcgaaagaccctaactcacaggcggattcagattcggaactggaactctacaccatcccaagctcttcaagatggttcgcgtgggaagaaattcacgaaacggagagagcagcattcaaggaatacttcgacggaagctcgatatcgcgaagcccgaagatatacaaagagtaccgagacttcgcttcgaagaaggcgcccccagtgggattcgagtcgccgccacgcccaattccttgaagcctatgctgctgcctcgcaatgggaagagtgccgccaatgccactggggcttctctcaaattgccgcctct

SEQ ID NO: 6605 - DNA, 378 bp, Glycine max
  Clone ID: LIB3030-008-Q1-B1-B10
agattcgtgatttttttaaaaacaataacgaatctccacagtaaattgatttaatgaatcctcgttaaccacatcatcgtcaccaatgacatttgtatacatggcacatcaaaatccttatgggattaggagagcagcttttgcaagtgctcagttgtcaggtgtggttgctgatggcgcctcatcagggccaggttatgaatgttcggccttggcatcctcatcacatggggcctcgacgatgtctgccatgcgagaatctgaatcaacgtcacttggttcactgacattgccaagtggtaacgccgcactcgatgttgtacgccttcagggcaacgtcgcaagcaagcgtttcgttgatgtcttgattgggggtgg

SEQ ID NO: 6606 - DNA, 383 bp, Glycine max
  Clone ID: LIB3030-008-Q1-B1-B11
cgccgacctcgctatcggattgatgctggcgctgctcaggaggatctgcgagtgcgatcgttatgtcaggagcggcaagtggaagaaaggggactacaaactgaccactaagttctctgggaaaactgttggcattattgggctagggaggattggtcaagcaattgctaagagagctgaaggattcaactgccccatatgctactactctagaactcaaaaaagagactcaaactacaagtactatcctagtgttgtagaactggcatctaactgcgacatactggtagttgcttgcccactgacggaggaaactcatcacatcatcaacagggaggtgatcaatgcactgggtcccaagggttatcttattaacattggac

SEQ ID NO: 6607 - DNA, 377 bp, Glycine max
  Clone ID: LIB3030-008-Q1-B1-B12
ggaaaaactagaaaagatcccaacagtgagaagcccagtgattttgtttaccttccgagagatgaagcatttggtcacttgaagtcatcagattttctcgtttatggaatcaaatcagtggctcaagacgtcttgcccgtgttgactgatgcgtttgatggcaatcttttgagccttgagtttgataactttgctgaagtgcgcaaactctatgaaggtggagttacactacctacaaactttcttagcaagatcgcccctataccagtggtcaaggaaatttttcgaactgatggcgaacagttcctcaagtatccaccacctaaagtgatgcaggtggataagtctgcatggatgactgatgaagaatttgctag

SEQ ID NO: 6608 - DNA, 380 bp, Glycine max
  Clone ID: LIB3030-008-Q1-B1-B2
cgtcaaggttcctcaaaatgtctctgtcttttgtgttgctcttcctcatctcaattccaccttctttctcctctccaattcaccccacaagcaacgaccttcgtttttcttcaacagcagaaaaactcataagagggcttaacctgttcccgaaagaccccattaacacactcgagaatgaccctctttttgtgtcaggaagcattgtggagaagagcttcactttccctagtcttgctgcttcttcagaatcttctgttgaagaacttggtcaccatgcaggctattatcgccttcctcgttccaaagctgcaaggatgttctacttcttcgttgaatctcgaagcagtaagaatgatcctgttgtcatatggctgact

SEQ ID NO: 6609 - DNA, 362 bp, Glycine max
  Clone ID: LIB3030-008-Q1-B1-B3
atttaaagaaatcaacacacacaaacacaacaacatatggaggtgctaagggtgcaaaccatagcttccaaatccaaagatgctgccatcccagccatgtttgttagggcagagacagagcaaccaggcatcacaaccgttcaaggggtgaaccttgaggtgccaattattgattttagtgacccagatgaagggaaagtggtgcatgagattttggaggcaagtagggactggggcatgttccaaattgtgaaccatgacatacctagtgatgttataagaaagttgcaaagtgttgggaaaatgttctttgagttgccacaagaggaaaaagagttgattgctaagcctgctgggtctga

SEQ ID NO: 6610 - DNA, 375 bp, Glycine max
  unsure (1)..(375): unsure at all n locations
  Clone ID: LIB3030-008-Q1-B1-B4
aagcggctcgagtcttgtttctctcataaccttagggaggacaatcaatcaagaagagaccttgcttggttcgttctcccacatctaataatctaataaattgaaacatgggcaactgtgctagctaccccaagaccaacgaaggtgaggccccagtgcctgtgccggtgccagaacctgtcgccgaggaggtcaaggttgagcagcaagagaacaaggctgaggaaaatgtcgtcgaggccaagacagaggaaacccctgtcgcctctgctgacaactctcttgtcaccttgctcaatgagaatgaagaaaagaaagaagagcaatttgaggccaaggangtgaaggctgaagccccgaaagaagagaaagcca

SEQ ID NO: 6611 - DNA, 375 bp, Glycine max
  Clone ID: LIB3030-008-Q1-B1-B5
gctagggttttggctcagtctgttaatgtccctggtctagtggctgagcataggcatggtcagcaaaagggatcaggaaaattaaaaagatcgaccaaaatgatgagtgctttacggacaaatggattaagaatgtcaggtttctcagggcttcgtactttcaatcctttggatactatgttgagacctggcatagattttcattctaaggtatccattgcaacgtcttcgcggcaagcaagagctaccagatgcgtgcccaaagccatgtttgagcgtttcactgagaaagcaatcaaagtgattatgctagcccaggaggaagcaagacgtcttggtcacaattttgttggcacagagcaaattctattgggt

SEQ ID NO: 6612 - DNA, 394 bp, Glycine max
  Clone ID: LIB3030-008-Q1-B1-B6
gtccttttcctcaaagggactaccataatttttctctcccaaacaaacccaagagaggaagaaagaaagaaaagagtataaacacacaatatctctttaaactcttgacccttctcttggaggcatggctttcccaattctcttccttctcttcatttcccttcccttctcctccgcaaagctcaacgtcgattactacaaaaacacatgcccagacttcgaaaaaatcgttagggaaaacgtcttcaccaaacaaagcgctagcgtggccacagcaccgggtctccttcgcctcttcttccacgattgcatcaccgatggctgcgacgcttccctcctcataacttccaatgcatacaaccctcatgcagaacgtgatgcggacctcaacctt

SEQ ID NO: 6613 - DNA, 363 bp, Glycine max
  unsure (1)..(363): unsure at all n locations
  Clone ID: LIB3030-008-Q1-B1-B7
tgacatgctcaatcagttagagcttcaagttgatggtggtttcaatcagaatctgaattcaaggactttgtctgctcccaatctcagtgcaatggactaccctgcacttacttcaccagatggtcagactgcttcagtagaatatgtggttgataatgtgcaacaaagtggcaatccttaccgatcatatgacagtgatgtgctgctttgcaaatctgtcgcttcagtttcatctacgggtggtgctattgactttgcgtcaactgttaagaagttggcgtctcgggattctggtggtatttggcactatgataaaagtggctctggtgatgctgctatctgctcaagtangaattcgaatgt

SEQ ID NO: 6614 - DNA, 393 bp, Glycine max
  Clone ID: LIB3030-008-Q1-B1-B8
gaagagaaagaaatttgtttctctctaaagagtctccgctgaactttttggtttcttgaagatgtcgttactctccgatcttatcaaccttaacctctccgacatcaccgataaggtgatcgccgagtacatatgggttggtggatctggcatggatatgaggagcaaagcaaggactctctcgggactggttaatgacccttccaagcttcccaagtggaactatgatggttccagcactggtcaagctcctggacaagatagtgaagtgatcttatatccacaagcaatttttcgggatccattcaggaggggtaacaatatcctggttatgtgtgatgcttacactcctgctggggaacccattcctaccaacaagagaaataaagctgc

SEQ ID NO: 6615 - DNA, 251 bp, Glycine max
  Clone ID: LIB3030-008-Q1-B1-B9
cttcccttgttttttgcaaattcgcatcccacacagcaagggaaggtgcgagtgattgattatggcgtccccattatcacctcaattggttcaatgtcagaactcacttccacctcttcagggtaattttagccaatatgtgtctaaggttcaaaggtcccctgtggaatgttacggtaccatatcaccgcttggttattacggtaaagcattgacatcaagatcacataaccccctgaggttttctgtca

SEQ ID NO: 6616 - DNA, 392 bp, Glycine max
  Clone ID: LIB3030-008-Q1-B1-C1
gtaggattatataccgaaagccttcaacaattgcttgagacagtgagggggcttcatgctccatcaaatgatgttgttcttgaagacttaagtctgcctggtttatctgaactcaaaggtcactggcatggatctcttgacgctagtggtgggggaaatggagacaccctggcagaatttgactttcatggggaggactgggaatggggagactacaaaactcagcgtgtgttggcagttggtgcttacagtaatgatgatggtatgtacctggagagaatttttatccagaaggataatgccaccatccatgcagatggaacattgctaggacctaaaaccaacctccattttgcggtattaaattttcctgttagtctggtcccaactgt

SEQ ID NO: 6617 - DNA, 380 bp, Glycine max
  Clone ID: LIB3030-008-Q1-B1-C10
ctctctttttctctctatctctcaatctctcagagaaatggctctcaaggccgtccatgtcaccgacgtcccttccctggacctggtgaccgagaatgcctctctgtccctctgctcctcccgcttccccaacggggtggaaatgagtcggagtgacttcaagatgccaaagttcgtcgtgatcggacacagaggtaatggcatgaacgttctgcagtcttccgatcgaagaatgagagccatcaaggaaaataccatcttgtccttcaacaaagccgccactttcccgctcgatttcatcgaattcgacgttcaagtgacgagagatgactgcccagtcattttccacgacgatttcatcttcacagaggagaatggtt

SEQ ID NO: 6618 - DNA, 381 bp, Glycine max
  Clone ID: LIB3030-008-Q1-B1-C11
ggaaaagcctccaaaaccaacccaccgttggcgcgatggctttcccctccaaaggcgatgacgagcaggttctggtgcagcgtaaatcgaatgcgagagttttgacactaaacaggactaaacagttgaatgccctctctttttatatggtttctcggctacttgaaattttttctgaagatgagaaagattctgatattaaattggttgtcgtgaagggaaatggaagggctttttgtgctggtggtgatgttgcagctgttgctcgtgatggaagtaaaggtgactggaggtttggtgcaaatttttttcaaagtgaatttaaattgaattacttgatggcaacatatagtaagccccaggtttcaattcttaatggaa

SEQ ID NO: 6619 - DNA, 380 bp, Glycine max
  Clone ID: LIB3030-008-Q1-B1-C12
ggggaatcttgagaagaagctgttgagcagagagcaaaaatcagaagaagagaatttatcattggtgaagagggtgtgggaagagagcaaggtgatgtggatagtggcagcaccagccatattcacaaggttcacaacctttggcatcagtgttataagccaagcatttattggtcatattggttcaagggaactcgctgcttatgcccttgtgttcactgtcatcatacgcttcgccaatggaattctgttaggaatggcaagtgcattgtcaacactttgtggacaagcatacggcgcaaaagaatatgacatgatgggagtgtatcttcaaagatcatggatagttttattcttaagtgcaatctgtcttcttccgt

SEQ ID NO: 6620 - DNA, 373 bp, Glycine max
  Clone ID: LIB3030-008-Q1-B1-C2
ctgcttctccgccatagcctctgagcccaacgtcactcacaaagtcaccaaccaccgcgacgtcatccaactctccctaagcatcaccttccgcgcggtggagcgcaactacttcaccgtgaagaaactcctaaccaaacacgacctaacgaaacgcgagacaaccgcgctccacgattgcctcgaaaccatagacgaaaccctcgacgagctcagagaagcacaacacgacctcgagctctaccctaacaagaaaactctgtaccagcacgccgacgatctcaaaaccctcatcagcgccgccataacgaaccaggtcacgtgcctcgacggtttctctcacgatgacgcagacaaacacgtgaggaaagag

SEQ ID NO: 6621 - DNA, 395 bp, Glycine max
  Clone ID: LIB3030-008-Q1-B1-C3
agagcactgaggaagtgtgtgtgtgtgtgtgtgtgtctgaggaagtgtgccctaatttgaatttgaatgctaacacactgcaatttcactactagcattagcagaacgagaattggaagttgagaattcgcagcgagaaagaaaaagagaaagagacatggcatgaagacagcgaagggacggcaaagaaggaggagattttagagtctcagattgaaaccgctatgcgctctcgcgtttctctcttcaaggaacaatctgactccttgacgttcgagggtgttcgtcgattgctcgagaaagacctgcgattggtggagtatgccttggatgtgcataagagatttatcaagcaatgcttgctcaagtgcttagaacgggttggagatgatgat

SEQ ID NO: 6622 - DNA, 324 bp, Glycine max
  Clone ID: LIB3030-008-Q1-B1-C4
tgtcaccctagaaatttagctgaaaggatacacatcaacatttatcgtaattagcgacttgctaatcctgtattcagctttggcatagagttgcaaaaaaatgattttactaaaattaagagagaagctatgttaaaaaatgtcatccaaagggtcatcaacatgcaactcaccggcgaactgcaaataggacatgggcgacgaacttcaactaatacttccacagcttctgcaagtatcgtaccattatgaagagcaagactgattaagacatcgccctcttgcggcaattcgagcatcccgggaatgttttcggggtcctca

SEQ ID NO: 6623 - DNA, 391 bp, Glycine max
  Clone ID: LIB3030-008-Q1-B1-C5
caagagcttccgtggcagtggtagttgccagactagtagcaagaagtaagtcacgtttttctccgttttcattcatcacaatattaaagcttttagtttccttcagtatgggggacacttacgttttggccacaccgaagcgcaaccgttccgatgacgtggacggcggcgaggcgaagaagctgctgttgcagcagggcgaggcagacccggcggcggcgctggcgagcgcgcggcacgagttcggggagcacggcggggtgaacatgtcgatcgaggcgtcggcgacgttcacggtgatggagccggagacgatgcggcgcatgttcgccggagaactcggccccgaccgcgacttcttcatctacagccgccacttcaacccgacggt

SEQ ID NO: 6624 - DNA, 393 bp, Glycine max
  Clone ID: LIB3030-008-Q1-B1-C6
ctctgggtgggtaaagatggaaggtgctagtagagtcttatgcttgtttctggcggcatttttgtggtttaatgctcaacatgcttttgtaagttgttctttgacatttgagttgtaaagcaaaattgctaaagccaaccaagagggaccttacctaggtttaatcataccaaattcttttgaactagaccctcttcttcagaatcctggctacacagctagtgacaccatcatagacttcgctggaaggagatttcgctttggagccattggtgacaagcctgttatactggtcatgacaggattgagcgtgataaatgcagctataacgactcagcttctgttgagtttattcacggtagaaggagtggtgcattacggcattgctggaaa

SEQ ID NO: 6625 - DNA, 389 bp, Glycine max
  Clone ID: LIB3030-008-Q1-B1-C7
cttattttcactttctttccttagccacctacgtttccttcagatccaaccaattccatcgtcaccaggaacacaccccttttgcctattcagctttacctctcactcttcaactgtgtctctgataaggttcaaccctttttttgctctctatgccattccaacagattttgatgattctgcatgctctatgtagcttactctgcagttgggaagggcataccagaacaagagtgtaattgcagtgcacggatttattaatagtcttgtagatctgttggctttttcaggatgggcaagtgcaagggttgtggaaagttaggaagaatgaggccaagtcatatgagtgcttatgaattttctctgatgctggctcctgttgtttctgt

SEQ ID NO: 6626 - DNA, 384 bp, Glycine max
  Clone ID: LIB3030-008-Q1-B1-C8
ttgattttatgtttgtttttgcgagcgtaaggttgaggagaagagatggtgggagcacggccacgggacatagatgacttgcccaagaacgccgccaactacacagcgcttacgccgttgtggtttctagagagagctgctacggtccaccccaccagaaactccctcatccacggatctcgtcgctacacgtggcagcagacttaccaccgttgccgtcgattcgcctccgctctttctaatcattccatcggtcttggaaacactgtagctgttattgcacccaacattccagctctttatgaagctcactttgggattccaatgtcaggggctgtgttgaaccctgttaatattaggctaaatgcatccacggtagctttt

SEQ ID NO: 6627 - DNA, 378 bp, Glycine max
  Clone ID: LIB3030-008-Q1-B1-C9
gtttttggatgcttttcaatgctgctttgaaggtgttttgatttcattgtggtttttaagagcaaattttaggattcagttgagttctatttgcaaagatcttgtcaaaacacatcttgatatcctggatttgtatgaatattatttacatttttcattagcttggcttcaaaaaaactcggaagcgcttttgtatatgttggaaccattcttggttgcacaatctaatgaccgtaatccttacaacattgatattgtgaatctgaagaagcttatcccaaaaattgggcagttgttggctcaaacttctttcatgtctaatatacaaaaccttcaactatccgaacgtgcagaagataaactagttgcagatataaa

SEQ ID NO: 6628 - DNA, 386 bp, Glycine max
  Clone ID: LIB3030-008-Q1-B1-D1
ttcttcctccgctcaacaactataagattatcttcttcttcttcttctcttcaattcttctccaatcccaaccgcaccctcttccgtccctttcttcacacttccttcaaaccacttccttcgtctttctctttccgaacagatcacactatggccacctcaaacgccaaatcagtccatgatttcaccgttaaagatgccaagggaaatgatattaaccttggtgactacaaaggaaaggtccttatcattgtcaatgttgcctcacaatgtggcttgactaattcaaattacactgagctcagtcagttgtatgagaaatacaaacagaaaggtctggaaattctggcgttcccatgcaatcagtttggggcacaggagcctgg

SEQ ID NO: 6629 - DNA, 380 bp, Glycine max
  Clone ID: LIB3030-008-Q1-B1-D10
ggagcttttagggaaggaataagaaaagctggaccaaggatgcttgagcctataatgaaggttgaagttgttactcctgaagaacatctaggtgatgtaattggtgatctcaactcaagaagaggacagatcaacagttttggtgacaaacctggtggccttaaggtggttgatgccctggtacctcttgctgagatgttccagtatgtcagcacactcagagggatgacaaagggccgtgcatcctacacaatgcaattagccatgtttgatgtggtgcctcagcacattcagaaccaacttgccacaaaagagcaagaagttgccgcttaatgtatttgcttggtctcctaacaaggaacttcttattgcatagttgt

SEQ ID NO: 6630 - DNA, 379 bp, Glycine max
  Clone ID: LIB3030-008-Q1-B1-D11
ggaaagaggtgtgaagtgtgtgagtctgagagaagagaacttagagaaatggaactacgtgagcttggaagaaccggactgaaactcagcactgtaggattcggagcttctccactgggcaatgtcttcggcgatgtttccgaggaacaagccaacgcttccgttcgcctcgctttccaatccggcatcaatttcttcgacacttctccgtactacggagggacactgtcggaaaaagttctgggaaaggcactgaaggctctgggagctccgaggaactcgtacgttgtggcaacgaagtgcggacggtacaaggagggtttcgatttcagcgcggagagagtgacgagaagcattgaagagagcttggaaaggttgc

SEQ ID NO: 6631 - DNA, 378 bp, Glycine max
  Clone ID: LIB3030-008-Q1-B1-D12
agaataggtgttgtggtggagtaagaatcgaattcgaaggaagagaggtggtagggtttgtgatatagcgatgagtgagagtaacgggaacagcaggaggcgaaatgttgaagatcaagatctgggactgtacttcttggaggcgtgcaggggtagggagatgaaagaggaagaggaagaggaagaggcacccagggagctcaacaccattaacagctctggtggtttcgtcgtggtttccacggacaagttgtcggtaaagtacaccagcgtcaaccttcacggccacgacgtcggtgtcattcaggccaacaagcctgctcctaccaagcgcctcatgtactatttcgagattcatgtcaaggatgccggcgttaa

SEQ ID NO: 6632 - DNA, 395 bp, Glycine max
  Clone ID: LIB3030-008-Q1-B1-D3
ctttagagtggggaaaaaagaaatgggatttttttttctttcaacgccaccccaagttcccagctttgaagtttgagctcaaggtccaaacattccaaaaacttgcatagagagatagatacatactacaaagacttcagatttttggggggagagaaaagatctgcgggggtgtaagtttgtggggattttttttttgagaaaagaggaagccgtttgtgtctgtgtgtgtttgtgaaatagtgtgttaatatgagtaactggttggggttctctctcactccacacttgaggattgatgaagaatttgagagagaaaaccaagagcgtggaggagggtaccatcatccttctccttcttgtcaccctcacttgtctgttatgccccttcgctc

SEQ ID NO: 6633 - DNA, 396 bp, Glycine max
  Clone ID: LIB3030-008-Q1-B1-D4
gtgcaagcaattcatgaacctctccatcggggagttcacgaggtcactcgacaagttcgccaagtttgacctgaacaaccttgacaacatcctcacaagtttgaaggtttggctcagcggtgcaatcacgtaccaagaaacatgtttagatgctttcgagaacacaaccaccgatgctggtcaaaaaatgcagaagctcttgcaaactgccatgcacatgagtagcaatggcctctctatcatcaacgaactgtcaaaaactctctcggaaatgcacgttaacagacctggccgtcgacgccttttgaacaacgttgatgatttaccagttcttggccacgactttgaccttcccgaatgggttgatgatcgcgttggtgttcgcaaactcctacg

SEQ ID NO: 6634 - DNA, 387 bp, Glycine max
  Clone ID: LIB3030-008-Q1-B1-D5
atttgtgtaagtacatttcacaggttgacgttgttataagtttgctgcccccaagttgtcatattattgtagcaaatgcttgcattgagctgaaaaaacatcttgtcactgctagctatgttgatagctccatgtcaatgctaaatgataaggctaaagatgctggcataacaattcttggagagatgggcttagacccaggaattgatcatatgatggcaatgaagatgatcaaccaagcacatgtgaggaaggggaaaataaagtctttcacttcttattgtggtggacttccatctcctgaagctgctaacaatccattagcatataaattcagttggaatcctgcaggagccatccgagctgggcgcaatcctgccacctaca

SEQ ID NO: 6635 - DNA, 374 bp, Glycine max
  Clone ID: LIB3030-008-Q1-B1-D6
atccgttctatgttgcttaataagttacctacgtagagcaagagaatctaactctattggatgtgtaaggtcaaaacaaataacgcataatcatgtcaaccaaattgattgaaacaagccttaaccgtatggtatggcttgtaattgcaacatcattaatagcacaatctgataaccgcccacttcttgacacataaggccaccctcttgagcctgccagagattactacatcacaccaacggtaacagacattggttgccgtgccactatattatacaacggaacatgccctttatatgtatgtcaagagaacacttttgtaaatcatagctttgccgtattcttcagcccttatgcaaaggaagatgatgtt

SEQ ID NO: 6636 - DNA, 391 bp, Glycine max
  Clone ID: LIB3030-008-Q1-B1-D8
caatcttctctccacgcccttcttgggtaaccgtctgaagtgcagcaatggcagatggattgcattcgcagcatccatcggtagttcagaagttatctggacagtcttatcttgtgtccaggcttgctcctaatcactccagaaactgttctaccactggtagttacttcaatggaggtttgcagtcttcaggtttggttccagtcacggcacacgcgccggctgagaaaggggtgtctggatttttgttggatttcctgatgggcggagtgtcggcggctgtgtccaagacagctgcggctccaatcgaacgagttaagttgctcatccaaaaccaggatgaaatgatcaagagtggtcggttgtctgaaccatacaaaggaattggcga

SEQ ID NO: 6637 - DNA, 377 bp, Glycine max
  Clone ID: LIB3030-008-Q1-B1-D9
tttgatagcctcaactcaagtaagggttttctctttgagaaaatcgtatcttacaccttttggtgaccactttgagtgagagaagagaaattaagagagatactcaaattagattcaagagagatggccatcaaccatgaaacttgggctttcattttcggtcttctaggcaacgtgatctcctttatggtgttcctcgctccattaccaactttttaccaaatctacaagaaaaaatctacggatgggtttcaatcactaccttatattgttgcactattcagttcaatgctctggatttattacgcactcgtcaaaaaggatgctagcctccttctcattactattaactcctttggatgtgtgatagagacgat

SEQ ID NO: 6638 - DNA, 389 bp, Glycine max
  unsure (1)..(389): unsure at all n locations
  Clone ID: LIB3030-008-Q1-B1-E1
acaaaacctagtcttgtccctggtgaggaaagagcggcatggaagtagcgaaagaccctaactcacaggcggattcagattcggaactggaactctacaccatcccaagctcttcaagatggttcgcgtgggaagaaattcacgaaacggagagagcagcattcaaggaatacttcgacggaagctcgatatcgcgaagcccgaagatatacaaagagtaccgagacttcgcttcgaagaaggcgcccccagtgggattcgagtcgccgccacgcccaattccttgaagcctatgctgctgcctcgcaatgggaagagtgccgccaatgccactggggcttctctcaaattgccgcnctctggctcttactctgatgtttatggtgatt

SEQ ID NO: 6639 - DNA, 381 bp, Glycine max
  Clone ID: LIB3030-008-Q1-B1-E10
gtcgtgatgggatttttcaaaaggatagccggatatctagggtttggaaaccacgaacacgattccaaggatgaggcccgcgatggtcaacctcgtaccacacaacctcgtaaaggcttcagtgtccctgcccaggtcgtcgtcgatcgcccccacctcgctcccgttctcactccttctacttccggcgacggtggaattcagggtctggattggtatgtaaagcgtcttaagatggatgaagatggtgatttagcagatgaattccttgatgaggtttcatcagacaagccataaggacatgcagtagatcatcataaaacacaggcaaggtttaaaccaaacaatgcgaccaagtcagtcagagtgaagaaacagatc

SEQ ID NO: 6640 - DNA, 378 bp, Glycine max
  Clone ID: LIB3030-008-Q1-B1-E11
atcctagcgtcgtgttttttacacaaacaaaaacacagggaagagaacaacaacaaagcacaacgtatagcttgctgaatcgttgtttgaggaaccaccgaatctcaatggcttcttcggtgttcttcactcactcccattgctactcttcaaagccctcttctcttgttttccgccaagttggtgtgggtcccacctctctccgattctcttcttctcatgttgcctccgttgctgctatggctatggattcttctgctaaggtgattgatggaaaatccgttgccaagcaaatcagagatgagataacggctgaggtttccaggatgagagaatccattggtgtgattcctgggttggctgtaattcttgttgggg

SEQ ID NO: 6641 - DNA, 382 bp, Glycine max
  Clone ID: LIB3030-008-Q1-B1-E12
ctcttcttctcttgcggctagggttttagcgcagcttcttctagatttaaggaagatgggtaaggaaaaggttcacatcagtattgtggtcattggccatgtcgactctgggaaatccactaccactggtcacctgatttacaagcttggaggcattgacaagcgtgttattgagaggtttgagaaggaagctgctgagatgaacaagaggtctttcaagtatgcctgggtgctggacaaacttaaggctgagcgtgaaagaggaatcaccattgatattgctttgtggaagtttgaaacaacaaagtattattgcacagttattgatgcgcctggacatagggatttcattaagaatatgattactgggacatcccaagct

SEQ ID NO: 6642 - DNA, 409 bp, Glycine max
  Clone ID: LIB3030-008-Q1-B1-E2
acccttacttaaccccggaattcggtccaagcttagctcaaacttaacctcaataacctttcgtgcaacctaccttaatcatattccaattccaacagaaccaaattctgctagctagctagtacgtcaaaagaaataaaataatatggcattcagcgggactcaacagaaatgcaaggcttgcgacaaaactgttcacttggtcgaaggtttatctgtcgatggggctgcttatcacaagaattgcttcagatgcagccattgcaatggccttcttgcgataagcaactactcatccaccgaacgggttttgtactgcaatgtgcactttgagcagcttttcaaggaaactggcgcctaccccaagaaatcccagtcgtctggaaagcctccactcgagctgaataga

SEQ ID NO: 6643 - DNA, 377 bp, Glycine max
  unsure (1)..(377): unsure at all n locations
  Clone ID: LIB3030-008-Q1-B1-E4
aaaatccccccctagctacagagcagccaaaggggaggaataataataagcctatattctaaggccggaaaaataaaaaaggaataacaaaaatgtctggaaaggtaattatctcggctgtttctctcatcctggtggttggagtggccataagtgtggtggtggccgtcaacaagaagggcgaggatcccacacttcaatctcaacaaaaatcagtaggggttatctgccaaaacactgatgaccagaagctctgccacgaaaccctaagctccgtgaagggcatggacaccgctgattcaaaggcttacatcgccaangcggtgaaagccaccatggacagcgtgaacaaggccttcaacatgagtgataagctc

SEQ ID NO: 6644 - DNA, 370 bp, Glycine max
  Clone ID: LIB3030-008-Q1-B1-E5
caagggtaagtgtgggactcaaaaccgtgatgatggttgaagttaataggaaggatccggacaccgaaaccagtcccggatgatgacacatcaaggcatactaagaacacaaatgtccaaccaggtgaaacctttttcgcagttaatgtcacagacaacatcaacacatcatctccgtcgtttactcagccaatgcttgacatcgagaaaacgccatcctcggactccaaaggttcagcgggaaacgctgcaccgtctaactattcatcaatcgttgacccacattctccccaacgaaatggtagtccataatctcaaccctccgtctcgaccaatcgtatcatatcagacgttgattcagcggtacaaa

SEQ ID NO: 6645 - DNA, 395 bp, Glycine max
  Clone ID: LIB3030-008-Q1-B1-E6
gacttgcagccactggaggggatatcagaggaagacatgaagttggtcaatgagatgaaagctgaagccttgaagactctagttggtcaaggaggtgagcctacagacaataacagtgtattgttgaccatgagcactttgagagaagaaggggtaattgctgtaaaaaaatgcagcatgtgagaggttattggatcagagggtggagataaagatgaagtcaaagaaaattaacgactgcttgaataggtttcatgttgcagtaccaaagcctcgtgaccagaaggaaaggcctccatgtattcctcaagcagttttagaagctaaagctaagcaagctgctgacaaggaaaagagaaaaactgaaaaggatctggacgatgagaatggtgggg

SEQ ID NO: 6646 - DNA, 388 bp, Glycine max
  Clone ID: LIB3030-008-Q1-B1-E7
gtgaagcggaaggacctcgccggagccctgcggttcctcaagtccctcgaatcggaacagccgctcgtaaacggcggttctccgtcgagcgagtcgactcggctccggttcggcgagttggagcggttcgggccgcagagggactgggaggttctggacacgtgtttgaatgctgatgacatgaaacttgtcgctaacgcttacaggttcctcagagataggggtttcttgcccaatttcggtaaatgcagaaacattgttttggagggaccgaggaaagtgacaccagatgtcttgagctcctctactggtttggaagtgactaaacttgctcctaagaagtggggtctttcagatggttcaagcattgttttggttgcttttcttg

SEQ ID NO: 6647 - DNA, 382 bp, Glycine max
  Clone ID: LIB3030-008-Q1-B1-E8
gccactttcattggccaaacaacattatacaattttatcttagtaacaaaaagaaagattcacgtcaccaaataaaatatacaggaaacatgacaaaattcacaaacttttacttagacaagagaaagataacaccaataataagctaaactcagacgactccttccaacaattgaaacaacaatccaccacactaaagttcttttggtatcatcacagtatatggcaagtttcttctgtatccccaggaatagccaatatatggaaatttcagtggccggtgtgacttgcctcagatctaggaaacctcttttattttctttgctatttttttcattttcaatgaccccattttttccttatctccgttttctagagagag

SEQ ID NO: 6648 - DNA, 197 bp, Glycine max
  Clone ID: LIB3030-008-Q1-B1-E9
caatttatacccagttgtattctggaagtttggatttcatacaattccaatcatgtggatgttgcatcaataatttgggttgattaatttcaaaaaaaataattaactcaaacacaaacataaaataatcgtaagggatttgtctagcagcacaatatagaatctcagattttacatgcaagttcgagattctccct

SEQ ID NO: 6649 - DNA, 383 bp, Glycine max
  Clone ID: LIB3030-008-Q1-B1-F1
ctagtaacccttcttttctctctctctctctcgtgttctgagctgctagaagcaatggagaggaaaagaagccatgcttctttcaccatgtttgcaatgcttgttggattgctctctcagagccttgtcattcctgtaatatccaccactgttgcagatcagaagaactactacaccccagatccacatgctggaagtccccccacaggtttctccgattctctgtgctcacacaatagtagtcctccatctcatggccatgggagctctccaccctcacatcacaatagtccaagtactccatcaacaccctcaggtggaaactgtggatcatcacccccacaacatcatgatccaacaccctcaactccatcaacaccatc

SEQ ID NO: 6650 - DNA, 385 bp, Glycine max
  Clone ID: LIB3030-008-Q1-B1-F10
ggggtttcgctgaagaagaagctgaagaagttaagatctccgttgggaacctgcctttcgacttcgacagcgagaaattggcctcgcttttcgaacaggctggcaccgttgaggttgctgaggttatatataataagggccactgaccggagtcgcgggttcggatttgttaccatgagtacaatcgaagagcttgagaaggctgtcaagatgttcagtggttatgaactaaatggaagagtgttgactgttaataaggctgctccaaaaggagcacagcctgaacgcccaccgcgcccaccacaatcctttagagtctatgttggcaacttgccatgggatgttgacaattctcggctggagcaaattttcagtgaacatggta

SEQ ID NO: 6651 - DNA, 379 bp, Glycine max
  Clone ID: LIB3030-008-Q1-B1-F11
gtaacggtggaagagagaaaggattcgctctcctcaatccttatataagctccagcgacccaatttcttctcttatcgatttgattgtttctgagtaatggcttcgtcgcgagtagatctggatgggaaccccataaagcccatcaccatttgcatgattggcgccggtggcttcattgggtcccacctctgcgagaagctcatgtcggagacccctcacagtgtcctcgccttggatgtctacaatgacaagatcaaacacctcttggaaccccacacgctcccttgggcctctcgcatccagttccatcgcctcaacatcaagcacgattcccgtctcgaaggcctcatcaaaatgtcagatctgactattaatctg

SEQ ID NO: 6652 - DNA, 390 bp, Glycine max
  unsure (1)..(390): unsure at all n locations
  Clone ID: LIB3030-008-Q1-B1-F12
catcaaaaacccaacacaagtaacgaagaagtcactgccatctcgcaagtttcgatccccagaaggaaaataaaaatgcacgaaattagagaccctgcaattcggctcttcggtcagaagatccctttccctgaagatgttgacaaagaagaagagagtgctgaggatagagaacaagagatggaagaacatgaagacgaaggagacaaggatactaaagttgaaaatgttactaaggaagagctagaagctgatcctcctctagatgctgaagagactaagatttcaggcacatcncctgaggctattgtgaaccccaaaacaccttccatagaagaagaaacagcaaaatcaaaaggtggcaaatcagagaaggaacaaggcgatgca

SEQ ID NO: 6653 - DNA, 399 bp, Glycine max
  unsure (1)..(399): unsure at all n locations
  Clone ID: LIB3030-008-Q1-B1-F2
ccctaacttaacccaggaatccggtccaagcaatttaaaggaaccttgaaacgaataaaataaggggcttcaaaaaaggacccccaaaaccaaaaccctaatcgattccccttccaataagggcgtccgaaaaccgcttctcgattgaatttccccggccgattcgtacattgggagcttgataagcttgacctctaagagtgagatcagataccaaggtattctctacaacatcaacaccgaagagtccagtattggcctcagaaacgtgccgtccttttggacagaaggaangaaaaaggatggcccacaaatccctcccagtgacaaggtttatgagtatatacttttccgtgggactgacatcaaggatttacaggttaaatcttctccacctgt

SEQ ID NO: 6654 - DNA, 394 bp, Glycine max
  Clone ID: LIB3030-008-Q1-B1-F3
cacaaaactcagtttccaattcaccaaactcacaatggttgatctagattggcaaacaaagatggttcactccaacatcatgcctccaatgtcccccaaactctctctcccggatcataacattccaatcccaactttgcaactcccccttcgccaaaacgacatcaccgcagcgtcgtctcctatctgcgctgcatacgacaactaccttcgtctccctgagctcagagccctctgggcctccaaggacttccccaattgggccaacgagcccatcttaaagcccgccttacacgccctcgaaatcaccttccgcttactcgcaaccgttttctccgacccgagaccgtacatcaacaaacgcgagtggacccgacgcgtcgagtctctcgcc

SEQ ID NO: 6655 - DNA, 427 bp, Glycine max
  Clone ID: LIB3030-008-Q1-B1-F4
acccttagttaactccggaatccggtccaaggaataacaagggaggccaaacctccgttacaataataatccgtgttactgggtttaccggggcgaacccaacccaaacaattaagaaaaccaattttccccgaaggccaaggaaagtttacggcgcagcccgcaggcccccgcctagttggttctctccttccatggtcgaccacttcatcacctttgacgctgaggactcttccgacacacgcgccaagctttcccccatcgcccacgaggtcacgcacctcttctgggtcacctttcagattcacgcagacgaagaatacaatgcaactgtcaacaaaaccatgctactcaaccttctaactgccctgaaatcttccacgacatcccggttggcccatgtaacggtccaaaccggaaccaaaca

SEQ ID NO: 6656 - DNA, 394 bp, Glycine max
  Clone ID: LIB3030-008-Q1-B1-F5
aaaaagtagccatcgccccaacgatcccatttcccttgacttctctacgtgaagatccttgtgtcacatagagctagttaaaatgtcagagggaaatgcagggaaaggaaagagaatcgccatcattggcgtctcaaccttattgttggtggctatggttgtggcggtcacaattggggtcaatctcaatgagaatggttccaacaatgatatagaggacaacaagaaaaatcatgttgcttcttccataaaagccgtccaaaccctttgtcatcccacaaattatgagaaagaatgcgaggaaagccttatagctggggctggaaataccacagatccaaaagaactcgtcaaaattttcttcaacatcaccattacaaaaattggtgataaa

SEQ ID NO: 6657 - DNA, 360 bp, Glycine max
  Clone ID: LIB3030-008-Q1-B1-F7
cttatacattacgcagtgagacaagatttactaattttagaagaaataatgcaaccgctggtctctcatttactttacttggtgatgccttatcatctggattgaagattgaagacaaattggttgctagtaagcgattcaagctggttgtcagtggtggcgcaatgacagggcgtggcgacattgcttatggtggcagtttggaggcccaactgagagataaggattaccctcttggtcgtttcttaaccacacttggcctttctgttatggattggcatggagatcttgctgttgggtacaatgtgcaatctcagattccagtaggacgttatacaaaccttgttgcccgggccaatt

SEQ ID NO: 6658 - DNA, 390 bp, Glycine max
  unsure (1)..(390): unsure at all n locations
  Clone ID: LIB3030-008-Q1-B1-F8
tttggctgaagtgaataacatgtttgggacatcgtcgtcgtcacagggacagtggctgaattaccgataccccccagaagcaatatcatttacacatgccaatgtttctatggctcatgggctgaagctagagcaagaagaaaacaaaggaaacttgtcgcatagcgtgagctctttgtacccaagtcacatggaatctgcaaggatattgagtgataataataattcggccttcgacaactccaactttggcttgttggacccgaacaacatctcaagcacgtccagcaacaacaaccgccacaacaataacgtggttgaaattcagaaattgttcaggcaanggaaacagctggctgagaacttcaaccacatcgtgaattcccaagc

SEQ ID NO: 6659 - DNA, 360 bp, Glycine max
  Clone ID: LIB3030-008-Q1-B1-F9
ccagggtttgctaagaactcgttccaacccttgtgatttcatttctgatttttaagattgtgatatgatggaatcttatttatgtcaatttgtttagtttaatttccatatgttattgttttttttaatattaagtcaggtaccagaaaatttgcatcaattcacactcatgagtcacctgaacaagagctagacccggttttattgtttgtatcactgtatgtaatatttaatgttttcggttcatacttttgttgcggttgtattgttgttgtgtatcatctgtgccattagtttatttgatgttgataagaataattccatgtgagatgggaaataataatatattattgcctgcag

SEQ ID NO: 6660 - DNA, 370 bp, Glycine max
  Clone ID: LIB3030-008-Q1-B1-G1
cacatggctacggctgcgtaggataacatctaacaaacctagcgcacgatagtcttccttcacccatgcttggagtactctgcgccactcgccccaaaccttggcttctctctacctcattccaccgcctgcaaactttttctctccggcggcgctgccgcctccatatggcacgctatcatgccccgaggtgatgacggattacggcgcggcgttgttgccgtccatgacttgaagggagagggatcgtggaatgtcgcttgggacgcgcggccggcacggtggctccaccgccccgactccgcgtggctcctctttggtgtctgtgcttgtctggcgccgccgccgggttgcgtggatgctgacacta

SEQ ID NO: 6661 - DNA, 370 bp, Glycine max
  Clone ID: LIB3030-008-Q1-B1-G10
aggtgatgctgtcatttatcctcatgctcttatggagctgtgtagaatgcaagaaccatcctcacccacaagaccctctaaccccgtctgagttcaacgatgtacgaaccattgtccaaaacgcatacccaacctcccataatctcaccttccactacgtagccttggacgaacccaacaagtccgaactcctctcatggctatcctcaaaccctaaaaccaaacctacaccatcttctccgccagcagctcgccgggccttcgccatagtccggtcccaaaaacagttccacgagatcacagtggacctttcaactccgtccatcgtatcaaccagagtctaccaaggaaatggataccctatgctgac

SEQ ID NO: 6662 - DNA, 380 bp, Glycine max
  Clone ID: LIB3030-008-Q1-B1-G11
ctcacccttctttgactgttctcccacaccacacccatgacactcctcctgctccttattctcctctttcacgcggcggaagccaagggacagtggcagctcctccacaaaaacatcggcattgtcgccatgcacatgcagcttctccacaacgaccgcgtcatcatcttcgaccgcaccgacttcggactctccaacctaaccctccccgacggaagatgccgcaacaacccaaacgagttggtcgtcaaacgcgactgcaccgcgcactccatcgaatacgacgtcgcagccaacacattccgcgctctctttgtccaaaccaatgtctggtgctcctccggttcggtctctcccgacggaacattagtccaaaccgg

SEQ ID NO: 6663 - DNA, 392 bp, Glycine max
  unsure (1)..(392): unsure at all n locations
  Clone ID: LIB3030-008-Q1-B1-G12
caaaaatctcccttctaaccttattcttcttctcgtccttcaccatcattgcgcatgcaattgttcctcaaaacgaaaccttcaaatttgagaactcaagtgaacttggaccctacatccttgagtacggtgcaaattacagaatgataagcatcttcaactccccaatccaagttgggttctacaacaccaacccaaatggcttcactccagctttgcgtgtangggctccaaggctccgagcagctatttcgttgggtttgggaggccaatagggccaacccagttggagaaaatgccactttttcacttggcactgatgggaaacttgtgttggcagatgctgatggcagaattgcatggcaaactaacactgccaacaagggtgttgg

SEQ ID NO: 6664 - DNA, 376 bp, Glycine max
  Clone ID: LIB3030-008-Q1-B1-G2
tccaacccaaaatggttccggtttttcaaatcccctcatgcttcattgagaaagcaaccattgggttcggtaaatcaatacattaggttaatgccttcggccttatatgtatccatggatcaatatcttcaaggtttgtttattctcgctaatgaccctgttgctgaagtacggaagttggtttgtgcagcatttgttcagctaattgaagtccgcccatctttcttggagccacatttacggaatgtgattgaatacatgttacaagtcaacaaggatacagatgatgaagtagcccttgaagcctgtgaattttggtctgcttattgtgatgctcaactgccacctgaaaacttaagagaattcttgccccgtc

SEQ ID NO: 6665 - DNA, 379 bp, Glycine max
  Clone ID: LIB3030-008-Q1-B1-G3
gaggtggtggacttggtggtggcctcggcggtcctaccggtgggatcggagggtttggcggtaccggtagcggtgtcggtggcggtattggtggtggcgttggaactggcgttggtggtggcagcggtgttcttcctttcccttgaaatgatgaacatgcatgcatgcatgcatatatgctccgtcacgtttctttggattacactagtctttatttttcgttcgggaaataattgtggtttgtgcttgtacgtgtcgttaatcgttcaagctttgttctagtgtttctctcgcctgtggaaagtaaaaaatagttgtaatgtgtcattctgtgtctttcatttgcttaggttttgtgtcagccatagtcactcatata

SEQ ID NO: 6666 - DNA, 383 bp, Glycine max
  unsure (1)..(383): unsure at all n locations
  Clone ID: LIB3030-008-Q1-B1-G6
cgaagccttcgaatctctctgaaacttttctcttctctttgattcttctctatcagttaaacattagaatgagccgttcacaggatccacacccttcccgatctttcttcccttttggaaatccttttcggatgatatcacctaaaggctctcgcatgtctccacaacttcttgcagtgttgcaagcttttgaggcaacattggcagagaggctgaaaaatcttatgcctaaaagcaaggatgaaatcctcaccttgtcttggatgactttagctatgaagtcactttgtgaaagtcacaatgacatacggacccttatgactgcccttgagcttcctgtgagtgattgggaggacanatggattgatgtgtacttggacata

SEQ ID NO: 6667 - DNA, 392 bp, Glycine max
  Clone ID: LIB3030-008-Q1-B1-G7
aaggaatgcaaacttgggaggcctatgatgcatattagtggattttaataaaatttgaagaacatcagaaagagtaggtatatgtcaaagggtgcaagttgagagcattatgaaggaatttaatggatggattgcagacctagaggttgaggatgtgccttgtgcgggacgaaaattcatcaggtacagaccaatgggacaactaaaagtagattggacaaaattcttgtatccgcagaatggcttgccaaatgacaaggaagcacttagtttatcatggattgcaatttcttagaccattgcccaattctcttgagatccacaattgttgataggggcctgaagtcgtttcgggttctggattgttggtttgaggataaatctttcaggaa

SEQ ID NO: 6668 - DNA, 393 bp, Glycine max
  Clone ID: LIB3030-008-Q1-B1-G8
tctctgtctttcgcactttcattctctcttaaaaatctaaatcccttttggtcttcatctttgcctctgacccaggtatggcttcgaaacgcatcctgaaggagctcaaggatttgcagaaggatcctcctacgtcatgcagcgcaggtcctgtggctgaagacatgtttcactggcaagccacaatcatgggacctgctgatagcccatatgcaggtggtgttttcttagtttcaattcattttcctcctgactatcccttcaagccaccaaaggttgcttttcggactaaggtgttccacccaaacatcaacagcaatggcagtatatgtcttgacattctcaaggaacaatggagcccagctctaaccatttccaaggtccttttgtcaa

SEQ ID NO: 6669 - DNA, 379 bp, Glycine max
  Clone ID: LIB3030-008-Q1-B1-G9
acaacagcacgctcgttcaagacgctcagcttatgctccagcagatgataatgaagttgatggctgcaacagtgatgcatcagcagagcatcagagtgctactgaagaagttggtggtgataaaagtgatactgctcaggaccaaagctgccattagtagcaatggatttgacctataatttgcattttgacggtgactagagttgcttgtgctaaaaaaactagaagttggagttttgaagcagttgtaaccatgaattagataactcttcgcaagtatgggattatatgacgtgctaagattgcactatgagaccttgatctctcattcatttgcgaaggcacgattgtggcatttgtaacatttgacatctcaaaa

SEQ ID NO: 6670 - DNA, 379 bp, Glycine max
  Clone ID: LIB3030-008-Q1-B1-H1
ctctagtgtggtctgcaactatgagcaaggattatctaatcatactttctctccttctttccacggtgcttgcaactgcaagttcttcttcttcttcttcctccctctatcttgggaagggcttctcccatcgcaaattgtctcccagttatcacattcacaaaaccattgacgaatcctatgcagttatcttcgatgctggtagcacgggaagccgtgtacatgtctatcgttttaaccaacaattagatctccttcgcattggccaagaccttgagttgtttgtcaagactatgccaggtttaagtgcttacgctgagaatccacaagatgctgcagaatctcttattccacttttggaggaagcagaagctgctgt

SEQ ID NO: 6671 - DNA, 391 bp, Glycine max
  Clone ID: LIB3030-008-Q1-B1-H10
cttgtagagtcatctatgcttgttctccggttggttgcgcgagtttcatggtcctgggtttctagaagtagtagctcctcagttggtatcaaagaaagtttgggtggttgttttaccagttggctcccgtactcttgccaaaccttacaagttggagcttgccatatattctaggttgcaggatgcacaaccacatactgttattggactgtggaacgccgatttacaagaaccaaagcttcaccagtctgattcgtcagtgacagttgttaatcacactactaaaacacgcattaaacttgggcctgcaagtgagaatgacaagcaacaacttacatggttttctaatgcttgcaaaggaattccacaggcaagtcctgcattcttgcaa

SEQ ID NO: 6672 - DNA, 379 bp, Glycine max
  Clone ID: LIB3030-008-Q1-B1-H11
gtaagaaaggaaaatcatccactgagccatacattgttgctcataacattctcttgtcacatgctgctgcctatagaagctaccaactacatttcaaggaacaacaaggaggtcaaataggaatagcactagatgtcatttggtatgaacctataacagaacttgatgaagacaaagacgcagcagcaagagctatggacttttcacttggatggttccttgacccacttttctttggaaaatatcctctctcaatggagaaacttgtagctaagagattgccggagatttctgatacagcctcaaaatttcttgtgggatctttggattttattggcataaatcactacacctcagtctatactcgtaacgacaggac

SEQ ID NO: 6673 - DNA, 216 bp, Glycine max
  Clone ID: LIB3030-008-Q1-B1-H12
cccattctcaccaccatcttcttcctcttcacagtgctcaaggtttcagcatcatcgtcagtgatattctacaacaagtgcccccacccagtgtggcccgggatccagcccagcgcaggaaagcccgttctggcccgcggaggcttcaagctcgccccaaaccgggcctactccctccagctacccgccctctggtccgggcgcttctggggccgc

SEQ ID NO: 6674 - DNA, 391 bp, Glycine max
  Clone ID: LIB3030-008-Q1-B1-H2
gtttgggaatatggatgggtttcgttagcctgtgtcttctgtctgtatcagtatcaggtctgctccaacgcctagagcaccctgtcaaagctgatggctcacttagccttatggtcattggagactggggaaggaaaggaacatacaaccaatctcaagttgccactcagatgggaagggttgctgcaaagttaaatatcgactttgtgatatccactggagacaatttctacgatgatggattgactggtatagatgaccctgcatttgaaatttccttctcaaaaatctacactgccaagagcctccaaaagcaatggtatagtgtgttgggcaaccatgactacaggggtgatgttgaagctcaattgaatccaatccttcagaaaat

SEQ ID NO: 6675 - DNA, 391 bp, Glycine max
  Clone ID: LIB3030-008-Q1-B1-H3
ctaatctcttctttttctatacctctctttttcttcttctacacataacaaactctctttaaaattttcaacactgtcgtcgtcgacatcttctttgtgtttctttctctttttgaattccctacacttgcttttgaagccacataccaactatatatctatatcgtgattaggttaattaccctaattcagaaatgaagaacatttctcaccgtgtgttgcttttggcattgtttctagcttcctttacctttatatcttcgacctcaactcaacaacaagaagccaaacatgaccctattgccatcaacatggaaacaaagcttggaacccaaagaaaactattaaggtacgtgccagaggcaaagaaagctgcattgcaaaacctaga

SEQ ID NO: 6676 - DNA, 381 bp, Glycine max
  Clone ID: LIB3030-008-Q1-B1-H4
ggccatcacctcgaatccccacaacgtggagcacattctcaagacgaatttccaaaactaccccaagggaaaacccttctccaccatcctcggcgatcttttgggaagaggaatcttcaacgtcgacggcgaatcgtggaagttccagcgcaagatggcgagtctcgaactcggcagcgtggcgattcggacgtacgcgatggaattagtcaacgaggagatccacgcgcgactgatcccgatcatggaatcaaccgcgcgtggcgaattaaactccgtctgcgttttggatttgcaagatatactacgaagattctcgttcgacaacatatgcaaattctcgttcgggctcgacccgggttgtctcctaccgaatctccc

(The sequence listing continues in the following parts.)
